United States Patent Application Publication US 2015/0376612 A1 - sequence listing, part 52

SEQ ID NO: 122955 - DNA, 1314 bp, Homo sapiens
gaaagaccttccctggatcattgctcctgaagtttctctttcattatctcgtttcctttataacatagatcacattctcttgattattttgtcagcctatttgttgtctttttcttccactgaaatacaactgccatgagagttgcttgcctgaccattttgttctgagctgtattcccagtgtctacccgcagagcttggttcacatgagttgcatactaaatatgcaattatgcgtaaaagtttcctagttgaaggagtggggaaaggacgatttaggcagctataaaaccgcgaaacagtctgttattggaagaggaatggtgtaaagctgagaatgttaaggtgtgttggaagtggaagattaggttatataaggaagatcgggggtgggaagtccactgcattccaaggcaagcagatgagattctgtttttcattctaagagagccaagagatgcttcttcagatagggagacaattaggaagataatcctggtagctatttggtagatggattagagcatggagaatgcaagcagagagttctattagaagcctgtagccataatgacatgtgagctggcctaaaataaaacgttgctttggatgcagaaaagaagctagattaaaagttaactgagcagaggagaagaatgagagatgaaggatgattctgaaatttctggttgaagtgagcgagtgttaattgtgactcactccattcacagaattacaaggagatagagcaagatttcttgaggtgcttaatgagttttgtttgtatgtgtcgattttaatagatatgcctaatagatgattgggaatatggattcagatatctgataggtcaggatagatgtaggagccagccataagctcatagatagcaactgaggcctgaaaagtttaaagaggaaaaggatttcaggcagtggtttataacctttagggatcttaaacctattggtaatatgaaaaaaacaatggccttctcaggtacagattagtgtgtatacaatttcagggggttcctaacctgtggaacctattgttgagcttttcagggtctggcatggatttcagttaagaacttctgatttaaggaacagacagagaagtatatgagatggggagagaattcaagaaagcttcttcagaatccagggataggacatggcaagggagcagttggagaatcagaagttcccagtgctttatgctctagagtaggagggagtttaaagtgtgccattgaattcagcaatgagccattcatttgtaacattttgtactgtgtagaggcagaagaca

SEQ ID NO: 122956 - DNA, 1590 bp, Homo sapiens
cttagattgttttattgtcgtcattgttatttttttccattttgagctaatgtgttttatttgtgaatagtcttttacatttttgtatgctgaatatgggcaccaaagaacctgtaaaagttatctttttcaattgaatgtgcacaaataaaagtttggaaaagatctctcttcattctataacttttattccccattttctattttaacaaaaattgtattcatacttcttttttttaaaatctatgcaagcttaagactttggctaaagtgtgttggcttctttttgaagtgtattttgtgtgtgtgtgtgtgtgtgtgtgtatatatatatatatatatgcaccacatgtgtatagtatcttttaatgctctgttaccaaataacaaataggaattttttttcttgcagattagaaataaaaacgtgtatataaactctagggaaccagactagaagtttatagataaaggataatgttttatgttgctaatttaatatgatagaaaatgttaaataacttgtaaaggttaagaaattgtagttttaagaagagaaacctcttacccactagatggaaatgagaaagaagctgtgatgaatggtgcctcatttggacctttgtttttctggaaagactcaacacctgtagttgtagagaagtgattgaggttcttgactttaatcttgggttgatgcccaagcctatactaagagtcttgtcagaagttggtaacatggagatgttttaacaagaagtgcccataagctgcctctgtgccacagtgtaattatcaaatagccccacttgaatttgaaagccattttgtgtgatactgtccttccccttgctgtatcttatttaatggagttaaagagtgactattcagtatatgagattgctactcttaaagttataataaatatgcatttatgaaacagtgtctctggctcacccaggagccctgatgtggtaatacaggatcaagctgtagttgtgccctgtcatttaggtttaggagtttagtgtaaccaacagtgattatacctagaaataaagctgagtggagagtccaattagcttctcaggagaaacttaatggggacaatattccaacacaatgttccacaaaaacttgtatttccaaaatgtttttaaacctttgtggaaaaattgcaacatcctaatctccatatatagtacattttccttactgtattataaaatcttgaaaacctagcttaggcactgcactgaacaacacatattatttttatcttttttcttctcaatgccttccctaacctcctgcttattccaaagtggaaagcaaaggctaacttacatttttccttcttgtgaaatatttcattgagatttttagacttgtatttttccttttttttaaaaaaaaagtgtttatttcctttattttaagattcagtaggatagccaaattcatagagaataaaattacatgaaagagttacaagctcactgttttaaagacttgacatttttcatttagttttaattaacagtaataagtcacctcctgtttttcaatgttcaccaaaaaaagaaacat

SEQ ID NO: 122957 - DNA, 1154 bp, Homo sapiens
aacagcctcaaaaaagaaaaccccaggagcagctcttggagtgtaacaagctgtgtggtaggggccaatccaggcagctttctccagagacctaatggcctcaacaccttctgaacgtggatagtgccagaacacttaggagggtgtctttggaccaatgcatagttgcgactcctgtgctctcttttcagtgtcatggaactggttttgaagagacactctgaaatgataaagacagcctttaatccccctcctccccagaaggaacctcaaaaggtagatgaggtacaaggtcctaagtgatctctttttctgagcaggatatcaggttaaaaaaaaaaagttactggctggtttaatactttctaccttcttcacagagcagcctttgaatagactatgtcctagtgaagacatcaacctccgccttaagctatgtatgtatggaggccagtcgcagctttattatgcagacacacaagtggtctggacatgagggtacagtttctgcctaccaagacactacttgcactggatcttacgcaaaaaagaaccagaacacacagtgtggacaactgcccatatattctatctagattaggagagggtcctggctaggattttagtggtaattcctagttacattcaacaagtataaagattatagagcttattttatgaactataaactataatttaatgcaaaatatccttttatgaatttcatgttaatattgtgaaatattaaaataattccacaatagttgagaaaaatgagcatttttttccatttttaaaaaatgcatagaaaagacaattttaaaatcctgggaccatatttatttagaagtagctgttagtaaaacattagaaaaggagtcaggccattaggttatttatccaaatctctaagcaattaggttgaagttattaagtcaagcctagaaaagctgcctccttgtaaggctttcatgacaatgtatagtaatccacagtgtccaattcttcacactcctcaggaatatcactacctcaggttacggtacacaggctataattgatgatgatgttcagataactgaagacacaataaatgacattcagacatcaggacaattccctcatgttcttttctatgatggccacctgtacca

SEQ ID NO: 122958 - DNA, 1059 bp, Homo sapiens
gccctttcacttaccctcttttatttttctttatcactcttacctccacctaaattttaacacttctgtctcctgaaactgtatcataggtgtgttcattttttttttcttttcgtctgtccctatcactggttcgtgaaaataagatgtggatctccagcacctggtactgtgcctgccatgttgtgggtgagcaagacacatgtgctggatgtgtgagtgaatcaatgaatccctaccacttctctatcttctcctcttcctcactccaagatgttttctggctggaatttctgcccatttgagtcctcagagttggtagaagagatcaggggaggttatttggtgtcatctgtcacttgaatatgtgaatacaaaggtagctgaaggatgacagtcgcagctttatcacctaacttcgtatgtgaccttgggaaacatgccttccatctgctcaaagtgaaaacttattcatcatgagatgaaagaagaggttaattaattaatttatgggcatattaatttttggataaaaagccctaataattattataaaaaaaacagtcacatatattttccggagtttcagtggctattttaaggagggctgggtttctacacaagtgtcacctcagatgaactcatgaaataataacattatgccttgggttttggctcatcttgactttacttgtgaagcatgaatataaaaatcttcacgttgttctgtgtcttcacaatgtcaagaatctgtgattctacgttgtgaaagcttgaaccatgttagaaaaattctgttattaaagggagctgaagtgatgatcaagagcaccccagaaacagtggggagtcgaggtaagattttgaacatatttgaagtgaaagataagttatggacaacagagtgtttaataagtatatatcctgattttgtttgacatacgggttttaatattagctacagaaaaatggaagggaggggctcttagcctctctggggccatgaacctcttcggtaggctggtgaagcctatggaccccttcttagaataatatttt

SEQ ID NO: 122959 - DNA, 3422 bp, Homo sapiens
tgtatggcctggtgagtggcacattgggaaccatggaacactgcctgctccctacaatattgccttcacacagcccatgcttggccatggtgtcttgcccttaccagtacgcttatcaaaagcagctaagaggcatattggttattttatagttcataagaataatcacttacctggttcttttgtgcatttcacattttactagataggaccacattgaacctgtgtggtggtgaaaaactaccacttattaacatctaccccctcaccctccacacacacacacacaaacacacacacgggttgcaaagtagacacttaaatagcaagggaaaagaaagcattgaggtggggagagtttctcaaatcgagcctaatatttattgccgtttatatctttttctctactggtaatgtgtgccatatgaaacttccaattaagtctaaagtaattttccccttctttcagccgcctttttatagccgaaacacagctgaaatgtacgacaacattctgaacaagcctctccagctgaaaccaaatattacaaattccgcaagacacctcctggagggcctcctgcagaaggacaggacaaagcggctcggggccaaggatgacttcgtgagtgatgttttcctgtcctcctgggccggccgggacgtgcactagacctccctgcccttattgaatgcacctgtctaaattaatcttgggtttcttatcaacagatggagattaagagtcatgtcttcttctccttaattaactgggatgatctcattaataagaagattactcccccttttaacccaaatgtggtgagtatctgtctctcttctaagtatagagaagcccaaagggcatttattttaattcagaattgtctgggggagggttggaaggaatacattggcagatgttttctccataaacctgttattttacctacataaaaagcacatttttgtgtcccaacaaggctcccataatttttagacacatttatcaattcgaagcaccaaaaggcaacaagtgaacattattcttatgtttaactgtgtgtagccttttgagattttgtgcttgaagtgggtgattatggaagttgatataagacttaaacttggtatttaaagcctggtcaagatttccctgtcctgtgtctagtgtgagttcttgacaagagtgtttttcccttcccgtcacagagtgggcccaacgacctacggcactttgaccccgagtttaccgaagagcctgtccccaactccattggcaagtcccctgacagcgtcctcgtcacagccagcgtcaaggaagctgccgaggctttcctaggcttttcctatgcgcctcccacggactctttcctctgaaccctgttagggcttggttttaaaggattttatgtgtgtttccgaatgttttagttagccttttggtggagccgccagctgacaggacatcttacaagagaatttgcacatctctggaagcttagcaatcttattgcacactgttcgctggaagctttttgaagagcacattctcctcagtgagctcatgaggttttcatttttattcttccttccaacgtggtgctatctctgaaacgagcgttagagtgccgccttagacggaggcaggagtttcgttagaaagcggacgctgttctaaaaaaggtctcctgcagatctgtctgggctgtgatgacgaatattatgaaatgtgccttttctgaagagattgtgttagctccaaagcttttcctatcgcagtgtttcagttctttattttcccttgtggatatgctgtgtgaaccgtcgtgtgagtgtggtatgcctgatcacagatggattttgttataagcatcaatgtgacacttgcaggacactacaacgtgggacattgtttgtttcttccatatttggaagataaatttatgtgtagacttttttgtaagatacggttaataactaaaatttattgaaatggtcttgcaatgactcgtattcagatgcttaaagaaagcattgctgctacaaatatttctatttttagaaagggtttttatggaccaatgccccagttgtcagtcagagccgttggtgtttttcattgtttaaaatgtcacctgtaaaatgggcattatttatgtttttttttttgcattcctgataattgtatgtattgtataaagaacgtctgtacattgggttataacactagtatatttaaacttacaggcttatttgtaatgtaaaccaccattttaatgtactgtaattaacatggttataatacgtacaatccttccctcatcccatcacacaactttttttgtgtgtgataaactgattttggtttgcaataaaaccttgaaaaatatttacatatattgtgtcatgtgttattttgtatattttggttaagggggtaatcatgggttagtttaaaattgaaaaccatgaaaatcctgctgtaatttcctgcttagtggtttgctcccaacagcagtggtttctgactccaggggagtataggatggtcttaaagccaacctacgttccaggcctttttagcagcattttatggtgtctgtcattcataaatccatccaaggaaatcctttgcaatttactcatcttgcaaggattgctatgaagtaatgcttcctgtatttattgcctgtcctgtgaagttggactatttgtcctgacatttggcttgtcttcagttacaggtaattctttccagaaatatttgaaagcctactctgggctctattgcgagtgctcaggatatcgtagtggacaaagcagacaacttcgcccttccagagcctgatgaagaaggccgacctaaagcagttagttgagatggaaattgagaaatagtctgtgaagtttaggagaatgccacacaagagggtgagaattttttttttttttttttttttttttgagacacggtcttactctgtcgcccaggctggagtgcagtggtgtgatcttggttcactgcagcctccgcctcctgggttcatgtgatccccccatctcagcctcctgagtagctgggactacaggcatgcaccaccatgcctggctaatttttgtattttagtagagatgggatttcaccatgtgggccaggctggtctcgaatccctggcctcaagtgatctgtctgcctcggcttccctaagtgctggggagaatgttttaaataagtggatatgttcccaaaaagctgacctggctgggacatctggtttctgagagtacctggagttgacccaggtctagagtgagctcagtaaagggaccctgaaggagctcatccctagcttggactgaagcttcttgagccagtgtctacctagcaccctaagggcccagcaggctctggggctgtg

SEQ ID NO: 122960 - DNA, 1031 bp, Homo sapiens
atggtggtttacattacaaataagcctgtaagtttaaatatactagtgttataacccaatgtacagacgttctttatacaatacatacaattatcaggaatgcaaaaaaaaaaacataaataatgcccattttacaggtgacattttaaacaatgaaaaacaccaacggctctgactgacaactggggcattggtccataaaaaccctttctaaaaatagaaatatttgtagcagcaatgctttctttaagcatctgaatacgagtcattgcaagaccatttcaataaattttagttattaaccgtatcttacaaaaaagtctacacataaatttatcttccaaatatggaagaaacaaacaatgtcccacgttgtagtgtcctgcaagtgtcacattgatgcttataacaaaatccatctgtgatcaggcataccacactcacacgacggttcacacagcatatccacaagggaaaataaagaactgaaacactgcgataggaaaagctttggagctaacacaatctcttcagaaaaggcacatttcataatattcgtcatcacagcccagacagatctgcaggagaccttttttagaacagcgtccgctttctaacgaaactcctgcctccgtctaaggcggcactctaacgctcgtttcagagatagcaccacgttggaaggaagaataaaaatgaaaacctcatgagctcactgaggagaatgtgctcttcaaaaagcttccagcgaacagtgtgcaataagattgctaagcttccagagatgtgcaaattctcttgtaagatgtcctgtcagctggcggctccaccaaaaggctaactaaaacattcggaaacacacataaaatcctttaaaaccaagccctaacagggttcagaggaaagagtccgtgggaggcgcataggaaaagcctaggaaagcctcggcagcttccttgacgctggctgtgacgaggacgctgtcaggggacttgccaatggagttggggacaggctcttcggtaaactcg

SEQ ID NO: 122961 - DNA, 1221 bp, Homo sapiens
ttggtggggagaatgttaccagaattagcatttccttcaacctgtcaggtttatagttaatagattacttggggccacttcctgcagttgttcttttgctgtgtatgtcaaaactaattaaattcatttgcaacccagaatgactttgttctgtctcctgcagttgttctaccatctccagagggaacgctgcttcctggaaccacgggctcgtttctatgctgctgaaatagccagtgccttgggctacctgcattcactgaacatcgtttataggtaagcctgagagctcttcaggctaccagttttggtataaaggagacgtagcactggctgtttcatagggccttaaaataatttgtgtttatttgcaacttggttgcctaaaaccagatcccctagcacgtgagctggcttgacttaagtgccaagggggaaccagccaagtaggattgtgcctaatccagaatagatgagcagaacaagggctcccttttttcttcactacacaactacagtgaacctaaaatgcctctaatacctttagcaattatctttaagaggatatcttatgaagtgaaattaacttgtgcaactacttttctattcacttttttacagagacttaaaaccagagaatattttgctagattcacagggacacattgtccttactgacttcggactctgcaaggagaacattgaacacaacagcacaacatccaccttctgtggcacgccggaggtaggcgctgtcttggtttggtgcctggtttacccccgccttccaagagagagatgtacaatcatgcacttaactaccaaaaagagtaaactcctctcagagacttcttaatacagttcagtgcaaataaaatacatttgctgtttgatgtagcatgagaaatcccaagtccttctgttcctttactgaaaagtagctgtttgtaagtaagatctgcatcataaaaactttctaaatccctaagtaagagatatcaagtgcccagcagtttcctaaatgtcagtacacataggtagccagtcaccctcaaaaagtccagcagttttatcaggaaggaatctaaagatatctatcttccaagctggctctgggtctctcagctttttcaaactaaatgtgtggtcgtgggattgcttgctttcgcaggttctaaacgctgtttccctggtctgtttttcagtatctcgcacctgagg

SEQ ID NO: 122962 - DNA, 3200 bp, Homo sapiens
acaaagcaaaccaaggagttgagactagagctcactttagggcaagtgggggtggttttgcctgcaaaacaaacccctgcccaagaccaaggaaaaggcgtttcacatgctattcctggtttgacagctggtatttcgggactgtgccagatccagtaggcaactttaaaatggcagagcctttggtagcaagaggtcatggcagggcagccaccgcagacagcaacagcgagcgccaggtacctggccctgcgaatagtggtaacttgtaactgcccgctccgggcccagtcgccgtgctcgcggcttcccggccagcactggctcacgtccccgcgccggcggtcaggctgcggctcccagacatcccccagccgcggggttactggaaggcaccggcatcgctgttctgcagagcccgggccgccgcctcgagcttccctctcttccctgccttctgcagcggagtcacccggctaatctttcaggataaagtcacagtttatgtgggactcacataaagagcgagcgaggtggcaaaactaagaagccctggggcagccttgagttaaacccagggagggtagggacgattttaagaccatgtatcatgacctgcagggttttcaggtgggacagcgggagaggagcaggccccacagaggaatcgaggatgcccggttcacgccaggtctgcccccgggcaaagctacccctcccttcgcttgttacctcctcacgtgttcttggcatggcagagattaaaaatgcaaggaaaaaaattacatgcggaacggacaaaatgttctcagagattacttcagaaaaaaaaaagtgaaatgcagattgtacttcttcctttagtgcagagacgacttttatttccgccccctcccctccacattcctgacctctccctcccccttttccctctttctttccttccttcctcctcttccaagttctgggatttttcagccttgcttggttttggccaaaagcacaaaaaaggcgttttcggaagcgacccgaccgtgcacaagggccatttgtttgttttgggactcggggcaggaaatcttgcccggcctgagtcacggcggctccttcaaggaaacgtcagtgctcgccggtcgctctcgtctgccgcgcgccccgccgcccgctgcccatgggggagatgcagggcgcgctggccagagcccggctcgagtccctgctgcggccccgccacaaaaagagggccgaggcgcagaaaaggagcgagtccttcctgctgagcggactgggtaagcgccgccgccggccccgctgggggcttggctcacttccccagagcggcttggaggcaggggccggctttcgtcggagttctcggggccggggtcccggcggcgggaacgggaggacctggcgggcgaggtcgcgcgcgcaggcctgcgccccagggataaaccccggagggtggcgcgcaccgccggctcgggttggggaggagggtgggagtccggccgcaggacggcgcctggccggggagagggtatctgcagggacagtgagcgaagccaccgtggccgccgcgcacccgccgggaagcgcttcggcgctgcgaacccggctttctccggcggcggaataaatgagagaggtggaaaactaccccgggctctccggccctccccgcgccctccgccggcgcgttctctctctcctgccccaggagccgatggagactgataacggccctgcgccaggccgtccccgggcggtcctcgcgcccccgcccggggctcgccctctcaatggggacagaaccgcccgccgcaggcagcgtagccgccagcaaaccgcgaggcggccggggcggggcgaggggcgaggcgaagggcggggccacttctcactgtcgcgcaggccccgcccccgcggcggtgccttttttataaggccgagcgcgcggcctggcgcagcatacgccgagccggtctttgagcgctaacgtctttctgtctccccgcggtggtgatgacggtgaaaactgaggctgctaagggcaccctcacttactccaggatgaggggcatggtggcaattctcatcggtgagtgcaggaatcttgcgggacttctgctccaggagacgcaaagtggaaattttttgaaagtcccggatcagattagtgtgtgtggcgccggacgttatgaagccgtctaaacgtttctttatttctcctccttcatccacagctttcatgaagcagaggaggatgggtctgaacgactttattcagaagattgccaataactcctatgcatgcaaacagtaagtttgaccggatttgaggaaataactagtatagtttgaatttgccagcggtaaacattctcatcacggcgtttatcgggaaggcgaagacttcttctggggtggggatctcatttctccttaaattctaatatatttgacacattttaaacattaaagttaatttgctgatttggcttgaactggagatgtaagataaatggttcgtgttggccgaattcacggcctttctccatgagcaacaatccttatttctgtatttaatggggtttattattttctttaactgactaatgtattggggtattttcagtttaaacagtgaattatccgggtagaagtcggtagagccagaaactcacttttgatgttggtgtgccccctagtggcgagctggattctaaatcgtgccctttattccctgcagccctgaagttcagtccatcttgaagatctcccaacctcaggagcctgagcttatgaatgccaacccttctcctccagtaagtttttgtatgtgccgtgcatctgtggagaactgtaagggagtcagttagtattcctacattaatggattaaaatagcatttctagaaattagtatcaaggcaggaatgcttcattatggcataacaagtgatataaatatttaagtattgagtcagagtattattttatttttttcctgggcatattttacctccaaagtggttattttaaaaggcatatttcataaaaaggttttatctgtctgaaacaacatgactgtgtgcagtttccatactcatttgaaatgtgatgaaatgtagttttgaatgtttatagatgtatggtcatttgcatcagtcatttgtagatgtaacattttctacatcg

SEQ ID NO: 122963 - DNA, 1051 bp, Homo sapiens
tccagttttcccagcacgatgagttgaaaagactattccttccctattgaatggtgctggtaccctggttgaaaaccaattgactatgtatttgttaacattttaaaaatacaggttatctagaaaattaaggaaaatgatttacttggccacctaacagactacgtagcccatttgagtttatagaacactagataatttgattctcataaccctacacgaagaatagaatcccagcctttacctgaaaccctttagagcaatggttttagaattcagaaatgttagaactttagaaaggtaaataatgcatacaagttacataacagaagggaacaacactctaaaatcaaaatattaatgtttctgcaccagaacttattaacactaactgagataaataagatctatacattgcctcacttcaagtctggttttgcatttaaatgggcttgttacagacttaagaaaaaacttcaaattttcagtcttttgggacttgggaattgcagataagtgattgtggacctgtattagtatggttcctatttacagataaggaattgaaccctccgagaggttgtgctatataaataataagtgattaagccaggactccttattcattacctttactctgaaattcagtacttttttttcctattacactatgctgcacattactttgaattatagatgactttggttatatataatatgaattaaaatattgagatagtgtgcagtcacttccctctgttattttcgtgtgataatttgtttgagctactatttgcaagatactgaggagatgaaaagacatataagacctaacttcatgctgccacaacccatcctttgtccatcctgattttgcatagctcacacatagctcaccaagggtagaagaacttaattaggtttgtatgcttctgttctttcaaatttggccatggagactggttccagttccttagtcacaccttggctaagcgaagtgaatcctgcttgtttacctcagttgtttgttacaaacgaaatgtttcttaga

SEQ ID NO: 122964 - DNA, 1540 bp, Homo sapiens
aaataggatacaaagtaatgataataaaatttatccagggaaaaatgatagacacattttcactgtgttctaaagtttacttacttctaagtttttcttagttacttctaagttttttaggttgaatcattctgggtttccatttttaatatgtcgatttgcagtttttctgataataaaagttatagattgcatagaaaattttggaaaacttaaaaatatggaaaataaaaatgccatatacttgcataatccatagatatatatctttacatgtcagtgtgtttttatgtgagcatattatccacccagttggtatgtattgggtgtattctggggatcctagacatacagtaaatgtctggggatcctagacattcagttgtgctgaagcaacacattcagaacctgcatgttgtaaggttggtttgccagcatcatttgaacatatacattttatgggaagagggagattttatacaataatgttacttatcctgaaaagctgttacttgtgaatagtctggattttttgttttatgtgtaattgttttgagatatttgggaccgtactcttatagtttttgtactttgcttttgtcacgtgacagatgaccatttttcccattagacttttttttctaattagctcatatagtacagattctgcatgacaataaatgtttctcagtgatgtttctaccatttgatgcatctttgaaataaaagtaagagtttttaaagttagtgatagtggtttagaggttggcaatacatttatttgggtcatttatactgatacacctatatttgagataaccttgtactttataattctttgtaattatttctatattaatttgatcatgtaaaattatattttaaggtactatttaggtactttacttacataattatattccatttcttccatacactagaaaagaaaagcttcttttaaaaaaattgctatagttgaagatacttaaatattcagaattcatgtattgatcatcaagtaacaacaagttaattgttgtgagcgaatggaactcattcacagaaagcagtatgtcctatgaggcaaaggaggggttggttactgcatatttttactcatgcaataataatatttgccaatggagaggtagagggatgaagaggtcagaagtgactttgaatagtaatactgtctccctgactactgtagtttcttaaaaataagcatgaattgcaagtttttcactgttgctttaggagattctgccagcatatattgattcagaaataccaggatcaaatttgtttcagaaaaatatggccatattttgtcagtctactccctatgggagaaaaacttgaaaaaaaattttttaagcaaacaaaggtttcctaagctattaaaattttactgtttagggactaatgccataatactacataaatatatttaaattttccctattttgtatgggaaactctatttcagtagcttttgggtacaagtaattttttcctttgttttttatttatttgtcaa

SEQ ID NO: 122965 - DNA, 1069 bp, Homo sapiens
ctttttctccctactcatgcatacaagctacctaataaacacttattccttcttcagagtgccagatgtctattctcaccatcatggattctttggtgcacctttgtgtttctattgtatattttacatattatttgtctcaggacaatgtaattgtttccatctttctcttcactagtataatatctttatgggcagggacttacatttttatttttttttatccccagagtttagtataatatctggtactacgtatttattatttctcaataaatatttgagaaaggaatgaacctttctttggtaatatgagtatttttatttgcaaaaaaaaaaagtaaagtgtggtatgccatatttagtagagatgttaattctgaaatgattattatttaatgtccattgaactactagttttatatgactacttgagaactaagtatagttaacggtattaatcatcagataacattgctgtatgaaccataagattttggtatgttttgcagatcaaggatctggattttgcataactggtaaaatagaagctggttatatccaaactggtgaccgactactggcaatgcctcctaatgaaacttgtaccgtgaaaggtatttatctgcaagatgcttttgctaaacaagccttaagttgagacagcagatttttaaaaagtggtttagttacaactccaaagtaagtaacctcttactgaaattgtaactgactgtcaaaatgatactgactgttgaagattaaaatgtgaaaacattaaacgatttttttctgttgtgattgtgtctgtatatatatgtacataaacattctaactgtagtagcattctatttttgacacagatctgagaagcctggttaggatttaatcagatatgtatagatacctcacagatgtatttggaataatattctgtagcagaaattaaatctagtcccagccttaccctaactagtcagtggcaaagcagccttctacagtctgttactttgaaatgtatgtttcagaataactataaattaacagctttgatcatgtttatgccaa

SEQ ID NO: 122966 - DNA, 1105 bp, Homo sapiens
tgtcctctaaatctccattgtcacagagccagcaatgcagagtgaatgtggaactgagcagcagtaaattggtaaccggcgtgcttacctgcgcacatgccctgacgcgtccctctgtattctctgtatcctctgtcattgtgctttcatgcagcattataattttttctatgctgtctgtttatcccacttagattatgaactccttgaaggcaagtactatctcttctttatctatatctgcggccctagcccagtgcctggcacataatacatttaacacatgaataaaaaaatgaatgaatgaaggtgctttgaaaaaatcatgcaatgaaatcaaaatttatcattatcattattagcttccagtgttctagtaatagaggaaatatgctaatagtttccaagatgcccattgtttatcaagaatacaagaggtggttacttttctttgattaacagtgtttgctgactgtactttctcaccttctgttcccccttcaggctgcttcctggcttccgcctacgctgctctcctgagtgtgttcctcctgaggtcatgaaatgacctcttggttgccaaagtcaatatacactttcaattctatcttacttgaatttggcattggttctgatgctggtagccacatccaccttgaaactcctcccttggtttctgtgacctgctttctcctgttaacctgtctatttctctgacctgtctatctctgacctctctatatcttctctatgggctcctcattctctgtcttttaaacagtgttctgctgcctcagtcctcttcttagtcttcaagttccttttgaactgacatccatgagtgtctctaccttctgcatcttgatgcttcccaaatctgtatctccaacccaaaccttttcactcattctccacacacttgtctaagcactactggacatctctcctgggagagtgttcttttaggggtaccattctcatggaatgtggtgtgattggtccccccggaatgcaacttctgcatgtgtgtgtctcatagacacttcagatttaccaagcctaaaatggatcttgtccttagtttcatatctcacagttaatgcat

SEQ ID NO: 122967 - DNA, 1130 bp, Homo sapiens
aggagtgtggaaactgatagggaagaatttgtccagcaagcatctgtagtatgcctttgttaccaaatgcttgaatgttttggaataaatttgcaagtttcccaatcaaaaaagttgaaaattattggatcagataactttggggctgtagttctgtgatttctattatgttttaaaaagtacattgttgcttttgcaaacttggtgcagttatggtaatggtgaatcttttaatgttttaaaaaatgttgtattaagtttcataagtcaatctttttaataggagagtgatgtaggttttattcctacaagtggtctcagtggtgaaaatctaatcacaagatctcagtcaagtgaactcacaaaatggtataaaggactatgtttattagaacaaattggtaagtatactgccattctagctttaatgcattataaacttggtattaattattatttagagttctttatgggagagagtcacacgtatgaaaaagcataggatttgtagtcggaggaactaagttacctgttttgtcatcatgtgcaatacttaacctgtctagtgctcagttttcctcagtttatgaggctagtgcctggtttacatatcttatagactgttgttaaaattaaatgagattaacattcattttataagctgcaactattacttggttgaatgtcccttatccgaaatgcttgggacccaaagtgtttggggtctgaaattttttttttggattttggaatatttacattatacttattagttgaacagcccaaattcagaaatctgaaatccaaaatgctccaatgagcatttcctttgagcattatatcagtgctcaaaaagtttcagattttggagcatttcagatttcagaattttggatttgggatgctcaatgtgtatattagtgacagttaagttgctattagtaattataaaaagtagttattttctaggagaagtgggattataatgagtttattgaagtgagtcaaaaatttaattttaaattaaaccttgccttttgcaatttcttttttccagattcctttaagcctccccagcgatctattgacaaaccttttagattatgtgtgtccgatgttttcaaaggtaa

SEQ ID NO: 122968 - DNA, 1126 bp, Homo sapiens
atccacatgacgcaagtggcatcaacacaaaagaatagtgggaacctgtaaagttagtttcaataaggctaacaaaaactgagctaagctgaggttagctttcttcttttgtggggtgtgtaatttgagtctgaaaggaatgtctttctatctgattcacaagatggtccacacaggttagaaaactttgttatacaaggcttttttttcaatagctgtagaggatgaatatgctgctttttgataattcatatatttgctgtttttcttcattataaacagtactctgatgaatatctttgtagatctatacttatttctctgggataaatccctagaggtggaattgatgggaagtaaaatatgtgtaatttttaagttcttgatactttttgtgaaaataccccctggaaggtggtgcacctacagtcccatgagcaatatttgaggatgcgcttctcaccgtatccttgcctacagcaaataattttgtctttcaaatctttaacaatgtgatttgtaaaaatgggagagagggaatatgtcaatgtgtttttattttacttttaaaaaattttagtttctactgaatttgaatttttttcatgttgaccatttatatttctttagcaaatagcttgcttgtatcttttaaagctatgtcttcttgctttgttttggggttttttatgttttttttttttggtaaagattctatagagattataacctttactttatatgttacaaatgtttgtccctccctgtctactgttttttgtttttttgagacagtcttgttctgtcacctaggctggagtgtagtggggcgatctcgactcactgcaacctctgcctctcaggttctagtgatcctcataccttagcctcccaagtagctgggatacaggtgtgcaccaccacacccggctaatttttgtattttttgcagagatggggtttcaccatattggccaggctggtctcgaactcctgacctcaggtgatctgcctgccttgacctcccaaagtgctgggattataggcgtgagccactgtgcctggttgctgtttgtttatgttttaattttgtttatatttttcctcctttgcttatatattttaa

SEQ ID NO: 122969 - DNA, 1003 bp, Homo sapiens
atattaatagagaaatttcccagtaattttttggagatagtaataggaagattaggtagaacatttgtggccttaggtatcttaataccaattcaatgaatttcacattttaacctaagaaggtaaatataattttacagttattatgaaaacctaatgagaaaaagattttcaattactgagcctaggacttggaagttctggtctggatgttttatataaactatatttactccctagggtttctgtgaagtaagtaagttggtaacacagagaggttagacaacttgcctgaggtgtggagaacagttattgactacaggtatgcatgaaagagccaatattcaaattgattgcttcagtttgtatgcttattctaatctaagaatccttgatcaaaagagctggatctcattgaggaaattaatgttcagttttataaaatatgagggattggaagtgaagatggcacttaagagtagagacaaagcaggagtatttaggtacgagtaaaaggaaacaggaatagtgtaaattatcccaccaaagtgtatggttagtacttcaatttaaatcgtaatgttctgttgtaagaaagtatctgagacattcttgacatattttatgaccatttattttccattatggtgaggattatatattatatctgaaattctttaaaaactggagagcacagaagtaaagggtcattggggaagcaacaaagaaacaagctgttgtggactctgttctgaccagaaagcaggagaacttaatgatgtggatggaatataagaggaccctggagagatagtgattatcatgtaacagcccgagatagctaaaaaggggaatgccaggtgtagtctttgtttcctggatttcagaaaagtggatttctatgacaaacaggtatgcatacaaagcaaaagctgtaaaagagaaaataaaagtgttctttaaaaaatgcccctacagtgcattgacagaaataattgataag

SEQ ID NO: 122970 - DNA, 2795 bp, Homo sapiens
tggcagatatatcaactgtgtcaaaataatgactctttacaaacctataaagtcctgtggaagtcctagattaacgagattaaactgtgttccctgatgtcttcaatctgattattggagaatatatctggattttcatgcctttttaatgtgtattttcttgcagtcttggatagtctccattataaacatataaggtaacgctctgtaaagcaggtcacagtattccttagctcttctgataaaccagaatttgtatcataatggtttctctttctttgtgggtgtctttagttctttatagtatcacagacctgttttctatcctagtaagaaaaattagctggacagttgccaattttggaaaacaatgtaattgtatatgatgcaatagtagaagcctaaataattttcacctctcagtttaacaagcacattactaaagtatgtggctttttagttttctttgcattatctagtaagcaggtaaagacattgagaacagtataatttaagttagaatggtttacttgaatttacctagtatcttagttgagctggcaagtgaactaataatctatttgattcctataatggtcagtcattttagcttttttgataatacatctgttgattggctttcatatttttgctgctgcgttttgctgctgctagttttttattgctcagcatgatataagttttagaatatttcttcattccatagatagcagatgcttccaggtacatgatgggagttttagctcaccaccgtatgttccttaatagcatttacaaaatgtaatatgttgcttatcctgccatgttaaatatttgtaaatcccctggtcttctcagatactgaagaacagaaattagtaaattgagtgacatttcatatccttagggttacaaattgaaatcagagctgtgtcagcagagtatacccaggtcagtctagggaggatctcagaataagtcttagttcaccattactctgaaggtgtctgtggtccctagagtatttgggaattattaaagagaattaagcgtcactttagcaaactaggatggcccatgctttcagattaagctaaaatggcttgactaaggagacctacagttactttattgctagggcaaacctatagttcattattctaattgttgtactcttttggtagtaaaagggagtattattattccttactttgggtgattctggggcaaacctagtttattgccacatgatttccctgtttaaattcctgaggcctagaatgactgagtgcccttgtagaccttccttgggccttcttatacaggttaagcatccctaatctgaaaatatgaaatttgaaatgctccaaaatctgaaactttttgagtgctgacatgacatcacaagtgaaacattctacatctgatctcatgtgacaggtcacacaaaatgactgaaaatgttgcataagattcccttcaggctatgtgtataatgtgtatatgaaacaaaggaattttgtgtttagatgtgggtcccatccccaagatacctcattttgtatatgcaaatattccaagtccaaaaaagtctgtaatttgaaaagcttctagtcccaagcatttcactaatctgaatctacatttttgtggctgaaaaaaggcactatgttggtctccaggaagaattaaataggatacaaagcaatctgctgttcatctatctctgttttttaaaaattaggcatctgctttgatatcttatgttttctaaatatgtagcatattaaccagccttgcaaattaagttttataagctcatttctataattagtgaagcataagtgtagaacgtgaagaaaattacctctcggtcgtggtaattttgcatttgtcttttctcatatgcagtattttccccccatttagagttgtccccatgtatccttcttcacaatttacactatttcttacaaaacaaataagataatagggcataactatcatttttattgagctcttactttgtcctcccttttatgttaaaaccatatggatgcacttctattatagcagaaattccagccccgattgataatttaattattcaaaaataatagtctataaaaacaatttccatttttacctaagaatgtagatggtcatgtagactattattaatttactctatagcactatttatatcgtacattctaaccatgttatgttttgtttaaggggagtaaccatggatgttggtatgacaaagtttgaaaccacaaccaaagttattacattaatggatgctccaggccataaggacttcattccaaatatgattacaggagcagcccaggtaactgctgttttcttcactatagtgtgctgattgtactttacataaaattttctgatgctgaggttacaattctaggattttgacttttaaaatattttaaaattaaaaattttaacctttataaagcttgaacaaaaagagcaatattgtatttttcatgatctttctacctgtactttgtaaaaccttttaaaatttcttacaaagaaacaaaatgtataaaagctatgagtttctttatcgtaaaagtaatggtaaaggacttgatgagtatagcttcatatttcctttattgataagttggcctgagtatttcaaaatctgccttatgtctttcaatatattcaagttctatatctttttaaagagcttgtttatgcagaaataatgaagcttgggtattttcgcccagtggtttatttactttctttataat

SEQ ID NO: 122971 - DNA, 1888 bp, Homo sapiens
cactgtcaaaaatgtttatgaactgtagtcatttagagatatctcccctcggggtagtatttgagtaaaaaagatcataagtctatcatgttggaaggatgagttgaagtaaaactatattttagtactaattcatctccagtaatatatttggtgccaattttacaaaatatctccttcataccattgattttgataggatggattatatggccaagactgtgggcttgattttgaatttcagttatttttcaacattattttcttcttatcttcatttttggtacagtttttctcatgggatcttccacggttgtatttgtgtggtttgagtctagctacttatcatttccaccttaacagactttagctacttagcagagattatttctggtctggagcataaaggattatgaagaaacagtttctctgcccttctgtcattgtaggacatcaatagagttggtttcaaatacttttttcctatctgccttctgtagagtatcttctgaagaaaatggtcatagtttccacacacctcaaaaaggaccgcccattgaagatgccattgcttcttccgatgttcttgagactgcttctaaatctgctaatccaccccacacgattcaagcatcagaagagcagagttcaaccccagcaccggtgaaaaagtctggcaagctgaggcagcaaatagatgtgaaggcggaactggagaagcggcaaggagggaagcagctactcaacttagtggtcattggtaatgctctttgtccctctggatcgtcagccagccatgccttagcctgcccactgtctggaggcagcatggaaactctgagtttctccatgggtggaatggacagagagcaaggaggcacagtctcataatgctttctagtcatgtggggagagataatgccaagttaccaaagaggtcattacacttgattgtgggatttttcattttgtgaacattttgaaattggcgtgtcttgttgacaattttaatttccaaaaatctgagaaattccccccgtctgtaaagagatatgctcttttttttttctattagatgttttaactgtcatttgataaatactggtattactgtaaaccactgacatgaaatattgaattacacatttatgcaatgcctcaatgtgaacatctggaaatgtacctggtattaatcctgaatcaattttctttaggtcatgttgatgctgggaaaagtactctgatgggccatatgctttatcttctgggtaatataaacaaaagaactatgcataagtatgaacaggagtctaaaaaggctggcaaagcttcgtttgcatatgcatgggtcttggatgaaactggcgaagaaagggaaaggtagtcactatatttcaaaattttcagtttgaaatcatacagtcttctaaaataagtgtgtaatatgtgttgaatttgtaaaacatatgaaatactttagagattatttttagaaaatagcttttagatatcagggaactattttgacttttttgatgtaatctgcatactgtttttactcttctgaattttatagaaatagattaaaagaatgtttaaaagaaacaaaataaaagccatgcagaaaaacaacagtaaaaatcataagctgattattctatgggataagtttcagttgtcacttccctaagtatttgtcaaattgtcttgattttgaattaaaattatgagtaagacttttaatttcatgtcagcttacaaaggaaaggtaactgtcataaaacctcttctgtgtagaatctaaataaccagcaaattcaaattaccaaacaattcatttttatactttacatattatgtttttatgagacagtctgcaaacaagtaa

SEQ ID NO: 122972 - DNA, 2080 bp, Homo sapiens
gttcataaacctcgcaggattaaaaatagtttagccatctgctaactgaccaaacaattttagtattgtgaaagggtgtggtaggaaagggaggtatagggtctaggtataatgtcagaacaaggctcagtgcagaaactaccttgtgacctcttaatactgaaacttaacagtcagttcaaaattaggaagagatttggtggaggttaagcataggagagtcctgacaataggggatttcctagattaaagtgacagaatttctttcagcattaatatcttactaaatttttttagagataatgtgtttataaagacattaattctgtgaaagttatcataatctataatttaaaatactatgtaatagatttctttatattactaaagaaattaattggccttttatattttactccttaactaggaaaaccagtagattcccagacatcgcgaagtgaatctgaaattgtgccaaaagttgctaaaatgactgtatctggaaagaagcaaactatgggatttgaagtgcctgggtaagactttgagtacctccctcatccccacccccacccccaagtttttgaaatcactgttgcttctgtaagaaagagactgtttcaatttcgcataatatatcattagcactgaagtatcatatatcctcagtataacatagtacaaagagacaaaatgagaaattaggcttgattctggccttatcttgtgtgtattacttactctacctcactgccagttttcttacataaatattttatagctactttaacataaaaaaccctatgattttgtgaaacctagcactgtgagatagggaattcttataccactaggtggcagaggtaaccagattttggagtgagtccccgaatcatggaatcattaattaaattttttaataactaaaatatttttaaactcttttggattttcatattgaataaattggaccattgtagcaaagacgtaaattggaccattgtagcaaagacatatgatatgaaacatatgtagaatttcaaatatgtagtgaaaaatggaaataaaccataccttggtagcacttgtttgttcttatcaaagtctctagaatccttccaggagtttttatagacaagggaagtgagttgctttaaagccattaatttttaaactctaaaatttttcagaattttcaattgttacttataaattatatgtattttgtctgccaaaatgataaacgctgttatcaaatataaacaataggtttttactataaacaatagatttttatatatatatactttttttccttttttttcctcttttcccaagttatatttttttaaaaatataaacccaggaaccttatttattttttttttccttacaatattcttttgtctaaactagtgaggtattatgagttttggttgggaagaatgtttatcacctagttcaatttttggattttatagaaacaagactttattcactagatttcaaagtcagtgaaggaaaggactccttatctaggacatagtaggcattcagtgtacattaattgaatgattggatgaatgaaaaagttaatttttatcatgagtaactttagcctgttaaaataatttagaattctgattcagtctcaaaaagcttcgtgtatgccttttttccttctgaattgggattgagttgtcagaattataattgccctttttgtccttattcttgagtaccatttaattctattatgggatttttacatacagagagagagagaggggggaaataaatagaatacacaatttattgttctaaggattttataatcttagtacaaaagatttttcagaagtcttaacatgcaaatgaacccaaattaatgtattatattagaagtaaatgcataggtatctaaatgaataattataaagataatgggtaataaatgtatcaataaataatgtgcataatttttgaaaactctgtaagtacaatgcaggcctttcagaattttatgactatattctttgtgaggccagggactgttaatgttcatcactgtattcctttt

SEQ ID NO: 122973 - DNA, 1351 bp, Homo sapiens
tgtaaatagtagttaaatacttatttgtaaattttttcaaatattttcaatttgtgtttggtctaatccatggatgcagaacccaaggatatgaaggtctgactgtaatatcttttaaagtaaagtctcttaaatattcctttctctatctccattgctcttagatcactgtagaatttcttacatgtatttgtacaacaatcttctaactgctttcctttcaatcttgcctccacaatccattttctattctggggtcagagtaagttttaaaagtatgatatgtttctccaacgcttaaattccttcagtggctcttatgtttcaagatcaagtgaaatattagacatggttctaaatgagttacctgcttttctaatcttatgtctcaccacattcttgggtctgtttatttcagtacctagctcagtgtcacacagttggcatttctcgccttcccttcatgaatgaatatgtgataggtagagagtaatttgtgtttgtaaatgtcctggtatcacatgagaaaaagaagttggcattttggtgactggcagagacccacggactgtgtgctttcatatgtgccagtcattacatgtactttacatgtattggctcatttaattctcagttctcctaacatctttgttaggcagatactattattttatggacgaggaaactaggcatagagaaaagttgagtgattcacttgaggtcatgcagtggcaaggcctggcttcaaactcaggttgtgttgcagcagagtctatgtcttatctactaacctaactggctggtgaattggaggcatttggtgtggaaagcttgttgggattctcctttgagggtatgaaaagtatgcatgtaactttatatgtgctttattctgttggtaattacctcagaggctctcagtaaatctttgtgaaatgaatctaagagtctttcttcatacattgctggagttggcctctgtgattcatgcattaccaagaagccatggcttccttctgttaataatcacaaatcttggcacaataaaattaaagtataattttcatgaaagtagtggcttttgcatgaaacatggaaatagatgagccatggccatgcatgtgagaaaacaagagtgtttatgtcagggattttcagtctgtttatgggagtttgcaaggaagaggtggatcttgaggggtaaattgcggtcgtgttaaagactaaatttacaagtagattttttctgtacagagctacagagtatattttattagctgagatgatgaaaaccctagtggacagaagtagaacatggtttgaggagctagagatagaaagcagagacacc

SEQ ID NO: 122974 - DNA, 1048 bp, Homo sapiens
gagtacagtggcatgatcttggctcactgcaacctccgcctcccgggctcaagcaatccatcttcctcagcctcccgagtacctaggactacaggcgtgtaccactatgcccagctaatttttttgtggtttttttttttttttttttttttgtagagacagtttctccgtgttgcccaggctggtcttgaactcctgggctcaggtgatctgcccacctcagtctcccaaggtgatgggattacaggcatgagccactgtagccggcctctatctgtatgtcttaaaggaatctctgaccaaatgtgtctatattcatgaacagtgtctaggttagagtcatagcagtcattgaggttcctatgttttgccttcctaagatttaattaatctccatgttctattaatgtattgactctcatgtctgttccttcttactcatttccggtactatagtacttgttcagctgcagtcacagtggttgtggtctcctagaaacttatcttaatttctctgtctctttttttcgtttcatcttatcgtactgttcatcacatctgttagaatgaaagctatctaaaaacagtctgtcactcacctttgtgtcctcagtgccaagaacatgctataatttaacctgaaaaactctgaagatccaagatcgtatctaggcagtctttcataaaataaaatttttggtgacagtttctgcttaggaggaggaagcagagttcctttatggactgttgtaattttgtgctgaatgaaaggagtaagagaaataagattctgaccagcagacttctcttagtttcctggaaggtatttcctgtttgttcatggcatcaccatctaccctttctttcttggcagaaaatctgaggactgtcctttctctcatctcctctgttcattcagatatcaaggattcatgattttaccttgtacacttgtcccttgtttccttgggtttcggctctggtacccccctccatcaagcatctgctgatgcttaaatccctgatataaaatgtcatcgtatttgca

SEQ ID NO: 122975 - DNA, 1089 bp, Homo sapiens
aagaattcttagtgctatagaatggtcataatatgataatttaaattcattgcatgtattagattataaattttgcatatactacctcaacgtatataatccaatgtaatatgtagattgaatttatttaaatgtctttgttttaaaaaattgctggttcagtgttatttacataaaattgaaatctggtctcagtgaatcttttaggttgttttcttctagtgtgataggaggctggatgctttataatggatttgatgaggcaagttatgctataaagctgctttaaagtgagaaaataattcataacaaataaatcacagccaatgcaacagtgctattgaaggaagtggtttattctccatagccgaggtggtgtactttctgaatgtacatctggtaactagaatttaaatgtttagtcagattcagtgaaatgatttcatattttaagtagtgtttttttcattggaaatttagcactgatttctttgaaattttgaaaatcttaatttgtgtgtgtgtacgtgtatctgtatgtactggcatattgaaacatttataggaaaaatagcaattgatggcaaaagtgtacgtacctggaaaacccctgttttttttttttgtttgtttgtttgtttttaaataagcttgaatgttgttttcaccaaggcattttgatctgaatgactttaaattgtgaatttgtcttagattaaaaatctgttgtgaatttgttttgaatgtttctaagccatataaatataaaaaaattccccattttgaaatctttcagatcaccttttcacaatgtcagagtaatatattaatgtaataaaagggaaaaaggtcactcatgattttcttaccttgagataacataatttatctttgccttattttttcagtttttgtctatgcgtttctattctttatgttgttaaggttatattatacatacatttctgtatcctatattttcctccttttctttatatatttttaaatgtggaataaatttttagatttcaatttgattcagaatacttccaaaatattgattaagagttataaaggcatttttaattt

SEQ ID NO: 122976 - DNA, 1054 bp, Homo sapiens
gtatattagtccttttttttaagtggtcacctgcctttttgaaaaaacccattttaacttaatcatgtgcaacattaaacaactcttcattttgccctccccctagtttctgacaaccacacatagaccctttttaataccgataaatttagatttcatagtattccattgtctagctgtctggttattataggaacttaagtctttcaatttattatataaaagatatgattttagagtggaattgctggatgaaaagggatgggcatttttaagacttatagtacatattgtacatatagtacttttagcacacttcttcagaaagattatactaattgttaaatttaattattattcataatagcattgatagtgttatttcataaaggataattatactccactgaaggattttgtatttgtattgaagttttcattcattgacagtggataaaagataaattatgcagtttttcttgggcctgtttatggcaattaccttgtgtccctgaaaattgtgtccctagtgcattgaacatgctgttataggttggcattgccaaaaataccatttatccatgagaaaataatgtctaccttacaagtttctgagaagtaaaataacccatatgatgcagttgtcataaggtcttgctcatggaaaatgcccaggaaatgatcattgaacttagttcaaagaaatagtgttcttttattaccacttaaggagcaaatgctgttaaaaagtggattattatgttaaagtctaatgaattgaggtactcaagttacttccactgattttttttttttttggagggttttttttaatcattcataatgtttttatataggcccttttacctgttgcccctttctccatttagccatttcaacagtctgatatatattctttcacataaccatttataaaaatagacacatacatatagggatttttgattatgcttttgtaaataaaaggcctattatatttttcattttccttttttccccataatacactgtcaagctagatcaaactacaata

SEQ ID NO: 122977 - DNA, 1194 bp, Homo sapiens
gtaattgcagagatgacagtgcaaggcaaaggaaatgataagctgggtatggtggcatgtacctgtagtctgagctgtttgggaggctgaggcagggggattatcacttgagtccaggagttcaggttcagcctgggcagtgtggtgagaccccatctcaaaaaaaaaaaaaagaaaaaacaaaactgataaaatgcgtatttatttccgacattgacatgcctaatttatattggatgagtgaaggaaagcagtttagttgcaggatataacccaagatgaacaaagatatgattcttacgtcaaaggggaggaggatatatgcacacttcagcacatgattatctttattgcagtgtggcatattatacccttcaaagctgacacctttgtcttcctcatccaaggtgccaccttctcttctgtttcccgtctttgttattactgtcaccatctagttaaccaaaatcaggaatctagtatcatccttggttcatctctcttcacctgctactcataattgattaccattcctgttattcccaccttataaataagtaaatgtatgtgtgtgtgcacataatatgcatacatatatagtcgactcttgttatttgcagtagttatgttttatagtcactacgaacactgaattaatgaatactgaaccattgctcctacaagaaatacagaggtaggttcctgtgagcctctcataacattttcatcaatcagtgaatacataacattgttttatatgtgtctctatttaaagacaccttatttaatggatgtgtatagcatggattcattaacaccgaactcatggcccacagcactggaagtcatgccttatctaatatcttttatttgttaggcacatcctagccttcttgtgtttagaatactaagcactacacttacaggccattttaaaaattaccaacaaaaagtacaaaattaccaacaaaaagtacaaaactggaaaaaatgcgacactaagtagaccatgaaaaggacatttgtttacagtatgagagctgtatcaaaaaggccgacgtcaccttctgtgaaattgcatgttggatgactcaaatttttcgctgctctgcacatgtccacaagtgattgcaaaagtgagtagtgattttgggattacaagtaaattgtgattaggtgaattcacaaatgtag

SEQ ID NO: 122978 - DNA, 1031 bp, Homo sapiens
cgcctggccaaatattttttttaatgaaaatgaaaaggctggtcttttcctagtaaatattttttctctggcagctactttactgtgcatttgataattttttgtattacttttgtttctgtttattttcagaatgacattctaaaattttaatctgtgtcatgtttttatattcagtattttgatgggaaaagttaagatggcattatgtcttttttttttttaaaccaaacacttcttgatttcttgtgttgtcttcaggtttttgtttttaattgaatgtatcagtgcaccataatactaatgcttaggacatcatttaaatcacaagctatattttgtgaatgattttaaaatttgagttatcccagtggttgagattgtttttctggtcttgaaccttgatcaaacattttagtaactttgaattagtatatgactgaactagatgtatatattagcagtctccaacttaggagtgaattaattgaattataagagtttgtaactgatgataattactgataggttaggtgctgcacaagtggtccacattgcacatgaatccccaaatacttatgtaatctacactgtagttgaatagcagcactattgtgttaccttcttttataacaaagtaattttcaagtggaaatgcaatacttttaaaaccatatagtagaccttctagggtgaactaggtctccatttgttggctgattagggttgtaactactaggtatgagattcttttggtggggaaaaaattagatattatagggtggtaagagaaggcaacaataccttaaataggtttccaggcttcctattttccttggcttggctgctggtctgtcaggcatgtacatgacaagtacttgccctgttgactaagggaatgtcacagtctctttgagactgcgaaggtggaactgagcagacctttccaccttccacccttggccatcgatccttggtaaaaagccaagtgtctgcttattcatgaatacactccttgtgatgattgttgg

SEQ ID NO: 122979 - DNA, 1053 bp, Homo sapiens
aagtctgtattttccgtgaactcttagattcaggcaaaattagcacttcatgtgttttcttttctgttttttttttttgttttttttttttgagacggagttttgttcttgtcacccaggctggagtgcaatggcgtgatctcggctcactgcaacctccgcctcctgggttcaaacggttcccctgcctgcctcagcctcctgagtagctgggattacaggtgcccactgccacgcccagctaatttttatatttttagtagagatggggtttcactgtatttgccaggctggtctcgaactcctgacctcaggtgatctacccgccttggcctcccaaagtgctgggattgcaggggtgagccactgcgcttggccaccttgtgttttcttaattatgtaaattagaagtttgatatttggtttgaaatatttgtattgaagagaaaatttcagggaacacagaatagtatacaaagaagagatattaggaaaggtagattttggaaaccagggagaaagtaggctgagtggaatggtttcagagattgggggaaagaaggaagaagattataagagaataataaattgtaagcaccttcgagtaggattttaggtatatgttttgatatgatattgtttttgttttcatcccttatgaaatatgggtaactataggtgattgattagaatttttaatttttactttaacttttgtaaaaaaaagttaataggaaatggctataccatagcattctttgatcattttatattctagctgctcagtttatttattcacggcgtgacaaaccttccgttgagcctgtggaagaatatgattatgaagatctgaaagaatcttccaattctgtttcaaaccatcagctcagtggatttgatcaaggtatagcaaaaagtagtgtatctgttatctgaaagtgattaatgaccaaatacaccagaatttatcagttttattgtgtttataacagtgactatgaacagtaatgatgtaaacatatctttcatattcaaggacagtttatgttttat

SEQ ID NO: 122980 - DNA, 1048 bp, Homo sapiens
tccaaacagggcacatgtccaaactgagccaaggggaggaatgtggagctacgtggcattacaatacaattatcttgcagcataatatttctctgtggttggtgttatcggactttatatgtgttgttattatgcagtgatgcaaaactttgaagttttgggagacaaatttcataaaatttcataacatcctcaatgttacactttcatagcccattgacatgagctaatttgttttaaggaaacgtgcattatagtagaacggattgaattctctcaactgctctttattaatatttctcttattcttttctccttgttcaggatctcttccacctcttcaattttccctatattcctacctcctttattataatgctccagtcttcattggttacttctgtgcttccgcagtgcttgttgtctggtattactcatttggcttttagaataagtcattacgtttttcttctttgccctcccttctaatctgtaaggccattgacttttacaatgaatagagagtggttatgctttaaccttccgagtataggtgttacacatacactgcagctttatgttctatgcattatctatacattttgatgtctttttctctacccctcaatgtgattgtatatctataaattttgaatgtagcttccctttaataaataatatcttcctgataatctatacacaagtcaatgaacttaacatgttttgtgctcttatagaaagctagataatacctctaataataccttgccttttgaatattatatctatatttctgtccttcttaacatattctttaattttgttcctttacaattgaacacagtgtccaggattcagttcagtggccatccagtagagctggaagcattagtactgtggatatgcctgtgattttctcctttgctcacttgtatttcatttatgatactcaggcatgtattggcatttagataatctgcctttcctttccttaatgagatacatatgaatacccagttatatattgagtgatgatgtttggcagtat

SEQ ID NO: 122981 - DNA, 1505 bp, Homo sapiens
aggaggagcacatccctcttcatgcagtagataactataggcatcaccaagcatcacataaactaaaaatataaacaaaaatgaactaatgcaggagaagaataaagaactatgctttacgaagtgcagaacatgtagtgcttaatatgttggtgattgtcattggcaccccagtagattattatagaacatcagtatgctttaactagagtgagggcagctaacaccctgttctccatttggaacctgtgacctcagtccgtctagaacatgtgaattttctggtggttactttagaatggaggcccttttaaataaatattgcagtggatggtattgcatgtggaccattgtcacctaagaaatgactttagattgagagagatttttgcaaatataaagtacatgaataggcctatttattattcattcatttctttaatagttgtttatcatttcctcaaccaccattaagttagtgcttagagtactgttctaagctttgaggactgaaagtaagatatttgagggtggtctaaaaggagaagattatacgagttacagattattagagtatgaaaaatgctacaaaaggtactgagaaaacgctatgggagggatacacagatgagaacacttaattcagaatggattggggggaatttaagcaggatttctacgttaaggaatgcttcatggaggagaggtggttggcctcagggagcaccttggcttcttgaggttaggttgtcatgttgtcatgcttctttgaaacaattggtgacatcataaccaagctgttcctgtaacattaaggaggttcatccccttttcttgtttataaaagttgtactcattaaggtccagtttatttctcttcttcccagttaggctttctcttgaattctcagaataataatttaaaaattctgttaagaaatataacctcattagagagagtttgtgttctaaaacctactggttccgctacttaactcccactttgtttttctctgtaatttatgtaatactttacatgactgcctcagtcactgatttaaaagtctcaggaaggcaaaatccatactttaagtagctggcacaatgttctttacatgtggtaaatatttcataattttgttgattgaggaaacaaactatgaagattgcaggaaagaattctcttcatctttatatgttgtggcactttagggtcaacttcagcattgacaaactgacctagtaaaaaagagttttttttcttttttttttttttttaagagacaggatcgcactttgttggttggccaagctggagtgcgagtgcagtggcatgatcatagctctctgtaacctccaactcctgggctcaagcaatcctcgtgcctcagcctcccgagtagctaggtctacaggcatgtgcccccatgcccggttaattttttattttagtagagacagcatccggctgtgttgcccaagcgagatcctccctcctcggcttc

SEQ ID NO: 122982 - DNA, 1589 bp, Homo sapiens
ttttgtagttcttgttcagaagttgtttagtgcctcctgttgacagtggaaacagaactaggctattgtttcaaaacacagacactaaatgaaaggaattattacagattataaatatatatttcctgggattttatttggtggtggtggtattttaaatttggattacatcatgtcgccattcaacctggactatcagattgttgcttaaaataatagctttaaattatgagaacccccaattcaggatttttggtaagcacttcagcttcacttgtagggggctggtaatatgcataccagtgagttagtttgggaagacaaaacctgtaatgaatataacttttctttttaaaaacaatgatttacattatgatatggctttatatcattgtttttattggtcttagtttaatgggtttcccaacattgcaatgacaaattttagtgaagtttctaagatagtatttttcctattttaagttttataagaaaaactataaaataaaccgtgtctgtaaaattattgtcatctgatcagttgattagattaacaaacattatgattatgattaacaaacagtaagcatatagttacttcttcaaaagtcataaaatttcctaggttaggttaactaaataaaagaaaaagctttcgaaaatagtaatgggttcttttaaatccatggcttttttctggggaaatcccttctggattaggttacattttataatatttcaaacaccattccatcagagacagaaaaaacaagagtaagtaagactctgactaacaagtggcctaattattcacttagttactctagaaactaagtattgtaaacatgggcacaagttggatcaaccaggcctggagttgtgagcaatttggtattaattttatttacaaaacattaaagcttgatcactcaatgttcttatctttgctttggttttaaaatcctttcctcttagattctcctaatcctctagactttatgggatcactataattctgttttgcgctgtactacttcttgatttttttcttcttttaataaaacaaaaaccccattggaatagcatagttgaattgtttattatgtttgagaaatattatttaaacgatgtgacagatgccaaagattttgagtgtgcacttatataaaggacatgggttcttgttccttttcttatccttaaccttaagttttcaacttaaaccttcactggttggaaggtggccaaatgtgtaacttgtccctggtctaatagtaacagcaggttcagacatgcaggggaataggaaggtgccaggtccttggccgtgtctgtggatacccataacagcagaaccagtttacaatactagagcaacagaatgcagcaaacaatcttgttgtgcaagttttcaaagttttgtcttcataacctttgaaaagattgttgaggagttttgtgtaagttttgtaatccagtagtagtctaaatcctcttgtttcagcccacgtctacccattcttatttctgcagcatatatagcagtgacgaggatgatgaggactttgagatgtgtgaccatgactatg

SEQ ID NO: 122983 - DNA, 1036 bp, Homo sapiens
cagagtcttggccagcaatctattaatcttgtcttctagaatgagtttgctctggaattttctgattctttgatgttgcaaggtgaaataactcatcagtcagcatccactctagcctgagatttcacatcactcccttaagtctgaaataacattcacaaagatttctgcaggagccaaatttggttggtggtgttgtcacagtgaggctctttgggctgtgcggcacctcatgaccatattggctacacccattgtatttgcagcttccaatcagacctttgtctttatttcccttactttgtaatttcagagacactataatgatgaagaccctgagaaggaaaagcgaataaaggaattagaattgctcctaatgtcaaccgagaatgagctaaaaggacagcaggtgctaccagtaagactgtcatcatgtgcttgaatgaggggatagcagctttgcctcagtttacctaagcgctcttctcttctaaatattacacttagcaaggctccatatatccattcagaatgtctcaacacaagaagttgcttgtagtaaaatgtagttggtatcagattatatgctgattaaattggaagcagtctttttgtaattgcaataaaaatgcaatatccacttatgattgttatcatcaatttttttcttcagaaggactataatcagtttaaagactagcaaagataaaatgaatgaaaatctgcattttctacagagctatgtatctatatggtaccattttggtttttttctattattttgttaacctatattttcatattttataatttcagacatgatttgatgcatgttcagtatatacatgtaaaaggttatatataaaacctcttcataaataacattagctgctctcttttatttgcatgtgtgaaagttatgtgggccattactgaattctgacatctttagcgactgggcagccaactgggatggctccttgtgctttgcaacatacatagttaaccaacaaagacaataaaagagaagtgatgc

SEQ ID NO: 122984 - DNA, 1054 bp, Homo sapiens
tttatagttcacttctgcccaggggcaattaaaggcacattacaggataagcgagatgactccccggccacaggaggaggatgtgtgggtaggattattaatgttgaaatgaattatgatagagtgacatgtctgcaagagcaccatgggttagtaacttaacaagaattcatatgcagaaacccataattctcagcagttctttagggtaaatgaaactaaagtttagggagagagaacaaggagaatttgcaaagatatgtatgacagtatttaaaaatgttcttccagcacaaagacattaatcttcctttgtcaaaataattctttctgcatgaaaagttggcatggggctcccaggcttcaggtaagatgggagaaagggagcgtttctttttttttgtaccaaagtactcaatcttctgatcttccttgactttcacgacataggcatatgtctactctgaccagtttgtttcatttattgtggtaagatgtgcttgtcttgtgctttcctggtgcagaaaaggagctgcctcgctcatgcttggtggcctttttgttcctacacacagtggttctcgtacatggtggctaccacatcctggtgtttgtctatactgggagaatcaggcgttccaagtcatcttggctgccctagctctgagcttcaggggatatatgactcagaaatgctatgctttctggaatttggatatttcatttttatttgtttcttggtaaattctcttttgacttaggagaagctaactatttggaaaggtctctcagaactctaattacaaatatatggtaccttctttatattgatctcatttttaaatacctagtcctggaggaagagctaaatatgaatacagtgatgagctgtgtaggggatctcacaggaacacagtcagatttcaagttgaaaatagattcagttgataatacttagtactagattctcctgaatcgactttgggaattctgagtcaacctaaggactatattacaaaggatcagaccttgacttttaggccaggtgtagtgg

SEQ ID NO: 122985 - DNA, 1056 bp, Homo sapiens
tgttccattcttcagttttcctttttttttcattgtttttgtgttttctttctcctaatataaagtgcattactacacactcatccacaaaacatttgttttatattttgctattgccattgaatcatttggaaagctacattgttcattccacagatcaggatgttacagctttcttatatataaatttccttcatttcttttcttgtcatgaatgaatgtcctatacttttgtgtgtgtgtgtgtgtgtgtgtgtgtgtttgtgtgtgtttccacctaagttgatagaactttctgatttttcccaggcatctaatatttttctgagacagatgaaatttattttattctgtaagtccacagataattgtttaagattttgaaatttattttattcttgtccctttatcatggctaagaaggagcccaaccagccaaaggtttgtctgttaacgttattttaagcaattccttgtctctcatccccgtgtatactcattagttctgccggatgtttttctctgtcatatcctcacatttatccccatttttgtttccactgccacggccctagatcaaagcctcatctgagcttttagctcagctctcttttactggctccttgtttctgatctttccctcctatagttctgaaatgagaaaagaacagagccatgaggaccaaggacacataatggatacacggatgaggaagaacaagcaagcaggcagaaaagtcactctaatagaggtaaggggaaaaccaatagaaagttgcgctatgttgtcaacaggaaaagatttaggaaagcatggtcagcaaggacaaataccagagagaggcaagtaaaataaggactgacaagtcccatttgggatctgtaaccgggaggccatttgcgaccttggagaagatagttttgatggagaaacctggaagcataaatcagattgtctccagcccaaagggaaaaagactgtaagaatagtcttattctctttagaagctggaatttaaaggaaagaaaaagctaggcagtaactagtggaaaaca

SEQ ID NO: 122986 - DNA, 1069 bp, Homo sapiens
acagcatccatttcacatgaacaggcttagcagaattggcaagacctgcacatggcaacatattattcatttttcaggataacaaaaaataattaaaagtaacattggcttaacactggtatatagttcagtatgacttctctcccctcaacctctggaataggttcaaattgatgagaatttctgattagagcccttaatgttgagttttttgaaaagttttatcaagtttcatatatacctatattgatggtaagttgctggtcttgccatgggcaaagagagaaaaatgatactgagaccttgtaaagaatagctggacatggaggcgcacacctgtaatcccagcaactcagaaggctgaggcgggaggattgcttgagcccaggagttcaaggctgcagtgagctacgatcatgccactgtactccagcctgagcaacaaagcatgacccaatctcttaaaaaaaagaaaagaataaaacatttcacatttaatttgactgctgtgtttagaatttatttcacaagtctggaaagaaacaggataatttctgttatgatggtgctttctgaggttttgatgattttctttgcttattgttctattggatgagggcagtctgaattagtagttgaatctgaaatttcccgtgtgtatgtacttttttcccaaacacgttttaactgagtcagagcaattccactggtggagaaaaattaagatgtcatgggttcttttgttgttctaccaaatgggtcacctgttgcaacactcacctttcaccaaaaagtctccttgctctttaattcttgtttttattatgcttgacttaaagctctacagctagcagtaataatcatataattatggtccagaaaagcataatatcctcttgaaatctgtaagaaaagtaatgcttgtttaaagatagtgccaaatcttgctgaagaatgatcttgcagaaatctgattgtgaagaaggaaatctaaaaaggccaaacaagcttcagtagagataacaccaggaaagcagttactcaaacaagactgaaagagaaggttgta

SEQ ID NO: 122987 - DNA, 1050 bp, Homo sapiens
tttatgaaactaggatcatacttaagattctgctttttcttttttcaatatatctttgacatctttttttttttttttttttttgaggcggggtctcgccctgtcacccaggttggagtgcagtgatgggatcccaactcactgcaacctctgccttcccagttcaagtgattctcctgcctcagtctcccgagtggcttggactacagatgtgggccaccatgccctgctaatgtttgtacttttagtagagatggggtttcaccatgctggccaggctgatctcaaactcctagcctcaagtgatctgcgcgcctcagcctcccaaagtgctgcgatgacaagtgtgagccaccactcctggcctcttttcttattagcagagacaatcctattttttaaccatttttaggtaccaaaatacccagttttctttttttaattcctaaaatctgtttttttaattcctgaaaatgctgttttcttttttctttatttctaaaaaacaaaacccaaagtagtaaagtactatttaccttctattagtgtttcaacattaatacagtcaagtatgtttttatataaatgctagatgtacagtaataagtatgcacagaaatgttagattatttttgaagatgtggagaaactactgttatttttgcttatattcttctctaaaaattcactaaatgaataacagttattggttttgctattcaagataattataaaaatatctattatagctaatcttcacatgagcagaggaatgtcttaataattttcattattttattaagcatgtagagtcaataagagcatgctggcttaattccaaaggacagactattctaaaccaaagtgtacactctggttattttcaggaacagctgctttcttgcctagttcaaaacaagaacagagaacccaaaagcattagataacttcatggtagttcctcttccagccaaacacacatacacgcaaaattttacattggtaaatctgtcagcctctcagaaaaatggtaggcaataaatatattgc

SEQ ID NO: 122988 - DNA, 1041 bp, Homo sapiens
tttagactgtagttgatttttcaaatttcctatgacttttgcccctcatagagtgatctccatgcttcaaacataccttcatattcatattgcagcagaccagttcttcagataccatcgtcagtcacccttgaggtctacttcaggctaatcccactgatgcccaaaccttaattctaatagatttaaggaatttagagtcatgtaaaggagtggcagaggataaaactccatttgggcaagggagtaggaatgttctcatggaggatatggaactcaaattaggctttaaatcttaagatgcgtggatttcttttgttgaagaacatgatttgatcttctctatctgaatccacgtgttagagtagaatcctgcatatatttttttctcttaggaatgtgctatgtgtgtaagacagtattttacttcccagtgagagaaggtataacaaatgatctatgtttatggaaaagaagcccctaagaaatataatgttgcctcgagtaattaaaatgatttgagtgcactctgagtcatggaactaacagccaacttttgagaaacgtgtaactgagcttcttagcacctggctagttgcatttcttaaatttagctcctttattaaaatatatatggtttgattttatcaagaccttaccttataaacctcccacagagtctatcagatatttaatttcatgttcaagtcttatttttattatcacttttttttaagaaagaacatgaaaagtcgtctgtgataaagtgactaaaattgtggggcatctaagttcatagaattacagaactagtgacatggaaaggaccttagagaacatccttggtgattctgatcaactccttcattctacaggaaattgagatccgggaagctataagaagttcgtttaaaatgatgctgctaattaggagcatggcctccatattctcaggccagtgcccattttcctccaccacctagttagcaacacacacatacagttggtacctgcacagttagccaggttctgtatcacact

SEQ ID NO: 122989 - DNA, 1074 bp, Homo sapiens
aagcctcttaaatataccctgggggagtccatgaagagttcccaaggaggaaatacttgacctgaggcatctaggatgcaaaaatatgtgttaggtcagtgaagttagaaaaacctttccagcagagggaataacgtgagtaagttatgggatggtatgattatgtctgggcataagttctaatagagagaagtacaggagaaatccaggaaccaggccacagaagagcgtagcatactctactaaaacacttaaattttatactcctgacgaaggggatcccctgaaggacgtaattcagggaatgacatgaacagatttgcatgttagaaaggtcattctagtgcagcagaatagttgctgaatttgaggtagctaaggacctagcacaaggaaattaggaatccatggaaataaaatacaaaaacctgaactaggggggatggaggtcaggggacataagctgtaattgacaggattttatgattgattggattttattagtgaagttggaatctaggattttgctaagggtcttagacaactgaataaatagtggtgccatagaagtaatgaaataaataagaaagatttgggaagacagggaaaaggaatcaccattccttgcagagtaagatatgataagctcagttttagatatctcaatttgttagtagtatctgtagtgctcccagatagaaatattcactgggagccagaaatgcaggattggaatttgagagaatgtagagcttcaaaatcaaatgagaattagtgtgttagttctattatatcagtaagtggaagcttgtaatgaaggcagagcccagaaagtatgtcatagagctataagaggagaaggccaaggacagaacctaattaaacactagtattaagggacagtcaaaggaagagaaaattaagaaagaataaaggaaaaggaaaaaaagaaaaaataataaacagaaaaaagtgccctggaagccagaagaggtagagaggttcaagaagagtatagttggaaacagccaagcagttaggttgtcgaagcatttggtcatcaagaggaccctg

SEQ ID NO: 122990 - DNA, 1369 bp, Homo sapiens
tttgccagaatggggcagcatttcattccataaaatagaatatatgttccagtgagctgagcaaaagaagttggttttatagacagagaaggaacggggggagaaacaaagaataaagagcagattggttttttaaagttcctttccttgtatatcaggaaaaggaaaacagaataacagaagaataactggttaacttcaggttactttttgttgtcaagattaaaacagagggagcttcattaccatactggttggaaatttaaactggcctgtttgggaagttggctctctttctctcccaatttcttggaaggtgaattaacaagttagttttggtttgatgacatagaacttcagcacgagtgacttcattttgattgttagtctggtctgttggggcctagttcaggagcttagtccaatggcttgtaatttttattcaatattcaatatacctggggcatcaggtagaatcatcaggaaggtcacaccttgatagtggggttaatttatccctagagtaaagtcttctctgaatatgctctatcaaaacctaaacctgggccaggagcggtggcttacgcctgtaatcccaacactttggaagccgaggcaggcagatcacgaggtcaggagatcgagaccagcctgaccaacgtggtgaaaccccatctctactaaaaatacaaaaattagctgggcatagtggtgcacgcctgtaatcccagctactcaggaggctgaggcaggaaaatcgcttgaacccgggagacggaggttgcagtgagccaagactgcaccactgcactccagcctgggtgacagagtgagactccgtctgaaaaaaaaaaaaaaaaacctaaacctgaaaacggatatcaagtaatggcatgccagaccaaggtccaacactctttaaagaaatagaagaaaatccagcactcaccaaagtaaaaatcgtgtctattagtttcctagggctgttgtagcaaactaccacaaacttggtggcttaaaacctaagacatttattcattcacagttctggaagcccggagtctgaaatcaggttagtcaaggagaaagcataaagaaggtggtgggatccagatgccatattgccttattagactggcacagagaagttcccaaatgattatgggcccaattgaagtagggctgaaggaaaaagtgctcaagcgtgtgaatttattcagtgcttagcttgtcgaatgacttggaggtattacgaacatcaattattggattgcattgtggataaaactgtaaggaacagctatgctgctgaactctactggttggtgttccctcagtacactggtttcattgaccaggcgtcactgag

SEQ ID NO: 122991 - DNA, 1526 bp, Homo sapiens
tttccaagaattcatagtatgtaaactggggtgaatgggcccctataaaactcataaaatagaacccatggccaatctcttcctgtaggtaattgcagggtggagagggaactgataaactataagcttttataacttgtcataaaagaacttgttttcccttatcaataaagtagcaattcaaagcagttctatcgaaattcaaatataaatgcaaaataggttctctttaacaaccacttgtagtcttccgtaatataacatgtttaagtataagcacatcagtttatttctccagacattgtaaattgtgaagcttatgttgatttttttcccattagcatactccactggcatttatgtttttcttagactttttttcctccatttctcttttggttttgctaaatttttctacctgaaaaactcttaaaattctgaaaattttatattactggaagatataacagcagcataaattgaattttctaaattatcaagaaacatgaggtatacaatatacataggatagtaccatacctagcactggtgaggtatggaaatactatgggaaaagtagaaataccaaaaaaaaaaaaaacccacaaaacatggttttataggtctttagatatatgtatacacacacatatatatatgtgtgtgtatatatattgtgtgtgtgtgtgtgtgtgtgtgtatatatatatacacacacaatgtgtctttgagtagttcttgatgtcattagaaaagtgacctgtaaacagctaaatcctaatatatgaaatgaataaaaaattcagagcaataacggaagggatgtcatgttactgaggcagtttgtgcccaaatataggaatatggtgtaaggctttgagtgctgtaggaattcccagcactggagtggtttaggaaggctgtttagagtcggcaagtgctaaaccagatcatgaaaggatgggatttttaaaagaatgcgttttgctagaccagagtaacagtgtgaccaaagattatagaaagacacactgtgtacacacagtttatagatgggtagaaaatttgactgcagcagcgtagatgagatagtagaagattggaaaatgtgatttgggcatcatttataaagatcattgaatgttaggttaacagttaagactatctgtataagcaatagtaaggtatttgatcatgagaataatatgatgaagggagtaatgttttaaaaggattaaaataaaagcagctcatgaaattgcaggtggtggcgttaggaagaaggtaactgagctgtgaagctacagaaatctacatttgtggtgataaggatttaaataaggagactatcgggatcagtgtggaaatagaggtatgcttataaaaagacttggagatgagagctgatgaaagggactcaaaggaaaagttgtagttaaaaagggagatcccatcattggaaggcccaggcctaggttgtgggaagtcatgtattataattgcatgcaggttcttcacaatggata

SEQ ID NO: 122992 - DNA, 1039 bp, Homo sapiens
gggatatgataaaggcaagcctttcagacttcacaattatatataggattggctccatttcgcttcagtttccatggccatgtaggccataagagggatatttatatccctgcacatactatctcagaagcatgaccattaagccatttggttactaatatgtctaacctcattttaaggcgtatctttcttagaaatgtcattgagatatcactgaacagaaaaatttcaaaagcataatatgtggtccatctcaaaatggccaaattaatctcttttattaagaagccagtgtttatgaaaaaaaatcctgccttaggaaccaggtgagctagttttcagacctaactctatttctaaacatggaatcttgagcagtttcttcaggccagagttttctcatccctccaaataaatgagggctctggctatggtgagtttctgctttaaaaattctgtgattctattcagtgttcaaatcagtttgtaaagtggataaataattaagtgttgattgtacgaataatctattagaatctgaaatacatgactacaaaaacaaatcatgtaaatagaatgtttaaaaataaaaatctcactgaaaacctatctgaaatatacaagtcacatctgtcgatatttgcctttggacagtataaaagaaagctatttacacagagctagtaagtatgagcccattagcgctcatgctaggagacttaagagtaggggttgattttatatatatgtaagtgggtttacatgctagagtgctagactctgcagtgggtttatgttctgttgtaacttttattgatctttttcaaggtgagttctaggtaacggagactgctagaaaagtaagcatttctctcttctttgatttgtattcctcacaatttctagaatgcttcatttattcattctaaaatcattttaagtgaccaccttgtttaaggccatctatttagcatgtggagtaaatgttacagtctctgccttcaggaacctctagtctggctagggagacaaataagta

SEQ ID NO: 122993 - DNA, 1049 bp, Homo sapiens
aaatatgttcttttccatttgaaagcacagaactctgaaaaattggctacatcatcatatgacatcataaatacctaattacccttacttctagtgatgttaataataactaatataacaccttatttgtatactactttatggtttgcccttgccaagatattctatttaatctatttcttatttaatgttcattagtgctttatggttaacatatgaatagcactttatgatacccgttcatcattattgctttcctggcacattcgcattgaagtatagatattatttttcttatctccatttaaagatggaaagtgaagctcaaagatatcaaatgagtttgttgttttaggtattgtatcactataactggtcagttttgatctgtatttaatggattttgatagaatttttaaagctgggtgatattttaggactgatgtggtatttgacccccccaactactttggaaaatacttttattttttattgagatgacataatagtttagttactttaaaaccatattaacatatggtcttaattgactttttcactgaatttgctaactctgctctaagagaaaaacctaaactaagatatactgtttattatcactgtttaaaagcaaaaaatagaaaaaaaaatttacaaacatgtaaataatgaatcagataaagggcatgtaacaagagcccagtattgtcttatacagaacatcaaaaggaaaattttaaatgcttgcacagtagaagtcctctgtatggttttcattatttaacaaaaaaatgggaaaggggctgttttaatatagtaatatttatatgccataaattatcattttgtttatttacagattacatttttgaagtgaattaggaatcagactgtcaatttctccaaaatagatcacattttattgtgctttttgaaagtaatgaaaaagattaaatgattgatttgttaataatgaaaaaaagatagattttttttctgaaacgaattctgatttacaagatgaatttgcctataaacatttcaagctt

SEQ ID NO: 122994 - DNA, 1050 bp, Homo sapiens
ttttaaaaattcatcagaagaatatatgagtataaaaattctatccattagtttagtaaccagctcaaatgctacttccataaagtagtctctcttgctctatagctagaattaatttctcttgtccaagtttgaaaagaactcttctgtttttcttttgcagtatgttctacatccaccttctattttacgttgacatgtttctcctctcttgctaaattataaactccctgggctcttgggactagctctcctttattctgcatccattatattatagaatgtctcccatatggcagattctcaaaaaatgtttgttgaatggaaattaagtatttaagagaaaagattttataccaccagtcatttacatgattaagacagttacatttgtaaaatcttttttgcttgtagattagtagcaaggaagtttgtaggagcagcaaattatcgggagaagattcatagtactttgactccatgtgggacttttctgtttgctggaagtgaggatggtatagtgtatgtttggaacccagaaacaggtgaatgtttattgaactttaaaaatcatttggggaggtacaggggtttgaagaagtgtgaaaattctaccattttatggaataattttcaaggaaattctgattttgggttttcaattatgttttttaagattagaaagcctttaaaggaactcagctacagtctaaacttgtattaaattttgttctctattgctttaatatctttatggatttagaatttcacattataattcaaggtttgttctttcatggcctataatgagacattgctgatcttagaaaagcgtttaatggaggctaacacaaagtacaaaatgttacaagctgaatttggaatatgattaggtagacaaattgttaaacatctatattttcattagtaacggaaacatacctgtgaaagttttgatgtctgaaacttaaatagcaagttgcctgaaatactgcagttcagtttttttccaataaacaattacattgggaagctcacttgtgcctcacc

SEQ ID NO: 122995 - DNA, 1053 bp, Homo sapiens
aaagtgaacatactacaaaaacacatactaattaaatgtgcatttgcacattgcataacaacacagaaatacaattcatcagctttattttcagccctaaactgacgttactcagaatccttttgctaacaattttaaagcatcctatacagtggaattggaaatgatattttaagattaattttgtacccccaaaaaagtttaacattagacaaacttttcagtagtagtattttttttaatcattttaggaaattaaagaaactgagtttaagggaattccaataagttatttggagattcatcccaatggaaaacgtttgttaatccataccaaagacagtactttgagaattatggatctccggatgtaagtatatttcagtgttgacaggataagtactcacagagtaagtaatgaattaaattatatttataaaattcggtagtggttctcaactaagcagtgtccccacactcaccaaggaacatctggcagtatctggagattttttttttttatgttgcttctagtatctaatgagtcgagataaaaaatattgctaagcatcctacagcccataggacagtccccctaaaacaattatccagcccaaaatgtgagtagttctgaggctgaaatgtagttagttgcttttattttcacaattaaaaaaaagaaacttctaccttcaacaatgatattgattgatactgatattatcactatgatactgttacagcattagtataatatgatataactacaggagagggcttttgatttatatgtccttgtttttttgtttatttccaaataatcgcaaatgtagggaaatatccttcctgaaaaaggtggaagcagtgttctgggaaaatcaacatggacttctagtgcacttttgtttgatgttagagatgataataatacttacctggcacaaagtgtgtgctgaaatggtgtttactattttttcgtgagtgaaaaaatatggaaggctatgtaccatatttagcagatggtttaataatatgttttatctaatttttttt

SEQ ID NO: 122996 - DNA, 1053 bp, Homo sapiens
tttgtatattattggattaaggatcttctgtctggaaacctaatttctaaatattttcattagtatatgaaattccttctggacgtttcatgagagaattgtgtggccacctcaatatcatttatgatctttcctggtcaaaagatgatcactacatccttacttcatcatctgatggcactgccaggttagtatccttgagaagtacttatgtgcatgctgtttgctgtcaaggaaagcaaagagaatataaactgatgtaactactcttatgctccagtcgtattttcccaagaagggactgtcataaatatgcatcatgcagactgattccataaattatagtaacactttttaaagacatttttcttaaatgtcttttatttatgtagcatataatatttctagtcctcaccatctttaaatgatcattatgtaaactgattaatgctttgagatggggttaggggttattaaacacttgagattttttcctagagcataagctcttggtggcagggatactgtcttcactattggctggatttgcagagggtagaatccagtggtgctcagtatatcacagtagaggaaacaaatatgtaccttatattttaacagttttatagattggttaaacatttacatttttcagaatgtcaatcttaaaaataatttatcccttttcaatttaataagtatcacaataaaacattttaaaagctaactttaaaagtttcatttatactttttttagttgcttgttctaccttgaatgtgttctaaaaatactgttagttttcagggtgcttttagatacatcacttaatttgattcttacagctattaggtaagacattattctctccacacactacgaaactgacatgtaaacagttgagatccatgctgaattcattgtcatttacttctgccttctactctcttaacacttcgtgttacttttagtgttcagaccacttcttctactgatcttgccaacctccttttctgtataaaatatctaatcaagatgttaccattattggttag

SEQ ID NO: 122997 - DNA, 1075 bp, Homo sapiens
atgggaggagcaaaatcttcccctcataaaaccccatgatttacatggtagaactgtgctttgtatcttgtacacactaccaccaaatgaccctattctgcttctaccttcttccttccgcaaaaccagatacacagcaggccccattatggttttagggtatataagatggtttctcatatattacatttctgtagaggagtgagcattgttactccctgtactctacaatgagttttgaaaggaaaagtcaactctgactaagatcacacagctgttgaggaataggtttgggatttgaaccccgatatactcagttctttccattatgtccaccaatctgttttcttttcttttttgttctatattgcctcctgttttctccaacacaaagtgtctatggacttcaccttttaaaaatgactgtatataagtgaaatgtgtttggctttagttgtttgccttcacagctatctttttgaaaacaaagtgtggctaggtgtaaacccttgggattctgagacaataagtaaaagatgaaatagcattgcaaacttctgacatttttgaactgtgtatcaagatttgtggcatatgtatttgagtctgctacaggaaaattcccagagcacataccacaattattcccaaagtaccttgaactgagatgcctagtcagttcctataactgggtgcaccagagatcgcactgtactccatgccataagccttcacaggtacaggtttttctaaaatggagcttgtgcagaggctatagtcgttttgcacaatgaaagaggctgtcttcaatgtgcatttcgatgtgtgctatgggaatcaggactaaccacgacccatggagacaatgctgcatgacttggagagtgcaacgtaagacgcaatgactctgagcctgcaccacgccatctgacctcaggatctccctgcagggatacgaggagatcttagccatatagcctttctattgccctctactgtctagggataaaatgacagaaaacacagttctgcattttggaagtttgcttaataactaaaaaaataaaaataaaaa

SEQ ID NO: 122998 - DNA, 1049 bp, Homo sapiens
acaactttgacatgtgtctaagatctttattatcaaaagattctctaagaatttcactttggtaattttttttcatcccacattgaaattttaactacatttttctccttctattttgaaaattactttaaaatgattgcatatctttctatttataggatatgcatactaactgatcctgctctatttgcttatttggacctctgggtctatctactctttgtcctccatgatcttcctggacctattttgtggtctgctgataagatttcttgtattctgtgttttctgagacatctttgcatttgacgttaacattcttttgtccacttaggtgcaaggtaacatacatctgtctttgacttgcatatgttcacataccttgctgattttatgtttgtgcgtctcaattagaatatcaagagtcaacttcaagccacagataactgggcttttaataaatgccttttaaatgctgttattactttttttttcctgctttcaaactttgaggaggcaattgatgaggctactattaaattgtgtttttcaagtctctcgttaatcattgaaaacttcagttaagtcttatttacctttaaaagttatgatattctggattgaacataatttataatcatgtcattttcaaacatgtaacatgaaaagtaatggcaatattaatactaatttgatgcaaagataattattacttataaaactagttcaaatccctttcttgggcattcagcactttcaaaaataggctcccactcacctagtcctgtaaacacattcaaacttacattgaatatgcaaaatttctgtggaagtcatattgttgcacaaacatgtcagatgcatctgacattatgtatagtaggcagaataatggccttccaaaggtgcccacatcctagtcctcggaacctgtgaatatgttaggttacatggcaaaggagattaaggtagtagatgaagttaaggttgctaatcagccatcattaaaatacagagaatatctggattatctggatgagaccaaaata

SEQ ID NO: 122999 - DNA, 1099 bp, Homo sapiens
gtatgcgtgtataaaatgtaaagcaatctaggtactgaatgcttttcacaacagatttggctgtaaagggctgtgtgtaaatataattgctaaaaattttttaatacatatgtatatatacaaatgcataaatacacatataatttaagatatttatacagtgtatatttataacatttacatataaacacattatataatatacaataacttatatttatacataataaataaaatgatatataactatacacagttttcttaagcaatcgtgtttacccacagtcctttatgagcaaatcttaaagtggaaaagttaaatactcagtacccatcttaagctttgcttagaaaataatatgcttatttctccaatgtcattatacagtgaatacatcaatttgtgtttctaactacaagttgttgatttctgttttagcttttttaaaatagaggatgaagttcagagtgtatgtgaattactgaaaaaactcttttttttgtttgtttaagatgcattctcctccccgctctgctcttggacctacactgaaaattcctaactggattaaaaatgaattcacaatttgacttgactcttaaattactaagcagatgggattgacactctttccttgctaccatatcgctactagcattacagaaattgctcctgttttggttctaattagtgttattaatatatattacgttagagataattgtgcatgattttgtaataaaccactttgtttgtaggttcctttggcttgagtgacgagcgcattagtttgggtcagctgtcatcatcgcgggctgcccatctgagtgtggacccagatcagcttccaggttcagtgctttctcctcctcctcctccaccacttcctcctcagttttcatctctccagccaccgtgttttcctcccgtacaaccaggatctaataatatttgtgactcagataatccagcaactgaaatgagcaaacagaacccggctgctaataagaccaattatagtcatcattcaaaaagccagagaaataaagatattccaaacatgttggacgttctaaaggatatgaataaggttaagct

SEQ ID NO: 123000 - DNA, 1044 bp, Homo sapiens
tttttttttttttttttttttttttttgagacagagtcttactctgtcgaccaggctggagtgcaatggcacgatcttggctcaccacaacctctgcctcccaggctcaagtgattctcctgcctcagcctcctgagtagctgggactacaggggcacgtcatcacaccggcgaatttttaaaaatatttttagtagagacagggtttcgccattttgaccaggctggtctcgaactcctggcctcaggtgattcactgcctcagcccccaaagtgttgggattacaggtgtgagccactgtgcccggcctgagagtagcttttattttgttttattgtcttttgattttcacgtaggagtgtaagagtttatacctcttttgattggaaatatatcttccctccatttcctattttttttcacccacagaaatagtatatggaaaaatgaagaagagaaagtggaaatttttcatcctttgcgactagttcgggatccactgtcacctgctgtaagacagaaagaaactgtgaaaaatgacctgcctgtaaatgaagctgcaattagaaaaatagctgcccttgaaaatgagctgacttttcttcgctctcagattgcagcaattgtggaaatgcaggaactgaaaaatagtacaaattctagtaagtaacagtaggatttttgtttcagttagatgatactcatggtatagcctataccaacctgtacagcatgatactgtactgaatatagtacgtatagtagcatacaggaacatctagtatttaagtgagtacaattctgaataagtaccatgaaaacattaaatgtacataaaaggatgttgaatatacaaaattattatatctgatgtttattcaggataaattaagacacatttgtagtgaggggatggctttgatttaaagaagaactagctttactatactagaagattgtatttttgtattaaaaagtctgttgtcttctaagtaagctttttttttttttttttgagacgcagtcttgctctgtcgcccagg

SEQ ID NO: 123001 - DNA, 1022 bp, Homo sapiens
ggggacacagccaaaccatatcataagcaaatcaaattttatctacttgttgaaaatctgctgtatctaagacaatatgcttgtttctgcaggtaatacagaggagtaatacatggttgtattcataatgcttaaaatatgaggaataagaaacaataaagataactgtaatatgagattgtaaggaagacgggtggggtgaattagaagaaagtagtcaaggataatttaagatttttttaaagcaaaagtaagttgaagaatcatagtaccattattataaatgggcatcttagtatgagaaactagtttgaatatggagatgaggtgagtcagaggtgatgttagaacatataagtagaaatatccttcagacaattggatatatatatggttttagtatgtaggaaagaaaaagattcagttttgggagttatctgctttgttttgatatttaaagccatggacttcgataatggcaaatgtcattagatgtgattgaaacattctaaatatcagtaatcgagagactgaagataacagctgaacatttgtttatcactattaggttattggtgaccttaagaatttctgtaagtggagaatgggactgtgttggagtagtttgaagaatatcaggaagggaggtgggatcagcaaccttcttttgaaaagtttgcttgtgaaaagaaattgagagaggccatcagcctgaaggggccgcaggatggaatttttctttttcttttaaagttagaagtaacttcagcatatttgtcatcactctggaagaaacagacaggaagaaatttaagatccacatgagagaggattgagcaccgcctttgagaaggtagttgggcaagggatctaattaaataagtcttggaaaggagagagactgtcctgccttaaagaacagaatgaaagtgagagagagtgaaaagagattttttttttttttaagatggagtcttgctctgttgcccaggctggagtgcagtggtgcaatcttggctcac

SEQ ID NO: 123002 - DNA, 1657 bp, Homo sapiens
aaaggagctaatgcttattctgttaatgtaaacttttgaagatcttaagtgtattgctctttcatcttaaacactttcgaggatttgcagtgcgtctagcacctagattacagccaggaacattggttaagaactgttggaaacaaaactaaaagcaaactcaacatatgtgatgtttatggccctcagatccttagtattgtgtgattttcccccgttaacatgtctttctaaaattgtctattaaagcagaggaaatacctgccaaaggaagtatgtattgcattaatcagggcataactaatattctcctgttcagaataatacttatttacgtgtgaaagcaacatggatgtgattcccaacacagaattttcatgacccttttattgtatacaaataaataccataacagttacttggttagacatcaaatctgtgtgcatgactatgtgcttatccacttaagacaataggtaaaaggggatctgagaaattatgtaatagggagtgggaataaaactacttaattcctgtgggcaggttatattttaagttcaaatgcattgctttaacctttggttacttttattctgttaaacagaattgaagaaagagtattataccagagtgtagtaggctagggtgattgtaagaactctgtaatagaatgtcattgtggatgttacctttttcagatccaagcatataaaaagcctgtatattttttaaaaacacatcttaactccacgctttacgatattataaaagttgaatggttcctcttggtaaggatatttgcttacaagtgctaggaaataactcactgatacctgcgttaacatactttgttttgcctagagaggggcaataaaaatgaaccaaaggatatttccagaaaggattaagaaagctgtttaagaaggccatgactctttaggtgtgtatgtgtacctttcagcatcctaggaatttttatactaaaagcaaaatgttttttccagttagtcttcttcaaggaattactattgttccttttgtcacaggtaaaatcagtgttgggaattataatttgagaaaaatattacccagtaacattgaatgtagatggctaaacgattcttactcagtgtgatgtataatgatgcaacagggacccttgtaaattgtcatacgccaataaaatgtcacaagtaataactgctgttgtttgtttacctgtgtctatttcacacatcttatttctgtggcctattttagaatatcagcgcatctgttaggaagattactggtgtggtaaggcttgataaatgctttataaactccctcaaacctttctttactgtttttttgttttgtcttgtttttgtttttgtttttgtttttgtttttgtttttgtttttcccttgtctcccctgggaaaatgggaaattttacagttggtaaatctaagccaaaattattttgaaataaaggaattctggatgtccagtttagtcctcgttttcttacgttaatctgggaccttatcacccataatatggtgattacttctctttctaaaaacatagtagctagtaaataagtaaaaagaattgtcttttcattcactttaagtaagatgtggtataattcttaccatgtgccatcctgtca

SEQ ID NO: 123003 - DNA, 2087 bp, Homo sapiens
atctagatttcaatctcagtagatttaaaatctacttttatatgtaaagtataaaattcataccaccagtttcattttagtgaatgttataatattttaatgatatttttatgactttctgctgcatctttatgactaaggtaattttgggaaaaacttaattttatctcattgcatttggtgtaataataagtggacttggattgacataataaaaaaacaaaactcaggattctaaaaatcagtggtaatttagcagttgagatcttccaaatgattgtctgggtaaccttcagtgcttgggttgctaagtagtaagatgtagttattctcttgatgatggaatgtatttttgttgaaaaattcagttttactggttttgttttattgtgttttagaatattaccaatctcatatacccaatcttcagaagattaatactgtgatttatgattggagaaatgatcatctttacaagaaacatttcattgacaattgtttttaacctttctgtagcatgacgacagagatgatggtgtggattattgggccaaaagaggaagaggtcgtggtacttttcaacgtggcagagggcgctttaacttcaaaaaatcaggtagcagtcctaaatggactcatgacaaataccaaggggatgggattgttgaagatgaagaagagaccatggaaaataatgaagaaaagaaggacagacgcaaggaagaaaaggtataaaatttcaacttgtgattctgacagattttttttgatataggtttggtgggtgaattatttcatttttaggaacaattattaatatggttccttttcactctccgcatcttttgttaatctttaattttttctctctcttttaggaataataaatatgaagtaagattacaacagagcagaacttgcacccaccattttttttacctgatttttgttttcaaataagaatgtaagcattttacttaaattttactgtttgcaagtagtctatagaaattttgttttaagtcttcaaatatcttgagaaatagtagactgtatgttgaaaattgtactgaaataaagtagaaaattgttacgtaccatatttgtaactatcaacttttaaaacttttaacgtttttgttacatgcattgtaattctgctttgtctataagatatggtcaagtacagctctgtgaaagttctgattctcttccttccctgtttgtcaatgttttattctgaagtaaacgttagctctacatataaatcctggaacagaaattgtttatagagactacactaattattttaactgtatacatctgtttaatttgaacacactacatcgtagggtgactgatttttgaagtataccacagacaaaaagttgttactatggtaaactaagctagtttaacacttgagcaaatgcttaagaaggaattaaaaaaaaaaagctttgccaatagctaaaaagtacaagctattaaaaatcagattgaaaagttttgagaaaatgttatttttactgaaagcaagcagtggcctataaagaacattcttaggagccttttctatttgcgttcaaaactgtgtgttctctttctattcctatttgatagtttgagtcatggtcttagatattagctatttgtgagaggaaactggtttgtaacaatactgcaaatagaaaccccatttctactgaacatcctagttttaaacagaagaaaaactgtaatcctggggttggtatgtaggaggtctatcctgcagaataagttgatacattagtacctgatttcatatcttacatatttatttgagctgaacattagtttgtagtgtaactattagtaaaaatagagaaacacagcatactgttcattaatagtattttaaaaaaattgtttttcaaatgtcaccaataaaagttttggcaggaagcttgttgcggcattgatctaacctttttcccccccatttcagttgcagtttttgtagaatggctttttctttttcctcttaagagttctattcttcaggtagataatttttcaaatgtgaattatcttttgtgtctata

SEQ ID NO: 123004 - DNA, 1458 bp, Homo sapiens
agcaagtgggaaagtactgaagtaggcagattctcagtgttgagttgctgtcttcaaaggaagagaaaatcgttggtggggaagggggttcaggattggagttttggttattattcctttgaaacgtgatccttgtatggagaagagaagatgattcagaaggtcttggtttctaatacagactcctttgttaacatgttcttagctgtgtataaatatctaacttctggcccttttaaatctgagataattaaaaattaaacattttaataatgagactgaaatcttcgatataaaacttgagtattaagaatatgtttagcatcaaaaatctcaattaagtagctgccaggatgccctacgaaaggcacagtttaattgtttaggtgctgttgtgtttaccaagtttcagatgattgtatattaaaagcaatggctagtttaaccctagtgtctagctttgctcttggcttttctatttctgctaactcttagctacctggtgtggtaatcatatactgccaccaagatatctgggaaatgtgttttatgggtgatggtcacaaggggtagaagaaagggctagctctgtgaccttgggcaagttacttaatttctcagtgcctcagtttgtttatttctaaagtgagggcagtaatactatcttagagggttgttgtgaggattagttgaataaatacatgtgaagtgttcagaacagggccagatccatattacacactatagaaacatcatttttgccaccatttattgagtgcttgcttgtcagacactgggccgggcacttcctgctgatctgtgttccctcaaggcacacattattaaaatgaagtgaattctagagaggttgcccaaagtcacacagtttctgataagatttaaacccatgcttctactccaaaacctcttcccagaatccatggtgtattgtgtaaaaatcataaaaaaacacagcctctggagttgggtatgttaatgtgataagggagcatgaaattatgtagtggagtgggcattatttttagtggcagactattttaaagtagtttattttgggtttgtaataaactctgccgtatttaaatttacacttttgatagttccaaaattcattcattatagagtcatgtacacctctacctagtaatctttcagtggtttggtaaagatagattattagcagttggtaagttctctttcatatggtctgttagttacccatataattgaacttttcaagtcatgaagggggttaatcagttaaatgaatatatccaaaggcacagtcttatgttttggaaaaaaaatactcatatgccatattacgtaaaaaaaagttttagtggcttttggatggttgctcactactggtactctatagattacacaacattttgtttgcattataccccttttctaataaaggggcattttgct

SEQ ID NO: 123005 - DNA, 1406 bp, Homo sapiens
cgagtatctagttgggttttggtggagttcatttattagataatttgggaaagagaagagctttgcttgtatggtgataggtatggctgaatacttggggcttctatgataattcaaagaaattagacaacttttgactagtaaaaaggaaaaacaacttgattatttaaaaatattagttcagtccatgaaagtacagtattctaacacttaggttgatcatttcttaacctactcaacttttagttggcagaaattttttgcctatgatataaaatggccatccttttcatcctcaatggccatgagatttagataggaaattagggcatatgttttttgttactgcagtaaaattagaatttgcatgtaactaaataccttttgattgcatcactaaacaactttgttaatgttaatcagtttcgaattagaggcagaggaagagccagaggagtttttgctgggacaaatactggtccaaacaactcaaatactacttttcaaaagagaccgaaggaagaggaatgggatccagaatataccccaaagagcaagaagtacttcttggtgggtgttagacatctgtgtttatttggtttgcattaattttcgaagcatactaggtgaataaatttgagtacagataaccactactataagaagattcaccgttatgtgggaaaccttttttaaaataattacccagacgatttgaaattttgaaaaatgtgggtccctttagtcctgttcatactttcttgatattaaacataggctgatcagggtaagcaaaaaatatacctgatttgttacccacattcagagaaaaacattatattatagttgagcttaatgtttgttttatatctgtctataagacagtgacagttgtagaaacttcacattaagatgtaccttccattatcatagctatttgtttaaatgaaaaggagaataattttttcaaagtacgtgtaattaagaattttagggaggctgtcaactttcattggagaaaaaagatgatgaaaaattacattacagaaaagttgctgctagatacactaatttggtgcttcctgtggtagaggtgcttttccctctgaaatagtttttcaaggatgaagctagaggtggtaggtcctgaaggattctctagataaggatgggcattttctgctgtttggcatggggaaaagggtctctcctgcattatagaggtggacaagaatataccgaaactattaccagaagtattcatttttttgtcatggcttttcagagaatttatgcttcagagactagttctgaaaactagttccttccatggaggaagattgtattggacttgaggaattgttgactttttcagttggctttttatgagtatatttgaataaacc

SEQ ID NO: 123006 - DNA, 11277 bp, Homo sapiens
aatagtagttgatgctcattctttttcccccaccaggcttaactttatattatgtatgtatttaattaatagtatctcactgatagttttttgtaatcttttcccccatttaactatatattatgccatgccattaaatattcttttacaacatcaatttaagtgcttgcctagaggtactacaatttgctaatatgtcctaatgcatgtgatatatataacacatgcgtgtgtgtgtgtgtgtgtgtgtgtgtgtgtgttttgtgccttcatttgtaaggtctttaaggtattctctcagtatttaccttagtgaggctttttgattggaaaccattaacttttgtacagatgagttttttaaaaaagtgtatttttgcctttactgtttatttacatgttatattcaaccagagtatttagaatggtagcatggaatactttatttttcttgcattgatatttatttcatttttagttctaggtctcgttccagaacatattcaaggtctcgtagtagagatcgtatgtattctagagattatcgtcgcgattacagaaataatagaggaatgagacgaccttatgggtacagaggaaggggtagagggtattatcaaggaggaggaggtagatatcatcgaggtggttatagacctgtctggaatagaaggcactctaggagtcctagacgaggtcgttcacgttccaggagtccaaaaagaagatccgtttcttctcaaagatccagaagcagatctcgccggtcatatagatcttctaggtctccaagatcatcctcttctcgttcttcatccccatatagcaaatctcctgtttctaaaagacgagggtctcaggaaaaacaaaccaaaaaagctgaaggggaaccccaagaagagagtccgttgaaaagtaaatcacaggaggaaccgaaagatacatttgaacatgacccatctgagtctatcgatgaatttaataagtcatcagccacatccggtgatatttggcctggcctttcagcttatgataatagtcctagatcaccccatagtccttcacctattgctacaccacctagtcagagttcatcttgctctgatgctcccatgctcagtacagttcactctgcaaaaaatactccttctcagcattcacattccattcagcatagtcctgaaaggtctgggtctggttctgttggaaatggatctagtcgatacagtccttctcagaatagtccaattcatcacatcccttcacgaagaagtcctgcaaagacaatcgcaccacagaatgctccaagagatgagtctaggggccgttcctcgttttatcctgatggtggagatcaggaaactgcaaagactgggaagttcttaaaaaggtaaaaactaaaatacagaatctagattataatattgtttttgttctttgaattctgtttggaattataaacgtaaaattgtgatatgtatttaactagcggtttttactcttgacttccttcattttaagataattccaaattgtttttactcttatctggtgaactttggaagctaagtgttttaataaaaattaatttatccagctactcaggaggctgaggcgggaggatctcttgagcccaggagttcaaggctgtggtgagctatgattgcgcctactgcactccagcctgggcgatagagcaagaccctgtctctttaaaaagaattaaaaaaacctaatttctatccctcctcttaattttaccattttcggtccagaattaaaaatacagatgaggagaagttgagtagcttagagcataactaaatgatatatgttgctaataactgtaaaccttttagaaattaagtttcttaaagcattgaaggcttattttgttcttttcactattagaatgtgacctacataaataatgcagctatattgcatgttcttaggtggcataaacagtctggctgtcaatatttaatgatttcagcctgactatacaaaaggtaatggtatttctcactgactaatgacatttgaaacagatacattgtttaaattctgatttcaagtgttgctgaaagttgctaacagtgaaaattggttgcttcatgtattgtgatttgacttaaaagtgagaaaatagaggaaacatgctgtttgtggaatagcactgcacaatctagaatttatgattgaactgatcattagtttctatgaaatagtgccagaaatcattatttttctagagcaagtttatatgaactgttctgtgattttcataaagtattaaattactgcagtggtaattaaatccatttgtgtgaactcttgtttatattaatagataatatctggaattttggggataattatcaatagaattctaacaatgtattatctattagtggttcttagtttcaaaaattaaatttaggcaatctctagaagttcgtgttagtgcagaattgtggattgtgactaaataggacaggtttttgtgattggctttgtgttttaaacttcagaagtcaaatgtaaatttattttaaaagtcagtacataagttctatatggatgctttcaatgatttttaaaagtggaatctgaaaaagcacttttcaatagggttattttctctcttgctggtcctgagggattgggcaacacatttaaatatggaagcgatctacagtgaatgcaatccagagttactatcctcttctttgcttattcgcaggttcacagatgaagagtctagagtattcctgcttgataggggtaataccagggataaagaggcttcaaaagagaaaggatcagagaaagggagggcagagggagaatgggaagatcaggaagctctagattacttcagtgataaagagtctggaaaacaaaagtttaatgattcagaaggggatgacacagaggagacagaggattatagacagttcaggaagtcagtcctcgcagatcagggtaaaagttttgctactgcatctcaccggaatactgaggaggaaggactcaagtacaagtccaaagtttcactgaaaggcaatagagaaagtgatggatttagagaagaaaaaaattataaacttaaagagactggatatgtagtggaaaggcctagcactacaaaagataagcacaaagaagaagacaaaaattctgaaagaataacagtaaagaaagaaactcagtcacctgagcaggtaaagtctgaaaagctcaaagacctctttgattacagtccccctctacacaagaatctggatgcacgagaaaagtctaccttcagagaggaaagcccacttaggatcaaaatgatagcgagtgattctcaccgtcctgaagtcaaactcaaaatggcacctgttcctcttgatgattctaacaggtaattccatattgatgcccagtaaataatctgtgggcagtcagtattccagttaattatcttaaactttctgaacataccatttttatatttaaaccaatggtatattttgtgtgtgtgtgtgttatcaatatgttccagacctgcttccttgactaaagacaggctgcttgctagtacacttgtccattctgtcaagaaggagcaagaattccgatccatctttgaccacattaagttgccacaggccagcaaaagcacttcagagtcatttattcaacacattgtgtccttggttcatcatgttaaaggtatgcttagtatgtttagtatcgtgaattaaatttctcttgcatgcaaataaaaaaatgtgtaattatgcttaataattcatgtaccccagggctagcaaatatacatccaatattattaaaacttggaaaagtagtttcatagaagagagtccctagtcttgctagcattgaaacttatgaagatagttaataaaaagtaattgaaatgctggagaaaccatatgctaaaaatctgtatcatggtagaacatgatgtagatttgttgaatgctaaaagtgttttttaagtatgtcattgtaatgtacttgaagtgcagaaggcttacagatagtctttcattgcatgcctatggcttgtgataatcttggcatagatttataacaaagtcagacagtattgttattgaatatttctaagaatttcttttcaacttttaaagaaatctgaaatggtggaaaaacactttttttgcgcttaattttttatacataaaaatcttaaaatgataaaacaagaaaatttatcaggatttttaaaggaaaaacgttcaagaaatttagaagtatattatataaatactgattacatgaatagtgactaattaggataatgatgacacttctttaggtcctaaagataaggttgtttatttcaactaaagtaatgatttttttttttaaatttttaccagtatgtaattatagttgcagagttactaataattttcaaagattttcaagtatgtcttttgggcagttaggttaagttttgtttttgttgttttgtttctgtgtttaaaaagcaacttactatgagacatattctttctcaggaacttcaaagactgttggcctttaaaattaatcccctccccgcttttaaaaaatctgtcgtttgacatgagaacagctcaatgtaatagatgaaacttgcctctagcagttctttatgcagttgatacatcagaacagtgaatagttagatgaatttcttttgggctgtaattatttaaacacggtaacaagacagttttgctatttggctctgagtaggtttgtgaaccagtttatgaccatattactgtggtacataaaatatgaaacattcttttttttttaattttttaatcttttttggcctagctccacattttacaatttattactgaattttgagatcaggttttgataaattttttcctttttcttttttctttttttttttttaaaagaactgtagtaatgtttcataattggtattgtgcaaccgatctgaacagctcttactttatatagagctgaaaatgcccagtgatgttttctttttcattgtaactaggtcctggaatatgttttgaaatggcaaaatccatgtttcaaagtaaaatagctgttgaaagatacaggcaaagttgaatcttctgtcttcctggcaaaaatggcataaaaactgagttgctagctcaaattcctgggtttcatggaattatgattgaggcactacccttgtagtggccgtttcaagttttaatgattggttatgagacatgtgctggatattgggcggtaagttgacaacagatgtatgttgacctgttaagcagatagcttgcttcataatgtgacatttcatagctcatgactttatacgtctttctattttacatttacaacatatcttgaactggttttaaaaataatcagtattgatattactagtttgaaaattgtttaaagagagacaaaacagcaatatcaaatttgctgttgggtttgccaagatgccagatttttggagtaattattgaatgttaattgatttaaaaatatttttccaatttgggtgataatattcagtgtttttataaatccatttttgttgatatggcagcatatagtcactgatgaaatttaatagttgacccaaacaagctttttagttaactccatattttcctgttttttgttttctgcaaatgattacttgaagtaatgtcattggttcatattggcaaggtattagagcatccatagattatgttcctttttgttctgaggaagtagtgtattaatgaagtggaattagagactcttgatttaatctattaattgctcttggattagatgtagtattgacagggacctgtgagcaactttcgaaacactctcctgttgaggtacaagaaattgaaagggtaggagttccttgtaacacttgattctcttttgctaggtttcttatttttattttcttttcacctgctacatgcccttctgtcacaaacaaatctctcttaaagtaaagttaactaatcggacagtatttcttctaaatcaacagagcaatacttcaagtcagctgcaatgaccctaaacgagcggttcacttcgtatcagaaagccactgaagaacatagtactcggcaaaagagccctgaaatacacaggtatgtatcctgctgaactggcatataaaaacgttgttttgataggaagacactgttaaaacaagattgtattggaagtttgtttttgtcattgatacaagtattattcctcatttatactttaaataaatatatttcaaagtcttgaaaattctataattcttgattttcagcttagttgaaactggttgttagaacttgaaatattaactcttattactttgcagtatggaattaaatagttatcaattagtttggtttttgggaggggcagtggaggcctagagttaccttcgaatttctagtgaaataaatgtgaaataaatgtttggtgagagagagagaacgaaagcatgagcattgaagtcagatagttgtgttgaaatcctgactttgtctcttcgttgcattgtgatgaacaacttaatctctggacgtaagttttttcatatacaaaatgtggataatcatgccagttttgcagggtggcagtgacagtgatattggctatgaagtatctgacttggtactttgtacacagttggtgtgattttggtgatgactgctaaagaagcactgggtagttgcagccaatactgacttagaaaggaaaggtgcagaataaaactaaaggggcactgaatatctaaaaatactgaagacaggagcaaataatcctattcatgtgtgtttgttgatgcttaaaatcatatccagtttaatcaaaacacattttttctatttttgatggctaaaataagtttgatgttttaaaggccagacttcacttctatataaaaatatctggttggagcattttaattcattctttgtgggtattttttcttaattgtgtattataaactaaattaatagtcttggtgtgctaaattagttgattgggagagaaataactgtcttaggaaaatggataatcgtgtggatgtttttgaaccaaaaagttaataatatgactaaaaatatattttattttacattaaggagaattgacatctcaccaagtaccctgaggaagcatacccgtttagcaggggaagagagagtttttaaagaagaaaatcaaaaggtatgtttttgaatgtaattttttttcgtgttaagttcagcttagttaatgatattgtaccaaatatagtttctcaaggcaaaatgtctatagatatcttctacttttaattcataactatattatggtagtgtacatactgtttcttcctggaagaaattaaggtgacactatactaagtgtcttaaatttaaaccaagagtgttttttcaaaacactaatgaaaggaaaaaaaatagtcctaagaaaagtgtaaagaatcagtgggtagacaaagggaaattataaaatcaaagatacaaattagaattttgagatgagattcattagccagagtaaatatttctcgatttgtgtgtctaaattaatatctctaggttcttcacagataacaagaagtaatccccatgctactgagcatttttgatgtggattaagaaataagcattctaagaactggtttacaaatgaacgtttggaacaaagacttgtcactcttggaatgtttggggattgggggaatgtcttttaaacatgagagaggagcctgtgaaagatattgaggggtcttggtgagaatggaattcagtggttaaggggtctccaatatactcttgacaattcaaaatgacctttgccaggtagactaatctatatcaggccataaaatgtctagtagtagaaatgtggggaaaggcagaaagggagcaactgttttgaagagattaggggacttggaagtactgcttggttccaattctggctgtcactaagtactatctacatgatatttggaaaataacctcttgaaccttgcttttctaattagaaaaatgagaatgcatctgttttgcagagttgttgaataattgggttattttgaaaataggcacgtttgttactagaagctgttatggacagtggtagtatacaagtttaatagggcatgctattaacttactagatgtggaatctagagcttacaaacaaggtttttttttgttctgttattttttttgtttttgttttgcatggggcgtattgatgttgaaagaacagattctgagtagtgaatactttttttggtttttaacttaaataatatcttgggttcaaagttgttaatttagttttcccaacagtttagtctgtcctcgtgctctgacagtgagtatcttctctcctcattacatagaccagattttgatccagaggagaaaaagtagagataattgatgaatagacaagaggatatgccattggtttttatcctcctgtctggatgaataacatgttaatatgtaattatgtatatatcgtttgtaatttacaaagtagtttcatttacattatcttgttacttgtggacttggtaatacctaggtgaataggaaggtttttttgctcttgattagatttttttctttgtgactctgggagcaaataggtgagtagttgatatcatttggagatacgtactttcagttttatgaatgcttatgaatattatagccagacttcccagagtaaatactacttattgttgaatactagcaaggatgtccacattgcttagcatcttactgatgtataatttctcttcattcctagatgcctctttccatcttcctaaattatatagtatttgaaaaagcaatggaacaagaaggaggtgaattgtgacccagttaaactaatgtccgttgcaatacctgaattgagaaagggcagtatatggcccaagatactgagtacaggattgcgaatatctttctggctttgtttctacccttgttcaaccaattggtttcattaataatattttacgtgcatgttatggaaattatagaattcttacttctgaagtttttttttttattgggttggtcagattatttgggaagagcttgatcataatgaggcttaagtaatgagaaccattatgttaggatctcttttatttaggtagaaggctacattacaactacagattataacatctgtcattgttcaactattgaaaacagcatttggaaggatgagggataataaggatgtgctgagtggaaaaaatatttgtatcatttactgtacaaaaatttattatagattgttttggataaaaacctgcaaaattctcaagataattagcttttaataatttccccagtcccactgcactttgtatacacaaatgtttagtaaaaatagtcaagtacattttttaacaaaaactaagtgatagtatcttatatgattcattattttctgatactaaaatgccagtttagaagctggcataaaatttaactctataatatgtgtatatatattttttctatttctcccctgaaatctgtattttatatctgtcttttatagggagataaaaaattaaggtgtgactctgctgaccttcggcatgacattgatcgccgtagaaaagaaagaagtaaagaacggggagattccaagggctccagggaatccagtggatcaagaaagcaggaaaaaactccaaaagattacaaggaatacaaatcttacaaagatgacaggtaattgttcaaactgactaagataggttttagcttctaattagcctttaataattgtcagcttaattgctttcaattttgactgtgtaatcgaatgtttaaatttaaacaattaaaattatttgttttacagcaaaaatgtatttgtcttttacacggcttatggtggatgaggacaaaaactttggaatagcaagctaacactgaaaaaaaaaatgacaaattaatgtgtcctattatccaggctacatcaggaggttggacttcaatgcagtgcatttctagaaacagtttgtgtaagaactttggttcgttatgcttgattccgcactttttcaactcataacacccagagtacaagaattttaaactgatatctagtggtttaacatgggagagatgggggggaggaaggactagaaatagcaatgtgtattagtctttcaaaataatatttccttggaaactgttagcagtggtaagagttaaccacaggtatgaccttttcgggtgttgcattaaatcatgtaaatttgatcatcatagagtcaaataggaacacaaagtattatagataatctttttccttgctattcattaggtaaatggtggattttgtttgtgttattaaatttatggctgttatttgtaatgtcatatgctttttatttgctataatggtactatagcccaaactataccaactattttcacccagggtgtacaaactgcagtcattttgaaacttggccttaagaacatccttactttttcctactcttctcttcctttcattaaagtaataaaagacataacttaatttaaaaatactaaagaactgaaccttattcttgacctttacagactactattttctaactggcaggccctagcatgtttttcattattgatgtaaaacacatattgaaggagaatggaaacagactgtgtcaaagtttaacacccaattattttatttacataattttattaggggatagtgttgttgacttgaaaaatatctcttctgttgtaagattcagcagggtctttatctttttaaaagtatcacattttttgttttctttattttgcagtaaacataaaagagagcaagatcattctcgatcttcatcctcttcagcatcaccttcttctcccagttctcgagaagaaaaggagagtaagaaggaaagagaagaagaatttaaaactcaccatgaaatgaaagaatactcaggctttgcaggagttagccgaccacgaggaacctttgtaagtgaaaaaattatctttgattgtttggtaggagtttatcttagagtactgtacataaggaaggtcatatacatgatttagagattgttatgtgtgtcattattcctaaagtcagagatagtattgaaacatgaagtggtgtttgaagtgctgtcttcatttagaaatgccattttgaggt

SEQ ID NO: 123007 - DNA, 1126 bp, Homo sapiens
tctaattatagcattggataccatgtagtgtttagaaaagttaaactactggtgcccaagttttttttttcttgtagttctaataaatctttcttgaagtaatccctccaattctttatcttttattctttttaaatcttcttaacagaaagcttcagggtgaactaggcattgtcacataagtccactttattctggagtcatgagtactgagagcagagccatggctccagctgtttagaaacttagtgtcctgtattgttctaggatactatctagtaccactccagacaggattgtgtatatggagtggtcagttcagtctcattttcaaggccataaagcactatgataacagcctggtaggtttattttttgttagtattgtgacactttattttatttcagttgccttatctgtagtacctttattatttatctttcttacaggaggggtaggcatttgtattgggcgtggaataacacataacatgctgctgcagtctcattgctttttctggcttctgcagctgctgccttttaggattgaggctcataagtggggcagtccgtaaaaatcttcagttgtgtctttaatcgacagtacctgtcatgcaggtgaaaacagttttagtcagggataattgacttgtcttctgaatactgatttgaaaaggatggtgaataatagcctttgagaaacttgtaaaaatcaaattttatctgaaaataagtaataatgtaaaattttaaatatcatattgtaattttaacctttttttgccctatcatttgattaggagaaaagaaatgggtcgctccaattctagatcacattcttcaaggtcaaagtctagatcacagtctagttctcgatcaagatcaagatctcattctagaaagaagcgatacaggtgatttaatgtgctttaaatttttaaaataattatatcagttaatacttgttgaatgagtatcgtaaacacagtgctaaaccccaaaatgtattttattctcaaagaaccctgtgaaatggatctattgttatccttattgtaagcgagaaaatgagaatgtccaggtaacaagctctagtaaatggcagagcttggattgaaatccagtt

SEQ ID NO: 123008 - DNA, 1207 bp, Homo sapiens
cacagtgcattgcagtgtcaaactcctgggctcaagtgatccttctgcatcagcctcccaagtagctgggactacaggcttgtgctaccttgccccgctaccaagatggcattatgttagctacgttggaattttctgatggaacgacatatcatatgttttttaaggctcaaattactaaaattagaattcaagtagttaaaaagatgctgtcagtttcatgatacgctactgcattgtggtttacaaaaaagttgaattttaagcttttacggttaaaagtttcctatttcctgaattagtttttccttccctgaaattgtaagtgcgtttattagagtttatggcagtgcccattatatgcattgtaaataatggttatttaatttaacataaatcacaataatggtttttttgtctttgctaggaattcgaatttagagtttaatttctcagagcattctctccaggaagaatttttacagtatctcaaagacttcacttgacttcttgatcctgcataaaaccaaggtaaaagagcattcatttttctagttttcacttttgacttttttgaggaaatgtcactactgaattgatgattcagatggagtgattaaaaatgatgtggtccgaagctttgttttttgtttattttggtggcttgtatgaagtaagtcagatgttaagttagttttaggaaaaaggttctttttctgtcttcttccaggttgtgctcctgctttttctatttctataaacacatctactaaaagactcaggacatacaagatagaaagactgctacttaacccatttccctaatgtaaacaagaggagattcataacttgtttctctctactgtagtgtttaggtaattcaaattgattgctaatgtgttagatgtattaagtgaattaagttcatcaactcattaagtccactacaagtctgtgaagtaggtactgttattttcttcgttttacagttgaggaacaggctcagagagcttaaggaatttgaattcatgtagtttaaatgcagagaccatgttcttagctttttccctgtttttgcagtagagcagaagatatcaatccatttcttttggactgctaactatttgataggcatgctttctttccgttagtttttgaagtttcaggtgtagcttaaagcaaaacgcaaacctttaaaaatgaactt

SEQ ID NO: 123009 - DNA, 2121 bp, Homo sapiens
acccgcagcaaagtgcgttgagtaggtctaccccttttcgcgtggtctttaaaactgccctccggcttcagaccacccgtcagttaatgcctcgtttttgtgatgctactaggttttagtgctctgttctgcctctcgctgctgaccctggttctctggagttaatttcggtacccgcggcaacctgctgttttgaagcgagcgcgcgctgttgactggtgctggttgcctagttacggttccctagcgagaggattgggtcttagctggtggttctgagcgtggccctgccccatccggctgaaagtgcggttcttcatgagtactagcgaagccgagtcttttcaagtgattcagcccatttagtcgtgtcagaaatgttgcagccacgattggtggacagctggtgtgagaaatgggtgggagtggcgaattggactttgccttcattttaaattcatgagttggcttgattcgcttttaagatttatttcttcagaatcaagctgaagtaccagcagctactttgctacctcagacttttttaaaaagcattttagaactggaaacaaattaagactgaagttgaaagcaagtgtggctaacactgacgaaaaagatgagctacttcagacttgtacctcactgcaacagcctcttttaaattttttggtgttacaaagcaaaacaaaatttcttgttcctcttgtgaattctcatttcagttcgactttagttggaatggttaggatactgttcaggcagtaaataacctttacgtaggaaaaactgctacaaggcttttgtatttttgtttgatcatgaccaattcaggataggtaatttgatgggagggaaaaagtggcccctcggcgggagtttgaggctgctgtgagctgtgctcgtcccactgcactccagcgggggcaacagagcgagaccttgtcacttaaaaaaggtagctcatggtaaacaaccttggagcaccttctcttagtgatttcatgtttcaaccagtacattgtggtgaatactgaaatatcttgtttaattcagataattaaaatggtggcaaaggaagctgtttagccagagcccttcttgactttgaggaacagtggtagtataagacttgaagacagacgtgtaaaaagtactactcactggtaggctcaggtctggttgattgactgattcttgagacggaatgtcgctctgtcgcctaggcaggagtgcagtggcccagtctcggctcactgcagcctccgtctccgggtccaagcgattctcctgcctcagcctcccgagtagctgggactacaggcgcccgccaccacaccgggctaatttttgtatttttagtagagacggagtttcacaatattggtctcgaactcctgacctcaggtgatccactcgcctggcccacccaaagtgctgggattacagggatgagcccctgcgcctggcctcggttgaatttattaaacaacttttgtgggcagcaagctgtacgaggttaactatgtgatgagaagacttagaaatggagaaaagttttatcagttctacataggacttagtttgggagtttctggaaactacgttggaaatcagtagttgcacactagctgaattcagctgtgtaatttacagtgatttgttatttaccaaataagtagaagagggaattaagaagctaaaatctctgggtacttgtttgatatgaatttgttaattgtttatactcaggtaataagtgttacctcagtcatagcatttaatattttatctgactgtccctaaggctgaaaaccaacgaatatactaacacgaagataatactagattatatttgtgtaatattttagagttttcaaacactttaattttatttatttatttttttgagacagagactcgctctgtagcccgggctggagtgcagtggcgccatctcggctcactgcaacctccgcttccctggttcaagcgattctcgtatctcagcctcccaagtagctgggactacaggcgccggcccgccaccatgtcctgctaattttttttttttttcttgagacacagtcttgctctgtcgccaaggctggtgtgcagtgg

SEQ ID NO: 123010 - DNA, 2886 bp, Homo sapiens
cctttaatttctttcagcactatcttctagttttcagtatgcagatctttagcctcctttgttaagttcattcctaagtactttattcctttggatgctataggaaatagagttgtttttcaaatttccttttctattttacttaatttgaattaatttagatttaaattcaaataggcaaatgtggttagtggctaaatttagaacatcttcatcatatcagaaagttctattaaacagcactgcgttaaagtatctgtcagtgaatcgtctctgttggaggatatttatactgtattctaaacctaccttaattataaaattaaagtccttttcctgctgatatgttgcccagaccattgacttgctgagtatgtgttccccctcagcattgtggaaactattaataggaaagatgattgtatagatggtgggctattaactcagatcaggatgagaattgggagtgcctttacatgtgtggtacccaaatgggtggttggatataagagtaacaaaaggactgaaaggtttaaaaaagaaagaaaaaaaaaaactccctggttgggagggtgttaagtatcgagtgtttttccaaaccattcctcctctgctcacctacccctaggtgattaaaggagataacttttaaaaaagaaagaattggctcaaaggtactgtaattctaggattatatacctttatataggttcattccctgatccctgtattatcaaggcacagataataataatccccaaccacccccacgccacatcaaaaattgtccctcttgagtctttttcccatttacatcacccattgatctgatttcagccaaatcaaaatgttttgagaaaaagaaaaaaaaagaagggctacttgaggtacttaaccccagtctcccctgggaaaagacctgggcatgccaccctgtacaccagccaggagtgccccatatggtggctgcagcttttgatacccaaagcccacagcagctctgtgaggccccacctcctacttttggggacctaaaatgggagaaatggtggttgagcagctggaaatgatgcagagctggcacacaccttgtgaagctcttctctgcctctttcttcattttttctgtttagaaatcccagggagacaatgagcattatttgacacttaaatgtttttgctcctctgataacccagaccatcaactaggatgctgctaaggaaaatggagggaagcaattaaaagggacactgaggggaacaaaagggaaaggaaggaaaagaggagtcgatgcttgagccaggcagaaaaggagagaagaaaaggtacagtactagttcatgtgacctggggctagataatactctgccccttcccatgtacgcttgcagtctgccctcctgacaggtgttcacataggtgcctccagcacgtgcccctcccacctgagggcattgtcaggtttcagatacttggaatgggtctgttttgctctgtacaatttttgtttgtttgttttggtcttcattgactttagagtagtggaacacttctctgggcttccctttgcccattttgacttaggaaagtgtcatctctcaagctgaattcctagttggcaatcagggaggggtgatgttttggcccaccttcagatttcagtttattcctggtaaggaagagcaaaaaaataaatagctgaaattcctcactttaaacctgacttttcttcaaaatcacctattgtatcagttatctattgctgcaagaggacagtaggtgaagaaggacttgattccattatacaacatcaatataaaagaaaaaaatgagtttatgtctaatatagcaggcatataatttttttaaagactgagatatagtgtgtttggggggaaaatgttgaagaattaaaaagaaaaagatgtgttttaattaaaattttttaaaaaatgaaagtaacatttgacatttgtgggggataaaccagaatgggacgttttgcttcaggtaattaattttagacacaaagtataggtgctttctaaaagtatgtacacacatatgctttttgacaaatatgactccaacacatccggaatcaccttattagtgtcacattgtgttaattcagttatactgttcagtgttaagctaacaagggccttttgttgagatggaatgggtatatgtgacatagctaagaaaatttcttaaaagtcattcaatggtttctagctccactgttgagtattgtgagtgtgtttgcctcgcttgtggaaaaatctaactattgagtttctctgaacttagagctataaaaaagaaagagagagagaaaatgtactcttcctcacatctggcacccgaagggctgtatctccatctaatcccaaagcaagacaaccagctcgctcccgactttggtaagtgaaatataagtggctggctgggttgtttcatgttagagaattagtagctctctcctctgaaagtgaactgttcttctcatgctgtttggctttgacttagggaatagcattcttcccaaaaggaaagaaaaaagagaaattggaatggttccctaaagcaactctatttctgtatctaccacataaaaaacaaatacacggagctaaatatctgcattctcttccatcgagtcgtgttctaggttctggcaagcctgttctcatgtgtccccttttgtctgccttgtttgtttgtggcccaggcttccgtccaagtctcttcctcatttgcctggcacacccagaccgacatcctccttgccacccggctcagtcaaagctgctcctgctcaggtccggcccccatcccccggcaacatccgccctgtcaagagggaagtcaaagtggagcct

SEQ ID NO: 123011 - DNA, 1013 bp, Homo sapiens
cttgtgtttatttggtgtcagttgaaagatataaaccttgttctgtggtctttagacattgtactttagtcttaaaggactcaccagtgaactagaagatctcattgcctctctccaggataacagtatgacccttttgatgaaaggctgaaacagtttcttaaaatcgtaacttcccagagcaattcagatttataaacctgatggacacttaaaaggattttgcttaaaggataattcagggttgtgagagcttgatggctttgcctacagcctgtttttctttcaagctccatcggcctttctggaatcagtgtttgattcatgattgagtcaggcctccaaccctctaagccacaggtgaaacaatctttgatgtctggaaagttttaatttattagagtgttggtgtttcagagatcctccttagctgtagacagaaagccgtagttaaacagaacaggttggccccaaagttgggtactcactgggcaggggaaaagagcatttaccatggaaaaactatcttgttctgggtaaaaacaaaaattaacactccttgagagaaggttgagggccacctgtggctgacaggttaaatgagagatttgtcatcacatgatccagagccttgttttgttttgtttttattaccttcctctttctctatttaatcacatagctgtctttttacctctttacaaccaagtatttaggcaaatactaacagaaaacgactcagagtcatttataccctggagctgcactgtggaattcagtagtgactggccacagtgagcacttggaaagtggctactgaaactgacaagctaaattttaagtttttaaaaaatatttagttgtgttaaaaaaaaaaaaaagcatgtaacgtaaaatttaccattttaatcattctaaagttcagcagtgttaagtatattcatattgaagtgcaaccaatgtccagaactttttaagtcctgcaaaactcaaactctatacccattaaacaa

SEQ ID NO: 123012 - DNA, 1901 bp, Homo sapiens
tgccaggcatttaatgaaagagtgcattaataaagatgcaatctgattgactttctgtctgtaaattaaacccaaatagcaaatcttttttcaactctataatcctgaagttaagatcaccccaagtttgtcttgtgaacttttgagttaagttattaatcctcttacattcagctggcatagtggtttctttaaagggttgctacaaagactacagttgagaagtccttttataaccatgtccaaatacatagtattctctatacttgtgtttaattgtcttatttttgctaggaaataaaatttctgaatgagatctgaaaatggaccttagaacctgaatactcacacttttgatacctatgcagtgttatatgaatttccttaaacccactgttgtttgcaataagttgattcatgacagtgttccttggaaggtaatggtcagaagctatgtagtttttcataaaatattccatcttgagtaaaactgtaaaggttcttcacggttcaaccttacatttggcagatctaacatatttctgttctattcaacattttaaatagatatagctaatctccccatatgctctaatgctgcttcttatgaactatcaaatgccttggcttttgggaaaacccggaagcatgcatttggtttgcctataaataaataagacatgtacagaatattttcctggaaaagtattacttatcctcgtgacaagtcttaacacctggtaagacttgttcacttaacattttttaagtttggttgcttttttcccctgctggctgttgaatttgaatcctgaaacagttgtagtatatcttgcttgcctgcttgcacgcttcctctctttccaccttttgttccatcttaaagctaatttaggaaaagtctggttataaactagtctttatataaaaattatcttttatcactaatgtagttttttttccagaaccatcagctaataggaatataagaccattgctctccataattactggattacttctacatctttcattagtatttaaagagccaaagagctaacaatatattccagattttttacgtggacatgccttccttttggactcatcataaattcataggactgtaaggacagttgagtatgatggttctgggcacctttaggtaataacatcttcttcctacttttctctctatctctgctttgctccttttcctgaacctgcttttggctttcttcaactgctcctctggcactcttgtgtgtaaaaccaatcacctgcaccctagttatccccatttgtcctcgttcagcatcttgcagccccatcatcatgccctacaaagctgcacactctagaaattcgatggatcgaccaaaactctttgtaacaccacctgagggctcttctcgcaggaggatcattcatggcacagcggtgagtagctgttgggagcagctgggcaagtctgggagccagtgctgttcctgtgcagactgtacatgaccctgagctgtggtgtgggcgtaagagggggagaccgtgacatccaccatcccatctttcccattgatcatgaatctggctagctgggcagtagtgtcccctcacttcctcttcacttggggattttgctctccctaaacatttgaatttgaagatgaaagctgttctttgttcaagcatgtatgagtggacgccctaccctcctggagcgtccatacacataagtacaatgccagaatactttcatttttgaaagtaggaaaaccaaatggcctttgaaggggaagtgggcttggactgctgccttggcattttatttcaaccatatccagaagctggctgaactctaaatgtggttcactcaaaagcaagataaagaatttttatcctgc

SEQ ID NO: 123013 - DNA, 1073 bp, Homo sapiens
ttagttatactttattatctcattagaaagcattcttaccagattgttaaattagaggaccttatagacaaatgggtcaagcaggtatatacatcattattagattgtttgagctttctcagtcctaaggcataggccttaaagctgagattaaattgaggctccgataccatcagggctcatgttctgctgtaatatatccaaagagctctactagttattaaaaatactgaaatatttccatatcacttttccaagatgtgcttccccgggccctccaaagccaagggaagccagtcattagtgtagtgtctgtgccttgtcagtttttaaatattttaattattacacctgaatatggtgttacatggactgataagattactttggttaaaagaaacctctgattatgaaaggtttctgtaattgctggaacagaatgttgccactggaaatttttacattaaaagtatatattattatctttaagctatctgcttaaccaactttttctcaagaaagaatattaggaagttggaaaagagtaagaaaaattgcctactttttgcttaaaatccatcaatacattttttccccagaatcttcatcataggactcagaggtagacctcgaaataaattctgctcacaggcttgttctgttttacctgagcagtgttgtttgttcttgttttaattagaattaattgccaacacttaaaatatagaatacttcatgtaacatttcagttttctacttctaaagaaaaaatcaggacctggcaacatgtgtctaatttcttcctggcacctattacctgaaatggaatagtgatgtcacgcttatgggaggaagtggtaaggcaggtatccataaagtttgtttagccccgatcatttatttatgttaacttgcatggcccccagaggcctttgagtttgcctctcttcatctgggtggcctataatggaaattgtcaatatctcaattttaagtgcttaaataggatcgatgccatagcgttgttccatgagagttaatatctctcccttcggtttggtaatcttaaaatc

SEQ ID NO: 123014 - DNA, 1176 bp, Homo sapiens
tgttccttcttttggagatttcaaaggcattcgcttttatggtcctcttttgcttcatagtgtgcctccactattttagaagcccttcactggccttccttttgtcttcatccacttgtatccttgaatttccatggctgacaagctggtgaaataaatatttattttatcctttaagagaaatgaattttatttctaagcctttaagttacctttaaaatgtccacttagaaaactgtgttattatgacagatctagaaatagagcagaaagcatccaatcctagtttttccttccatcagtgaactaggaaattgcaatcctacatgttggctgtcaattagcattatctccatttgttttagatccagacaggcggtcagtttccaccatgaatctttcgaaatatgttgatcccgtcattagcaagcggctctcctcttcatctgcaactttactaaattctccagatagaggtacagtccaaaggaaaacaaaaaagtgtctgttatttacttaatgcttttttttctggatgtttacagataaaaataagcatctgaagttgctttccctacgtttcttaaataggaagaaaaaaacttcagagtaaaaaagcaataaacggctgagcagcattttccttgcgacaagaacatttctcattttagaacttggctgagtgattgcatttagcagtgacgaaagcggtgcttctctcaactttttagtaaatgagtttacagctccagaaatcacccacttatccaccaaaatgcaaataatctttgttatgaacatttcttttacttcaatcatactgtctttggcttttcatctatctgtactttgggaattccaggctctgactttctttaaaaactttttaaatgattcagattggtagattttattttgccaatttacttctcatttaaccaaattatttcttactgcatttcttatgtgtgctgttggttttttggtgtccattcattaactcttgagggatctggcctaacttcaagaaatcatcataattacagcctcctgaaacatttaatattcatagtcctttattaacatcttgtttgaattttgagttttattcatcccatggatttacagtacatgaatgttgagttatttataaagcaaaagttttgttttacatag

SEQ ID NO: 123015 - DNA, 1030 bp, Homo sapiens
tacaaaaactagccggctatggtggcacatgcctgtaatcccagctattcaggaggttgaggcaggagaattgcttgagcccaggagatggaggttgcagtgagctgagattgtgccactgcactccagcctggctggcagaatgagactctgtctcaaaaataaaacaaaaacttgatacattaaaaacttattcttttgtgtgttttgttcggtgagaaaaagaaatgaataacaactgtcttatatattaagtaataaacaaattcatggtgtgcctccataattttaacaatttatggcagatttagatgctttactactaatgatactttttaggatacaaggatccactgtaactcattttttccacttactctgaagcagaattaaatgtttttaataacctgttgagaatctgcctgaggataggcctgcgtgtggacacaattttcccccaactaaagcataacatataaagcaatatcagaaaatgtactgctataaaatcacctggaaatgactttcgtattcctcttcctaccctgtacctcacatgtcatcactaggatgttccttttgatgtttgaccctaaatcctttctttatgtttggattgccctaagagtccatcagctaagtataaatttgaggcacagaagtggttttttttttaataataaaattgcttcagccattaaaatgaatcccagctgaagatagaaatgactgatgttaatcaaagacttgcttattaccagtgtgctataaatagtagtcaaaaatacacagggaaaagtttgcagcaattttttcttactgccaaggttagaccaacgggtactgagttttggaagcatctcccacaaggagtatttttgttttagttttagaagcaggtaacaacagaaaaataaaacaaaatacagcaaaaacccctttcactttggctactgtagatcagaacatccacctgcctcctggataaattaggaataagactttttagactttcattacatgcagtgtt

SEQ ID NO: 123016 - DNA, 1260 bp, Homo sapiens
ttattttcctgaaagtaacagggtgtttccttctttcttctaaatctatgtttgcgaaacaaaaatcctgctgaaataattaaacaacaatgaaatgaatctttcactatttgaggataagagggtgatggagataagaagtaagggcctctttcccttaacacaggccaattttctcatgttacaaaattccttaaagggagaaatctatgtagtgtttctaaataaacatgctagcttcaacactacattattttagtcttctatttgcattagggtttcaggattatggaataagttaactagttttatctttttctctggaaggattatagttatattgactgaccagaatcaatactatgagcttatgtattctgaccctaaagtatatgcaacactaatgctctgtaagaaaatatataggtttattgagctagaaatagtaaatgactaagctatttcctcctttctgaatggacataaaatcatattgaaatttggatttactgaaaggctttatttttgtactgtaaattcaatacccctggaattttacatagtgtgtcagtttttatttttttatttgtgtgaatctgataaccttttttttttaaatttgctttgaaaaatcattgttttacattctgtctccaggtggttttgttgaatcatcattctcctctctggatttagcaggcctggaccaccacttcataacttttggtggtactagaaaagctggtacagacatccctgtgattgccaattgcctgacctgtagctagcacctcagacctagggccgatgcatcaatagctgaagcatcaccaccttagtcatcaacgcatgcctaataccctagcgcatagacgtagatctgggattggaacagtgtttcttaagtgtgataatatgactcaggtgacttaaaggtgttgaaataaagtaattacatgtggaatgtttgctttccctttaaacaatcattttggttttctatttatgttttttatttcttttttcaatgtcaggattaaacctttaaaaaatgttttttagctaaaaaaattacctgggatcaaagtacttccagtttagcttttttccccgtcaatcattactgctgttgccacttttagttttaagctaaataactgtggacctctttttgtttgcttattctgttctctttcattgttaacattctatagatctcttataactgctttattaaaattaaaaatctaggatcaggtg

SEQ ID NO: 123017 - DNA, 1037 bp, Homo sapiens
acctgatcaactgtctatgaactgtgctttatagaagctataacagcagtggaaattttttttaaaagaaaaaaagtttaaaagcagacacttaatattaaggaaatctttggactgtgcttaatttgaaaacaaaaaaaaaatagttggtaatgtcaactcttaccaactttcaaactttaaagttttcaagttaaaaaaaatcggacaccattccacaaatgctggcaaagtaaagtttaaaatgaatagccagggagactggttatttactgttggatgtaggttgaaaataacattgaaatcattaaagattgttttaatccacgtattttaaaaagcaaggtagagagagggagaataaaggtctgattattttgttcttggtgttatggcatatttgtactattttgcaaacaggaaggacttattaataactttctgtgggttaaatctctgagtcatgctttgatgcttttatagtaggattatgtcatgtggcctgctttttctgcattatccttcagtttttcacaaaatcaggcataattcttcatgtatgagattattctgtcgttgggcacttgtactctgaaagctttatttttcttccttaaacgctttatacgtagaaaagtctctaaccaccctattccatctgattctatcccctcaaactctctctcttgacttctgcatgtttttcactctctctcttctaagcttttattttttgttttccaagggtggggtggagaatctcatttgttctcacaggttcactctcctttttaaatattgattccacatttccagctactcggaaggcagtagatgcctgcctgtttcccgaaactctacttctgtacaactaaattgttcattttctttcactccaaaactgactcatcctggtaatttctgtgtcccaattaattgcaccaaatgtttgggtttttttggccccaagacattatttatttccgtcatttttgatgcttctgctagagaccctaggttctttctgactagtagct

SEQ ID NO: 123018 - DNA, 1071 bp, Homo sapiens
atgtcattccatacactttctcagtgactccatgtctgttctcagcagtgaagggagaacagaggccactctgcctgactgattttaaatgatcgcctttttcagatgcttttagtatggaaacaaaatcagccataaccttcagggttttaaatgtcactgttaatgcatcaggaagcccaaagacagacagtctggagaaatagtatgtaatgtttagatgattttggtaaacagctaagtttttaatgtatgtttaatgtgcattctgtttggggcctctgagtttgaatccctgagaccgagctgatgtttagcaaccatttcttaaccaggaaaagcctcccctactcccagcccatagccatttgagcttcactggcttttttgaacagaagcatttcccagtttttgcttggttcagtgaacacggttactgtttaaaaacagtggctgtcgagttgtatgtctcaccaccctttgctctcctcttgagctacctcaagctgtgtgagagataatagttagcatgattaaacggccccttcactgatatttggtctttgcctggctgagggacacaaagcaagaagagggagacatgcagatatgttgcaggatattcaagaaagaaggattttagcatggaagacactaaactgtactgtaagttcttgggctcaaaatgtgttttgaaaaccttaataaggacgttcaagaatcaggcaatctttaaatccattttgacaaattaatacttataacaagtggaagtacagagtaggaaatcttctaatctttttttttttaatcattgttttaatgtccttagaaaaaggagtgggaatttaattaaataaaatgatatttattatataaactatggatttatacttctaccttcatgtcctagagccgtttgatagtttccatgaaaattaaaggcaaaccatcatcattctctattttccatacttctttctttttttgacaaaaacaaagtgagaagctgaacagtagcaaactagacaaacatacacaattatgctgctgtccaaaaaaaatttcagt

SEQ ID NO: 123019 - DNA, 1127 bp, Homo sapiens
catttttgaaacattcttctgcaatggttaagatgggtatccacttatttaggatttcttcattaaggattcaaacatacttttccacctctccccaccacttgtcaatgtcatgggcaaagaaatggtggtttattttatgtttttgatttttcaatcctgccccttccataggtggtttatgttttagtttgcatttatttgattactggtgatgttacatattttgtatacttgttagcactttcctttcttttgtcaattacatatttcttctgacatttttattgggatgtttaaccttttataaataaagtttacttaccttttgtcaaatgtgttatagatacttttccattttaacatttgccattttgtttatttaaatttttgttgttttgagaatgatgatttcagatatcttcctattacagagagttgattttgggatagccttaggtggttcaatcagatccgcaccaaaatggtttcaaatacccaagtgacctgtaaactgtaaattcacaagacccaatgaaccctaaggtctgagctctggggcataaccacagcctcaaagctagggcaggattaagccagctcagatgcactcagcctgcagaatctaactaggtcagtctgctgtggctctctgagattgtggggctatttttgtcagtgtctcttctgcctatgaaaattagaattgaggaaagctacagatgcttcccatatggttgctattagtgaaattatatacagagaatttaatttgaaaacagttgatacactcacattatttagagacttaaagggctgtgaaagatactctagctatcacacctgcaactctcctgtttgcagggagccttcatcttacatgtggtagccttctgtcctgttcttgcttttgccagggaaggagccttcattctggtgttcatgattttgccgggcacataatgtagatcttcattaaggattcaaacataattttttcacctttctttcccctccccacatcacttttatttaaatatatagctcctagattttggcattgactttagtgaactcagcagatagctgctctagttcttcctgtatctaggatttagagaattttc

SEQ ID NO: 123020 - DNA, 1143 bp, Homo sapiens
ctggaggagacactattattttttcttttataaacaaaagtagaattttgtgtgataagttttttcttggagcatattgtcttcataaaataaacatggaaaacatattgttttcttctcctacagttgatacccaaaaaaagctttgtgaaataatgccaagatagtgtcactactaccataaaactttaaaaagtgaataaaaatgtgagagaagttaacacttagcatatggtttttcccaaaactggaaaagcttgtacaagaatattatctagaaactacttaaaactttaaaaagtgactttgaaaagaaaatcgtcatagaaatttgccttttgtaagatgttacaattagctaaatatgaacataatgtgaaagtaaataaagcataagccgccctttcgcaataatactgtccttttgaaattttttgagaggcccttttcccagaataagtatgactcttaacagaggactttccgctctgtatattagcgtatgaagtgcgtgtccatgttaatggtccaacttcaagcatcttttgtgccatcattaacaactggaacacagaaaattgtgaacagaaatcgcctctagacatctctcagttgttaactgcctaaatattgtgaatgtaacatgcatttttctgatgagaaaagaaatacaatttttttttttttcctggagatcaagtcatgctctgtctcccaggtgggagctcagtcgcacgctcatagctcattgcagcctcgaactcctgggcttaagcaatcctccctgctcagcctcttgaatatctgggactacaagcacacaccaccatgcctggctaattttttttttctttaaatttttgcagaaacgggatctcgctatgttacccaggattcctggcctcaagcagtccttccaccttggtctcccaaagtgctgggattacaggtgtgagccactgcacctggccatatttatttagaaagtaaaaaaatttaaattgtttctaaatcatctataatccctaccatctctgtataactatgtcaacattttggtatttattattctggtctttataaactctatcgtatgtgtgtgtttacaaatctggcatatcattacatatatgattttacaac

SEQ ID NO: 123021 - DNA, 1024 bp, Homo sapiens
atttttttaacagtgaatttttctgcacaagtatttctatcttgcctagtcagagatttctccccagaaaaccatatatcttaccccaaggacaatataagtaaaatatgtttgctaaaataactgagcacatcagtgtaagtttttacaataaataaaagactcaatgttacaactgccaccaaatctgttactaaatctgtcagaattctaatttagctactgcatatcacaccctatgaatgcagcctttcttgtagcaaatcttcacatttcccatttctgtttcctaagtaacagtctatttctaggtaggctgcaagactgaaggcacacaactcagcacgcttggttctactaattcgttgcaatgatactgattgcctgttacactaagataggctatttccagttatcttccatgtcatagatttcagcctctaaaaaagaaaagtggttttatatggtacaaataaaaatggtaaggtattaagaactctaaaggttgtaattacttataacctgagaggtcggtaggttgtgccttccccattttacagacatgaaacctgaagctcaaagcttaaataatagtctcccattacagctggatttcaacttacgttgccttgctatagagtactatagggtgttagagtctaatgccattcttagacttatggggagataaaactgcagatgggaagcctttatcacatatgtctgagagttttgaaaaataattgaatcccaatgagaacgatacaatgctctcggtatgggtttttcaacatgtttcataggaattactttgcaaaactttgagataatcattgtagaattatgacttctaaggggagggtttaactgacagatggtctcttagtctcccttcttcaaaagttgaaaatagaagccaggtgtggcaagtgcgctcctgtagccccacctgatccagtgtctgagacaggatcccttgagcccaggaagtccaggctgtagtgaacaatgttcaagccattgc

SEQ ID NO: 123022 - DNA, 2497 bp, Homo sapiens
ctttctcctcccatcctgctgcgctgccgctgagaggaagagggagctgcccagcggcctcacgctgtaaccctctgctggtgagttcccagaacccagcatcctgcaagctgccgcttctcagctggggagatggagccgctctgggcccttcttgattaggatatgttagggttgtcagggcaactgttaacggcagcatatcatattttcccctctctgctgtgggctgaatattttactgtgtggtagcaggaagaagattggaaaaaggtgctgcagcaggaagaagctgggatctgattgaacaggttgtgcagtggtgggaggcatcagaccctgcgtgtctgtagtagggcttttctggaaggagtgtgtgtgtgtgtgtgtgtgtgcgcgcgcgtgtacgtgcatgcatgagccggagcaatcaccagcgcatgtgcctgtcggggagtcagtgggagggggctggtaggggaggtggggaagctgctgctaggtgaggggaactgcagggcctcagttgccaagtggctggtactatctgtcagctgtttgcaaactgtttacccataggggatctattacaagtgctcaaatgaacaggcagcttaggaactagcagcttcctgggagctgcaattacataagcatatatttttaatataatcacaattaaaaaaaaaaaaaacaagtagcagcggtatgcctggatcagctacagctctccgacatgagagactgaagaagaccaatgcaaggccaattcctcttggtttattcaccattaatgaggaagacgaacagcaaaagaatggaaattccagaagaccaaaaggtatgcattagctccaccctttggtcggagccagatccagcccttgtctcccacactgcctatagaacgttttataaactgtgctgctcgtgcatgctccagggagtgcttgtgacctcctagcacggtttgctggtagtgtttataccctctgtagggttgtgtatgcatgaaatgggaaacagtttttgtagattcggtgtatttcagatcagttgccttttttgacttaagctactttcttggcctagagatgtttaatttttcccatgctcacttcagcagtgaccagtcactctgtcctcatcaagaggaggaaatactgagttatcaaggtttaaacgaacatctccccaccttccttaggtgcctcagataatttttgcttattttaatgaagtgagtttctgctttaaaggatgagttaaagtgactcaagagtgcaaccttttctaggcagagggtcaaaatgtcacttccctttctatactaaaatgtcaagagtaaagaggagcacagcaaacattgagggcgaatgtggagggtgaagctagggagcagggaggagatcatgaggttgtataactgttgatgataactgaattcgtgtatggcagttgaaatgcacaggttacagaaaagggaagtctgacccttgtgttgttctttcacagtatgaaaggtagcagcagcttaccagcttcttgagagcctgtgtactgcatcattgtcagcattgtctcacagctgccctcccagggctgtaattatcagccagagacagcaacatcagacatttttgaaaaaggagctttaaggcctgtgttttacattttccagcatcctaagtcttgcttccccttccccaaaatatataagctgttcttaaacagatgggttatgagttttcttgcttttatgtgctgattaatttttagcttgctcttaaattattctgtcactgaggtatcaaattttcttctgtgatgcagagaggtagcatgacaaagtagaaagcaaatatttaagcaatgataaagtgaagagtgttaaatagaatccagtgtctgaggactcgttttctttttcctgtttctcgaattaatcttactttgcttttcttaaatataattgaaactgtctacattaaatccaaaagcatattacttcatttttatgagacagtacacagggaagttctaataagtagaatcttactactgtagttgatttttatttactatcagacctggctcctgtctgagaaccaaatgacctcagaaatcaaatgatgctatgactggagggtgacttaatgtgattcttttatttgcctgtgaattacatcattgaaccagagtgtgttgctctggatgaaaactcaggactttaaatttttagcagcaaatcattttgcctctgaaaagttggtaacttttaaaattaatgtagatttgttgaattgttctcatggggtatttttggaaacattcttgatttgtggtacttttccttggatgtcttggacagtaacttaggatagccatccattttattcttaataattttcttttcttttcttttttttgagatggagtcttgctctgttgcccaggctggagtgcagtggcacaatctcagctcactgcaacctct

SEQ ID NO: 123023 - DNA, 1004 bp, Homo sapiens
ttcacctctcttgtttctcctcaccgcatgctgctgtgcccaaggcccagctggtaacctctgcggtttttaatgtgcatttttttctcagcaggattattcaacttgtgctttgattatcacctcaaattgtcatctctggctctacacactgaaatgtctacaggcacttctggttttgtttttgagacagggtctcgctctgtcgcccaagctgggatgcagtggcacaatcctgacttactacagccttgacctcttggtctcaagctattctcctacctcagcctaccgagtacctgagactacgggtgcatgccatcagcctggctaattttgtttattttttgtagagatgagatttctctatgttgcccaggcgggtttcaaactcctggacacaagcaatcctcctgcctcagcctctgaaagtgctggaattataggcatgagccaccacacccagcttacaggcacttctgagttgcattcgtgcctgctcctgaggttttgtggtgccatcttttgtgatttgaagctttttctgggagggcttacctttggcagcatgatttcctatccttttctcctctttgcagctagcatatgtctaactatgaagtccaaggcaaaaatgaagaggtcagtagtggatattggatgggactgattcctaaataagagtatctttgatttctctttaagattatatggaaactgagcatgtgtgaggctgtgaggtctgaagctcaaaactaacactaattgtttaggggtaattctaacctactattttgtgcaaggtctctggagtctggctgcctgggttccaatctcagctccaccacttggtacctgtgggatcttgggcatgtcatgtaagcattctcttcctcagtgtcttcctttttaaaatagggtattggtaatatcgtcacagggattaaattagttgatactaaagttcttagaacagtgcttgacacagcataggcaccaagtgt

SEQ ID NO: 123024 - DNA, 1024 bp, Homo sapiens
agtttgtgctcaaaaataaactttctagaatctgcacgtgaacaacttgttcagacataagtgaactgactacaaactgtaggatattcagtgcctgagcatgttaaggaataggccgtgcttccaacaattaatatacaaatcaaccatgtgcctgtcagtgtaatattttcttttattaaaaagggagttaaattggctgttatctccttcatagaaaacatttcttccacacttttgcctaaaaacttcattttccaaaggacattttttatatatggtcttgaataattatactttataatttcactgaaaacttaattctggccccgcatctctttcctatttttctaccccaagattactattaatgtttttagtgttcagaagcatttgtgtcagcaggtgccaaagaaagaaggaaggtgtaaatgtatttttttgaatctaggtggtagttattttgagagaacaagtgagattgtttgaatttcaacaacttaagttattccatatatttaaaacacatgacctatatctgaatatgagactttaatttagcacttcattctggtgaacatatttcacattatacacatccaaatactgcaagtctcatttttttaaacaatcagaagtttgtatggaattgttgggggggtgggggggggtggtggtggtgggtggccgtggacagagaaactattaccatcaagagttgaaaattgccaccttaaatggcaacatttcttgagggattaattttatttctttttagaactcattattatgaggtagagtccactcttaaataactcttagtttttgggtctctatacaaagactggtctaattttagggcactttagatgagaatatcaggttattataaaaatgatacctgtaatgtgttcagaattatatgtgtgagtgtgtgtgtgtgtatatgtgtatcaaagatgaattgacagtggtggcgtgtggcctatgaaatgagaccgttcttaagcatattgaaagctat

SEQ ID NO: 123025 - DNA, 1028 bp, Homo sapiens
tacgaatttggaggacacagaaccataatacctgggaaaatgtgttccctggaattctgtgtacaaacacaaggaagaatccccttcccaaatatgcaccaggagaaaaatggatttccctcagccccaagcttcttgtggatacaacctcccacagacacactcagtccctggtatgacacttctcatcctcttttagttcaatgggtactgggaactcatctacctgcctcccttgccgtggcctctacctgtccttcatgatcactgtggactactgcacatagcttcttccctccctgtgtcctgaggaaatagctgcaaaaaaaggttggggctagaggagtctagccaagtttttaaagtctctcagtacaacagtttacctgttctcatcttttattgagatgtaaatggagcaaagctctctcttggctcttagtaaacaatctcagcctgtctctgccttgagaaactcactgtgcttctttgctaaacattttatcgccttaggaattccctaatgtccacctctttagatctcatagaaggagctgaaaggccatatatgtgccagtagggcctcagtacaaggagagctgaaatgagtgttttctacacactctcaaaaaccttgacttgggtcctaaaggaaagctgtctcgggcagttactctgaggcccaggaagaaggtgctctagagtgaggggtagctggcctctgagtccagggaggatgagtgtcatgcatgcttcgtggcggtggagactggagtggtctcgagccatcagctttctctctggcctttcctttggctcacggtgatcattcaaagactgagaataggactgggttgacccaagaagaggaaccaagctggatggagagagcagctgggcagcccttggagttctttcatttattcattcaacaaatacttattgagcatcagtcgaaggccaggcactgtactatgtgctggggatgctgtggcgaactgaacaaaaatatctgcatccccttgaag

SEQ ID NO: 123026 - DNA, 1031 bp, Homo sapiens
tccagtatagctcctgggccactgtgaagaaccaatgactgttagcttaaattactgttacattattaatacactttaaagagctcatttgaatgaggatttatttactatttatccctactttacaggaagtctttctgctctccttcgttccaaatggggtccattaaaagacaatgagcaaacaattggcttttatacaaagcaaatactggaaggattaaaatatctccatgacaatcagatagttcaccgggacataaaggtgaggtacaccagcattcattttcatgagttctttctttgctgggttattattttacttgcaaaagtcatattgtgttatgagtattaatttagaatggtgaataagtaaatcttagaaacagcagaaatataaaatatcgttcaaccctgaatcagttatttatgttcatgtcttaacgcttctgctcaaggaacacactgcttaactgcgttcagccaacaagattgtgctcccaccacacaatgtttcctaggagctctgtggtgtgggatgcagctgtcaaaagttaaacaggagatggcccctggtcctgaggagcttataggctggttaatctttgtatccttgcccatagtagctactcagtaaatacttattgaatcaatggatgaatggttagaagaaaaaaaattcctcttttctcacaagtatcacatattcattgatttaactataattataaggtatagattctctaaaataagctaaaataataactttacattctctttttaaaaagaaaattcagaactaatacattttttacaaagtctggactgttgaaaataagttaatattagtaccctaaaatcaaccaaaaagcccatttatctatcatgtccctacatattccaggaaaagaagtaaagaaacatagaaaagaaagtaaggtaactggaaagttatgaaaatcgtaatttaattatacatacatcattatatatctgtaaatagcaacaagctctaaccaattaggaatcat

SEQ ID NO: 123027 - DNA, 1017 bp, Homo sapiens
actgaattagtaaggtaacagttgagaaaaaaatttaatataataaattgtttgttttttgagaccggctcttgctgtgttacccgggctggaggtggagtgcagtggcacaatcacagctcattgtagcctcttgacctcctgggctcaagcaatcctcccacttcagccagagcatgccaccacacctggctaacttttttttttttttttttttttttttggtggagacgggatctcactttgttgcccaggttggtcttgaactcctgggctcaagcagttctccctcttcggcctcccaaagtgctgggattatagggataagcaccatgcctggcctataatagctagttgttaactctgcccgtagttaagttctatgattatctagcaattgtatagctttgatatttgtagttaagcctaagcctctttcattaaagatgtaaaaagatgacaggcctaatttggaaaaaaagatttcctgtgcattagcttgctgtctatagaagtaatagatactacttcttatttatgtatgttttatattttacaattttttatttcttattcaagtgattgttaggaattagctttcttgactcctacttcagggctcgtttgattataccttgttatctttgtttctgtgttaaattttgcatcacttgatacatagcaacttgccaaggtaaaacttaaagaaattgaaaatgaaacaattctatcaatcatatagaattatgaaggggatgactggaaaattcatgaagtattcttcaatgttacaaatttctggctttttttttttttttttaaaccagagatagctatcctttgtttcatgccctcctttcaggaactaactgcatcttaccaaaaatatgcatagcctagccaggctgtggtggcaggtgcctatcatctcagctactcaggaggctgaggcaggagaatcacttgaactcgggaggcagaggtttcagtgagccaagattgtgccactgcactcca

SEQ ID NO: 123028 - DNA, 1040 bp, Homo sapiens
caccctagagcagccctgctctgcagagatgaggaggaggacacctctcggaagagtaaatcattttagtagtgtggtgcaggaagtatcactttttaaagtgctatttataacttcttgttataaacaacattgatataaatgggattgaatttaaaacatttctttttcatcataggactgtagaagaattgatagttctctgaataatgcctttttgtttgttggtttcagtatttctaaatttgaagaaagatgctgctttctttatgtgcttcacaattctgatgatttccaaatctatttctgtacagaacttcattgtaaaaagtacgtattagtcattgtgtgtgaaaaagattcttcttacctgatcattattttcaagtaatgagtgaacatgtacctcctgtgaagaatgcatggctatgtggttatataaatattttatttgggctaatattttataattatatcataaatttaacagattttgggggggggttttctttaataagtcaaactttatcttagtcataacttattttcccacagataaaacattaactaagacttattggttaattgttaaatattataactcatattttaagtgctcacttactgtatatgattaccagaattttcattctcaaattcttttaaatcgtctcagtattatctacaatagtacctctttaccttggctcatattagttagatccacctggtaggctttaaaaaaacatgcatggcccccacctcagactaattatattggacgttctggtgggggtgaagcctgagttaagagccactgatctgatctataccaataaaagagatcatccaaaaatccatggactgcattgtatgtttgtgtttttctccattgtatgtttctcttgggctaataattaaattcttcttacttctttagaacactatgattgactgtgggaaactagagaagtgagtgataatttagaagccaaagtgtaggtgaaagttagtttggactcagaattttgctggggatt

SEQ ID NO: 123029 - DNA, 1179 bp, Homo sapiens
atcaaaacaataaattttaaaacattttcatcactccacaaggaaaccctgtacccattagcagccccccttccatttccctcccaaatcccccaactctaggcaaccacgaatctactttcagtctttacagatttgcctattctggacatttcatataaatggaatcatacagtatgtggtcccttgtgactgacctctttcacttagcataatattttcaaggtctaaggaatgataactcttatagaatttttatctggttttgtgaactgtctacacatactattttaaagcatgctacataaagcaacttccttagataatcagttagtcacacgtagaaatcaagcagttcttgggtttgatttgatttttggtatcatctgtgaatgagtttgctaagttttggagcaaaagccattgaaacctaaggtcagggttttgtccctacttggctttatttactctaccctattcaaagacacagactacaactctaatctcgtttcaccaacttgaacctgcatataggctgcagggaaattggaaggattgtggatgagtaagtacaaatccatcaccattattaacacagaaactcaaaagaaatccttgttagacctagtagacatacaatgggataaaacaaaaaattaggcttaggacagaggtttacagaggactctcaaaatctaattgtttctgtcctggcaaatttctctaatatgaatcaacatgttaaatagggtttttaaaaaagaattgatctatattgcttctgtaatgtatattgaaacaacaatgttttctgccttaggagaaatctccctggtgacagagcaaaagctcttgatattatgattcccatggtgcaaagcgaaggacaagttgcttcagatatgtattgcctagttggtcgaatctacaaagatatgtttttggactctaatttcacggacactgaaagcagagaccatggagcttcttggtaagtaaatagtatataaatgagctacttacttagtaaatccatggcataaaaaagtatttgcaaatgagagtgttaaagtattattataatccataagattgtgtattatgaactaaaccttagattttattttattttattttatttttgagatggagtcttgttctgttgcccaggctggagtg

SEQ ID NO: 123030 - DNA, 1049 bp, Homo sapiens
atggaggttgcagtgagccaagatcatgccagtatactctagtctgggcaacagagtgagactctgtctcaaaaacaaaaacaacaaacaaacaaaaaatcataggtacatctaatttatttagaacaatttgtactggaaacagtaaaatggaaaacaaagttttggcattttaagtggttttttgcaggaaaatttattaatatggagtacctttacctttaattctttctgaaggcagagtaataaaagaaatacattggcttctaaatttcttaataatgccagatatgtaagatatttatttaggcatctgaatgaactgaaaactacaaatgctttatagctaatgctgcaatatcattcatgtctttattaaaattattgcttttcattgaaattgtttctaatgtcaaactctttgaaatgtgtgtgtttttaccagccagtacttccgggaatctatactcaatgacatcaggaaagctcgtaatttatacactggtaaagaattggcagctgagttggcaagaattcggcagcgagtagataatatcgaagtcttgacagcagatattgtcataaatctgttactttcctacagagatatccaggtgagaagatgtttaaagtgaaatctttgttgtgtagcatgttggagggataagggagtattaacctcaaatttcagtttgctggtaagcagttcatgttactacacgtaattttttattgactctcttaagctttccatcctataattttatgatgaatgaaaaagactcatgtgagttaaccatcagtgattgtgaaagacttgtatggtaaaggcctgactttttcctccaaaagaacaaaaagaaaaatctgctggcacagcgaacctgtggacacagtctattctactgttagcctcaggcacacctgtcagtgaaagctttgttttggcaaatagcagacatttttagagctttctggacataccttttatcccttgaaattgtattgcttgaaattgatagtgctgaatctaactcgcctgaaggaaa

SEQ ID NO: 123031 - DNA, 1012 bp, Homo sapiens
ggaggttaggaataatttgctttggcaatatgagaatgatttatgtttgaatcaccatgcatacatttattagagtttagtgatgaggaaatcatggaccagaatatactgttgatatatatttgcatcattttacatggtataattaaccaaataacacacaagaaattaaagggaggctgatgaagctaaaagagtagtcatttatagtagggattgcccaactgtgaccagttcaagaccttgatgatagatgattcttatgtccttcttgaaaatttcaacattcctagctgtataacaggacttttgcagtttcccgatgttatctacttgccaaactttagaaaactgacttggagtctttaggagactctaacaggacatgacttttaggtcaaatttcagaaaataccaattaacatcttccctcaactcttctcttcacaagcagcagcaactcatgtgagatatttaactaacagataccttattatgaagggaaaattcaatttaaaaaccccacagactaccagccactgccattcgatgaccaaaatgcaattaagcttaatagcttaatgttattaccctaaaaattttattatgctttaacaaacccctgataaaccttgtgttatcctccacttaacattaactcagtcagaacaaggaaacaaattataccttaggtaaaaatgtaggagatttttgtgtctttgtctatacttttaaatgactaactttcttaaatttcttttttttttttttctttgaggcggagtctcgctctgtcgcccaggctggagtgcaatggtgctatctctgctcactgcaagctgcgcctcctgggttcaccccattctcctgcctcagcctcccgagtagctgggactacaggcacctgccaccacgcccggctaattttttttgtatttttagtagagacggggtttcaccgtgttagccaggatggtctcgatctcctgaccttgtggtccgcccgccttgg

SEQ ID NO: 123032 - DNA, 1036 bp, Homo sapiens
cttcaccttagtgggaaagctagtttctcaccattaagtatgatgttagctatagggtttttttttttttgtaggtatttgaacacttttattattttgatttgactgcaaattatcaacatcttattcaggcttctccagctgtgaagttagcaattagaagtggttgtgattgaaacattatctataattcaattttgaattgataatatataaatcaataatttgaattttgctcccataccaaatgggcatgtgtatgtttatttgtatgcataataaattgtataggaaaacgcttagagtgaaataccaaaatggttagtatctccgtgtgctagctaataacaggtcattttaatatgtatatttatttgctactaaggactaaatatattatatttttgagggttgtcaaccattaaattgtttatcatttgcctggatatagtttcattatttcttacatttagttaagaggctcacattgctactgtcatggtctatatcgacaaccaagacagtcttattgatggaaaagcaagtgcatatattataatgaaatgtggtgagaactattgggaattcaacatgaagaagtaaatagtctctccaggagtgaaaaaaattcaccatcttaatgtgaccctcattttcaaaacaagtaaaaaatctagctctcgtacagagcagtaggatccaattaaatggtagaaaattgcccctttgtaatttagcactcaagctccttctcagaagtctggtttatttatgatgacaggcacaaagggaagattcagagcagtttaagaaaataacttatgtagcactttttctaaaagtaagctaacataaaaactcactcgagaatccaaggaaaaatgtcatctggttaatggtgggattatggatggtggaatttcaggtaacatttcttctttttttaaatctttctttttttttattgtctcagtcttgctcttaaataaatcacacggaggtagaaagagctggggagaagtctttcagatatgac

SEQ ID NO: 123033 - DNA, 1022 bp, Homo sapiens
ccattctcatgcctcagcctctcgagtagctgggattacaggcctgtgccaccatgcctggctaatttttctatgttcagtagagacagggtttcgacacattgaccagcctggtctggaactcctgacctcagatggtccacccacctcagcctcccaaagtgctgggattacaggcgtgagccacagtgcctggcctggagtgttttataagggcactaatcccattcatgagggttccaccctcctaacctaatcacttcccaaagccctcacctcgtaatattatcaccttggggggtgaggatttcaacatatggattttagggaacacaaaaatgagaccttagtagtatttattgaatcaataaattaacaaataataccattaattacattcactgaatatatgtgaattaaggacttgatcattttcataaataatacctcatgtaagagctttatttagaaaatcttttgccttttcttttagttgttatggcccaaagagagagctaattaatatataagatggcatgtgccttgagatttatgataggatttactagtactaaatggccttatgtttgttgtttctataaggaaaaaaaattgtagactggtgacaattatatatataactgactgctgactagtctttactatttaagcatgagacagcatgtttatgccaccttattgcaattggactatcctaattgaagaaattaaaaaatactctatcactctccacaagatgacagaggacaaatcaacaaattgaatagtgcaatgtgcattctgtcctgctttctttgatgtctgtaagaacaggattcaaaaattattttcatttctctcttaaactaatatggatatttaccatgataatattagatagaacctattctttgaaaatagagggctgggtcccttgagaatgcactttgtgagatccacccactgcccccaaaacattgctcttaactccaccgcctatcccaaaacctataagaactaat

SEQ ID NO: 123034 - DNA, 1013 bp, Homo sapiens
gcccagtcctccccaaatgcgttatatctgcctcaaacttttgaccttttctggtctcaagtgggccattcagtggctttcccttcttcccttccttctccatcgcttctctgtgctgtcggagtagttactatgaaattatcttctgatcagtgcagtttcctgcttagagttcactgggctcctgaccagctgtgggaggaaactaaatttgctagcacagcagcaaagccttttgaggtttggcatccatctgcctcatcgcagcccctctcacaaggccccctttctgtgaccagccccagccgcagggttgccggtcttttctctaataaagaggttgggatctcctcaccctggtgcacatctgtccttctgtgcttattttcccattttcccctttcaagttctgtagttttattgtgttgacagttgctggaaccactgatttgggatgcgagaacaattcccccaggctcctggcttcttcccaggctgcgtggcatcctgcaggacagctctgagaaccttctgtcctccacacagccctgcccagacacctgggatctactcttctgtcttcccacagtgcctgctgcatgcactcttgcattttagtggccagcctcctggctgactgttcgtttttttttttttttttttaaagttagggtctattttctttattcttgtgcccgtagtgctcacatgtaataggtgctctacaagtatttgtcctattcagttctggctgccataatctcccataagcgaggtggcatataaacatcagcaatgtattttctcacagttgtggaagctagaaggtgcatgatcaaggcaccagcagattcagtgtttgtgagggcccacttcctcataaatagctgtcttttctctgttatcgcatggggcaaaaaaggagagggatctctcctctctggagcttctctctggttttttgttttgtttcgttttgttttgagacagagtcttgctctgtcacccaggct

SEQ ID NO: 123035 - DNA, 2050 bp, Homo sapiens
ctggttaacacagtttatggaaccattcaccattttaaacattcgggaaaattctgtttctgaaacctaaaaccgggacttttcttgtattagagcagtgacttttgctttcatccacctctgagtagcatcttggccagatgtaggagaagcatcaacttggagtggtgaaggtggtggggctgtggtgaggaaggggacaaagggaagatcaggtggctgcagggagaaccgggatgctgtgtgaaggaggaggcaatgccagcaggagatccagcaacactttcacttcctttaggcttcttccctttctacttctggccgacgtaagacccagggatgctgctgtgctcaaggccacctcactccttcagtggacacagggttagcttggctgcctgcttcccatttccttaccaccagccttcacatccgcccgggcctttcagcttggctcactgcagattgcaaccgcttactcagcctttcaccctgtagcaatcataggtaacaggaaggaagcacatgctagttaaaattgtaagaacttagcttttctattctcatccatggtatgttcccactttacttgagcttgtgacaaaagtcgcccatgtgttaatatgccatcttgctggagaggcatctgaccttgccaggctttggctccaacttgcttccagcaaagctccttaggacttctaatcttatttggtaaaacaataaaacaaaacagaacataaccttgtatcccatctatcccagatggagaagttcttgaaaattgtccagcccacttctgcatttctactttcaatatactttccgagtatattgtctcatatattttgaaggagagagtaaagtctgtatgtcctaaatagtggttcccacgaaccagttaaaaaaatttggaggactgacatgtgtttgccaacatttaaatttttccaagtaagagtattataagtagagaaagtgaggaaaatcgagagagagaaagagagacagagagacaagaaaatcaacaaccagccacctattgccatgatttcttaaaaaggaaagttttatgttaaaaaaaaattagtgggggacataaccttagaatgaagggcagatcttcacatacagaaaatgtgtgcaaaaactcatgacttgttatttatttttcccatttctccaaggatgagtgaaaactttatcacaccagtcaacagagttgtgtttgagagcctctgattggaaccgccctgcagccccttcccacctttcagccactgcttcacgtgagaaacgaaccttagtaaaattatcaaaagagcaaacgtagataaactcataagggaaaactctagttagggaaggattttttaaaaaaatcccagtggtgtccaacacatggtttttctctgagctgttcacgttccctggcacaccattgtagcagctgccacccaccgcacacaaactgacagcactgctgcttcttgctttcttggataatgggtcaattaaggcaaaactataatttttttaaaagagcttaactagaaaatcggacggaaaaaagcaaaatcaaaaagaaaactccagagcacaaaattagtttttagagtaccaatttcttaccccacatcatcagctgcatgttgtcatgaccggctctgcttcctgggctgccaggatcctggtttctttccttaatttggtcacctgttgtctgcttgagacattatcagttggtagttcgagctggttccatctctgggtgaagcctgtgcattatataagcgcataacacaggcttgtctcacccgtggccttggctggagccagccttttgggagttctctgtttatagggcagttcccctctggtggctataagaactgtgccctacttcctgtttcagaggtctggttagaggcccattcagttcctgtttctggtttgcaggataaaattggttcacactttctttgtggagcagtgggagatggacaagcacaaagtccgggaaatgtgcaagtctctccagcatgaggta

SEQ ID NO: 123036 - DNA, 1028 bp, Homo sapiens
ataatgttgagcgaagatgctaagttggagctacatatagtgtgaaaccactgaaaggctttgcacaggggagtgacatttaatttgtattttctaaagattactttttatgcagtgtggataatggattggaggtaaacaaaaatggatggggagagcagttagaaggatgttataatctaagtggtaacttatggttgatggttgtaacctcttaagagaaatcatagacaaattcttagccatagccctttaggatcttatccctcccagctattcaaccttgctcttccctgaatctggcaagcttgttccctgttaaggtctttccctgttctctgtaacctgagcctttcatctcgggtctgcagagttcagtctttaactgcactcaagtctctgcacagagaggtctttcctggccattttgttgagaagtgaccccctgcccttgtcattattttctgttctccttactctgctttttctttgtagtttttaaaaaaattgcaacttgaaattatacatttatttatagcatgtttgctgctgctaaaatataagatccatgggggctggtcttatctaaaattgtaacctcctttccccccgtgcctagtacatagtaggtgctcaataaatatttgttgaatagatgagtgaattgattgaagttgggataatggaattcattcttcccttttcagctgtttctcaaacatctctctggctgtgaacttttttcagagcttgaggttaatgcccaaaccctgtcttgctgtcacctcaaactcagtatatataaaattacattattttccttcctccagtctttcacttttgttaatgctgccatcactgacagtcctcaggcacaaaaccttggtgttatcttgcagtgttcactacccccgatccctagggtgctgtatattcccatttatgtgtttgaggaagttttctggttactgtttcacctctgctttttgcctattgacattttagccagccctcagggccctgcctca

SEQ ID NO: 123037 - DNA, 1313 bp, Homo sapiens
tgaggcggtaggactgcttgagcctaggagtttgagaccagcctggggaacatggtgagacactgtctctacagaaaataagaaaaaaattagctgggtgtggtggcacgcaagcgtgactccagctacttaggaggctgaggtgtgggaggaccgcttgagcccaggaggtcatcgctgcagtgagctgagattgtgcccactgcactccagcctgggcgactgcgcaagaccctgttttggaaaaaaaaaaagaaaaatctaagttgtacagcttagggttttgatctaaatatatcttgagtaatgattcctacagtcaagctaattaacatatccatcacttgaatggttaccattttcttgtgtgtgagataagaacatttcagatctactctcagcaaatttcaagtattcagtaatacattattatttataatagttaccatggtgtacattgaatctctagaaattattcatcttataactaaaagtttgtatcctttgaccaacatatccccatttcccccacccccagcccctggcaaacactactctactgtatgtttctctaagtttgacttttttagattccacctataagtgacgggatcagtattactgatgttttttttcctcagcctccaacatggctcaatatagtactgggcagcagagagaaagtaacccacatgtaagcggcttaagcccagatactcatacttcctacgtatatgtgggagagagtagtaagattcaaagtaacctgctggctgatcaccaatgtgatataccaatggcatatactcaggtccttgtcaggactaatttcataaagtataattatgcacatattttgttgaacttagtttacagcagtgatctgtgtataatctgttgtataaaatgaaagaatgaaaacatttccaaaagttttcaagtagttcatttgaaatggttcactgagagcagtgaagcatatactttagaatagcagcattggataactaaaactgtttaccaagagatctggaaggatcacctggttcctgcaagctttttctaagaaaggccagatagggatattaattgaattttaatgctttccaataaacattgacccagcaagcttttttagatgactaactttctaatctgctttgacatttcttcgtggggctgcaaacagtgatttgttggtaggttttaaaatatgtataatttgttttagtgaagaaggtttggaagtatactgtagaattctgtgaaagcagaatggagtcttatctgtaaggaataagtctggaggaatg

SEQ ID NO: 123038 - DNA, 1197 bp, Homo sapiens
tactttaaagttcatatggaaccaaaaaagagcccgcatcgccaagtcaatcctaagccaaaagaacaaagctggaggcatcacactacctgacttcaaactatactacaaggctacagtaaccaaaacagcatggtactggtaccaaaacagagatatagatcaatggaacagaacagagccctcagaaataatgccacatatctacaactatctgatctttgacaaacctgagaaaaacaagcaatggggaaaggattccctatttaataaatggtgctgggaaaactggctagccatatgtagaaaactgatggtttttataaatagtttcattgggatgcagctacgcccgtttattaacatattgtttatggttgctttcacactacagtggtggagttgagtagttgtgagagagactgaaaggtcctcaaagccaaaaatatttaccgcctgtggcccttgacagaaaacgtttgctgacctctggcataaatcctcaaggagagagtaagaagtggaaactcttttgtgcagttggctgtttagtagagaacagaagacattagctagaggaggaggtggtgctcctaatagtgtctcctctttcagttatgcagcatccaaagatagacaataggtaggataattgttcctttcttgctaataaactataccaatgccctgagttgttgaattatgttgattggctttcttaggaaatataatatcacacacttttttcccattttatttcattatttttaattttaaaagtaaaaaatgaccaaaccatcctaaattgtgaaagtactattaggttgaaaatactcagaaatggaaaccttcaggtaaattatatacagacaagtatatccatttagattatgcaactttctttttacagggagcatgactgaggtgaaagattatgtaattttttgagatcctaataatgaatactagtaatgcctatgtatagaggcatagttaatttaagaaaaaatatttttgttctctgataaaaattaatagctttcttttctagaatgttgagcagtacacactgtcgacttataaggttataaactattattttttgaatttttaagctaagtcatagctttttttgtccataatctgaattaaatcttttctaatatatgaagtcttttgggatgggaccagtaatat

SEQ ID NO: 123039 - DNA, 1054 bp, Homo sapiens
tttcttcttatgttgcctttcccaagcctgcatccttctttggtcttttatccttctgtaacatagttaacctttacggttagtaaggctgagtgtgcattaagtcagtggtagcaatattaatatatttaatttgaatcaattaaccctttcatttacatgtataacttgagttaatcatcttttatgtttttattattattattgagtcagagtctagctctgtcgcccaggctggagtgcagtggtacaatctcggctcactgcaacctccgcctcccgggttcaagcaattctcctgcctcagccttctgagtacaggtgtgcgccatcacacccagctaatttttgtatttttagtagagacagggtttcaccatgttggctaggctggtctcgaactcctgacctcaggtgatcaacccgccttggcctcccaaagtgttgggattacaggtgtgagctactgcgcctggcctgtgtttttaatttagtataaatggtaatgagttttgtgcttatagtgaatcggatctgtaagttgaccacagttcagtttactggtttatactgttaccattttgtaattttaccgttggtgaaagattctaccacagagagtattagtccaagtcgaattaaagttcttgtaaggatgtgaattagattgacattagcattattttcttaggggagggatgccttttggccttatatcctacagtttcaaaggagtcatttcaaactctagattgaattagtggtgtagaatagatccacctcaaaaatgaactgaggccaggcatggtggctcacatctgtaatcccagcactttgggagctgaggcagatggatcacttgagaacaggagtttgagaccagcctggccaaccaacatggtgaaacctgtctctacaaaaatacaaaaattagccgggcatggtggcacacacctgtaatcccagctacttgggaggctgaggcaggagaatcacttgaacacgggaagtggagattgcagtgagccgagatagcgccaccgtaccccagcct

SEQ ID NO: 123040 - DNA, 1036 bp, Homo sapiens
ctcttaaactcaaacgacctgcctgccttgaccttccaaagtgctaggattacaagtgtgagccaccatgcctgacctgttttggtactttaagtcagttcacatactcatatcttattagggtgaacccaagctcattgatcttgagacaatgctatagctatagcagaatttatacttttaacctagtattagatataaattcctgaaagttagtatatattatttaggcattttgtatgttttaatggaaacctcgagcttaattaaatggtttttttttagctagtttcaggagactgacgctttaggagaatacccttcgctcccttatgataaagagtgatttcctttgcctgcaagtgatagaactgggactatgttagatctttgtgaaatttgttaaaaagcatactccagaaagggaagggctgtttgaaaggccccaggacacattctgtttctcatctggacttttctctacttgttgacttggctctgcagactggctttctccacacagtgagacacatggccactagtggctcctgaatttatatatatataaatatatataaattcactatgtttatatatatattcagtgtataatgcagcgtgacatccacgtcaccctgcattatacactgaaggctggagaaggtcatgagagatcatttcatcaaagctatatatatatattttttctgtatttatatatatatattttatatatattatatatatatatattatatatatatagttttttttttggggggacagaaacttgctccattgcccaggctggagttaaggggcgtgatctcagctcactgcaacctccacccctggggttcaagtaattcttatgccccagcgtcttgagtagctgggattacaggcgtgtgccaccatgcctggctaatttatttatttattttgtatttttagtagagacagggttttgccatgttggccaggctggtctcaaacgcctggcctcaagtgatccacctgccttagcctcccaaag

SEQ ID NO: 123041 - DNA, 1307 bp, Homo sapiens
tagtttttttcattaggaagagcagcattccgtgtcttccacattgtagcaaattctcagatatctgaagattttaattgataaagctaaaatgaccagtttagcctcagagtaacactccagtttcatgatacttttataaatattataacctttaaaacttttttatcagtggtcttaatggcctttgataataataagccagaccaagcacttaatttttttagacatatggatttgggggcaagaaaaatataaagtgaattttaatttcagtgttgtcaaactgtattcagccacagtttgcgtgatgtgagtctctctctgcctatgtcagcaacattaatgtttccaactcaactgttaagctactttttggtgacaaaattgtacaactgtactctactttaaaattcaggcatatttacagaatgtctgttatctgccagccattgtaatagacagtttgaaatgtctttttgaggaaatgataaaaatgaaggcttggagacaagtagtaacacacctaggagaaccctaagcctgtcagttttgttggtatcgtgggacatatgtagtcacaaatgtaaatagggagtactggaagatatatattcaatagagtaattatgggttggcacattcccaggtaacatagtaggaccacagactttggagccagactgccttctactagctgtataaacttgagcaagttattttaaaacttgatggctcagtttccccatccctgtaaatggagatgctaatagtacccaccacatgggattgttgtgatggttagaagagctaatatacacaaatactggtacatagtaagtactatgtaagtgtttgctacttttgtcattattaaggctagaatggatggtgacagaaggctgtctccttgggcttgaggccatttcagcgctctagtcttcaagagtgaggtaattttattttacagcagtaagagcaagcagccccatctagccttttgttgccctctgctccttggaggtgaaagagaagtacgaattggggataggaagttatctagaatcagctctgtccttccacatccctgttctttggagatatttagaaacgttctatagattagacatctattatgtagtggggtgagcatgtagacctttgagtgagtcatacttgaagtgaaaagctgactcctctatttactagttgtgaaatatgggaaatgatactgtgatctaccttgctgggatgttcagaggattaaatgaagtagtatctgtaaatactctggcacataataagag

SEQ ID NO: 123042 - DNA, 2672 bp, Homo sapiens
acttgttgtcatgtcactgtaaatatgttcttatatttctgatcaaagttgctgaaaaccagcaaaatgacaaagacaaattatgatgtctgcagtttatttttaaatggttcagcaaaaatattccttcatatgcgtatgtgtagagagagaaagataaaacaaatgtggcaaaattttagcagttggtaaactagacaaaggacatacgggtgttcattttattctttgaggtttattgtgggttggtaattttcaaaataaaaacatttgagaaaaaagcaaactgtatttactcatgcaaaataagaccctaaaataccttctagttaatgttattatttaatgatattagtttaattgtagaataagataactagctttattatattgtgttaagtgggaaaatgatctttaattggattgtagtaaacttaaaatcttaaagcagaggatgcagaaataccttttatctttgtcacagatactctcatgggatttgcccttatctagtaagtgtcttaactttggtgtggctgatgggcttttttgatccttatgtttattagcacagagatttccacaggcagatacttctctttcttccccttccccttaaaaaaaggtcagccaaagtaaacagatagtatagttgaatatgtactctgcctcacaaacctttcatttcaactttgcctagtccccgttaccaacaaaaaaaggtcagtcagagtaaacagataagaaatgtggctgaatatgagctgccacacagcttcaaatgatcattttacctcatcttttaagatagttgtttttaattcctctacttttgttcatcaaaccataagaaatcatgtggctaatgatatgatactgattgttaacatttgcaggaactacagttaaattcttaggatgatcagagattttcaaaatgttctgtgccttcagatatcttagctagaaatgtctttgtaaccctatcaccgttttttgctttgtgagatgggttcaccacacctcaccaataactttagaaaagcatcttaatgtagtcatctttggtttccttttaagaacgggaatatttgcattccccgatttgtgtaatccttgcaaggatattttagtactgaatttattctgtgttaataaagcacattgcctgatgacagggtaggacttgtctgttttattgttttgtccctggctcctgggatgtggatatgctaagtacatgtttataaatataagtgaatttgaattaaatgaaaaattgtgataccctttggtcactctgactgtagaagctcaaacatttgtattttaatgtggtttccactttaaatatttctgaagcagtcattaataaaacaatttaaagtagaaagtcctgttgggatgagaaatcttttccaaggagaagacttgctgttcagttgtggttaagtcagcactgactgactaatagaatgttactatttagcacatttgggaccatcgcgtttgttaactaaagtgacagataaacatttttatttttttctacaaatcaagtgtaatatgcaatatactgacacatctctaagcttcatatatctttgggttaagatacatatttatatgtatgaagcaataactcccaagtttgttgatatgttcattttttaatatgtcccgaaagagtttttccatttgacttgtttaaattagaaaattcttgtgttaattactgtcatactggaaagatcttttcatgaagtgaagtatacttttgtaagttaagtaccagatgaaaatgaaaataatttcctataaaatgaaacaacatatattaattggaaagaaacttgtaagacttttgattttaaatagcttgctttataactgcagagctttttcagaattatttgttactaacatttttctttaagaatgaaaccagatccgtgtctaattcataactgaatgcaagcacatgaataaatagataaatctaaaaggaacaaggaatgttaagccttagcttaatgcagtataagtcattgctttgaactttgaattgtgctgattagttccaacagaacatttatggactttctaaattaatttgcatcatactttttaaaaaatcctattgtgtggtttcaataaggcaactgagtagattttgttgcatgtatttgtattttttaaatgtagatactgctttttctcatttttcgtagtaggaagtcaaaagataatatctgaaaatgacaaaataaatgagctccatgagcatattctttagaaatatagagtaaaacattagaagaagcaactaaaagaatttagagtgattgcctctgaggtgaaagattgaggaagtacggcaggaagctgctgttttctgttacaaaccttgtagaattagttgactctaatgtgtgcaattatagtttttaagaaaaagataattgagcagaaaaacctgtctttccctctctccgttatttgcacacatagtaagcctatttacttagaccaactgggtactgccagtcagctggtagtagtttacacagttcccagagagcataaggatgaataatacaccctttgaggtctgtcctgaaaccctagtcaagagtgtggcaacactaaatattctaaaatggaattcttag

SEQ ID NO: 123043 - DNA, 1021 bp, Homo sapiens
tactgtatttaacaatatttttgatatttcactactgaatattatttttaaattatgcatattaatattgattgaaaaaattttcctgactcctgatccccttgaggtgaagaaatctgaagcttaggttgtctctgtttagtaaatcctctcaaggcaaaagctggcttcatttttccatttactgctctgggtttcagtcttgtgttggtttttactatagtgttcctcactaatgctttaatgaagttttaaggttggttatttgtttttatgtttcgtccagggtttttagttgtttttaaaatgttggtctagaaaccaggtcagccattctgttggaaatgaacctctcttagattaggcaccataatgtatacacttggtatgttacataatttctaccagagctgtgaaatggtataatgaagtgtctttatgccattcagtagactaaccctcccttcaccaaagagtttcagcatgtattttctttgatgaactctttgcaagatgcagataaatactggatagtttttcccaggttaaaattatgtctgtgattctgtggtgtagaactctgtgaggctttgactacccattagctgtatattagagcaaattcaggtggactttttgaatagaatcacagttctcctgaatgtgtgacttccctcatcacactttcaggctgaagttggatagctgcacacatgtgtctttgtgagacatcttaattttcataaggcccaccttatcttatctcagtgcagctttgtcctaagctggctcaaaacaacagaagctgcattccaggaatttatcaggagagtataaataaattctcgttgttttgtattatccttacgttctaaaagaaaccagtttttatggtttacataaagaatatttagcgtatccattctgctgaaataaaatctaaatttcaaatgaagtcagagagctaaatacccggattacatcaaattgactttcccttagacccattcttttaaactgc

SEQ ID NO: 123044 - DNA, 1051 bp, Homo sapiens
tttggtggtcccagggcctgggtgaactggttcatcacaggaggcacttttaggctcttgtagaggataactctttgctgctgcagcctgacatagtggggccatttcacaaagtgggtgaggtcccttttgggctggatgtcctgtccagtgccagaattcttaggcctttactcaacaggggattcaccactttcttggcctgttgcttcaagatagcaggggctggggccccgtcttgcccttggtcttctttcggcatcttgggcagctataggagagagataatttgtatatttacaagtcacatcaaactcttttctaggggagatatgaatcaagttctacatgtatctccatgtttttccctctcacttttgtcagttatctattactgtgtaatgaacaacttccaggacttagtggcgtaaaacaacaattttatttgctcacaattctgtgagtcagcaatttggaccagacacaccctagcagttcttcttttggtctttcctgtggccacccatgtggttccagccatctggtggcttaactagggccgggtggtcctattaggcctcgttcaatgtgtctggtggatagtgctggttgtcttccaggccgtgtgtctctaggtatgcccaggtctctgcacttaacagttgtgtgtttacaagagggcaagagcaaaagctgcaagtcatcttgagaattggacttggaagccacacagcattccttctgttgcaaagcaagttgcaaggccagcccagattcaaagagtgggaaatagactgtaccgtttgatgggaggacctgtgaagaattcatagtcacttaaaatctgccacactaacctgtgttggtatagtaggtggtttaagttttatttttgtttgtttgttttgagatggaatgttgctcttgttgcccaggctggagtgcaatggcgtgatctcggctcactgcagcctccgtcttctgggttcaagcaattctcctgcctcagcctcctgagtagctgggattacaggcatgtgccaccacgccc

SEQ ID NO: 123045 - DNA, 1040 bp, Homo sapiens
ttttaaacaacacacatttatcatctcacagtttctatggtcaggaatccagaaacaactgagttgtttgagctcaggttttctcatgacatcacagctattcacatggttatcaggcctcaattactcaaccacatgggattttccataggcagaatgtccctacaatgtggcattcggcttccccagactcaatgatacaagagaaaaaaggacatacaagatggaagtctcagtataacctaaagtcaggagtgaccgtcatcacttctgccaggttctgttagctacacagaccaaccctggtacagcgtgggaggagttaacataagggtgtgaataccaggaagcgggtatcactggagactatctagaaggctaattaccataatacgctttttaaagtaggaaattatagacaaatatatatgatatcctagttttgttatttttttaaaggaggagtttgcgtgtgtataaacatacatacaaaaaagactgaaagtttccacactgaacacagcaagctctgtgtagtaaggttggggatggtgaacactgaagagagcgcgtttacttaattataaatttgtttttcttttatgtaccacaatgagcctgtgttacttttataattagaaataatgaagtaagttttcaaagacactgtaattccttctccaggaagctttgtctgctactgctgtcaagctgatgtacttgccctcctggcgctccccccttttctgccacacaatcccactgttgctaaggatgaaggcgctgtgttcatctttaagtcctctgtggctaacagaatacttagcacaaaatacttgtactatatgtttgttgaatgaatggataaactaaaggatttatttaatgtcattaatatttattaagtagctccaaaggtgatgtgcttgagtctagacccttggtaccctgataccaataggtcaaatagctatttaacctttagatctacatttttattcatctagatcatttaacctcgctaaacatggtattcttaa

SEQ ID NO: 123046 - DNA, 1128 bp, Homo sapiens
aaacagaacggtaagcctgaaatggaatggggcatacattcatgtaccactctgtagctaatgtgggaacaaacaaccctgatgcattgattctctgcatgtgaatctgggaagtcatgatgttcaaaagatacgccgcacaaaataaagttctatatacagaaattttacagaactaacttcagatcttctttacagaaactctgttgacaggatatggtgttgttattggagtgtagagagattgtacacttcactttgatgaagagctttcacttgcacagtctttctctgagaagaagaaaaaaatgtgagcaaggacccaggacaatgaataagaactctatccatgtgttgtttagaattgttctcagcattggtccagttcctgaccatgctctgctgagctaaaggaaaagagtatattgaaactgttgctgaaaaaaaaaaaaaaaaaaaaagcttatactgatagtaaagaattaaatggtgccttggtcttctatttccttctacagttatttgtctggggtggtcccagaaatgtctggctctaaccaatgtttgcaattccctatcctagtggtcccagtgtgtgaccaaccacacgctggtgctcacctggctggagccgaacactctttactgcgtacacgtggagtccttcgtcccagggccccctcgccgtgctcagccttctgagaagcagtgtgccaggactttgaaaggtaagctttaaaaaatctttgctggtctaggaaggagatctgctaaaactagaagtcggtatgatggtttagacaaggttttgacaaatccgtgtctaacagaaacaggttgaggcaaaggcagaaacaactaccaccagaaatgcgtggagcagcctgggactctgccattgagcttggccgacgttcagaagtgttctcacaccctcggagaactcatacaggtcccgtgtccactgccagcttctttccatggtccttcggccacctgccttgtgaattaacaatgaagaacttttacacatgccttttttcttctttaaaatcataatcacgctgggcatagtggcccacacctgaaatttcagcactttgggaggccaaggagggaggatggctt

SEQ ID NO: 123047 - DNA, 1032 bp, Homo sapiens
gctctaatctaggatttttcccagtacacctccattgctccactggtaaaatgaggattttcttcctcattggcggtgacgtaaagtaatattaatacttctgtttcccaccagctaaatttctggacaaatgaataggacaaatgaacatttgttagtttaacaactaacaataaacattcctgcaatttgagtttttaaatttaccatttttataaggaatataacagatgcatagtatcgtgctgtgttgaagtaacaaattgacttattgatagtaaagctatttttagacatgttcaagtcaatcatatatatttcttcagttgtttgaccaggactaatatggtgattttttttttttttcagattaaaagaagctgtgcattttcactgttttcttttttcatctagatccagtataaaatactcacgcagaaggaagatgattgtgacgagattcagtgccagttagcgattccagtatcctcactgaattctcagtactgtgtttcagcagaaggagtcttacatgtgtggggtgttacaactgaaaagtcaaaagaagtttgtattaccattttcaatagcagtataaaaggtaagttcttgccattttttttctaaatatagagggagcagtaactaaaataggatcatgtgaggaaagcaaactcatttgcagtttcaaaagatctgttttaacaatattcatttgcattagttccattccttagagaagttcaaaattaaaaataaagcagtttctcacacatttaaagatatagaacaactaatttggaaagccatgtgatggccccttgacccaggaaagaaaaaatatataataagtacataaaactacacaaatgtttgcatttcaggattatgaattataagtcagtttgttacttcaccatagcaagatgttgtgaatccactaaaatgttctttatggggattgtaatttaaagactgaagagcaggaacgatcactggttacaactgtatgacgtggactggacaaagact

SEQ ID NO: 123048 - DNA, 1030 bp, Homo sapiens
tctcacatatgactaagggaatttaatatttaaagatatatttgttaaaataataatgcacattattgaataatccctaacatattaagtatttactacaagacacacagtgtgcttacctttttaatgcattacctcagatactcatcacatccatcccgtgagggagacaatgttaccatacatattttaccaatgagaaaacaaaggcttagagaagttacgtaacttgacaatatgcaaagttttgttggttttcattaagaaaaatgcttccaacatctttgtgatcgtttaataaaataaggggtaaattacctccatatttaaattggaattggagaagactattttctggtgacttcaaaagcatctgcttcaggtaatgtttcctgattttattacattatcacaattatattatggccactgcaaaagttgaacaatgcattaaaatgaataatttcttaaaaatacacaagacctaaacagatacctagtattctgattactatgcattaggataatctaaaataaaggcacccctttaataagaaaattacaagtaaattcctttctgttaggaattcacttcattctggttcaaacctcattctgattctttgttcaatcaaaattgaaccattaattactcatctggtttgtaaagcaacttcactactggtatgctgccaaattttgtaagatagctgtttattacttttctttaggttttcatacacaaacacacacacacacacaaacacacacacaaacacgagagacagagtcttgctctgttgcccaagctggagtgcagtggtacaatcatggctcactgcagcctagacctcctgggctcaagtgatcctcctacctcagcctccccagtagctaggactacaggcacatgccaccacacagggttaatttttgtatttttttgtagagatgggttttgccatgttgcccaggctggtcttgaacttctgggctccagtgatccttccgccgatgtgctgggattaca

SEQ ID NO: 123049 - DNA, 1036 bp, Homo sapiens
agacaaaaatgtctgcccagagtggaaaaataaaacaagggggagaagagtttgagtaacggagaagttctgtggaatcctagtgacaaaagttgagaaactacctttaaataagacagtgaggtaacaaatgttaaaaaaaaaaaagttaagggtaatattgcattgtttgccacttataacgtatctgaaacatttgttctttaatcttaagcgtagagtggtccaagacctggaaatctgggcagtgggttttgatttctaaggaggcagttttacaggctgtgcaaggctaaccctaccaatgagatcacactggcgtatccgatattgacatttgcatgtcttgcctatggtttacagctctcactattttagatctttggtgaaaaatctttagattcagaagagaaaaataaaagagtcaggcaagcaaaaagagataacacctcatttgtttaaaatcttcctactgcccatctctttccatctgattgtggcaggcactgtagccacaggtttggtgttgtgggattgcaaggggcaggtattgaaagacctggctcctaggcaaaactttgcccctgaatggctgtgggatctgagcagtacctgtaactccattgccttagctgcagactaaggtggtagtgtaatttcagggaagggaataaggtcatctttgacttttagtcccatcatcaagcatggtgattggccttcagtaggtggtcaggtagtgcttgttgggtggatgggtggatggatggatagatggatggatggatggatggatggatggatggatggatggacggacggacggacggacggatagatgatattgtgaaagagacttttgctgtgccacaaaggaaaggtatatgtgttatttttatcctgctatgattttgcccaattccacctgtagaggacgtctgacatcaaaagagagcaccatctgatccagagaatgactcccactatgcctttcccagcaatcagattaagaatcccaatctaaaactatcaccag

SEQ ID NO: 123050 - DNA, 1049 bp, Homo sapiens
cattcattttagctaaggcttcatgttgactcgatatgtcatctaggaaagtactatttcatggtccaaacctgttgccatagttggtaaggctttcctttaagtgtgaaatatttagatgaaattttctcttttaaagttctttatagggttagggtgtgggaaaatgctatattaataaatctgtagtgttttgtgtttatatgttcagaaccagagtagactggattgaaagatggactgggtctaatttatcatgactgatagatctggttaagttgtgtagtaaagcattaggagggtcattcttgtcacaaaagtgccactaaaacagcctcaggagaataaatgacttgcttttctaaatctcaggtttatctgggctctatcatatagacaggcttctgatagtttgcaactgtaagcagaaacctacatatagttaaaatcctggtctttcttggtaaacagattttaaatgtctgatataaaacatgccacaggagaattcggggatttgagtttctctgaatagcatatatatgatgcatcggataggtcattatgattttttaccatttcgacttacataatgaaaaccaattcattttaaatatcagattattattttgtaagttgtggaaaaagctaattgtagttttcattatgaagttttcccaataaaccaggtattctaaacttgtttccagtttgtagtttttccatttttcaaatctggggaaaggaattaaaaaaaaaatgggtaataagaacatgggatataatgaaaagtggtttttgtttgtttttttgtttgaagttttaagggccttgctcattttaggtgtccaaaaccaatttttgagtggagattaatgaattctaatagtctattccctgaacttttcctcaatgaacaataccctagacacacattaaacaatttctctgcagtgctatcaaccagaggaaaatggactaagagatttctggcaggttcagacacccgggggacatgtgtgcagtgtagctgaagcctcctccttgtg

SEQ ID NO: 123051 - DNA, 1033 bp, Homo sapiens
tccttccttaatttcctaggtagaaattatatttctctcccttgtgtcctcaccgttcttcttacataatcctgtcgtgaagctcatcaaccacgttggcagttgtttgcaggttctattctcagaccctagcctcaaggagctcatctagacaaattactcatctttgtatctcttatgtcagtgccttataaatgtttgtgggatgaaactgcttctccagctttacatcacatgtcccagaaagccactgccttcatctcctagattcttagaaaatgcagtatttgaaagaatctgtgccaaaatggaatctcagctttggcaataggacttctaatatcttactgactgagaaggtcggtctaaagagtatacccagaagcccaacactcaattcattgacctcagctagtgtagacttaaatcctgtgccctctactcaactaaagccctgccccacctaatgtatattagataaggggtgggggatggtggtggtagtaatcaggactctgaccaatattctatgccaaaggatgctaaagatacaaagttttcagttctcagtagatttccatgaaaagtccttggccaccctggaagaggcatactgcctgtcctacctccacctccaacatgaatttgacttggagtatttatgttctaaaggactgaagaacctccactcctatcctgtcccaattcaggattgtctctttcttccttccaggtcacttgcaacagtactggtccagatgaaataaaactgtcaagggaatcctggagctattttgtcaaaaggcagccattggcagcaaacctcttgttggcattactcagtgcccctttgggaacaatcccagtgattaccctagccataacccagccattttgcttacctgctccatgatttttcagagccaacctcagcctaattgctttctcttgccagttgtactttccaaaaagattctaacagcttttttttttcccatttgtctttgtatgtgtcccaccacctctcctccct

SEQ ID NO: 123052 - DNA, 1047 bp, Homo sapiens
aacctttgtttccaagtgctggtcccacttaatcttgacagcactcctgtgtgagacagtggacacactgaggttggaggggctatgtagctggccaagctccttgagccagtccagggcagagccagggctgctggactccaaaaatcaccttcctaactcactatggggtattagctctccaattatttgacttaatacagaagattttttattattatttgcaatttatgggaagagctgagatatatacaattaaattttgtgcagtaaatcacttgatgaagcaccattgttgaaaaaacctcctagaaaacctgctatatttcgccattgcccactcacaagtgcaacttaccaataaaggattatggattagaccaccttgtatcaaaacagcttcaaatgcaatttccaaggagccagtgcttttaaaagacagttgtcctatattcagactgaggggagtgtcatgaattattagagctattaagattagcacgtatacctagctttgccaggaaatgacttaaattgactttacctctctctaaggaagaaggaaactttaagataaaagagactctagtctggaattgatgtgaatacccactggggaaacctgagtaattatgtaattaaataactaactcttacctctccaccttctgctaacttgaccaagggaagaggctaggtaacaattgatatggttttttaatgagggttaaggtgagcaaaactgaagaattactgagagaagatttaggatagggctcatttttaggcctaaaggaatccttctagaatattttaagtgagagcagacctatgctaattttcagtttaatgaactccagagagaattgttctatgtaaaataatgggttttttttcctgaaactataactgccccatggtgtgctttattttataaatcctattttgtttttctgtatttaccagctgggagaaaaaccttcaaaaacaaaaggggttttgtaagcttatttcagaggctgttggtaggacagaagccaggaaact

SEQ ID NO: 123053 - DNA, 1035 bp, Homo sapiens
tgctttggctaccccttcagccactgggtgctggcctgtatccatctctggactgaggcatgtcctcttgcccccttgcaagtgccacttccatgattaaaaattaacaaaagagaaaacattatgctccactgagacagggagatggcagatttcctttgttcctctaagagaaagttatgaaagtaaaaacagaagagtgggagaagggaaaaactccctgagttataaaccctttctttgactcattatttattttgatgtcaaaagcttcaaacctcactttgtcataaacgtccatcaagccttcatccctaccctgttatcagggggctgctttctcggctgaatcacagtcactcagtgtttctcagtgactcctatcttcagacagctaatatgccattgaaatgagcctccttaattctacaggattcaggagagcctttcttttcaaagcaattaaagtttcatatggtaggggagtttgaaaatgttcgggcaaataaagtacgttttttataaagacagtgcttgacatgagctgcgattgctgcagaaatgcctctttgatcctggatagaacaaagtgacgtctgtgtaaggtggttcctcagcactaaaggaaggtcccagccttgcacggcaattgatcaagggtcatcggcactgactttggattgctgttccttagagtagcggttttcagttgcagtcttgtgacttactttgaccaaatgtaaggttcgctgcaagcaatattttataaagtaccagatttcctaaaagatagtgtagcaagtataaatctcagttgtacaagatatatctatttcttcacattaaaacaaagctgactgtagcccctcagcctgcctagcagggagaacacttggtctctgccctccctttatttctcatcccagggtcaaaccagaagctggagcttgtgtggtatctgtaaggggaggccccctcacctcttatatcaccagggagcccccattatctccagtcataggctccctaagggtc

SEQ ID NO: 123054 - DNA, 1034 bp, Homo sapiens
cttccaaatagatacttgagttcccatcacatccaggcctttgggtgtgtatgaggccagtccccgccctggaggggggcttacaggatctactcttagctgtttttgtatcttttccagcattatactcataaattatagacaaacaaaaccttattcattaatttactggggttttttgacatcatttatgaaattgaagctaattctgaagattccattcccagttactcagtttctgggaacaacgccttgccatctttcagcttcttgccaagcattttatgagtgcctaccatagcggagctagaccatgagggcacaaagatatttttaaatatattctttgtgcctttgaattaaaatctcacagttagagcagacttgtacacagttagaatagatagaataataccatacatttgtctacagtgtttacacagcatttccattaatcacatcaacaaaattaccataatcattctgccataaagaccttgctgaattgtttccaaagaacacatctctttctgtttgcatccaggctctttgaagatgctacggataagttgaacctcatggccttgggaggttttctttaccagctgaagaaagcatcgcagtctcagcttttccattctgttacagatacagttgattactctctggcaatgccaggtaattctttccctgaataaaccatatgccaggaagttagcaggaaacagcccaggcctctatcaccagcagcgtgcctgaagatttgactccacattcccattgcttacactcacacaagctaagcccaagtatagatttgtctccagattttgaggcatcctgtgtgaggggtggtgtaactctttgtgaatggaaacgttgctgctaccacatctataagaactcccactggagctggactaggttgttctgctaagttttgtgcttgtggtagaaattgtgtggctccttagggtgcagatagcttccttcacatgagggtggagcttttctgcgtatcacaaaccacacca

SEQ ID NO: 123055 - DNA, 1079 bp, Homo sapiens
tcgtggccccctacagccttggcctcctgggctcaagtgatcctcccacctcagcttcctgagtagctgggactacaggcatgcgccatcatgcttggctaaatttttatttttttacttttttgtagagatggctcttactatgttactcagactagtctcaaacttctgagcttaagtgatcctcctgcggttctgggattacagttgtgaacaaccatgcctggcctatttttttttaagattataagtgtatgacatcatgggttgggctgtgttcccccaaattcctatgttgaagtcctaacccctggtacctcagaatgtgactatatttggagaagaggtcttttaagaggtaattaagtcaaaatgaggtcgtgagggttagttttaattaaatatgactggtgtctctataagaggaggaaattgagacatagacctgtacagaggaagtccatgttaagacacaggaagaaaatggtcatctacaggtcaaggagatagacctcggaggaaaccttcatatctgacttctaggcaccagaaatgtgggatatatggttctgctgtttgagtcacccagtctgtggtactttctgtggcagcccggataacctaatatgtatgaaatgtgggtaatttggttacaaggctaacagtttttatgaaaacctttgctaaatgactccacaaatgttttcagtatttctggccaaagctcagattacaatgtgtgagaactggaagtgaatgaacattcttatttataagcaccctatgagttgagatttaggtacttaccttttcttggtgtgtccatttggtttttcatcaggaggcagctcaataatgagctggcaggactgagcgtggtcaaagttgtttggtgtctttggtgagcactgggtgtccagcataaacacctgtatgggggtgcaaaggtacatttcagaactccagtgtcctctgcttgacctgtcagggatcagctggatgaccctgggcaagttgagcctcatctataaaatgaggataatggtttcctatttgatatgtttgttgagagagttaat

SEQ ID NO: 123056 - DNA, 2315 bp, Homo sapiens
tggccacagggatgtacctggatctgtgcttctgcgtctctcaccgagacactgagggagctcccggtggagcctgagcggggcctcttgtcctgtcgcagcagctcggggcctgcgctgaaggaatgccgcatttgcccttggtccatcaagtgctggggacgctgaagcagcggggagtcctggcccctgggacccagtggctctcctttcttctccactttgacctctttggggaacgcggacaggttgtgctgctgtttcctctttttgtattcggtcatcaactttgaaatggtcttgtcggctgccatggtgtagattttgttccccgcattctcccaccactccttcttccggctgggatccttcttctccactttggggctggggggcagcagcaggtccccaccaccggccttcaggctcagggactcgcccatgtgctcccgggactggcttctgtcatcctcggaaggggtttctttcccagagaagcccccggtggatggggtggatgactcggactggaaggagggcaggatgaagaacgggtcgcccttgaagatgggaggctcctccatacagttctccaggtccaagtgcatctggatgtagttgttgcacagttccatgcacagcttgtgcagcctcttgaccagccacacccaatctgcgttgctgacaggctggacgctgagcaagggcatccgtgcccgccactgtctcttctccttgcctctcggggggctgacctgggcggtttcctcaaagatgtcttcatcctcagatgaacactgctgggaagaatccgtgcttctctcgtcgtcctcaaaaaggaccttcttcacttgctcggccgtgatggtttcttgattggtgagaacagcacacaccagggcgtggaaataaatgttaaagctcatcgcagactggcggtagaggttggcggcgcccccgatgccagacactttcttcagcaggcacttcagcccggggctggtgtcaaactccctggcagtcctataagagtccagcagcaggtcgaatatgactgccaagttctgcatagagatgtatctgaggaagccagccagcttggcttctggcacttgtatcgtcttttcctctccaggagaggggcctttgacaaactcttctaacaagatgtcatataagttctggagtaacacctgatgagacagcaggctcaccacaatttccctgaaagacacgcttcaagtgaaaagagagggctcgattaatggttttctgccctatatcaggtgtctcaaagcaatatagacgttacccgtttcagaacgatctatgcaaatttacaaactaaactacctctactcaaatgtcttccatgaaagaaggcatactttttgggcactgtgtgataaccattttaatcacaactagtggagttcttgacacttaaaaaaattcctgaagctgggccgagcgcggtggctcaagcctgtaatcccagcactttggaaggccgaggtgggcggatcacgaggtcaggagatcgagaccatcctggctaacatggtgaaaccccgtctctactaaaaatacaaaaaattagccgggcatggtggcgggcacctgtagtcccagcttactagggaggctgaagcaggagaatggcatgaacccgggaggtggagcttgcagtgagctgaaatcgcgccactgcactccagcctgggcaacagagcaagactctgtctcaaaaagaaaaaaaattcccaaagctatagaatataagttattatgccaaattaatagttgtcaagatatcacagatatcagagagttaactgtgacatcaaaagatatcacagttgaagggggctgggaagtctttttgcccttggggacacagaatatattttgggttttcctattatgacccatcacatgaggtcagatgtggaattttccatttgtagtgtcctgttggcactcaaaaagttggggttagggatgctcaacctgtactatgtttgccaaactttttaatttgccaatgtggttttggtttacagtttcatttcttttcactgctcttataattttatgaaaatagttgtggccattatatggccaattaatgccccaaactggataattataaaattatgacaaccgttattaatttcaaagttctagccatgatgttaataacattttgctttatgtctatgactttgaatgtaaaaatttgtgtaagtaggaaaaagtgcttttctaacagaaaatgacaaatcctgcataaatctcaatgttaactttgccct

SEQ ID NO: 123057 - DNA, 1526 bp, Homo sapiens
taatgtaaaaagcctttccaaccactgatcagcattggggccatactaaggtttgtatctagatgacacaaacgatattctgattttgcacattattatagaagaatctataatccttgatatgtttctaactcttgaagtatatttcccagtgcttttgcttacagtgttgtccccaaatgggtcattttcaaggattactcatttgaaaacactatattgatccatttgatccatcatttaaaaaataaatacaattcctaaggcaatatctgctggtaagtcaagctgataaacactcagacatctagtaccagggattattaattggaggaagatttatggttatgggtctggctgggaagaagacaactataaatacatattcttgggtgtcataatcaagaaagaggtgacttctgttgtaaaataatccagaacacttcaaaattattcctaaatcattaagattttcaggtattcaccaatttccccatgtaaggtactgtgttgtacctttatttctgtatttctaaaagaagaaagttctttcctagcagggtttgaagtctgtggcttatcagcctgtgacacagagtacccagtgaaagtggctggtacgtagattgtcaagagacataagaccgaccagccaccctggctgttcttgtggtgtttgtttccatccccaaggcaaacaaggaaaggaaaggaaagaagaaaaggtgccttagtcctttgttgcacttccatttccatgccccacaattgtctgaacataaggtatagcatttggtttttaagaaaacaaaacattaagacgcaactcattttatatcaacacgcttggaggaaagggactcagggaagggagcagggagtgtggggtggggatggattatgatgaaatcattttcaatcttaaaatataatacaacaatcttgcaaaattatggtgtcagttacacaagctctagtctcaaaatgaaagtaatggagaaagacactgaaatttagaaaattttgtcgatttaaaatatttctcctatctaccaagtaaagttaccctatgtttgatgtctttgcattcagaccaatatttcaggtggatatttctaagtattactagaaaatacgtttgaaagctttatcttattatttacagtatttttatatttcttacattatcctaatgattgaaaactcctcaatcaagcttacttacacacattctacagagttatttaaggcatacattataatctcccagccccattcataatgaataagtcaccctttaaatataagacacaaattctacagtattgaaataaggatttaaaggggtatttgtaaactttgccctccttgagaaatatggaactaccttagaggttaagaggaaggcagtgttctgacttctttaggtgatctgaaaaaaacacccttatcatccagtgtaccatctagagatcaccacagaatccatttttttcccagttccacaaaacactctgtttgccttc

SEQ ID NO: 123058 - DNA, 1090 bp, Homo sapiens
taccaaaatttaggaaaagaagagaaagatctcaactttaaggtaatatacttttggctataaatacaggcaactaaaaacaatgtataaactctcattctgcttaggtctgtaaatacatgctaataactgttcgtaactttaaaaggctgccttgaattttgtcttactgttgctgcaaaagagactgtgaggagagaaacacctgacactttcagagactgggagggagggaaacaaagttgggggagtgggcagctgagtcacaggaacagggcaagagactgagctgggcagcctgggaaggtgccactcccctctcagtgttcttcatctcctccctttcttctccacctgctgggaagaaccacctgaatgcctactcattagagactactttgcatcaagctgcaaatacctctgagaagtactgctgtcactcagtgatggttctggttgaaatctgatgtcagtgtggatggctggtaactcgagtgcagagtatgttaggactgagttatagagaagacaatgggaaggtaccaaaacactcttaaaaaattgtaggtcaagagctctgtacacctactcatccttttattcttgggacccataatcaggctagaactagaacagtgtttggacacagtacagggtaaacttatgttcaagaattttggatcccataatagagcatcggggagaatgctgatttccaaacaaacaactaacatactttgggatacagtattcacttttttttttttttttttttagatggagtttcactcttgtcacccagtctggagtgcaatggtgcaatcttggctcactgcaacgtccgcctcctgggttcgagcgattctcctgtctcggcctcctaagtagctgggattacaggtgcatcctaccacacctggctaatttttgtatttttagtagagacgaggtttcaccatgttgtccagcctggtctcaaactcctgaccgcaggttatctgcccaccttggcctcccaaagtaagtgctgggattacaggcgtgagccaccgtgcccagctggtattctcaaattgagacagcttccttt

SEQ ID NO: 123059 - DNA, 1026 bp, Homo sapiens
aaaaactgaatctacccttgggcagatgacttgggattggattctatacagcagtcttgctcaatcttcccagtttccagttttattataccaacaattggtttttacaagctagaagacaatgaatgtataagttctatggaacagtgagataaatctaagcttcttgtctttgtatttagaaacattgattctatggatgatcatttgtatcatgttgaccctttgacttgtactgaaggtgattttaaatttaagtatgtagtgtttgaatttcttccatccatgtcgttttaatgagatgtttccatgtcagctcctttacagccttggctcctggcttacagatttttgaatagttgtttgcttgccagttgttttacatctttcattggccaccaaaatattagccatttgagatgagatgagactacttgttgtaccttcatctttcatttaattttctggcgtaaattaacattttaatttcatatatatctgtaaagagtctacccaaaggcttcacggaaatttgcaaaatgaactaattcccttttaagcagcaggtgtgcctgtttttgacttttcagtaaatatgttgtttgtgcacatatctacatggtggagaccatattcattatttcatcttccaaataatgggaaaaatataaaagtgaatcagtgtgctttgggaattcagtgaaatcatgttaactcatatagagggggccttagtttatctcttctttactgaattaattagttttggaaattcttttaccattaaaaaaaattaaggaccatacagagaatgatttaagaaaaaacaagtcacttaaaaatcatcacctatttataaactgtattaattacacataatgcttattgattcaatgaggtttctctaaagacttctgcttaataaatatgctgacttcatttaaattagtttagactattgtaggaatggaaggaaatgattatatttactagaattagtgagatcagaaagcatatcagaatgtt

SEQ ID NO: 123060 - DNA, 1025 bp, Homo sapiens
aataaacttagacaaattacattataaacagttcccctactactatctcccactctagataaagccagtgggtggtatgggtccttttattccttatagtattatgccaaagaatcaacttattttcattgaagattataaataaatgaagcttgttatagccataatgatttgagtcagtataccattttacctataaaatgcaaaattcatccttgcaaccccattcaccaggagccttgaagcattttgtttactccaaaggccttgtcaaggaagcataattttttgttttgccttcttatttagtcagtttggtcatatttacttaaaaaaacaaactgaaaatcacactcctttatatgttgatataactgattttatagaatctgtctgttctttgtttaacaggtctctgtaagcaagcttgcaagtgtattttgtgtacattttatctgaggtggaaatgaaaattctaaagagaaaatattttaaaagatattgtatttatgttgcttgtgttgtagaataaagattcaaatgcattaaaaatctggtacatgaaacaattgtgtttactgaataaatatatataaatatcctgtgtttacagaattctgtcaaaagaattaggccccttttcatggcatttcataagtctaaatgtaaaggcccattttaaatcctgtaacatggagatagtcattattgacaatttggtatatgcctaaaaaacaaatttgtagaaataatatatcatttccttgtttaaaaaaagggcttattctatgatattatcttttactcataagaacttatatcaaattcctactgtcagtagatattgatgtagatcattcatttaaaaaattaaagtattaccttttgttcataaacaaccaaaaatccaattaataagaatattagtatttaaaagtaatattaaaaaatacagccacttttaacttcctgatcttactagattattgttttaaatacacatatatcaaaatatcacactatac

SEQ ID NO: 123061 - DNA, 1185 bp, Homo sapiens
ttaaatatatatatatatatatatatatatatatatatatatatatatataatttttttttttttttttttttttttttgatggagtcttgctctgtcgcccaggctggagtgcagtggcgcaatcttggctcactgcaagctccgcctcccaggttcacaccattctcctgcctcagcctcccgagtagctgggactacaggtgcctgccaccacgcctggctaattttttgtatttttttttagtagagatggggtttcactatgttagccaggttggtcttgatctcctgaccttgtgatccgcctgcctcagcctcccaaagtgcttggattacaggtatgagccaccatgcaaaaaattttgtttttaattgacatcactaattacattaattgtacatatttatggggtatagtgtgatattttgatatatgtgtatttaaaacaataatctagtaagatcaggaagttaaaagtggctgtattttttaatattacttttaaatactaatattcttattaattggatttttggttgtttatgaacaaaaggtaatactttaattttttaaatgaatgatctacatcaatatctactgacagtaggaatttgatataagttcttatgagtaaaagataatatcatagaataagccctttttttaaacaaggaaatgatatattatttctacaaatttgttttttaggcatataccaaattgtcaataatgactatctccatgttacaggatttaaaatgggcctttacatttagacttatgaaatgccatgaaaaggggcctaattcttttgacagaattctgtaaacacaggatatttatatatatttattcagtaaacacaattgtttcatgtaccagatttttaatgcatttgaatctttattctacaacacaagcaacataaatacaatatcttttaaaatattttctctttagaattttcatttccacctcagataaaatgtacacaaaatacacttgcaagcttgcttacagagacctgttaaacaaagaacagacagattctataaaatcagttatatcaacatataaaggagtgtgattttcagtttgtttttttaagtaaatatgaccaaactgactaaataagaaggcaaaacaaaaaattatgcttccttgacaaggcctttggagtaa

SEQ ID NO: 123062 - DNA, 1081 bp, Homo sapiens
gttgatacaagcacagtgctgccatttcagtactaccctctgctatctgagtgagcaaaaggcatcctatatccagtccatgccctggttagattatgtgttgggagagggaagccttagaaaccccatcagtcctagggtcgcatccaggtgtccactgacacagaggggtgtgcttgactcgcattgctcagcaaagcccgtgttgagatagatacttttgggtccttgttggatggagataacatagggagaactatagttttactactatttttagagattcgatttgtcttaaggattgacttttttttttctcagtacactttgggtaggttcttgtctttgtgattttttttcttttttctcataagctctgttctttcctgggtagcttgaaatctaactgtttacacttaaagtttacctcgtccacgtccctctctgttggcccttccttgtgtttctttctttctgtctttttttttttttaacatactattctctgtttggttgtaaaactccaacgaataaatcatcctaatttgaggaaatgttcactggatcagttcctgccagtttccccaactagaacacaacagattgctgttgaattttgaatgtcaccaacagacagataatggcttcagatggataatgaaatgtttggaacacagatgggcctgtaaatcaattttctttgccttagaatttccttctgacataaagaattaatgtaattaacactgttttataccagtacccctcaaatatggtatctctgtggccctattgttcaattactacattcatctacctttgggaaagatgtgtcactgcttgatagatggtctgcacagtcacccagtgggcgaaaggctaccttgaagactttactgaaaggtgattatttcaaagtaaatcctcctctgagcccttggcagccttgatcttgaagggataccctgagaattccatacgcagcactcaagccataggaggattggaggtacaaattaagagaagtacctgacattcatgacaataattttcattttagagctatcagtaactttttaaa

SEQ ID NO: 123063 - DNA, 1096 bp, Homo sapiens
taagttattcgcttggcgagtgtggatcatttgtgacataataaaaagaacagaccaaccctcttttcctttgggcattttatcatttgtcatgtggaatatgtaggaagcaaaattctattgccctctttgggatccccaccgaacacctcctctgagtagagaagacttctcctctttcacttttacctccaccctaaatggatatcatgttgatccctttaattttatttctacttctctttaggtatttgccttactctgaaacagttttctcacggtgtggctcacaggacagctgcatcagcattgattgaggacttgctaggaatccaagttgtcaggctccatcccagacctactgaatcagatatgggagtggactcagcagtatttttataacaagccctccaggggattctgatgtaccttaatttgggatgccactgctctgtacattggcctgtgaatttgtttaatcaggcagctaaactgtaagcaccttgaaggcgggaatgtaaccctttagtcccactaccctttacaagctacaagttaggattccaagacacagctacccagtttcagagttggtgctcttgactgctgctgctcttctctctcgttggtggcaaaggtgacttgagaaactggtgttgatgcctctgtgtattcattctgtgttttctccaagctagctctgccttgactgtctggaagaagagtattcagaggtttagaaaaaaatggctggccaaagcacaggtcaggagaatcactgaacctggaggttggaaagaaaacataattgtcaccagcttgactttctcttttccaactttctggtggtataagtctagataactttcatcctcctttttttttttttttttttttgagacggagtctcgctctgtcacccaggctggagtgcagtggtgccatctcagctcactgcaacctccgcctcccgggttcaagcaattctcctgcctcagcctcctgagtagctgggactacaggcacccgccaccacgcccagctaatttttgtatttttaatagagatggagtgtcaccatgttgaacaggctggt

SEQ ID NO: 123064 - DNA, 1046 bp, Homo sapiens
acaacctttcctggatttcccctgggtagccccaggaagtccttttctaccttgtcatggaagcttacactccaccattctgctgcttatgatacactatataattgtgtttgcatgtttatctccctacttgacagtaacatccatgggaacagggctttgtcttttcacttgtgtgtccccagcacacagtccagtgactgggactgcaaatactgttgtgtttgtagaaggcctgaaaatgtttggaaaagtcacctaaaacacaggagagagatcagagtcaaagccggggaacaagtagtgagaatgtggagtgatgagattggggatggagagggccagtggtgaggaggggggcggttgaggcttggaagctttactttagggcactgggagggagaagtctgcaaaagagcacaactggggaagaagaaagtttagccaggatgaggcagtcatcatggcgctcacaggtggggagagagtcattgtaagaaaaggctattgaatcggttgttaggtggtgattggtgacctttgaaagggcagtttcaaggaagtctttagattaagaagccagatttcctgagataagaaggatttttataagcagaaaaacaataaaagtaattgttttaaagaaataaaggtgagtgaatgatgccaacagaacagagagggaagggatagtattttgaggtggtggcacggtacagctgatattattacatgttttaaaaactagagcttatgaaaacagggccgtagacaaaaggagtcagcaggaggggaaaggattacagatatggaaagagaatgggaggatgttctctgaagaagcaggaaggaggcagtcaactcagggcaaagcggagggtcggaggttgcggcctctgtctcctagagggaattggggaagcgtgttatgagacggagccagagatcgaggctgttcattacatggtgtgggagccttgcttgcaatgtggcccccgccatattgttagttctttggtgaaaaggatgactttatttggtgctct

SEQ ID NO: 123065 - DNA, 1037 bp, Homo sapiens
agtgacttgtaaaattcagagactttttcttagtacaacaaaccaaacttcttattctaccagatgctgctcctaccagacttctcctaccatgcagtatttgggactttagtataccaaagaagtatttgttatttatctgaaatgtaatttaactggggctcctgtattttatctaattgtggaagacttgactttgggagaaattctgtcattgattcaaggaaaatctagaaaaataattttatcttgtatgtcagtcacttatgaagtgattcattctttaatgtaccaccactatgatgactgataacatttattaaacacttaactctaatgccagatactgttctaagcccactgaatgtattatctcatctaattttcccagtgatcctactgcttactgttactgttgcagatggaaaaatggaagcacaatgattagaaactttcccaagatctccaagttaattagcagtaggaccaggatttaaacttggacagtctgaggctgtggagctcatattcttaactgctacactatactgcctttaacaatgatttatttattgggaatctgttattctggcagaagtgcagagtacaaaggcagggtcctagctctcaaacacaatgtggaaaatactgaggagacaaactaaaaattgctgtatgggaattaaagagggcagataacttctgcttggagagagaaagaatagctatccataggttcaccatagatttggtgttctgaacagaactgtgcagacatttcagatcatggttctattttttgttcctttaatcttttgtaatgcttagattatctaatgtatcttccagtatcttgtatctcatagctttgctattggactatccagaagtgagggcattgttggtttccctttttatttagcctgagtaacctctgtctttagtgacttcagtcttaaataagaagaatggcattcgtttggttcgtttgtaaatggccttggagttgtgctttgagctttgttgctgtcataata

SEQ ID NO: 123066 - DNA, 1063 bp, Homo sapiens
agtcttgctctgtcacccaggctggagtgcagtggcgtgatctcggctcactgcaaccccctcctcccgggttcaagcaattcttctgcctcagcctcctgagtacctggcactacaggtgctcaccaccacgcccggctaatttttgttatttttagtagagacagggtttcaccatgtcggtcaggctggtctcgaactcctgacctcaggtgatccgcccgccttggcctcccaaagtgctgagattacaggcgtgagccaccacgcctggccaagaataaagtctttagagttggtaatgtaaactatttcttttcctgctgtattaaattcattcatttaataaaataatatgaattgcatgcccacagtgtatcaaacctggcactgggcaccttgttgctgtaggttcagtgagccatggcctctgtatcatggtccagatcatgtgtttagtgggagattaaacaaattagtcattgaacaaatcactacaagtagtagtgatatagaagaaaagtataggtttcgatgaaagtgaacaatgggaggtctaaatagagtccaattcagaccttgaagaaatggcaaattaatctgagacccgaaggatgatgggaagagagtgggtaaaaggccaatccactggccctctgtctctttacacagcaactaagataactcttgcttcttcctttacccaccagcccctgtaatcatttgattgccaaaatatctggtattcaagaaaataaaatccaatttcaacacacagggaaacttttcaaaaagttactcatcccagctacttgggaggccgaagcaggggaggattgcttgagcacaggagttggagactgtggtgaactgggatctgcactctagcctgggtgacagagtgagtccctgtctctggaaaaagaaaaaaaaaagttacttacattcatgaataaatgttaggtttattcataaatgtgtggacatttttgtttagtatttgcaaggcgtttcttaaggaaaattttcataaaggttagaaaattatggcactatgtgacaa

SEQ ID NO: 123067 - DNA, 1093 bp, Homo sapiens
gtcccactccctactgcccctccccaccatctgacctgacttcctcccctaaccagccacagaactaacaacgttcgcttcccagactcccttgcagctacagtacaggtatgtgacctaggctgtgccaccctgacccactcattggatgtggatgacaaactgagggatgttaggcagtagctgagtaggttgtctggatctactggcaagcccagcagcactgacctgctctgggagctgcttcagtggctccacaagtgtaggcatccacacttgcgcatgctctgtgatgaccagcaggtggcaacagcagcagtgtttcactgttacagtcctggctgattggcaggtaaacttatcctctggccctcctggagattctgagaactccttaatatctcttaataaataggatttgcttaattaatatgatgaaactggattctattgtttgcctctaagtgctcagacattgctttcatatctgctttaacaaggcactggctgtcttgtttcagtaatctgatgttctttccctaaatactgatagtggttagatcttacatgttctttatcagaatgtatgtgatacttcagaactgtatataactaaaattggggaaaactcagcatttaaaaaatgaatacagagaaagctttttatgtcattgttactttccattcatgggctttaatcatgaccatccagtttctgcaaaccctacttgtagaaaaaaatcagtctgacaatgcaggcaataatcaggaactgaaatattcatccagaattctccaacaacatgaaatcagagagtctggtgagaacagaggctaagtagagtcagaatgtgacagtatcctacctcctggactgttggtgtcgtcttggactaggtaacacacttaagagaggcagaaagtgttatgatacagccaaagagtaggcatgggggaaatcattgtgcagaagatagactgtttacttccatccctttctcatcaacattatagttcaccttggatttaaacattttgtctatttttaaaatttagttttctatgtctctaacgtttttctaaaacacagaag

SEQ ID NO: 123068 - DNA, 1043 bp, Homo sapiens
aagacaaagacgctaatgttagacacatgacagggtagagtgccgttctgaagtgtatctttaagcccaaagaagcgggataaatgctggtggaattcccaaaactaccacgaatgacaaactttatcgatactatcaagatggattctgttcaatttctgacgatgtatcagctgattttgaaattcattagtatagtggttaaaaacacaaggaaaagaggatatttaaattttaaaagcagactttttaaagaaataaatgatataaagttacatttcaaaactcatgggatgtggccaaaactatatgcagagggaaattagtaagctcatatatttttaaaataaaaaagaataaaaattaagcacgcaactcgaggtaaagtataaagaaacattgaaaaagcttatcataaaaataggagaaaaatggcaaacccactggagtttgtttcatatatttacaggtgttctgggtaaaagtagagagggcagggaagtggcaagtacaatataaaaaggaagaagagtgggcactgtgtgtggtaaaataggaagttttgtttatttttccagacagggctcactctatcacccaggctggagtgcagtggtgcaatcttggctcactgcagccttgacttcccaggctcaagtgatcctctcacctcagccttcccagtagttgggactacaggtgagcaccaccaggcttggctaatttttgtatgttttagagacagaggtttgccatgttgcccaggctggctccgaactcctaagctcaagtgatccatccacctcagcctcccaaagtgctgggattacaggtgtgagccattgcacctggctacaaaatagaatgttttgacattatgatctgggaactcaagggcatgtttaaaattctattctttctattttatttttgcccaaatattttctttttttttttttttggagacagagtctcgctctgttgctcaggttagagtgcagtggcatgatctcggctcagtgcaacctcctcctcccaggttc

SEQ ID NO: 123069 - DNA, 1037 bp, Homo sapiens
gatcctaggctaattacctagcatcccttctccaaactctatccagaatgaaaaaacagattgcaactgtttcttctctggttaaaaagtcttcagttccctaccaccactgttccattgccttcaggatgaagtgtaaattccctaacatgacatagaggagcccttcatgacagaatgcctccttattttcttcttgagcttcaattctcagtagcctcttcccccatccatatttcccactgtgttcaccttccttggcacgtgccaggaccctctgccttgagggaatatctgcttctcccctattgcttcaacctgatctttagattagacttacaggattcagttcagatgttacctcctcttggaagttctctataatattccaatgctggttagtaaccccttctctgagttacctatcacagtgtcatacatctgtctgttttcttgtgctaggcaataagaacctagagggtagggaatgtgtattgttcattaccattgataccaagaagcacataaatgttggctatattactttgttaataattgaaaaaaatttaagatataaaggaaaattctggtgtatcatctggtttaatatcagaaaaagaattagccaggtattgtggctcacacttgtaatcccagcactttagaaggctaggcaggcagatcacttgaggtcaggaattgaagacccgcctaagcaacatggcaaaaccctgcccctacaaaaacaaaaaacaaaaagacaaaaaagttagccaggtgtggtggcacatacctgtagtctcagctactgtggaggctgaagtgggaggtcaaggctacattgagccaagatgttgccactgcactccagcctgggcaacagagcaagaccctgtttcaggaaaaaaaaaaaaagagagagaaacaaaatggttgacaaatgaagtagatctaagaaaaacagaaacaaaatggaaagcgttaccctgcccccttatttgaagttacaaaagttacaaactaactgttcttacctg

SEQ ID NO: 123070 - DNA, 1112 bp, Homo sapiens
gaatgtgttttgtgtgtgttttgttatagacaaaagtagctaaaagtttaaaagaaggtttttaaaatcaactcaataaatataggaatagtttacagcagtagtagagaaattttcatgtaaggagttgttcatgtaagggttagaaggagtagaaagggtaaaggattctattgctttaagctttactctgtgaacttaggagtgaaattaatttgactatagaacatacttctaggctgggcgtggtggcgggtgcctgtaatcccagcgacttgggaggctgagtcagaagaattgcttgaacccaggagttggatgttgcagtgagccgagatcgcgccactgcactccagcctgggcaacaagagtgaaactcggtctcaaaaaaaaaaaaaaaaaaaaaaaagaaaagaaagaacatacttcttgttctggccacatatggattataatacttcctaagtactataagatggtgattatatgagtatatgtcgtcattccctgattagtcaaggagtattttctctctttaggcatttattttttccgtcaactctatttttcttccaactcttattacaatgtaattaatgtaggcatgtgagagtgtgtttgtctatgtgattgttgaaatggtgggggtagagggggagatgaatttccttggaactgttctgttcatatctttcagtgtatgtcattctgttgatgggaaattcttgacatcttttcaagttttggaaataaagtggtcctggcttatttgctttgtggattgctcctttgtcctcaaagtctgttcatgaggtatagacgtggattctgtagacccaggctttgcaattttaaccttattttgacatcttaaaacctaccagtctttaatattgaacttggtgtttgggatattcctttatatagtaggtgcaaatttggtgaaattgaaggggtaagaacaaaaaggaacatcacatttttctgtcctcaagcattcaattaattcttactacagagagtatctagttgcagtggatttccaaggagtcatgggctgacatgaatttaagtatttctgaaaaataattttagatgaaaggcattatgag

SEQ ID NO: 123071 - DNA, 1045 bp, Homo sapiens
taagagaggactactgtactgtactttgcagctgaggtgaaacagacttgtgaatgggtatggagaaggatttttccatctttatctgggctttttggcaagagtaagaggatacatagggaggagatatggtttgcctgttttgcttgtataattttgttttgtgttttgccaggaatgaagtcaaattttgagctgatctagacgcactaattctgtgtattatgcaaactaatttctaatttattctcatccccactattttatggaaatcaaaattaaactggtagcacacaagtgaaatcacactggagtggttttgaagacataattatctaaatatttttggctgcatgtgtggataccactccctcttgtagagataataatgttaaactttaacatgatgctggatgttgtaatcctacaagggagagaagtggttgccgccctaaggtcatggttggcaaaggccagacctttgtgctgtccagaggactacaaatcctgtgagtgtgcatcatcttggacctactccctttcacaaagcttcctaggtatttatttttcagtctcagtagcaatgatcaatggtgtcagacaatcataatttcaatggatagttcttattttttcctagtttgaacagtgtgccttttcatgttttattctcagacatacagttgtaaacacaagggctttttaaaattattttattattttttttttggagatagagtctcactctgttgcccaggctggaatacagtggcacgatcccagctcactgcaacctccgcctcccaggttcaagcaattctcctgcctcagcttccggagtagctgggattacaggtgtacgacaccacacctggctcattttatatttttagtagagatggggtttcgccatgttggccaggctggtcttaaactccttacctcaggtgatcagcctgccttgtcctcctaaagtgctgggattataggcatgagccactgtgcccggcccacaagggatttttttttaatatgataactttat

SEQ ID NO: 123072 - DNA, 1087 bp, Homo sapiens
tcttttctccatctgatatgtagacaccaagtttatttactcatttttcatttggttgaaattgcatcccccagatttctatttcatgttcttgtttgtatcctctatatttaaaaagtcaagaaatagtgaaggtaagacgtatttcaattatttaaaaccacttctactctactaaacatttttggccaaatactttaaacgatatttgagcctcattaatgcgaatgggaatgatataaaatgtggctgaaaaagctgatctgaccctctggttttccatgaatttgttaatgaaccactaatatcccagtgcagagaattcacatgactttttactagtttgtgttgaaatgctataatccccattttgcatcctagatccacagtgtttgctcaatgagtattttgatttgcacataggagacctacaaaaatgtttaaatgcaacctgaattaattgaaaatagagattacagaaaattctgtgactcaagaaatggggctcagagaaaagaaaaatagttatttttctacaatgacaatgacaataacaatgacagaagcattgttattccttctgtcattctctaaacattgaagaattgacagaagagtctcactcctgataggaaaagcttttggtactttacatagttactctctattttggttgtaaaatatcagagatgatgatagttttaaagatgtctttcttttctaatgaaatgaaaactcaaagaattctgacttttgtgtttacctaatgagagaaatcaactttagtaattatttagagagagctcttattgaagcaatgaccacacattttcttctctcggtgccatttgaagcattttagtaaatatatgtacacagtctttaaattggacatgtgaagggatccaagtagagttagcttaacaacaaggctaactaacgtgtcagggctggaaggaacctccgagataccctgtctgatcccttgtttggcagctaagaagggaggatgcagaaaagtgagttagcttgctcaaggcctgtacccaacagggcccagtgaggctatgtccttacattcctttgt

SEQ ID NO: 123073 - DNA, 1050 bp, Homo sapiens
ttaactataacatgttctgtcaaattagaggggtttgtttgtttgctttttttttttttagaaacagggtcttgctttgttgcccaggctggagtgcaatggcacaatcatagctccctgtaaccttgaactcccaggctcaagggatcctccccgctcagcctcctgagtagctaggactacaggcacagggtaccatgcctttctaattttttattttattttattttattttatttttgtagagatggggtctctctcttttgctcaggctgatcttgaacatctggcctcaagtgatcctcctgccttggcctcccaaaatgctgggattataagcctgagccaccatgcccagcctagagttttttttgaaaactacagtattttctatcaaatacttcagtttaatctcctaaaggtctgctgtatttgcacctagatgtccgtcctcatagagcgtaggccctcatcagctcttacttggacttctaaatgatcttctgtcctctcttgctttctccactcttgttcccctttgatccatccatgagtctacactgtctccagagtgatcttcctaagatacaaaaaccagctgggaccagtggctcaagcctataatcccagcacctggggaggccgaggtgggaggaacatttgaactcaggggttcatgaccagcctggccaacatggtgaaaccctgtctctactaaaaatacaaaaattactcgggtttagtgcggcatacctgtaatcccagctacttgggaggctgaggcaggagaatcgcttgaacccaggaggcggaggttgcagtgagccgagatctcaccacttcactccagcctgggtgacagagcaagactctgtctcagaaaaacaagaaacagaaaaacccacaaaaacaactggatcacctttctgtagctccccattgcctacagaatggagcttacatcactttacatggcgtgaaactttacgggatctgcctccgtcctctcccctgcagaactagcatacagactcattgctttttcacaac

SEQ ID NO: 123074 - DNA, 2185 bp, Homo sapiens
gttctttgcttcttccagctctggtggctgaatcacttcgatctcagcctctgtggtcacattgccttttcctcttccagctgaaacctccccctgcttctctctttgaaaggacacatgtgattgcgtttatagcccgcccagggctatattagcccgcgctaatccaccatagtctacatctccagatccttaactgaatcatacctatgtatctttttcccatgtcaggtaacatttatagatttctctccctccacccatgctaatacttaaagaattggtaattgtggggctattaattttctaccaagttattgtgtttgccaaacgattgtgttggccaaattcagtggtgtactggagccagcacgtactgactatgggagccagttcttaatttcaagattttagcaggctggttgttaaattgttggtagcttgaaagtggccatggtgggaggctttatatcatggaaactggcaaatatgtattataagtcatggcttcccacgtccctcatccccgccccagagagccagtttactaacacaccactggttggctaaatctcccgactgctagaaaactcagctagagagtacatctcatcccgaagaaattactcaagcccagaggcttgactcaggcctactacttgtttcttgtatttctttttttgcagtatgttgaaagtaactgtgcatatctgtctcctacaacacattttatactcctctaggggagggccctatcttttgtgctttagaatcagtctgcctggcccatctcctagcaagagatcaataaatatttgaactgatccctgtaactgggctctttgccgtttctggaggtgatgcacatactgatgcctagctgcaataattctaaatatatgtatttgcatttctgtctctttccttgtttggaaacgtactcgatatttttgcttcctggatgctcctgattaaagaattttgttactttatattcaattctgttaatagattattaaaagtaaggttcatctgcttcactggaaatcactgcttgtatcaagcaatgtgtcacatatatttagcatgtaggagtagcacagtaaaagtaggctgaattgatagaacgttaaaagtcagatatattcggtgtaagcactatagagccatagtgagtatagttttaaagatagagttaaatagaataaatgctttaaaaggtcacgtaaggtcgattggaaaattctttgtaattttttaaacatctactaggaaaaactgatgtgaaaaaattttccactggcatggagcaattcaattcacctagtagaacccagcagatcccagcctgtgtgtggattatcaggtagaatgtaggctgctttttgatttggctcactgttgattgcactgggctggtctggatcattggattctgaagttctcgtggatggaagcagtgaagatgtcctaataaatgaagaaaagcatacgcctatcagttaataagcttctttcttcccaaagtgaaacagtatggccatatgaatggggttttattattaaccctttaattcaggttgtatactttttgccagtttatacattttacttttgctttttgtgatttagtgataaaggaatgattgctataaaggcctaattatctccttacgctgaaacttgttaagatcaaaataaaaaggtaacatggaaatgatggatggttccatttttttcaccctgtcaaccaacattggctaaatgctggctgtgtataaggcattataaggcaggggtccccaaaccccaggctgtggcctattaggaaccaggcggctcagcaggaggggagctgtgggcaagcgagcattgctgcctgagcttcacctcctgtcagacaggcagcggcattagattctcataggagtgcgaaccctgttgtgagccatgcatgccagggatctaggttgcacactgcttatgagaatctcatgctgctgatgagctgaggtggaagtttcatcctgaaaccactccctaccctgctgtccatggaaaaatggtcctccatgaaactggtccctggtgccagaaaggctggggaccactgctgtaagggacaggaagatgacagatgagcttcctggcctcaggggcattatagtctagcactgtgctaact

SEQ ID NO: 123075 - DNA, 1064 bp, Homo sapiens
ctggtatcaatagccccttacctattccttttgctgattatatcctgcacattctcaagttcaaaaagataggtctgagtgcctcctgagtgctccatgcttgccccatacagtcactaggtggcagtattgctgttctttttcttgagaggaggcgattcccagaggattgcccgagatcaatggtcaatacacaggcctgctgaaatcaggattagaacccagccctgcctgattcaaatatttgtgctatttgcctctctctgtgttgttccagcatatttttgagaggggaaaggaaaagactaaagctttgcttcttacattatccagtaaaattttattgaccatccacaaagttaaattttttcttaaggaactgattatcactgatggacaggtgaggtgtcagtggtctgacatcagtaacccacggtgcaaaggagggaaatcccatatgaccaggcttcctggtactatgccgattctcccaatggagagggtaaacagccgcttcaagggtcagggatgatgctgaagagtatggagaactggggagtccatacagacaggttggactctgttgttggggatgaaatggaaggcagaggagcttgggtttcatgaggcagaggccccgggatagcagtttgacaagatcagggctggagttggtggttgattgggcaggatgtgtaggccaaaaggaagaaccagagggaagaggggcaggggctttcctcagggagtgaggggaaagggagaaaggaggggcttgactctttgtagttttatgcaaagggaggttatctttgagtttgggagggaaggtggaagtaggcttcagggaaaacctaaaggtttggaataaccagagcaacatgaaaggtatgagtaggccgggcgcagtggcttacgcctggaatcccagcacttttggaggccaaggccaacggatcacctgaggtcaggagtttgagaccagcctggccaacaaggtgaaaccctgtctctactaaaaatacaaaaattagccaggcatggtgatgggcacctgtagtcac

SEQ ID NO: 123076 - DNA, 1022 bp, Homo sapiens
ctagagactattttaaaggattatctcatggaagctttcagaacttcccccccacccccgccaattgaatgtgggtgagaaacggacgtgaacttaaaaaacttaccaagcttggttcacctctcaggagcaggtctgcttaaattagctgcattgagctcctcgatgtccttttgcggcgctgctgattctttcaagaaccttggctaccttgccaaatgtatcactcctttataatcttaagcgttttaacaaatgaaatacagttcagtttctgcacttggttttaaatgtcatgatgtgtctcagcaatccacttagtccatcaaaatcacattttgacttgtccacataatccttttagactgtttctggatttattaagtgctttttcatgcagttgatgaaaaagctttcattttaaaaataatttccacatgacgctggaggcctcccattgtagtttaacaatagttgagatgttgtattgtttattcaaaactgccaagtagcgtcagtgctggtggatgggaaccctggatggaatgctgggagagccctggggaggtaatttaacctcttcgttgttcagtcctgatgtccagtgggtttcagcagcgtgtctaggtttactccattgccaggcagaggtagattctgcctcctctgcccctttgcattccttggatcgaccattgactactggaaggcattcagaccattacctttctatgccttttcctttgcataagacctgcaaaggaaaacatactttcatcctggatattttttggttttagcttccaagtagggtttatggcctttttttctcttggggttgggaagaagggcagtgttggagaggaagagacccagaaacaccaccatgctaataataaggaggagaaagtcgggccatgttggagtccctctgccaattatacagatcgtggcacataggtgcaagggtggcatggcaacctctggacccctcactttccactttctcttacccattgtct

SEQ ID NO: 123077 - DNA, 1054 bp, Homo sapiens
gcaatggtgcagtctcggctcactgcagcctcagtctcctgcattcaggtgattctcctgcctcagcctcccaagtagctggaattacaggcacctgccaccacacccagctaatttctgtacttttagtagagatgggctttcaccatattggccaggctggtctcgaactcttgacctcaggtgatccacccaccttggcctcccaaagtgctgggattacaggcatgagccactgcgcctggccttacatttttttatattgtactggttaccataaaacactaaattatgtagaatttgttttgaaaaaaatatgtaatagaatccaaaacaattaggtagctcagaatgttttcttaggttatactctgtgcctgggtcaagaggtaacagacaaataggatccaaattttacagctagatgacttggacacacagagagtaggtgacttgctgatgattaaacagggaatctgatggatctccaggccctaagctctgaccttggactcttgcactttttgcagtctaatgtttagaaacatatgggtgaacctgaattaaagagaaatacatgtaagtccatttactttaatttcattttcattattgtacttaagagtgtgaggatgcagtcgtctttgaatgaaggcagcattcagtattagtgggattgtttagcttcacccaccctaccacaaagagatgaggaaacgctggacgttgttttagtctggtcagcaaatccaaatctatgagcattgtggagaaagggtctatgttcacatatatttttagtagttcttagaagaaagaaaaatgctgcttttttttttttttttttttcttccagatgaagtcttgctttgttgtccaggctgctagagtgcagtggcatgttcatggctcactgcagcctcaaacttctgggctcaagccatcttctgacctcagcctccagagtagctggggctacaggtgtgcaccaccacatctggctatttttttttttttccaagatggagtcttgctctgccacccaggctggagt

SEQ ID NO: 123078 - DNA, 1042 bp, Homo sapiens
atgaagttaggaaagttggtcaaggccacatggtcagttgtaatggtggggcttgagcagcctaattcttgggctgtgcgtgagccccagcggtgcattgccagctttcccaagcagcctcgactctgcgtctcacattcttcctgacatccacattcctccatagctttggtcccagctcacccttgcaccatgtccagcaccatttctatgagctttgacctatgcattctgcccacccttggaggcctaagcaacatccatttgcttgtctgcctttcttagccactttatttgtaagtaatatatttattgggaactctccagcacatattgtctgtatcagcatttcttaatctttggggatcgtggaccctttacataggcattattctccctaacaaaaaaagtgtatatagtgtatgcatgtaaatttgcatgcaatttcatggagttacaaatactctgaaaaccagtttctctttacatgcctagcatcttctagtaaccaacagagtagatgggcaagacagtggggttgaatgaaatgttcctgtcgtgtaaatgtctttcctgtgtttaagatttcttcctaatcccctaaaagggagggatggtctcaatctttgaatatatttgtatattatgatataactggcacagttatttgtcttataaattatggagctttgtttgtagtggcagttgaaggaggccgctctgctttgttttttgccaaattattttcattacaagtaactgcagttcgtagttagtagtcattgatcaggaattttctttatgggaagttaactggacaaagtagaaataaaattttcagtatggataacaagttttatcaaacttaataggctcaagaaaggatttttgtgctacagatcctactgtattataatgatgcctattttatagagaaagcaggaattattgagttcacattgagttgaaactcattttaaaattttcaactccattttttatctgtttcaactgacttggacatagagaacttgaaaatgac

SEQ ID NO: 123079 - DNA, 1044 bp, Homo sapiens
ttcaaaggtggttttgaaaaaaataatcaacgtatgtagtttacaaggcttcacagtgtgattttttttttttggtgggagtgggcggggagacaaggtcttactctgtcgctcaggctggagctgcagcatggcttaccgcagcctctaactcccaagctcaagcgatcctcccacctcagcctcccaagtagcttagactgcaggcatgtgccaccatgccagggtaatttaaaaagattttttgtagagacagggtctcactgtgttgcccaggcagttctcaaacttctggcctcaagcccagccagttagtgtaaatcttttaatcaaaactttggtttgtctactttgggggaagtaattgtgtactactaaaaaaatctgaaaaatatgtaatgtgttatttctgtagactatacaactttatgaagcctggttttgtagaaatcaatttctacttactatgtgtttgcttattaaggtttgaagcttcacatatggttagaaagaaatccacttaccacaaatgccttctgtaacaattgccacaacaactaaatctgtgcattaaattcaggcatttgcttctctttaagaaatactgatgtaaggccgggcgtggtggctcacgcctgtaatcgcaacactttgggaggccaaggtgggtggatcacctgaggtcaggagttcaagaccagcctggccaacatggtgaaaccccatctctattaaaaatacaaaaattaactgggtgtggtggtgcactcctgtaatcccagctacatgggaggctgaggcaggagaattgcttgaacttgggaggcggagggtgcagtgagccgagatcgcgacactgcactccagcctgggcaacaagagcgagactccgtctcaaaaaaaaaagaaagaaagaaagaaagaaatactgatgtaaaattattgggcaacaaataaatttggtgctttcaggacataataggatatgaccgtcattgaaataattagtagtgaagattccttgcttcctcatttacagctcag

SEQ ID NO: 123080 - DNA, 1030 bp, Homo sapiens
ttataccaaattctcaagtttttagataatgtgttttatctttaagatattttcagggaatatctataattgctcccaggagtagatagagaaaagaagtaatttgacagtgcttccagatggctcttaaaaaaataatacattccttcaagttcttgattcctaatactatggattttgttgtatctccaaacaaatcaagtaattctgatgtaagtatgaagctgctgtaacccagatttacctttattaaaacagatggtacaaaaaaagaagaaaagtattttaccatcccctttgggcacaaagctcaaacttatttatccccatccaaaggcagtttctctctggtttggcctgacttctgggagcccagaactcttaaaagatgttttcttgaaaatagtgagctcttttcttgtctgtcctagtattcttggccgagtttcctgtattctggctgctcctactcattaatatgcagcttgatccatagtggctgggaagacagcagagggttggaagttagtgcaatgaaagctcctatgcgggctttctgaggaaagatgcaaatgtacccaggaatagtgtacccaagtttcattttctcaggtcagttgaataatcgaagctttcaacagatttaaatagaaagtttctttttttctttttcttttgatgtagattcaattaggacttaactttcctacctccttgacagtaagtatacttttcttgttgacaataaaatgattaattaagtattgcaggtatctttttaatttttaatttttgtgggtgcatagtaagtgtatatgtttatgaggtacatgagatgttttgatacaggcatgctatgcataataatcacatcatagaaaatgagctatccatccattcctcaagcatttattctttgtgttacaaacaatccaattatactcttttagtttaaaatgtacaattattgactatagtcactctgttgtgctgtcaaatactatgtcttattctttctatttttttatac

SEQ ID NO: 123081 - DNA, 1214 bp, Homo sapiens
gtgcgatcttggcatctcagctcactgcaatctccgcctcctgggttcaagtgattctcctgcctcagcctcccgcatatctgggattacaggcacatgccactacgcctggctagtttttgtatttttagtagagacggggtttcaccttgttggccaggatggtcttgatcccttgacctcgtgatccaccctcctcggcctcccaaagtgctgagattacaggcttgagccaccgtgcctggccaagactaaggctttttaagaggaacttaaatgcttagaaatacatgtcacctagttagacctggaaatataataggtgtggaaagtcaaattgtcttgagtgcagaatgaagaaatgaagttttacaccctactaaatttaatttcactgagcaatttaatttttccttgctccagtgcagttactgaacttgactctgtggtagctgtttagctctgcaggcaagagaatgcagaggaaatccttgaatttcaacagcctctccctgtgagtgggcacaagtgcaactgattatccaaaagtagttgcttaaactaatttagactatttagctaacctcaatcccagtgccgatcttatgttgcttagaaaattacctgttggtgattataataaatggaggtaattaaaattttaaaaagtgatggaacattctgcatgtgggtgtatttaattatctggcaggtgttcatatttctacagtgtgaaacttgtgcataaacaatagcctttctgttagaaattctgttcacacttttgtgtttctccccttttagaggtaggtattttcaattgcttggagaataacagtgatgatctaactaatttgttttgcagtgtgtgtttcctaagtggttatatatttttttgcttgttttacttcaactgattctaacttttcttacttgaattactcttattcagtaattgcatcttcataaaaaatgatatgaatggaaacatgattttctagattttaaagtaattttagaaaaattgggcttttaaagttctgtgatatagccataccttaattttttttttttttttttgagatagagtttcactcttgttgcccaggctggagtgtaatggcgcgatctcagctcaccgcaacctctgcctccgggttcaagtgattctcctgcttcaacctcccgagtagctgggattacaggcatgagcc

SEQ ID NO: 123082 - DNA, 1097 bp, Homo sapiens
atgatgtgtctacttgctaggctatagcgcccagatgtttggtcaaacatcagattagatgttgctgtgaagcaagttttttttcatttgaataaagctgggtgggcctcatccaatcagttgaatgtcttaagataaaaagctaagtttccccacaccctgaccccagggagaaattctgtctccagactgccttctgacttgagctgcaacatcaactctttgctggggctccagcctgctggcctgctttgcagatttcagattagccagctccgacaattgcatgagccaattttaaaaataaatctttctttttctaggctgatcagtagataaagatagagctacagattggtctgtatgtttgcctatatctttctgttgatttgtgtcatattcgttctgtttctccggaagaccttgactaatacagattttcacatagctagagtcaacattgtgttttctatttattgagcttgttctttagcatttagctccatccttgattccttgagtcctttgacagacaattcctctctttccaggcagttatctgattttccttttgcccagtagtgctctgtgtgtacctctcttaggccattatgttattgtaattcttggcatatgtgttttttccctaaaactaatctgtgaacttcttgcacactagaagctcctactagcttgtgtggcttgggtacccagcctacttggcgcgtaagaatttgtcactgtgtgtttgttgagtgaaagattagctctgatctaactcttaagtatgacactaggaaagaaatgaaaaggagaaacattaaaatgtaaagtaaatgtgaccaaaaagccaggagaggttggcaagcacatggtgaatatcttctggatcttcccctggaacgcaggtgtgaaatttattgtggtgatctctggaacaccacagtgaccattatctaatccgcatttgtttgtttttcaaattgtcaatctttatccagacttgactttgcccagtgatggctagataaagccagactttaaaatatttcagagacatttcaggaaaacacagaagtatcaagaaggacaaataa

SEQ ID NO: 123083 - DNA, 1021 bp, Homo sapiens
cttttcttttttttgagatggagtttcgctcttgttggccaggttggagtgcaatggcaccatctcggctcactgcaacctccgcctcccaggttcaagcgattcttctgcctcatcctccctagtagttgcgactacaggcatgagccaccatgcttggctaattttatatttttagtagagacggggtattttgtatttttagtagagactaacccctgacctcaggtgatccatccacctcggcctcccaaactgctgggattgcaggcgtgagctactgtgcccagccacaatttcttttctaacaaggtctctcactctgtctgataagtcaccaggtccccatgttcctggaggggctgcccatgctggtttaacctgtggtgtgtgtccactaaaatgaattctttctgagtggtcctaagtgtaccacacagtcaaaaacaaagatgttagaatatttttttgatttcaaaggaagttaaatattaactattaaaattatagaactgtataaaattacagagctatgaagaaagtagtgaacttttttcgtagtcctaaccctcagatataatcaccgttagcagttggtacataacagaagcatttgaaaatcaagaatattttctaattatcagcacttcacttgatattctcctgtctacattaatgttagtgagaaaatagaaaggacatgaaagaagagaagataatgaacaaaatatacattccctgagcaggcaattaaagagtctgaaattctttttgttagctgttttgcattttgatttacttggaatttggtgagtgaatgaaattctagaagagaactgaaaacattgtggttgaacaaacattgacattttgtcctccttttcttttcctctttagaataatgtctcaagtatatgcatttccagtcagtcttttctagagaaattatgtaatgctgagtgatggttatgcgatcctccttaattttttatatacagcttaacagcagtttcattgacat

SEQ ID NO: 123084 - DNA, 1021 bp, Homo sapiens
taaagattgtggtgtgtatgtgtgttttaacaaacagcatgctgaccattaaaagcccttcccacttgcactatgcagtctttgtaaaaggatctgaatgtttatagaaccctgcaagcttttggtaaagtacatgtttttaaatcatgttaatcgtgtaaagaaaagacagacttgagcttgttaaaaattactcctgtcaagtgccatgtagcttcacatgtcaaacatgacttgaaaatgttttccccaagtggccatgtcttaacaatttatgttccagaaggagtttcttggaaggaattaagtaatgagaggtcacatttttctttcaagttcgatttccaaagtgaaaattaacttctgttttttaacttaaacttgaaaaaaattcagtgagagcctttagacttgtgcaatgattgtgttatatggaattgggcctccctatctctgttgccagaaatgaaacttgactgtgtgttttttgtttttttttttgtagctgtaaaaatgaagaaatagaagaagtaaaaaatgctgagtctgggaaactgttctagtcacttaaatcttagctacataaatgtgtgtttatattaatggggcaggacaaaataagaagagtcttttttttttttttctggttaaatactgccccctcacccccgcccaccaagtattgctttgcaaattcctcagactttctcattgaaaatatatgaatagctaaaagtgagtatttagcatgattagaaaatatcatacagtttttacagtgaaattccaatcaagttactggattccaagttacaggaattccagttggttattcattttttcttgatatttgagctaatggagaagagagataatagaaataatctagaaacattatctatctatctatctatctatctatctatctacctatctatctagctatctatgagacagtcttgctctcccagattggagtgcagtggtgcgatctcggctcactgcaacctctgcctccctg

SEQ ID NO: 123085 - DNA, 1328 bp, Homo sapiens
cttaatttttttattgcttgatttttaggaatagtttatgagcttcccaagagatgattaagcctttcctatattaagaaaggtaaagggggctgggcacggtggctcatgcctgccatcccaacactttgggaggctgaggcaggcagatcactgtgactcaagagttcaagaccagcctgggcaacatggtgaaagcccgtctctacattaaatacaaaaattaaccaggcgtggtggctcgcgcctgtggtcccagctgattgggaggctgaggctggagggtcgcttgaacctgggaagcagaggttgcagtgagctaagatcacaccactgcactccagcctgggtgacagagtgagaacctgctttaaaaaaaataaaataaaagaggaaaagggaggagaggcttctgttaaatgtctgcaacaacatagttgggtttatttaaaagtaggcattttctgccttttaatctagatatccacatgctaaatgtgaattgctttctgacttaggagtatgtttgtatctagaactgtgtttgaattttagtgtggaatgttttactctgagatggtgacttcatttgctaagtaaatgcaattggtcatgagtcctgtttggtgtatttgatttcactgggttggttttaacaacctgactgcggtgtactaggtggtgctgcgacagtgcagagtgacactgacagacatttgaatagagcagccgtggtcagtggagttatttttctctagtggttagccagtttaagaccaaagatttgtgctgaattactacagaaatgactaaaaagagcattattcataagtatagactcagacacataatcattgaattacgtaacccactatgtaagttttgtgtaaataaaaatacatcaacaagttttcagtcttacaaagtatgccgtaaaatgtttctgatgataaaattgaggtatattcatcctaaattccaaacttgtaaagtgcagaaaatataatgaagaaaaaaatcataacctagagagtattgcttcattttctctctttttttggccaatatatttatatgtttggatctatctatatttaattatagtaatcaatagcattttaaactgaagtgggtgcatctttctctgttcatgagaacagagaaatttgtgtcctgaattttgaaagtgtagcttatatcatgagctattcccccatgttgtagatatctagaggctgttttaaaaacgagaggcattggggtgcatctctctgacaatctgttttggatcccaagtaaagcccttttgatgtcctcaggggtctgcg

SEQ ID NO: 123086 - DNA, 1088 bp, Homo sapiens
aacttgacgggctcagcctgcacctcggctttcctcgggcatcttggaacgtgcagcagctgttcatctccgggttacccacactttctgaatcatcggagtcactgggagcttggtgaaaaacacccccaggtggccccgcccctggagattctgagtcagcgcagccgggtgaggccaggaacagacctccctagcaaggacccccaggtgattccaatgaggcgaatttgggaaacacccatctaggccgtgtgtgaggcatcttgtttattcagggcggcaggacattcatccattcatccattcctgaactgtattttgagttattctgttagtgctaagtggtgaggattacacagggtccttccttgaagtacttgacagtttcatgtggatggttagatatataactaaataataaggaatagaatgaccatttataacattgtttctggaagaaaatctgttctgaattccaaatcgccaatttaaattgcattttgagactacatcaaacttagaaaagctgaatgtaagtttctgggatgatggcactcctacacatataaaataatgatttcaaatgtttacagcatattttatctaaaaattaaactctgagaaacaaatataaacccttctggaataattttatttttcctttgggatggtggaaattttcttctgttttattttcacttacccttttgattggtttcataagacatttccacccatgtagaaaagcagttaccagcctggccaacatggtgaaaccccatatctactaaaaatacaaaaattaactaggcttggtagcaggtgcctgtaatctcgggaggttgaggcaggagtattgcttgaacctgggaggtggaggttgcagtgagccaagatcacgccactgcactctagcctgggcgacaagatcaaaactccgtctcagaaaaaaaaaaaaagaaaagcggtatcttactttggaaggatagacaatggttttagattattcctgtagggaaatcctttgttatactttacttcccctgcactccctgttatgattaaaaattgttaaaggtgttatc

SEQ ID NO: 123087 - DNA, 1026 bp, Homo sapiens
ttcatagcttcctcctcagctttaaaaagtgcaatgtcattatggaaagagaattatgtttaaatgcatttgccaaatattcagatttctaggagagttattttttgaattatgagagtatatcctttaaatcaaaacatcagtctcctcattgactcttgggtattgggaaaatgataacctgcttaaaaagctacctacatttaggttgaaattatttatctagccgtaatctagttttctgctatattaaagaaaaccctaatattaacattttagctgtatatattttaaaatcgagaatagcaaatgaaaaaatttaacaaaagagaaacatttgagtttcttaatattttggggagaaaattcagaaacaaaactaatgcaatatttgcctctggcagtcattttattatgtttaaaaaaccaagtttttccagcagtgaaggtgtaaaaagaaaaaaaaaatcgttataagtataaaataaaatgacttgcacctaactaggcccctagtaacttacttaattctgtttctcctcaaattggtttctatcctggaatgaatgacttctgcaggaactgaagttcagatgcagcaggagggtactgaccgccatcttgttccacatgccggtttcatttgtggtctgcacttgtcacagtgtgcacttcagctgcactttgggcaaaggtagaagagctggagcttctgtgtttgactgaggaactctctgagaaaaggagcttacaggccccccatgtttgtttgtttgtttgtttgtttttctgagacggagtctcactctgttgcccaggctagaatgcagtggcgcgatcttggctcactgcaacctctgcctcccgggttcaagtgattcttctgcctcagccttctgagtagctgggattacaggcgcacgccaccacgcccagctaattttgtatttttagtagagatggggttttgccatgttggccaggctggtcttgaactcctgaccttgtgatccgcccgccttggcc

SEQ ID NO: 123088 - DNA, 1077 bp, Homo sapiens
ctcagcctctagagtacctgggattacaggcgcccgccaccacgcccggctaatttttgtatttttagtagagacagggtttcgccatgtttgtcaggctggtctttaactcccaacctcaggcgatccacctgcctcgacctcccaaagtgctgggattacaggtgtgagctaccacacgtggccccatttttttttttttaataatcatgcaagaaggctttttattgaatataattatgcctgagtataaatgtacatgtagagaagaaagctgactatcaagacattaatttttgtggtttctttcaccttcacacactttgcttttttatgtgcttaaaagcagtgaaatgcctatgcattaccatctgttaggattcttttaaaacaatgcctcaaaccttgtttctgtgtaaaaactacagtttgaagttgttctgccattttaggcaggtcttcagaatatcatactccattagtatggatggctagacttttagacttggaattgaccgtaaaggccatccatttcgtgaattcttacccagagaggaaatccagtccaacagcattgcagttaattcaccccaggttaggctgtgggtaatgacacatccgggcctgaagcccaaaccttctgattgtctcgcctgtcgtcccactgcctgtgttccttccctttagaagagtgtggagccaggcacagtggctcatgcctgtaatcccagcactttgggagaccaaggtgggcggatcatttgaggctaggagttcaagatcagcctggccaacatggcgaaaccccgtctctaccaaaaatacaaaaattagcgagactgtctcaaaaaaaaaaaaggtgtggaaatggggagcaaagtttagatatgttccttaaacagtcctaaggataactgtgaccgttaattccacccttcttgtcagataaaccatttaatgagtctccccaggagcaattaacagaatccagcagtttaccaaaagcctctagcagttggggacagcatatttcagtgaccaataatagctttctaccataagaaaggatgtgagaat

SEQ ID NO: 123089 - DNA, 1051 bp, Homo sapiens
ctagggccatcactcttactctttggtttgttttctttttttttattttaagagacaggtctcgctcagtggttcaggctggagtgcagtggcatgatcacggctcagtgcagctgcaacctcctaggctcaagtgatcctgtcacttcagcctcctgagtagctgggaccataggtgctgccaccatgcctggctaattttttaattctttatagagacagggtctcactatgttgcacaggctggtctcgaactcccggcctcaagcaatgctcctgctttggccttccaaagtgctggaattactgcgtccaggctataatgactctcttaatagctaaatctattagcagacggaaataattgatgctaccttattacataaaatagagcatttataggacggtgataaaattaaagcaagcatttcttagtgaaacaaaccattgttcctgattgttcatcaggtaatttatcataaaattatttttcctttatacacatgtggagttatagacatttatgttgaatgctttaaaattgtctttagttttctctcatattgccttagtttgtagtaatttagagtaattagagtaatatgagtaattagagtaatttctcatgttgtcttagtttgattacttataaattattcagtactttctttcattaaaacattattaataatatgatatttgaaaaggtaatattctttattgaagttaaattagtttatgttctcatagcacattttttgttgatctgaataagttatgttacttggctaacaatgcccagacaaccttactattaactctagcaatctaggatgtagaattgtgttgagataagtagaagtcaaaagaaataaaaggttggaatcagtgaagaaattaaacatcatttaaattatcaacatgtccacctgagactgtaattgagaaggaaaaaagaggatcagaattgagtttcaagaagcagcctcttaactttcctatctttaaaggatcaaacttgataaggagtctagagtgtttccttgacaat

SEQ ID NO: 123090 - DNA, 1030 bp, Homo sapiens
gtctcaaactcctgggctcaagcagtcctcctgcctcagcctcccaaagtgctgggattccaggcgtgagtcaccacgcccagcctgcgttgtatttctattgaacagtgttgctctaaactttaggtattgctacaaaattaatattcttgaaacatcactttcttcctgccatttctattttttaccattttttttaaaccatgtcaactattttaaaggttcttaataatttggtcacaacctgtatgcacatgctgttgtatttttcattctttttcattcccctcaggctggttttctggatgcccaagaaacacatcatgttcattctcatcataatgcgtttgttcaggttgtacctcctacctagagttactctcacctccttgttctccttatcacgttacattcaagctgaccacttccataaaggatttcatttgtaccttaacctagcattctgccttatattattatctgttgatttttacatgtgttaaatctcagccttccaattggacaagaatgtctttgatggcagtgcttatgtctgtacatttttgcaacctctgccatacatgtactgcaagcatttagttgccttcagtgtattcatatcattgaattgggtcttgaaaaataagtaacaggtggataaatacaggtcagtgagaaaaatgaaagacagtgattataataagggatgagtaattcatgcaagattcccgtcctatttccagtcttcttgaggaacaattaagagaattatagaaaagattttagagctgtaatgattttatttttggacttttaaacagaattgttttcccaaagatgataaagtggtgtcttctcaaaagatttttttaatctagtgtcttgtcatgtttgtctctaatcagctccttactatgaaaatgattattgacacattaaaaataactctgggccaggtgtggtggctcgcacctgtaatcccagcactttgggaggccgaggcaggaaggttgcttgaggccaggagttc

SEQ ID NO: 123091 - DNA, 1061 bp, Homo sapiens
gtaaaaataatagaatactatttctgaaacattgtccttttgaatgaatcttttgcccagaggagaaagagctgggacttcatcagtcctacagaggagactgtgtgaagttgtttgggcttatttactaatgtttgtttagaaaaactctaggtatggcatcatttgatgttaggtactttcactagaacttggtggtgaggttgcaggagagggtaaccttcggatgtcttagatacccagcaaaaatatctgagagtggtgcatgatcaaattggcatattttaggtggagtacttgcttcctgttctttcttacatgttttcctgccagtctcttttgatcagccattttttctctcctcctcacctgtcagctactcctgcatctgtgggtgcaaagcagattgttaacggactctccccatggagtcactggaaggagacaggcatcttcctggctctgttgaaagaggctgcaaagacagggcacagataaacaggcccttcagtcaatgttgaaaaatcagggggaagacattttatgatagtcattggctatgtttctttttactccaactttgcagctttcaagataagaaaataacagaccagacctcacatttataaccactttgtgcatcatgttctaggctcacgtatcataaaccaggcaattttagttgtgaccactggaggtcattagagatcttatggtatattttgaagcagcttaactcaggcctgactttttgtcactggaaattgcatcctttgtccggtaactgaattcttttttctgtgagacaagaatataaaactaacctgttcagtgaaagtactttttttttttgtttgtttgtttgtttttggatagcagcagcatttcttcagagagcagactgtatttcatagtttcatgaatgttagtataaatttcctttaaacattttttttttgagatggagtcttgctctgtcgcccaggctggagtgcagtggcgcgatctcagctcactgcaagctctgcccccggggttcatgccattctcctgcctcagcc

SEQ ID NO: 123092 - DNA, 1028 bp, Homo sapiens
aaaactgttgaaaacataatctttagcaattaagcaaagttgctgatctagaaaagtaagaagtacaaagaaaaacttttcttagtaacatatatatagtcaatatggttttatttggaaaaataaatcgtagctacaaagagatggcaaagaggctggcttagtttccattacagtagcattatctgagaggaaaaacaatcagagaaaatacacctgaaagcaaactttcatttagatactaaagctgcaaatttagattaaaatgtaacacgggctgaccaacaacagaaccaaattgctttgttacaccgacaccactcattttcctctttaaaacacccttgattcctatcaagtagggctgagagtgatgcagaaactatataaatcattgcttctctactcctaaatgccaagggccttttagaacttgggaaagctggcacaactgtgaaactggtaagggaaaatattctttgtagatataacaaaagtgctttgacctaacatagttttgaagcagaggtcacttgctaattttagttaatatagcagcgtcaccaaacggtagcacatttggctctgcggagagaggaactggcctagcagagcacagcagggtatgaacgctgttgctggtaatagggaacaggttttctttctttttttttttttgagacagagtctcacactgttgccaggctggagtgcagcggcacgttctcgatctaggctcactgcaacctccgcctcctgggttcaggcgattctcctgcctcagcctcctgagtagctgggactacaggcatgtgccaccacgcccgactaatttttgtatttttagtagagacggggtttcaccatgttggcctggatggtcttgatctcctgaccttgtgatccgcccgcctcagcctcccagtgttgggattacaggcgtgagccaccgcatctggccgggaacaggttttcttctttttctcctcctctgccttcctttcctcctgttcatcctccttttccct

SEQ ID NO: 123093 - DNA, 1610 bp, Homo sapiens
ttagtagtataataccatgaagatgaaaattttgttaatgcatgtttttctgaaccagggaagaccattgaaacaagtatatagaagctattttgaaaaattacttttttccttacttctgagaacagaaaatgggaagtaaggtacaaaatagaggtagttctggttaaaacacaatactgtcaatttgaaagagaaaaataggaaagtaagtaagttagaatatggtggctaactgaaaagactgcctaaaatcaacattgattaaaaattctgaatgcaaagttattctttgggaaactaaagctcaaaatgagatctaggagttgatatagccagatgtcatcactagggaaaagaagctacattaacaaattcatctaccagggggcgggtttattgcaaaattcaggtgttaatacccattgttgcaaacagtgacttttctaaaaactagacattctatttccctgatttgtgtaataagaaaatgtttgaaattactaggatcttattttaatattaaacatataaagagactacatttcagccgggcgcggtggctcacgcctgtaatcccagcactttgggaggccgaggcgggtggatcatgaggtcaggagatcgagaccatcctggctaacaaggtgaaaccccgtctctactaaaaatacaaaaaattagccgggcgcggtggcgggcgcctgtagtcccagctactcgggaggctgaggcaggagaatggcgtgaacccgggaagcggagcttgcagtgagccgagattgcgccattgcagtccgcagtccggcctgggcgacagagcgagactccgtctcaaaaaaaagaaactacatttctaaagtgaagtatacttttaaaatatgaataagctctcccttagttgtcttgacaaatttaaattgttttcttgaagcagagctgttgttagatatttcttcatttttatatactttgaaacataacttggcctttgcatctttttcaggatgttcttgaggagagaatttccctggaagttcaactggaacaacttcgaccattctctcacctataagccaattgccgttaactgtgaacatacttgtttttaagtggttttgggttcaaagccaatttggagacctagacattcagctcactgcttaactcaacattaaattttatgattctgttttgccctatatgttcaccgttgtatttaagtatcttttattttttaatttcgacaataaaaaggtcaggatggcgttttctggagggtagattgtgtttgttggcacacccaccttttctgttccctagcatctgggatatgcaatgcttctatggctaataccacacaccaatttaatttatagaatgggctcctcatttacatctcagtcacagactcagaaataaattgtcagtttgtccttttatgtttaatattttacataaagcatctattctataaaaatctttagaaagagtttcccatttaattttgattttaaagaattatattggataaggtggttttcaccataagctaatttactctctgcagccgtctacattcttcacaaatcatgtggtacattgaagcc

SEQ ID NO: 123094 - DNA, 1030 bp, Homo sapiens
atgtttttggttttttaaagagttgcctagctttccattactttataatgttattttattcactaagatgaatgttagtatttttgagtaagaaatcctatggtgataatgcatagatatttctggagactgcctttgtttattgttgaacaggtatatattgattctgtatcatatttatgttaaaactgtgaatattacagtcttgcatcagtatgttgctctaaaaatacttatattgcaggtacattcatgattgtggtgtcaactagaaacatcttttctcactgtaatttaagttagctcttgccacaaatatatagatttaaagtaggacaagtaactttcaattttccaagagcaaatggcttaaagaaagcaaatggtgttgcaaagtgctaactatgaatgtcttcaaaaatgcttattattaatggaattcttgtcttaaagagcaaaggcacaacaccacttgctccaccacctaaacctgttcgaagaagattaaaatcagaagatgaattaaggccagaagttgatgaacatacacaaaagacgggtgtcttagctgctgttcttgcatcacaaccttctattcccaggtaatcaaagctattcctagacacatttaattactaggaagaaaaagcacgacaattaaaagtaatcaaactggcccaggcgtggtggctcacacctgtaatcccagcattttgggaggctgagctgggcagatcatttgtggtcaggagttagaccagcctgaccaacatggtgaaaccccatctctgctaaaaatacaaaaaaattagccgggtgtggtggtacacacctgtagtcccagctactcgggaagctgaggtaggagaattgcttgaacccaggaggcggaggttgcagtgagccgaggtggcaccactgcactccagcctgggcaacagagcaagacttcatctcacaaataataataataacaataatcagactgaagtaaattatggtcagactagttctttaattgagcagagcc

SEQ ID NO: 123095 - DNA, 1071 bp, Homo sapiens
ttgtttgctattatgggaataggcaggagtatgccaggagggcttcatgtaatagaggtaagaagcaaagtgagatctgatgaaaggctgtgagatttggtctttaggttacatacagaccatgtaacaagttagtacttgccttctaatacttaacaaacattcttagaaatctttatcatgtagtcacattcattcagcctatttcttctattaacaaagtgattatacagttactaaaaagaagaacttttgtattcatgcaggacaacaacaggctggagttgttgcccatcctcctgcagtgcctccaagaccacagccctcacaggtaattctccaaggtatttattactaaatgtcccatgatcactttgcctgctaggtatttaattctattctcaaattatttggaaggtcaggaatgatctgttggtaatctttaatgagcatttaattcagtgaggctgaatctcattttgaaagatgcacatttcaagaatgatctgagttattttttgaaagagccttaaaagtgaaacaaatgataatgtcttgacagagaagagtttagtggaaacaacaatggattgggagataggaaatatccattaatgtcctgggtctagcagtgactcacaaaatcacttcaccaggctgggtgcagtggttcacacctgtaattgcagcactttgggaggctaaggcagtaggatttctcaagcccaggagttccagaccagcctggacaacatagtgagacccccatctctaaaaacaaaacaaaaaaattagctgggtgtggtggtgtgcacctgtagtcccagctacttgggaggctgaggtgggaggatctcttgagcctgggagatcaaggctgcagtgagctgtaattgcaccactgcactccagcctggatgacagagtgagaccctgtctcaaaacaaaacaaaatacccctaaataacctcactgcatctctctggatgtgtttaccacatgagttaaggaagtataatgacctctgcatcccttccacatcaaaattagagtgctgtagtagacatttat

SEQ ID NO: 123096 - DNA, 1422 bp, Homo sapiens
ctaaatgtttcagggtttctcaaaggtagattttttttgtgtaagtcagcgttataaattaacttactttacagtttacatatgtagtgtttaagtgtgctgcaggaataaaattaagtgtgaacatgcaaataaactttttcattataaactatcttctattatggcagaaaataaaattataaataaacagttttacatttgtttttattaaaaatattattttgtcttacattttatggatttacctgccacttctttggatatttaaatgaagtcttacactctgagctttatgagtttatcagttcaaatacctatgtcttgtatttttacctattaattctctattagatcatacaaatcccactagcccattacttgtgaaaccatctgaccttttagaagaaaataagataaattcatcggtgaaattcgcttctggtaatactgtaggtaagtgaagtattacatcttccatttgaagtttactaagtctggatttagagtctgactatttcagatgtgtatgcatttaataccgtcttcactagataaagtagaggagagtgaaccctttcgaacactttgccctatcagtgaataaatggttgcccattgactcctgcttcaatgcaggcttcctgtttgccatccctctctgtgtagccaggtttgatcttatggctcttcctcagtggttccttccttttctatcacacaagaaattgtgtatactttcattcagccagtgttaattggatacagtatgccaggatctgttctaggcactggagattgaacagtaaaaaagtctttgctgctatagagtttacattctgtaagggagataaaagggagataaaaaataactcttatattagaaagtaactaatactgtgaataaaaataaagctgggaaagggtggagagagtgccattttaaataggatggtcaaggaaggccttaccaaaaaaatgtcatttgagtgaaaacttgaaggagatgaattcagctgtacaaatccagaaggaaaattaaggcacagcaaacagcaaatgtagagccctaaggcaggacctgcttttactagaatagcaggcaaatacctggaatagaattagttagcaaatttggcagggaaaggtagcagtggtaggatagtaacaggaggcagtgtcagactttctttgacttagatgaaaagccaatcgaaggtttgaatggaggagtgacatgatttgagcctgctttttaactggatcagtctggctctcctaatggtaataggccaaaagaaggcgagacaaaacaggacacaatttaggagatagcggtaatcaggcaagggaagatggtgacagcttggtgtctagggtgcaagcagtggaagtgatgagaagtggctggactctggctat

SEQ ID NO: 123097 - DNA, 1031 bp, Homo sapiens
ttaaatctgaactttgtttcccaaccagtattcttactttaaattttcggttagaagagtagcctgctttctcttagttgtgtcctacagtgtctaagtttcttaaccttcatttgatacttacctgaagtattacccatctacagacccactacagcctgtagccacaatcccacatgatcctttgcaaggctttatataaataaggattataagtaagtaaataaggcacattcagattacaagggaatcacctggggggaaaaactctactcttctattatgaatttaacatttcttacagtattggaaatatttaacagactattaaaaagaaactaaattgtaataattagccatttgctcagtaaaagtcagtgcaaagttccaaactggtctgtagcatttagagacaaccactacacagtgcagtgaccccatttgcaaaccagatggttagttattaagctttcatagttctgatgaaattgagattctgatggtcttgtttccagaaacttgatctcttttcttgaactgcttgtcagttagtagcctttggtagaatctgcttctgctaggatatacatgaatgaaaacacaggaaaattgtaggtggatgagaagtgtaatgcgttagtctttgctgtgattgattgcactgcaaatatatgaaaatgctagttaacattcccagctgttccaagctttataaatctgattttatatacacatacacatacgtcgaatatagattagatgaatgttatgaattaaagcatctaagaagtttttcttttttaaaatttctaatttgctttgtatttggaataagacttattttctcatgaactatcatttttttctcctttgatcttgccttataaaggtaaattctgattttcttaacagttatttctggtattaaatgtaaattaagaaaatagtagagttgctcctaaagccatgtttttataaccaacatataacttaatatcttaaaggtattcttataaatactttcctgagaa

SEQ ID NO: 123098 - DNA, 1272 bp, Homo sapiens
atgattttttttgtgtacctcttttagaagagtagtatttcatatcaaaatacatctgtatataactcatgctcagatgcttgatttgctctcattgtggccgcattctgatttttctagcatggggtagggagtggggaagcgggggtgtctgattggcagttctgtcttgtggtctggcatggccctgtttgtagtgctgattgcaggggttgacttgctacagattgacataagctctacatatattaattccagaattctttgcattttatctcaattatattttattaaatatctatacatatgtgtaaaatatgtgcacgtacataatagaatcatctttcaggggtcgcactggcaagtcgcactgacttgctttgttttgaacaaaactttgattcattaggatcacaaaatcagtacattaacatttgaatgttcaaagaagaatttgatgttattctttctttctttagtcaaggcatgcctctttagcatttttacttggtggacatttatatcacttagactttgctcctgtattgtgttttattttaactctgtaaggctttaaatctcttccatagagattgcaataaatcattactatacttttgattgtgaactcctcaccttacattacaagtgacccagaataaatataaaatgttgacggaaaaatagaaattactgaattttgttaaacctatgaaacacaacttgcagtgcaacctctgaattactttgctaaatcttctccagtgatcttttactccatctttctcatcatgctgacttgtctctcctctgtctgttcagcagtgggagacatttagtgaacgctcttcaagctcacaaactctgacccaatttgattctaacattgcaccagctgatcctgtaagtcaatcacttagcttgcttgtttgagattaattttattaacccaaatttccattcattatcgtttttagctgatatgcatgattcagtggagtgcttagagggaagtggcggcaggctttttggtttttgtgtgcttaatggtgggaaagacattttttgccattccttttttctagttattttgttgagagaaaactacgtttttaaaatctggtacatgtgtctagagaagcattttttgtgacaatctattttgttaaccttatcatttgctaattaagtgtatattttatatacatactgtttatttcagtgtagtgactctttatgtattatctgtatgcttacacatcatgtaatatg

SEQ ID NO: 123099 - DNA, 1541 bp, Homo sapiens
acaatgatattgtaatgatatttttgatatgagttctaaaccgattaggtactccctgttgactggggttatattcaaagccagcttggaagaatcggaatgagagtttagtgacctttgaaatttccttctgtttttaaatataatttagagttattttaaattaagcttaactatgcttaaaagtagaatatgatacctcaaaatactttaaaaaccattttgaaatagtataatggatttgtaactatctcagttaagtctgtaagtgctagtgagcttaataataaaagttaagtttcagacagagcttattgactttgcttttttcccgtggctggggactctctccttctgctttgtgccttgcaagtatgttctgtttttttgttaacaagggagatttgtagaggatatatgagtgaattagtataaattggcagttcccaaagtatattccaagggaatactgaaggattttatttgatgaaaaggatgtgtgtctggaaaaaaaaaagtgatttaaacaaagcttattttaaactttgagacatcacaagtcttgatatacaaatgtgcatacggatgctccaacagagaattattgtttccccaaacttacttgagcagaaaacctaatttttcaaagccaccttactgatgagtattccatggaatagaatacactttgggaaactggtataaatctatttctgttatcagaaaattattttaaagcatgtgacctattgcaatattattatgtataaccttctttttattcctaactagattttattttcatgaaaagctgtggttttgagtagaccataagtagcaggaataagtaatgtctgttaaaatgcttactctgagaacatgaggaaaggagatttagattatatattactacttatgaaaatcatcggttggcttttttttaataagtaaatatgcctaaaataaactacaatgtagtctttatagagaatttctctatttttaaattgcagatgttggggatcagccaggtgaggtaggttattcaggctctcctgctgaagctcctccaagcaagtcaccatcgatgccatcactaaaccagacatggcctgagctgaatcagagcagtgaggttagcaaagctttccttttctttcattaaaagttaactcttttaaggtaagatgttccaaagagggcaatttcagtctgtctcttccagcatgcatgcataattgagagaacatatcagatatactatgataaatgtttgtaattatgtgactttttcgaggttttcaaagtatatattctgtcatttgatttccaccacttatccccattaaaaccttgtgagtttagagaggcagattcagaaagtttaaccatcaaaaggtaaatgacttggccaagatctcatatccagtgagggacgagagctaggatttgaacgtaagtcctttgatatctagtcaactgccacatccactgtgtcacactgccttctcagtcctgtaaacaaggtatgtaatagtaca

SEQ ID NO: 123100 - DNA, 1037 bp, Homo sapiens
gtgagatcagcatgcatatttatttatatttaatgcttatgtatgtgggggggggtaaggaatacaataactgtaagtgaagaatacaataactatattttgtcgccactgccttgattcagtgcaaatgtcaacatgggaaaagcattattacaagaatagttttcacctttcaggtctcttttaaaagagtcttggggactcttaggggtctgtggtccacagtttgaggtctacaactctaggaaaataactctattgaaatagcggtaaagtataattatttgggtgactagcatttcactttgcagcctcaagcagctagacccacttcagctttgtaccagtgaaccagaaatattcccagaatctgtcccaaatcataactgccctgaggtgggggtgtggtacagcttggccctaaatttgtcagtagaagaaatcatgagaactgtggtcttgaaaacccaaccaggacttgcagattgccctaagattgatgtttaaaaataaagtaatagagtcttgctttaaataaattctttcgaaaattagtcatcttgtagttaatactgttttaattctgtttattttcttcagtactcacctgctttggggaatcccttgaagatacttctttattattctcctggtagactttcactttcagtatattgtcaaatttatagctactgtttccctttccctttgttatcactggggataaagtttcataatttttttttcccaatgaaaactatccaatgaggaatttgctactattgtttatcctaaataattttttcataagttcttctctaagaactttgagttgaggtcttcatagaataatatgtgaagtcttcctacttctgtactacccagacacttctattgagaagatataggacttaagaaagaaataatttctgatcttagaaaacaaaaatcaatcagaatacaattctggactgcagattagaacttgcaatgtggtataattataaaggtataacgtctgggtaagtaaaaaggaa

SEQ ID NO: 123101 - DNA, 1074 bp, Homo sapiens
aaatacagtcttaaagactaacatttgtgggtgggcaggaagctctttgttggagtacttatttggagcaaagttgaaggaggtacagtttatttctagactgaatggttgtccatagactcttggtttctagaacataggaaagaagcaatgcgtaatttgctaatttatcccagaaacaatttttggattttctaggacagcaatttttcaaacttttaaatctttttttctttggttggtttttgttgttgttgtcgtcgtcgtttatttcaatgtggaacaaacttttaaatcttaagacccctttaggcattcttaaaatttgtggaccccaagagtctttgtttacatgggttaaatctatcaatacttacattattagaaattaaaactgattaatttttgtttttactttatgtaaaaaagcaataacaaatccattacctattggcataaatatttttaggaaaataaccatattctccaaaattaaagaaaaaattgtaaaaggggtggcattattttacatttttgcaaatttcttttacatctgtcttaatagaagacaacgaaattgtcatatttgcttccacattgtctgttggatatgttgttttgtttgaggtataccaggggtctaaaaactaagccctgtgagatagatccagcctactgctcatttttgactagcccacaagctgagaatattttttctttttaactgttgaaatgaaaagaataatattttattacacattaaaaattgtatgaaattcaaatttcagtgtccataaaaattgtattagaacacagcagtgctcatcacttatttatgaattgtctaggactgcctttgcaccataatggtggagctgaattgctgcaacagataccttatagccacaaaacctaaaatagttactatctggcctaatatagaaaaagtttccaaattaaatctagcctcacacaataaaaggaaggactatttcatggctttttcagataacgtaattattctttggtactacatcaaagcacaaatggtatttcttaaaggttacttgcagt

SEQ ID NO: 123102 - DNA, 1008 bp, Homo sapiens
cttgaacccaggaggtggaggttgcagtgggccgagatcgtgccactgcactccagcctgggtgacagagcgagattccatctcaaaaaaaataaaaacaaaaaataaagtacatacatggtgaattttgataacataaaaacagacttttgaaaaatttcactaacttattacgtatgccttctaaaaatgcatgtgaattataggtcattctttttggtgaccttaattattggggctgctttttagagaatttcaaacacacaggaaagcttaaagaagagtaccataagcattcatatactaccacctagattctggaggtaacattttgctacatttgctatattacacatctttctgtgtatgggatttttataattactgagttcttgcactttctcatggaaaatatttctcttgcttctttttgagaaataaaaggatccaaagcggaatgtgattatattcacaataaacttatcttctagggaactctcagactttgataaagatggtgcattgacactggatgagttttgtgctgcttttcatctggtggttgctaggaagaatggctatgatttaccagaaaaacttcctgaaagcttaatgcccaaactgattgatttggaagattcagcaggtaagattgggagctgaagagagctgtttgcatgccttgataaacataatgcttgattctgaaagaaaaatcaagatagaggttaaccttagcttaatagcttagatatttcatcaagtgtacatagatttgtcatcagaataggatgtatgggccaagcttgaatttgtcttattcagtctatttttaaaaataaagatgagtaatatataccactattttacctttgtatttgtgacttgccgagatttgaagagcatttcagtgtcttgttattttgccatcctttaattgtgatatatattgtctcgagtggatagagtaacccatcttcattataaacatttttctctttaatacat

SEQ ID NO: 123103 - DNA, 1069 bp, Homo sapiens
tgagtaggtggggattataggcttgtgccacagaacctggcttagagattttttgaaagtaacaattatttagggttgtaaattgaaggaaacttgataatattccttcaggagttgcctcccagatagtttttaattgtaagtttaagttaaatagaagcaaaaaccaactatggaaatttgtaagtggatacattgctttgaaaagtggtaattgcatttatgtgtatctgtgatgtttagacaagtttatggataccagattctctaaaggtaaaatgaataattatttcccagaatattatgtatatattacatacattttattgacaaggagagcacaaaataattgaagatatttaaatgaggtataatttctaatagaacagaaaagattccattttggaaattgttagatttcttcagagtaagagttggaaagaaaacttcctagtaacttttttcctcaaacatgagtcagcatgtttacccattctccttataggttcttctgctggtgatgcagtgtggtcagggcattccccacctccacctcaagaaaactgggtcagttttgcagatactccaccaaccagtactcttttaaccatgcatcctgcttctgtccaggtgtgacattttattggtattgcatttttatttgcttcattcagagtattgctccagtcgttgtttttatattttgctgttgcagattttataaatgcaaatccactcatttatttaaaagcaaaattctgctctgtgcatttcaaatctgttatcattggaatgtttcagctgattttatttctgtttctgattccctagtgaagttttgaaaggtttctgcatctggaaatatatttgcttggctttcttagcacattttcataactttctgttgcttacataattgctgtcattctactcgtttctataatcattgtgcaaaaacatatccaataatctgactgtaacagatgtgtggttttacattttaaatatacacaaaaagcaagttttactttcaaagataaataacctagcaatcttggtccatataatc

SEQ ID NO: 123104 - DNA, 1254 bp, Homo sapiens
tgtgggaattacaattcaagatgagatttgggtgggaacacagagtcaaaccatatcgaagtgttacatcagataatttgtttttcaagtatttagaggcttgttgatgtgaaagaagatagaaattctataaagaaaggcacttaaatgcagagggttctttcattttcatagagtaaaggggaaagagaaaaattaagattttaaaaataatctgtacagaaaaatttctgtaaaattctgtaaatatcagaatttgtagaaatagttttaagtaccagtttagtttattggtcggtagaggttttcattgtggacctctagtttgccacacatcattcttctagtgttgggagtttacattcttttcaggtaattttgaattcttttacatgtatattgaataagcttaatagtttccttccttcatgtggaggttctaaacagagacgaaagtaatcatgtaatggaggtaagtacgctttcctctgaaatgattttgtagctgtattttttctggtctaaaagtatcacttatttacctgcaaacagtttctcagtccttcatctttctcctctatttaaaattgaatgtagaatatctggctgtaggagaaacataagccagactacagtggatagatagaatactctaccatatttttggggggtgaacaataaggtatttttaagaatttctgccatgaaaatttctaaatctagtctcagacttagtgacatattctgtgttttacttagaggtctaaaatcttactttaaagacccggtgtgagtagaagcagcctaggctttggggtctgactgatctaggtttatatcttaactgtcagttactacaagcatgaccttggcatcatggagcctcagttttcttatctgtaaataggagctttgcaggggtactgtggttacgaggtgaaataaatattcagtggcaagtatagggccaaacatacgtagacatttgatgtagccattgttatcactcattagaaggacaatttggttttattacttctttctagataagagtctccctaaataatgtaagggagatggtggtccaaattttgtggtgatagacattttgtgcctcttgtttctgtatccatttttacaaaaattctaatatctaattcatgtcttattttagttttcaatatatatgtccttttttattttgaagtaatgattattttgtggttaacagtaaaggaccttcctctgccaaga

SEQ ID NO: 123105 - DNA, 1041 bp, Homo sapiens
tttttgagtctaatatttacttgtgctagcaagtctagaaatacttgttgaaagactggaatgattaatgtagatccttgaacactttcatgctctaaaaaagacaaattttgtttgttttaaagaagagtagtgtagccatattaaacacatttggaaaataagagggaaaacccgactcaatctcatctgaaaaaattgtgatagacttttaaaaaatagtttccaaatttgtatttatgtggttaaaattaggtatcttgcctttcttccccacttgataaatccttagtatttttccatgttgttatatcatttaaagaccgtcactttaaatggctgcataatagtctcttagtcacatggtcctattgtatgtgcagtgcttatgaataagagtgggtggtacgttgtttctttaaaaatgtgactcataacaaaaatttattctaagaaaattgctaatcatatggattttgataaataggagaatgatgaccttattgcaaagcagtgactttttgtttgtaaacatatgaacctgaaacttgaggaagttggttgtcagttgtgagtattataccatctattagatagatattttgagacgttacaaacaagttgggtagctgcttatttttgaagggagatttttgttgtgaatcttaatgttaacattatgttattttatagatcatggagctttgtggtgcaacaagacttggttattttggaagaagtcagttctacattgctttgaaacttgtagctgttgcccagtctggtttccctttaagagtggaaagtataaatacaggtaaatatagagtacactagtaaccgaaagaaaataggcttctattacaaatgaagtcaagtcaatagaactcttgtgtctttctgatcttatagtggcatttgtgaccttgagtgaagtgtcgtgactttattcccactaccttgcatttctcacttgaaaatactagaaaaatatgtctgacctgtattacggcatagtatatgtacttcatctgtatttga

SEQ ID NO: 123106 - DNA, 1032 bp, Homo sapiens
ctgcattccctcctccccatcaattctacacacacttacagctacactctggtctttccttcctgaggatgctcagtaaatagtcattgaataaatgaattaattccatgacagtttgcaggtcaatatgtataatataataaaaccttttttttttttatgagatggagtttcagtctgtcacccagtctggagggcagtggcatgatctcggctcactgcaacctccatctcccgagttcaaatgatcctctcacctcagccccccgagtacttagaattaccagtgcgcaccaccacacctggctaacttttgtatttttagtagacatgggtttcaccgtgttggccagactggtcttgaactcttgatcccaagtaatctgccctccttggcctcccaaagtgctgtgattacaggcatgagccactacccctggccacaataaaacttcttaaaatgagtaaagaagattaacagtccatttaaagttgccagagaacaagttgggcaagtcaggaaaagaaatgcaaatggctaacaaatataaaacttttaataaataccaattaaaacagcattgagattctgtttcccttcttgaacactacctcctcatttctaaccatttccctggtgtcttcccaaaatgtcaacaaaccatactgtgatctccttttaggtcttccctctgtctagcatatacctggcatatgttagttgcattgttatataaacaaaagtatttaagatatgtaatgaacctctaagaggcgtcaagtgggcagaagagtagaggattggggctgcatgaccttgcctttttaaactccccttttcctcatagttcccttgatggtgttaacctgcctgtttattctctttgcccttttacatttcttcagaaggacatgctccttagtggcaggaacaggaacttcttccagtgctggtcagccagcaaaaatgactcttttttgtgtatgtaaataaatggctgttattgttgtgatacaattgcttaatcatta

SEQ ID NO: 123107 - DNA, 2192 bp, Homo sapiens
aacttaacaactcgtgttttatgatgtaacatactaaaactgttataatgcagcttattagatgaatgtactactgggcaaatatgatcccttataaaataatgaagtgacaaagagcatgggtttcaatctaagttctgtcacttgctgtgtgtccttgagcaagtatggtcagttctctcagctataaaacagtacctacctcatagggttgttaggatgattaggttagttaacacgttacgagtttgggacagtacctgacacattgtgtgtgcacagttaatgcttgtcattattataataatcatctttttgtcattctcaccctgtgataacccatagcacgggtgtagtacattatcctaacagtggaatgggtttctctttatcatattataagtaaagaaatttccctgtcccatttgctcctgcttgaccagtggtaacaaatatataccagaaattatatcatgcttaactctatttaaccacggttctactcacttgagatacttgagagctccactgtattctgtgcacttaggaataattgtgggctcctgcttctcccactagaggagcaatagtggcaacatagtacagttggtaagaacacactctggaatcttcaacttcatcacttactgtgaccagggcgaattactgagcctctctgtacttcagttttctcatctgtaaaataggatagaaatctctgtccttctgggctaagatgattaaatgagctataaagtgcttaaaatgatgcctggcccactgtgtttaaatgttttattgtaaacttttattattttttaaaatttctgattaggagtcattgtggttctggaataatcaagtttcaatgtaagaaaagagaggtttgattattagtaactggttcttgaaaaatactactccttaatcaaaacattaatattttatgtggcatgttgtaaggcaacaggttgcaggtgttgtctttccatgtcaccttacacactttattggttgaatgggattatttatcttcaatgagttttacaagcaattatgtctgggtttgcttaagacagtcctggtttatgcctcttgtttaggcataattataaacagtgcctctttcactctacacatgtctcagtttggatgtaaattttatgatcaccctaagtatacgatagtgatcaaattaattttattggactatctccataccctatcgtattttctaaaggcaactagtactatttcaagcttcagttttaggtggttgtagtatttttcaaactacttttgcgtatttgtggtttttctcctttcttacctttaatcttatttgttttttttttaaagcctttttgtcgttgttgttgttgtcattgttaatgtagataatacaaataattattttaattgggaatttgagacctgaatcaaactatcaaactttaaaagtagtcatactatttttcacattggagttcttatgtttgaggctatcagaagtgttttatttgtttagataacaatgacagtgagactgattatgagcagtaaaatatttattggcctgtatgtactacttttatcagagtagactgacagtgggagtttatatttcctaaagcaagaatttatagctaaagaaccaggaatcacatattgctaaggagaatctctttaaccacatatactatgcagaaattgaagtcaagaactataaacttcttaagctgcttcagtccccttacattggttgtttgactgaacccattctttatgattcccttctatagcagatagagtgaattctaccctccaaatattaagaagcttctaggtcatatagcagtaatctatattgtgatggtgagttctcttgatgaatgtctatgaaaatattagtagaggaagaagaatatgtatatatatttgaactttctgtgctgaaaagttacagaagacatttctagggtttttttttgtattgagaaatatactgtttttatatttatatactaatacttgtatagaaaggaaattcttatctcgtacttatgtaatttttcttgtctatttttaaaatttttccttaactgacaaaaattgtatatattatacaacatattttgaaatatgtatacattgtggaatggctaaattgagttaattaacatacttatttt

SEQ ID NO: 123108 - DNA, 1042 bp, Homo sapiens
aaccattttgatgcttaaaattacagccttgctgggtacggtggctcatggctgtaatcccagcactttgggaggccgaggcagatggatcacttgagcccaggagtttgagaccagccttggcaacatagtgagaccccatctctaccaaaaaaaaaaaaaaaaattggccagctgcagtggtgtgtgcctgttagctgctcaggaggctaaggcagaaggggtttgaactaaggaggttgaggatgcagtgagccgagattgcaccactgcactccagcctggaagacagacctgggagacagagcgagagctatctcaaaaaaaaaaaaaaaaaaaaaaaaaaaattacagctttgtatcatagattgtgtgttgtttgcaactagggcagaaagtttttaagaaaaagggttctgtgttaaaattttgttttcctcccagggccaagtgtatattttcaacattgtatgtaagtacttaaaagaagattttgatgagatgtttctataatgctactaggtataataaccagtctgcaattcagtgttagcacattctatacaatattgagaatacatgaaagactgcagatacgggtgtgtacttgaatcaaggagaggcagtagagcagccttatgttttgttccccaaagagtgagatgtgtacccaattcttgcacatagtgaagaagctgttctcttttttgttgtttgtcacatctgattattcatggagaaagttgcagcttggggctagtaaaatttttttttaacaccgttctcatattatttgctctcttcttttaataaaggacagataggccttgatgtggctgtaagcacatttagcagacagtggtgtttggctgaaattacagttttgttttcattgaatatatattttttatctctatttcaagtgaagtagaattttccatttatacatgatacaaagtttcttttaaaataagtttaactttaaaaaagtgtctcatttaaagaaaaaatactaagtacataatagtgcaagtggtccatg

SEQ ID NO: 123109 - DNA, 1001 bp, Homo sapiens
taacaaatgacctgatttcttctctactgcctgtaccctggcctgttcttaagcactagtaatctaacttttatttttatttgctgatttatcttctgagacagggtcttgctctgtcacccaagctggagtgcaatggcacgatcttggttcactgcacctctgttacctgagcttaagcgatcctcccacctcagcctcccgagtagctgggactacaggtgtgcaccaccatgcccggcctttttttgggtatttttattagagatagggtttcgccatgttggccaggctggtctcggactcctcagcttaaaagcaatctgcctgccttggcctcccaaagtgctgggattttaggtgtgagccactgtgcttggtgtaatttaacttttatattccccctccttttttttttttttaagatattcttaaagttcattgttatcctgatcaccaaatccagtgacctttcacttcccttgcaactggcagtgaatcacttcttggtggatattgtctcttcttgttcatcgtggagctgaaatactctgtctttaacgtcctgattgtcttcctactgtcttctttggagtcagctttgactcctcttttccatctatccaacttacaaagtccttcagattctctttgaaaggacttagccaatcgttcttttctgttcttagtgttactctaatccaagctctgaacacctcattgatgaactactatagtggcctcctaaatcttaagcttttctgtgattgctgaagaatagattagtgaattataaattatatgctactcttcagaaatgttcagtgaaaattagtgtggcatttagagccttcatcatctagcttcagtgtaccacctagccaccactacagtccttgcattgacctactggcaccccgaataggattgcctctcttgttttgactgaccaaaaaactgcccattctttaaggtctagagatgaggtacttactaaaaaa

SEQ ID NO: 123110 - DNA, 1991 bp, Homo sapiens
ccaactctattctgtatgtttgcacttgtatacaatttgtactttaggttattcttcctgtgtatctgtttcccttgataggtggcaaaaaatttgagggtaagttttagccttgtttgtttcctttattatcactttgttcctgttaggcactcactcaaaacctattagactgcttagttggtgctttagaacttcattcctcatcagtacattgatgggtgctagcctagcctcttcattttatcataccacttaaaaaattccaaattataattaatgagtttttttcagcagtatggaactctgagaccagactgcatagtgctttcaattagcctgtgaatattctcgttaatacttttaaagttggtcaggtgatgctagtcaaacactgagcatgcttgctaataactttaagcaatcgttacttcaaggctgttctcttaaatttttttttttttttttttagtggtattgtgggtcactttagtagtaaactcacatgtatttctctgccctgcagaggcataattttcaattgttgaacttgacagtgagtaagcagtggtagacaagcatgtagtctaaataagaaaacaggtcagtggagtttctcatttaatttagttaactcttttggagggaaggtatagcattcccataaaatgaatggtgataacagagagcatttcaaatctgattagtcatgcgtaatcagccttaaaagcttctaccaactcactgctacatctcacaggcttgtttctgattattctcctaatagggactgtgtgttccttcccagcagatctgtttttctgtttctcacacagcttttacttgttctttatctattcttttttatcatgtaacttccctcagctacaggactctctcctcactttcgtgcttattccgccccccttttcaaaacatggcttaattgacttttgtaggttttggaaattaatttgaacaacttcactctcactgagaccagtttccctcctgcctatccttttgtatatgttttgtactgtattgatttttgttcatttatgctgttgcttggtgtgtatatgccattgcttggctgcttctccagtatctctatatcccagcaatattgtgagcaagttgtgaataaaactcagatttcttttctttcttgatgtgcagaacagcaaaaacacataatagatgtttagaaaacatcggcagctttttagggcaagccatttgcttagccctgcttggctgtgcattcatagacgtgattgggatgatgacttaaagcaattctgggctcctcacccagggaagtgaaaagtgggggtggtgaagcttcaagccttggatgttccactgcctagcactatgggtactctctccccaccccaatcaacattctgggcatgagaagagaaggaggcagtaagaacagaacaatagcacagaattctctgagctctgacttcgctgctttgctgacaagacattgctgctttcccctccctccctttcaggatctttttcccttacctacccccacttttttttatctatagcagagtaattgtaagacattttttaaaaactgataatttattggcaactaaagaaataaattatggtagaatctggacaccttggcactatagcgtatacttttttttttcataaaatataatgaggcaaaacttctacagagttccagtgtgcctggctgcaagtggaggcccacaagtcaatttagagatgagggtgctgggttgagtcatggtacactcacaggatttcacacattccctagcacagtccactgagacatgtgccacgtcagaattacagattgtactacttgtcattatctcataggaatagtagaaactgcagatcttaaaactttgaaagctaatgacccactgtattctgtgccttcattcagaacactaaagaattaatggctggtggaagggagcttatgg

SEQ ID NO: 123111 - DNA, 1364 bp, Homo sapiens
ctattctgcaataaaaaagaaacaaattagtgatatatgttataacaaacatgaatgtcaaaaacatgtctctgggcaatatagcaagaccctgtcccaaaaaattaataaataatattagctaaatgtgatggcacccgcatatcattgaagctattcttggaaggctgaggaaagaggatagcttaagcccaggtgtttgaggctgcagtgagctgtgttcacgccagtacactccagcctgggtgacagagcaagacctcatctgtaataacaacatgctaactgtcaaaccaaatacaaaagagtacatattgtgtggttacatttatatggactgtctacaaaaagcaaatctatagagatatagcagattagtggttgcatcaggccagagcaagagaaatggtatggaggaaaatacttgggtgatagaaaaattctaaaattagattgtagtgatagtgctctatacactgtataattttcttaaaactcaatgaattgtacacatatgatggttgaattttatggtgtataaattatacctcaaagctatgaattaaaaattacaaaatagtcatcttggggaatgtaaaggttgaatgtggtggagaatgaaggactgtgtactgcttacatagtttaattacaaaacttcagcataatgtaatctggcattttgataaaggatttaaattttgaaagatgatgtactgatagatttttatgtgtagaggagattgccatatctcatcttccaagattcattagaactgagtatatttacattacattacattagcatcaagctaacatttattcactgttctgtgtgacagggaccgctctgcgtgctttatatgtgttattttacaagtacattatttattgaccttagaaggggctaaaaataatatgatttagaatgaagaccagtttccatctattgacctttggtggtatgatgaatttttgtacacttaactcagatatcttaatattatgggaaattatagaaatataatacctcaaagaataatgcaagtttgaagtagtcatgactgacaagtaataattttaatgaaatagtagtttcagtctacaggactattttgggttgctttgtccactggaataatcaccgtcactatcatgaatctttttgtgggccattctaatgttacttaaagggactgatttggtgtctttgtattttgaaatagctgtattcaatctgagtttgcataaggagctagatcttggtcccaatcctcacaattataatagcatgttcctgtggagaaaaaaaaattgcatgaagtgattattgcttctttttgtccatgggttatgcaaaatgt

SEQ ID NO: 123112 - DNA, 1922 bp, Homo sapiens
gtgacagagcaagtctccgttcccccccccccccgccccacccacaaaaaaaaaaggaaaaaagaactgtgtacaataatagagaatcattgggtggtagaatcagaggaggtagtggggacctacttaggtgtaagggaaggccccttagaggatgcctggatggggggtcaggggagggagaataaggtgtttcatatagagagaactgggaagggcctgaggctgtgaagagcacagtgtgtttaaggaactgaaactgtggacaagaggggagaatggcagggactgcataaggcaggcccttgtactcagtgataaggaatttggattttagtggaaatatactaaaagtttttattcgggggtgtagcatcatctgaattatattttaaaagatcatgctgactgctgtatgagcaaaaagaatactgggggcaagtggaagcagatacgctagtggatatgcaacagtccaggcagcagacagcaatggcttagattagcgaggtggcagtaggatagagagcagtggacatctgtgagaattttttaggtggtagaaatacgaaggcataaatagggttggatatggaacataagggaggggaaagaactcaaggatgttgctggaagttgccactattggatggttggaagaggagtggattttgggggggattgtttcgtgggagaggtaagggtgaattcagcagttccccttttgtctatcttagttctcagaagcctgtaagattgtcaagtaggcctgttagagagatctatacatcttgaggaattcagagatacttggcttagagatgtcagtttgaagattgtcactatgttagtgatacttaaggtaatgaaataattgaagaaaagattataaagaagagagaaagattgactagaactggaatcctgaggaatgctgaacatttctaagttgggtaaactggaaggcttcttggaaggacgctaggaagcacacaatcagagtggtacaaattgggaatgtgtaatatatagtattatcatgtcgtggatgccaaataatgcaagtatttcaagggggtgggtagtcagctgtattgaatttcactgagaggctgagaacatgtgggcaggaatgtggccattggatttggcaacctggaagttattagtaacttcagtgagccagtttcatggactagtgtagatggatgccagatttgagtgatttgagggataaatgatggctgaggaactagagacagggtgtatagatagcttttaaagaagtttacctatgaaagggaatagatacagggtagaagctagagatgtatgaggatataaaggaaatctttttgtttgtttctttttgagtgtgagaaattctgcagaatgattttagttgttaggattgctaagataagggagatgagaagtccttgagaaagcaggagtggtcaggatcctgactgcacagagtcctttgataggaaggggatacttcttcagttttttttttttgtttttttttttttttttgtgatggattctcgctctgtcgcccaggctggagtgcaatggcctggtcttggctcactgcaacctccgcctcccgggttgaagcgattctcctgcctcagccatcagagttgctgggattacaggtgcctaccaccacgcctggctgatttttgtcttcttagtagagacagggtttcaccatgttggccaggctggtctcgaactgctgatctcgtgatctgcctgccttggcctcccaaagtgctgggattacaggcatgagccaccgtgcccggccacttcctcagttttaacagtggggaagaaagaacaacatggttacagacgcaagtaggaatatagatttagtgggtggaatatagatttagtgggaggatgtt

SEQ ID NO: 123113 - DNA, 1275 bp, Homo sapiens
atctcttctcctactgcgacattgagagcaccaagaaggtggtggtcaacgggcgggtgctggagctgttccgggccgcgcagctgccgaacgacgtggtcctacaggtaacgtcgcgtcccggggccggcgggcggcttaggcctgcagtcactggcctccaggagtgggagtgggcgccgattccttggggcccggcggggggctggttcctcggggggtccccgcagcgggcaggggccgcaggtgcccgggaggcctggactcgcgccgcggccaagggggagggggttgcccttagaggacggaactcctgtggtgggggtctgaagagcctcagccggtatcccccacgaccctgagaatctgtgctctgtactgcaagagctatctcacttgaaggatcttaggttgttaatgtgtgtgaatcctagaacctggcatatagagagcttttcggatcctgcagagtagtaaagttatcagtatgggcaaaatggtttttttaattcttggattaaccgagaagacgtgataaagtgagttctatagatttaggaatcgaagaagcagtttttttaaaggaagcaaaattcttagggaaattttttaaaatgtgaactacttagtagttttacaagtaggcatacaagaagttgtaattatctgtagaacgtgtgtatgtgatgagactgaacaatgtttttcaacaggcattcgaaagcatttgtggaacttgtggatttgggttgggagatgagtattgaacagctggtaggcagaagtgcgttatttgccctaatctgaagccctggaggagcaaaccctgtaggtttaaagcctttttttatcatatctgcttttgaaacagaggacttcctagaagttcttatctaatgtatgtggtgagcattaatgctactctgtttaatgattcatagctgctagtaggagtctgtctaaacagtatgttaggaacaggttttaagctttcatcttttatattgatccaagctagttatccacatctccaaaatttaaagccacatgtataggtgtatgtagtggactgcaaagcattggaccagggttttgaaggctgggtccttgaccctactctgctgttaaccagcagtgtgactttgggtcaggcactttccattttcaagcataagtatgttcatccacagaatgaaggcaagtttcttccaacaaaaattctgtgaagaataaaaatgtccacacacaggtctctgttttagaagttaagtctgc

SEQ ID NO: 123114 - DNA, 1019 bp, Homo sapiens
ggtctggacccggttaccttcttcagtgcactggggagggtgaggccaaggaaggaagtggctgaggcaaagagaaagacggctgtggaggaggaggagcagggtagggggaaaagtaagtgtttctgcgctcaagaaaggggccgcccacactcccagggacaagcctatgaggaggaaactcaggggaggagacgtccaagaaaggggctgactgcagacaggtgaagcgccctgggctcctaggaaaacgggcccagagcctggattacctcacttttccaccgtgctactcagagccaaggatcccaggatctgcatctgatcctgggcgtcgatttcctgatggatttctctcccaacgtaagaaacaaagcgccctcaaattgctgaaggctgctagaaagaacgtggcattcatgggttccggatgccgggggcctccagaaaactacgactcatgacttaaaaatggcttaattcgcaaaacaaaatgcaatcttgaaagccaatttgtcagactgcaaagaaattttacttggacatagatagttgttgaccctgggtcagtatcggtttcttcccttgttcattcattatttcatacatttaacttcataattcaatttattcatgctccctttgttttagtcactgttattttaatatatgcgtgtgtgagagagagatgcttaccgtacccagagagtccttttggaaaggaaacagttacccaaactatttctagagcaggggttgcacaaataactacaaaaaacgttccttaccccctccccacccccagcccagctaatttaaattaagagtgatcgcgtgacccaagagcgcacaatccgtgatgtagtcatcatcctgtgaggtgacctggagcaaacagttctcatcaaacacggactctgatagttagtaagccaatcagacactcccttggaaatggaaagtggagaatgcagagacggagctgtctgatgtaagagaaaggttggagctaagagagg

SEQ ID NO: 123115 - DNA, 1040 bp, Homo sapiens
gtattgatctgcctcccccactagactacaggctcctgaagggcagggagtgtttgtcagttcattctggggtgcccagcccccagcttaggcctgcctcaagtgtgccgtgtgttttctcctttgttgccttgctttgtgtatgcacttcctcctgtgtagagtgccctaccccaccagtctggctggaccagtcctccccagtgacctccaggaagcctcctgctgcttcctcctttgtgcttccatatgccttggacccaccactcaaagagtattcgtctcattgctcttcattgcaggccctcatctgcctttagaatgtgagatccccgagggcagatcctgtgctacacaccttttgtatttttggtgcctggcaggataccatgaagaggacctacgcatagtgaatcgtgggtgcaaggagaatggctgtagtgaatcgtgggtgcaaggagaatggctgtattctcccccacagacgtggagaataggagtgcagggagctgagggggcggttacaaaggtagagggaaaatggggacacttcagtgccacatgcatcacacaaatatttttaggaaaaggaacatggtaaattaatagtgacagacgcgacctgaacaagacaaagggctcttggatttggatgtgcttaatggaatgtaatggtgataatttagacttcctttttttctctcccaggcagcaatgaatgtggatcacgaggttaacctcttagtggaggaaattcatcgtttgggttcaaaaagtaagtatctgacagagatagagtatttctcctggctttaccttggaacaggtgagactggcatgctggagaagcctatgaaggggtcacccagggcttcaggacacaggtctgggagctctgcccacagccccaggttataactgcccttagccaggaattgacatctggagacacggggcttttggggtattgtgattctgatgcagggaatagttgagatatttcattatttttcgatagaaagcaaattaccaagcttctt

SEQ ID NO: 123116 - DNA, 1101 bp, Homo sapiens
catgttggccaggctggtctcgaactcctggcctcatgtgatccacccgcctcagccttccaaagtgctgggattgtagacatgagctgctgggcccagccgtgcattactattgtttggatagttataggtgttacaggcatatttccaaagatttgtaggattttcttttctttatccatatcagcctagtgtttattggtcatattcaattagtttttaaattctaacctttacattactagaagagtgtcattattctggtaaggcaaactgaaattccacttcaaaattagcagctttcacattagaagacttaagataattatcgtaacttctataagcatggaaatacttttaattttgcagcttcatcaggataccttgactttctcattcctggcaaaagatgacttattgagtttgaaagcatatatagatatgtgttatctttgaacgtgttatggttaattatttaagttgtatctggagtgattttgctttagtctacatatgatgtatgagctgaggatgaaaactgatgaatttagttttatcttttcattgaaagtcaaattccttaaagtctcatttttcatatagcgaaaaaagattaaatggggagagtgcacttggaaatttaaattctttcattcaacaaattttttttagtgtcccctttgtgctcaagtgctggagatgtaaaaatgaacaaaattccatctccatctttgaggtcctctttaggtagctgaaagacagacaaactggaagtacctagagggaagtgattaacatgggctgtaaagtcggactctctggaaatgaatcccagctcctctacatacttgctgtgtgaccttggctactttactaaacttttctgtgccttgttttccttatttgtaaaacaataatactctatttcaaggacacatttcttcacattaaaaaatctctaaaataggccaggtgtggtggctcatgcctataatcccagcactttgggaggccaaggcaggcagattgcctgaggtcaggagttcgagaccagcttggccaacatggtgaaaccctgtctctactaaaaatacaaaaatt

SEQ ID NO: 123117 - DNA, 1088 bp, Homo sapiens
tactgggaattcagattcagtggtcctgatgaatggctgatgattatacatttttaaggagccccccactcccaccctggggattccgagtgttcagaacacacttagagaaacactgctcttgatcctggttttctctttcatttgtagtgtttattgattcaaaaactcacgtaacaattaacaaataaaaatagagggagagaaattcatctgcagtattagcactgtagcacattcaacttttgtaaatgttggttctcagtctttgtctggataatcctaaggccaagaggcatatagcatgtatttattccattactttttggatcagggaagagaatatgttgaatttatgactgttaagtgttaaattgcaaccttggatagcccatagttataaatttattaaagattttgtaagtcttccatacttgagggtatgaaacagactttgcatttgctaacaatgtattttctcaaactagatgctgatggaaagttaagcgtgaaatttggggtcctcttccgtgatgataaatgtgccaacctctttgaagcattggtaggaactcttaaagctgcaaaacgaaggaagattgtaacatatccaggagagctgcttctgcaaggtgttcatgatgatgttgacattatattactgcaagattaatgtggtttacatatctttatgtactgccattttttgtttctggtaaactggaatataaagtgaaagaacaaacatttgaacatacttaatgtatttttatagaactttgtaaacgaaaggagattcatgttttagaagtctgtccttttttatatcttgaaagaaaatctatgtatgatgctataaaataaatcctattatttttctcaggaatctggttaggaattgcaggcaatgagattttttgcggggcagggatgggaatgtttgttcataaataattagacattttctatagatatttgacattctgcgaaagcaacaagcaaactgaagaccaactcctatgagaaatattatgatgtttatgtaataaagacatgtaactgtcttaaatttgccttattttgtcatt

SEQ ID NO: 123118 - DNA, 1076 bp, Homo sapiens
tcacacctgtaattccagcactttgggaggctgaggcgggcagatcacctgaggttgggggttcgagacagcctggccaacatggtgaaaccccatctctactaaaaatacaaaaattagctgggcgtgatggcacacatctgtaatacccactactctggaggctgaggcacaaggatcacctgaacccaggaggtggaggttgcagtgagctgaggtcgccccacggcactccagcctgggcgacagagcgagacttgatctcacaaaaaaaaaaaaaaaaaaaaaagaggaatggttagtgttatggttagaccctatacaaaatatttattttgaggctgattgtgtgcttattgctgagtttggggacatgccaaaaaatctaacctaaaaacttcacattctagttgggttacacccatctgaaacaatatgggataatctctgattgcatgttacagaatttaacatgacttggaatgccaaggagaataaaagcagtgaaagccacaatggccaggggagatatcctggagggggcagaacttgcatggaggaatgattgcagctgattatctcgagggaaaaaaagatgggatgatgagggtgatgactgaaggaaaggcagaaggatacaaattggcaaggcatgatctcgtgaaaggcaggatatgaggccgaccagaatgctggggagagaggtcgttcattggacaatgaaagtgggacctgggaaatcaggaagaggaatatgaacagaaactggagccaggacattccatgatgacagtgatgtttagtgcagatggccctcacactagtgattcaggtggattgtagagagtgaagaagtggtcagacaagccagctgaaatgttgctcaggaatctcatgggggtgaccataacgcaaaggcgggggaagaatgaactccaagcatgtttttaaaatcaaagccctctcatctgtactctttctgctgtgacaggaccccaattcaaagatcaaacattagaattcactggcacttgacggttattgctaacatttattgagcatttacaatgccaatt

SEQ ID NO: 123119 - DNA, 1044 bp, Homo sapiens
taccaggctcagtagacacctggtctcttcctgggtgtctgttgttcactctaattgtcagctctcatgctcctactgtcttcctgaatcttggatctgtgctcacatcatgcttagaagagccatttctgccacccctgtggtttttggtggagaggattaagttccttaggaatagatggctcttttctctatagttgcttcctggatcccctttgaaaagatctcttccacagcttcagggtaagggacaaaaagatctgcatttaatatgcaggctttgcaaccaggcttgcaactgcttttcctgcagaaaacccttatagtatctaaaaattattttactatttcatgttctgcccccttgcatataggttacacatttttatcgccatgttataaattatgtaatgtagtttttaatatagttaatataagtacaatatactaaaagagctgatgctgctattttaagcatcgaagttaagctataaaatacagacttgaactctggtgctgatagtaaataccatttttctgttattttgtcgtgatatagttacgagtgctctgataaataacatatgcttattactcatgccatttcctccaaaatgaactctttaaaaatttaaacacaagtctagtacaataacatttcacaacatggctaaaaataaaaggaatcacatttgatgagcatttactatatgccatgctctgagctaagcactttgcagacattatctcacgtagttcctcaacaacaagaggctggtcctataacaataattgtcagtgagacagctgaagctcagaggagttaaataactttcaagtctcagaatgaggccacaatggagcttaactccaaagtccaaaccttaactatcaagtgatattggcctcccaaaactagataaagataaaaggtgtgtttgtgcatctgtgtgtgtgtgtgttaaagagagagagtgagagaatcagatactcagagcataacaaactgcagggtctcaccaaatagtttactgggaagaaatc

SEQ ID NO: 123120 - DNA, 1043 bp, Homo sapiens
gtctgaagcgattctcctgcctcagcctcccgagtagctgggattacaggcgcccgccaccacgcccggctaatttttgttatttttagtagagacagggtttcaccatattggtcaggctggtctcgaactcctgacctcgtgatccgcccgtctcggcctcccaaagtgctgagattacaggcgtgagtcaccacgcccagccagatcaggcactttttaaacagggcacctgctcttacaagcagcgtacagtgctctgaacataggcggctgaatgtcgcctgttagaactgtaggccccgttggctgtgtctctgcaatattgaaataggaagatttatttatttattttcagaaacaaacttaccccgtttgtgaatgtttcagaatactagttttgggtagcctgtgttcttcatgttcttttgtttttctcctggctttaaccttcattttggtattgatgtggcagagagaaaggtgctcagactctgggtaggacagactcctagctcagccatttagagcttcatcatcttggaaaggtcagtcttccagagcctcaatttcctcatgtgtaaacttgaaaaaaaattaccctggctccctcctagtgttattgagaggctcagagtgccccttccctattatgctcccagttcttgttattttaaaggttacatatataatgagcttaaagtttctcacaaagagtgcatgaacaatgatgacagctttcgtttattcatttaaaaaagattacctgcagtgttgcaagtaccgtgttcaatactaagggatccagcggtaatcaagacgagacatcccggtcctcagggagcttgcattcctgttctggtggtggttttggtttgctctgcccacccccctaccagctcctttttttttttttttttggcctatgtggaagcttcaagttcacagtttccttttttttcttgctccaaaagattagtccaatttaaggtggcatgaggaaatttttttcttaggctacttgtacctcctagtttgtacat

SEQ ID NO: 123121 - DNA, 2394 bp, Homo sapiens
caaaatcaactaaggaccaatatttggatttttaatgttaaagttattatcggtagtagttttaagtgtatttcaattttttacttaactgtgacattagattttgtaattacagaaattacaaatcaagtaattattacaagaaaggaggtacttgatattctttgaaacttgtaaatagtttttcactgttcaagtcagctatctacatctgcaaacatgcaaacttaatgacttcgcttaaaattaatagtgtttatttgtagttgtttggagtttatagaatggttttgtgtcttgtagctcttgggcagtgcggccaccagagcagggcaatattagcttttagttgttcagtttgtcaagtgggcataaataaatacttattctgtaaaggaagattactagttacggagagcttggggaagccgcggtatagttgtggttggagaagatgaactggctgcagttgtgcatcttgagtaagtttaatattaattcttaggatatcataccgctaataagacatttattagatactaattttaagatactagtttatgaggcttatttttcagggattggtgtaaaagaccaccccatctttttcctacatagtaatctgtctgcacataccatttgcattttcattgcaggtatacaagattaccaatggttatatttagaatctagttatcaaaaggtagatacgtagtttcattctggttccattaggcctctacatttttatatcaggcctaaaaatatttgaaaccttgatcatagtatatctagttttcattgggcctggatcttaagtacttttataaattcctgttattggatgaccatggttcatcactccactcattccttactgcctctagaacccgtgggcagcagagtctgccttaattcatggaactgtttctagcagatggagttcgtttgcatagagattggctttccatttggtggacctagattcaaatcctggcttctcaaattacttgtcaaatgaccttgggcaagtcatttaacttctctgagccttggtttctgctttgtaaaatggattgtagtacctacccatacagatgtagtaaaatatctgtatctatctattaaatatatttaaaataaatagattacatacattagatagattagaacagtgtctgacttacagtaccagcttacgaagtattagctgtttgtcttagatcctggaaatagcctgagcagagatacacgtgctggaggttactggagagtgctcttggcatcattcctagtggaggagggaaggaagcaggattgggcagaagcaggagttgaactgtgatgcatctgtaacagagaccccagttgatcctctcttgggggagctctggaggtgggatggcctttctgagttatctcaccttaaataataggggcagggccttctacacactcccccaactcccagttgactggtcatttggacttgggctccccccaggaagagagcatgaccttgagggtggcatctctttacctggaaaccctttatggagagggactctgctgagaagcttcagctctgagtgaaaggagagccattcttattcccctagcattatggatgtcttcatttagaccaccagtaccattcacataaaacacaggtgtgggataaatatttctcactaacaactaaataggctttgtggaggagactgggaattaaccaccattataacagtgtttccatgggaaaacgcattctgaattccatatatctgttgacaagtagattttttttggagtaccacctgttccctatgcacaggatttgtattttgctgcatatttaggccactaaagacactttttataaccgaggtttgtagtatattttaaatagtttctttttagatgtttactttaattcctactacatttaaattacctatatccatcagtaggaaaatgaaaaatgtttgcttgctgtttattttcaaatcaaggaatatctgttgaggatctaaggtatataggttaccattataatcttagaaaacattttcttgccttatctagaagtcagttttttgggtctcaagaactatttgcctttggatgttgtcttttgaaatccacctttttagtggagattggcagaaaatattgcctcatgcatcaaagattcttcctgtacacttcgtgtattaaagtgaagagctcttctgtgcgccgttcatggtgctctatgcgcagtctcgtctttctctcattctttacttgttagaggatctgtgatctgtccttaagttctagaaactaaaccttcaatgtcaattttcctgtaagtccaagaatatatttcattccatggagaattgaaaacgg

SEQ ID NO: 123122 - DNA, 1051 bp, Homo sapiens
agtcctagcagtaggatcactggtttgatacatattgccaaactgctcctacagacgaggtttgccagtttacaccatcagtggtggtgcagttccttcgcactctgtaatgtaaatttcgattaccattttcatctttgccaatcagatagatgaaaaatcacatctcattgtcataatatttgcattttttggatcatcagtgaatatctttttatatttatattgatcatttgtatttttttcttgtttgtgatttttgtccattttactaatagggtatttgtgttcttactgattttcacaaagtgtttgcgtattcagggtactttttgacatacgctttccctaatttattgtttgcctttcagccttatttatggttgtctttgctggttagaaattttacagttttgtatgattacattaacatccacatagaaataaaggtaaaggtaagggagtgtgaggaaagttgtgaaattacttgtaggcaaagcagtttgggcatggcataaagttagcaactttgagttcatttgtataccagtgcacagtaatgctattacatttatgaggttgtgtttactttttaatttggaaggctctgtttctcagaattggttgcaacccgccaggtgtggtggcttacgcctgtaatctcagcactttgggaggctgaggcaggcagatcacttgaggtcaagagtttgagaccaacttggccaacatggtgaaaccccatgtcactactaaaaatgctaacattagctgggcatggtggcgcatgcctcttatcccagctactcgtgaggctgaggcaggagaatcgcttcaacctgggaggcagaggttgcagtgagctgagatcatgcctctaaactccagcctgggcattagagggagactctgtctccaaaaaaaaaaaattggttgcaactcctgctgccctcccttacctcctctccgagtctctggccactcactgctgtcgagtcaatagctgagctccagtgctcaatacccgtctcttcttgcacatttctaaaat

SEQ ID NO: 123123 - DNA, 1031 bp, Homo sapiens
tggaaaacaaaagagtgtaaagatttcatttattttagggtatggatagggtaaagaagtgaatttagctacatcgtgctgagattttattgatttaaatacagtagtcttaaaatcatcttgggagttggtgtgttaactcaatccgtttaactaaacagaatgcaggcaaggcaggctgaacttctgtttcttccggccgtgctttttctgctacttaatttgatattctccatactgagagaatggtgtttctttacattctttcaaaggaaaatcctcctcttttgagtttagcaattctattaactagagcagattgactttcttgtcattatttttaaggagtgcaaagattggggtcaggaaacctttatactgtaattgagtttaagtacttttttaacgtggtcacttaggttggtgcaaaagtaatttgcgatttttgccattactttcttacctactttttaagtactctaaggattaatatgaggattgaacattttgaataagacactattctcaattgtagaactacatactacaatctggttacgcaaagctgtggggtcacagcctctccatataagctggctctgtgctctcaattgtcctgtgtgcagtatgggtggaaatacaagagagaaggccacttactagctgaatggccttgggcacatcaccaaaggagccttcctgtgctcagaaagagtatgtggaatctggactaaagtgattgtcctatttctattctgtgaaactttgatacttttaagaaacatttaggataaactatgacactattatcttcatcctgatgttcagcctaaaccaggcatattctgggtccgtattcttttgggtcttgacgtgtcttctattagacaaggaaaatatgaatcttctactttatagtcattattgatgtgatttcttactgagatcagagcgtcagagccagaatggaaataacaggtaaaatagaaacctagagttttttatttagtttgaatttgaggctgggtaga

SEQ ID NO: 123124 - DNA, 1014 bp, Homo sapiens
ctgttttttttccatgaatattttccattgacaattggtcaaatccatggatgtggaacccacagatatagaggacagactgcatatgaatggggtggagagggagtcttagctacctggagaatgtgtgctgcaccaaaacagcattctgattcacattccaaaaaaaaactctggactggtttactaagacacaatgcaggccaaactgccccattggaactctgatctaggggatatatagacatcatatcacctattatcagttgagcttttagaatattttgaacagcagggagttgtgagttgtattttctaaccggtaactggtctacggatgacccgtgttgccagttaatcatgcagtcttatgctttacctgttgggcagacaagggaaggggtaaagtcattagtcttttcagcagaggtcattgggatttcagaggtaaggggaaggggccaaatcggccatggcctttggcctccaaataccattttggggctcatcaagagagaagaagcaggtccagcatttacactgcgttgtaatttacatggtaaatgaaaatcacatagataaactatgagtaaagaggtttgagtattgccacattttgaatatttgtgctgacaaaggaggacattaatatggataatcaaaatcaagcttattttcctaagcaaggataatattggaatacagtactaaagactgacatgaagtctttaaaaataggattgtttaacaactggttggacagtttctccgcagttgtatatatacagtcatgcattgcttaatgacagggatacattctaagaagtgtgtcatttggcgatttcatcatcaggcgtacatcatagagtgtacttatacaaagtatagcctactacatacgtaggccagatggtataccctgttgcttctgtgctacaaacctgtacagcaggttcgttgaatactgtaggcaattggaacacaatggcatttatgcatctaaacatacagaaa

SEQ ID NO: 123125 - DNA, 1052 bp, Homo sapiens
ctggccttccgcttctgctcttgccgctgtggccagggccacttgaagaaggacacagactggtatcaggtgaagcggatgcaggacgagaaaaagaagaagtctggctccgagaagaacacagggaggcctcctggtgaggcggcggaggaggcaaaaaagtgcaggcccccaaataagccccagaaaggcccaagccacgacctcccccgccggcattccatggaccggcagaactcccaggagaaggcagtgggtgccgcagcctacggtgcccgttcccccggtggctccccgggccagtccccacccacgggctactccatcctctctcctgcccacttcagcggcccccgctcctccagatacctcggggagttcttaaagaacgccatccatctggagcctcacaagaaggccatggctgggggccatgtgttcagaaatgcccactttgattacagccctgcggggttggcagttcacagggggggacacttcgacacccccgtgcagttccttcggcggctggacctctccgaactcctcactcacatccccaggcataagctgaacactttccacgtgcgcatggaagacgatgcccaagtgggccagggggaagacttgcggaagttcattctggccgcgctcagtgccagccacagaaacgtggtaaactgtgccctgtgccaccgggcgctcccggtgttcgaacagttcccactggtggatggaactttgttcctaagcccgtcgagacatgatgagatcgaatatgatgttccttgtcaccttcaaggtataggtgttaattcaccttgcctgctttctgtttgttaaaaaccaaacaacaaacaagacagattgctctattttggtgtagttttcaccagtgttgtttttttgttctagtcaggtgctaggtaacatttgaatatttcagcttcgcccagtgacgcggtgattttttactctgatgtcacagtaccaagtacagttgtcctagcggataattttgtgtgttctgtaatttgaagaaaggattgccg

SEQ ID NO: 123126 - DNA, 1083 bp, Homo sapiens
cagtgaggaaaagcagtggtcagaaaagggccaaggtatttttagattagttgaattaattttgaagtttatgaaagatgagagtgtgttgatagcagcaaaaggtaaacaggattattgaaagctcagacattagcccggtggtggtggtggaaggaggggcgatggggaagcttattattcctgtggatggcatataaggatttggtacatttcagccataaattgaatgacacgaggttggttagtataagaaatctgtcagttcatgtacaactactgaacttccataaagatgagacacatcacatataacatgtttacactttaaatgtgtgctaaaaagcttgttgtgaaaatgatatatccccacctgtctccttcccaccaaccctgctgtgtcagtacccagacaaacattttcaaatcttagctgatgcttcaagtttttgacatcgtgattgtaaatactgctgtcttcattctccagctttacatattatctgtttattgactggctttgaaggtggatgactgtgcatccccctcctccttcctctcaggataagataccacaattattagttaaatccttaatgtttactaatgtgaatatatatatttaatattgagccaagaagtatagggttttatcttattatatagtaccatatagtctaggactccttttgtttttattagggttaattgattattttgatttgcatagtttttttttttttttttaactttggctagttctcactctccagcagctttacaaaccatctttcaaagacatttccacatacctgtcagattttttttggaaaaaaaatttttgcccctgaaaatgcccctcgtggagactcttaccctcctgcttctacctgtcctggtgcactcaggacctggtgtaccacatagctgtccttctaggaatgccttcatttctgtcctatttttaaaaatcttgtttcctagatctcaatattttatttttttctcggtttattctctcagcttttaggaaacatcccccaggagctttttgagaaagggagcatgggaatagatgatttg

SEQ ID NO: 123127 - DNA, 1992 bp, Homo sapiens
cagtttctgagcttaaccatttactatccctcagtctactttctgacttcatatagtttaattcagggttgaaataacctcattgtttcatggaagatggagtttgtgtttttgtttttttatcctgtttgggggtaattttagagggaagtggatggaaacacctttatttctccattgtaaaacttgaaacattttttatgaagatgaatatgggtacagcagatatgagaatagtagtgttctttttctatccatgatggacagattattgtcatgtaatccattcatcagttcatcaaacttacggatatcacacatgctgggtactatcagttcttgcttgtcatcaatttataatcttaggataagatgcttttataaaatgtaactaacttaccaggcttaaagttctagtatcatacctggatatgatgtacattaagtatcctataatttccagaggaagggaccactttggcttggttcgtaaaaagaggcagcatgaatgctgatgtcaaaaggtggactggatcttggtaagcagagggtctacccaggtcaggtgtttgttgatgaggagggagtgcctgcaagcaaaggaagggtggttaaaaagaagaagggcaggttgcgatgaggagctagggagagaactgtttggttggagccaagggtgttctagagtgggaaaggagtaggatagggagagaagggagagaacagattgcagaagtactttcaagccataataaagaactttgctatatattctttatgaatgtgaatggaaagattttcagtgtttttttaaagcaggcagtcacatggaggaaaggtgcgggaaaggggtttgaaaggggtgggatctagagacagagttgaggctttgtagtctagatgtaaggagataaaaggtgtggacagaatggaagggaggggatattgtcaagaggttattttaaagaaaaattacagcttgtgaatttagaaacaaaattcactttgtttctagaccagataaatggtgcaagagtagagaaaggagatgggtagataaaggtggggaaagggcctggttttgcgggcagaagatgaggtttctgtgtgttgggtttgaagggatgttgggacttttgtgtggagatgtctagcaaacatggttaaaaataagcatttgggttgaacactgggagtttataacagtggtggttaaaatcctaagggtggaagagctcttggataggaagaaaagagaaaaaaaaggaaggaggatatgataaacccacaaccaaatcttgagagtacctttcagggagcagatgaagaaagaggtgaaaattaggcctgagtacttgtgtgtgcgtatatatacacatcaaaacatagacatacataaatagataatgcgcacattagatgtgcccacaaagatactgagaagttgaacgtttgatgtaaaacctgaagatcagggtgtttaattattaccagagaagttatcattgccacaagtgaggccttgaccacatatcagcatttttattgccacatctttgagaaatccatgccgtcttatttgtagtaagaaaatgtaaatcatgtcttcaatcaccaattactgaccacacattcttctatttttcttttcttttttctttctttttttttgagtatctcagtctgtcaccctggctggctggaaagcagcggagtgatcatagctactgcagccttggactgctgagctcaagcagtcctcctgccccagcttctccagtagctaggactgtaggctcaagccaccacactcggcttatttaatttgtttaaacttgttgttgttgttgtttgttgttgtgttttttttttttgtgacggggtttcacttttgttgcccaggctggagtgcaatggtgctatctcggctcactgcagcctttgcttctgggttcaagcgattctcctgcctcagcctcatgagtagctggg

SEQ ID NO: 123128 - DNA, 1819 bp, Homo sapiens
tctattctgtaatgctgctgttagggttaaatgaaatgattcacacggagctggtagcatagtgccataccctcggttaactcttagtaaaagttactctgtcttcatcattatggtcatcgttagcaacacctgacttctgtgtctaaggctgcccttacccttctcagctgtggcctctgtacctgggaatgtttgggaattgcattgagtatgcaggacagagagtgcaaatgaaattttttccagtggctcctggatccttgaacggacttcctaacatgccccgaggccagagtagatgtggcatgtgagacccttttattttcaatgccgtagagcagaggtggggagtatttcaagaagttcttgtcatccttcccccttttggcataaaggcccccaaggttatctgtctttggctgttaacatgccccatccatttacccaacatacacttataaagtgctttccacatcccagacactgtgctagtcactgagtctacaaggatgactaagacatggttcttgccctcaaggaggaagggggtcatgcaagtaaatgcaaacgaagggctccccctaagtactgtagatggaacatacatacctttccatcgggtaaggagcaggttgatccttactactgagtgctgaagacccatagtctgactgatggcagtgagcagcacattctgaatatgaggccacttaggattatgtgttctcctgatggtagtttttaacatggggaagcaccctgggttccacacagagcagaaatgttgctgttatacgttgcctgggcagattctgggcattctgactctttcctaattatttaaactgtgatgcttccatatacactaggatgacatctttcctttattaacattaagatgttatcaaataatggagggggatcatgttgtaacttttaagagctcggtgaataataagacattgaacttcttttaaaaaattacgagtaagatataattctggttcctaaattagatgtggtgatggctgagcattttgaggacaaggatagttaacagtaattttggttgtggtgtaattctgggctatcagtccccaagacagacttttgatttttatgatgggacttgtcacaagagagcttgtgacaagatcagtggtgttggttaagtctctatatgctaaacataaacttttgagcaggaagtcctgcgtgaatacagtacaggctggttttgagtgtatgtggctttgttacttgaatttggatggacccattatgtaagcccagcagccctttttggaaaagtgaattgaagccaagtttttaatatgcttgaacttaaaatacatgctttattgacaacagctagtaattcatcattatcctgaaaggacagcttgtgtactaaatattgatttttctttttatatttatccaaatgataaaatctttgcttataattggtagatgaaacatttttatctccttggagatgaaatgtgatttccatgatggccactcagagccttgtgtcttctgtgcacagggagactcatgcatctgtatgccgtgtgcgtggactgcctggaaggggttcacaagatcatctgcatcaagtgtaagtcacggtgggatggcagctggcaccagctgggcactatgtacacctacgacatcctggctgcctctccatgttgtcaggtaggtactgaacacactgagggagcagtgggtgatattaggcttctgtccccaagtgaatgtagggaagatgcgtctggcaataaagaagaaattcagtccagcaatg

SEQ ID NO: 123129 - DNA, 1609 bp, Homo sapiens
cctggattgctaattttacttgagtatcttgggaaattttatttttacatcaaagaaaacgcaacttttctatagagtagaatgaaaaatgaaatttcaaagaagtttcgtggaggtttgggtgagggaagtcagcttcagccgctgtcttaaaatccagggggaggggtttcttattgttagggaacttcagtggagagcatttaggcagtagtagtttagaattttcttctcataagtaggtgaaacagctagcagtgctgcatatcaggagagaagttgggagtctttcaggtataccccgtttccatgtttttggtagtaaaagggatgctttgcaaagcccttgatcagtttcccagcattttggtttggatgactttgacaagtgttgggaagtggaggggtgttgtggctgatggtgtctgtttcccccaggcccgcctgaactgtaagcactgtgggaagccggtgatcgacgtgaggatcgggatgcagtacttctccgaatatagcaacgtccagcagtgtccacactgtgggaacctggactaccacttcgtgaagccattttcctccttcaaagttctcgaagcttattgatgaaagctttgctttagtaatagctattttattgatattattactttattacatatcttttatagggaaacattctgtgacattaatttcctttctaatttaaaggagagttactttgttgtatgtgtgccactaaaataggggctgcccttgccctgtcttgattcccgagtgttaatctgtggttttgaccagagcccagatgggtaatcctgtgcatttgggttggggttcactcttaccaagaatctttgatgcagctttaagatggtggggaggatggggtgaatttaggaaaggaatttgtggttataaactaagagcttgataggagttggaaggaaactcttactaaaatgttaactttctaaaaaccttcttttagatcttccttgggcctttggaaaaatatgtgacaagtgaatgtaagtctgtgcctggagagctaatagtgcattagtctatctcagcctagtgttctgcagcacacatgggcaggcagtttactcacactgacaggtgacctgaaagtggcacaagtgctgtttctatcactattgtaatttgccagttcatttttcatgctgaaagtaatatccaaattgtaagacatatgaaagatattagtgttgcaaatatgtttaggtaaactgacctataacagaatatgtgaaatgaatttggaaataatgcaagaaggcagaactcaatcatttaaattgtgtctttgaagttggtaatatagcttttaaggagaacccatgaataacctgatttgggcagtgatgatttattacaggttgcactgttgaagtgtcatttggtgtcaggttcttctcacaggtaaatctttcagccacagaatctaactggtgagcttcagaaccaataattgccacatttattgtcctcaaaattgcttatggccatgtataaccaattaattctgagtttccaaaatcaaagatttgaccttaagagggaagggaaaaaagtgtgaaaggat

SEQ ID NO: 123130 - DNA, 1066 bp, Homo sapiens
catatatgttgggggaaaattaactcatctaaaaagaatcttattaggtatttgaactctaaaactaacagataagacagatatgtaccttattagagcaccagaactaatttgctaagtcttttgtttagtcctgcaagactgatgcttaatacacagtctgttctcctgtgtctaggtcaggaactccagtttgcttttctgttttgtgtcctggtagcagctgttgagtaactttcattggaggttgggaaggaagtgaggagaaagtgttcttgtttagtgttttatttcctataataggatgctgcctaacccagttcatctctatgtcctgttcactgaatattccgggtaattgaaagaaaatataatggatgggctccattaaaaccagctcaaaaataaattcttgtcagtaaagatttcttgtcaagatgtcttggattgcacttttgttgaggaaagacagtgtaaatagttaaagaatgttgataaaattgaaacatttggttgtggaattgtgtgtggttttagagggtttctgtttgtgaaatgtatgtattaaaaataataaaattccagaaactaacattgtactctgtctttagtttgtcactttatttttcattgagatttttgagcagtgggattgtctggtcagaaaagatgaagagaaagctttctgaggttttgatcactattcaggtaaccatttcaaagtcactcctgcagctaataaaaaaaactgccaacttttttgctgcttgcgtcatgtatcacatgtaaactcactttgcaataaaagctttcagtatgacaaagttgattctatacgaatagtccaaaattatcgttccggttttagggaattctattatttgatagatagtatagtgttaaagattagatagacccccaaggtcaaccacccatagccacatagccaaaacttaagtcgtcctgatttccctgaaatgctagttctaatcaaaacaaaatgcaaggccttgtcggcatgatttggtgaaatcaaacttactagccatacagtaatcccccctta

SEQ ID NO: 123131 - DNA, 1051 bp, Homo sapiens
tggtggcaggcgcctgtaatcccagctactcaggaggctgaggcaggagaatcgcttgaactcgggaggcagagtttgcagtgagccgagatcacgccattgcactccagcctgggcaaaagagtgaaaaacaaacaacaacaaaaaagaagaaaacaaagaagtttacaaactactaactaatttaaaatatgatcaaaattaaaaacctagcttgtctgtagagccaggggctgacagtcttgggcccagcctctggcctccgtgggtacccagcttcaggcagcttggcaccaagcagcgagtgcccagctatgtttcatccaggaaaactgcacctgagtacatgcctcgttctccacttcatctaagcaaagaagagatcctacaaacaagaatgtgagtagcctcaggttcgaaaaacacaggctgcattttattcacttcttacttcctcgtacccagcccagggcctggtgaccaccagacattctatatgcttcattaaatgaaataaaagaatggcagccccactgttctgttaattcacctaaatattactctacctctccgaacttcggtttccccatttataaaatgggggtgaaaatagaaccttccttgtgggactgtttcaaggatgaaacaaataatgcatgtaatcacattttgtgaactctacctcactctataaatgtaaagacccagaaaatacagagactgcttttgtgcagcaacttctcagatgtgcccagatattatcaacattttaatggctaaaaaggccatgccagctttcccactgtgatagtcttctattcaatacagtaaatatcctaaattacaggcttgttcatggaactccataaagatattcttcttttaaatgaaagaaaaagcagtgacaaaaccatgtgcccctaagtcatttcccatttcctgaattggctcaggtgcaaataagtttgcttgccactgccctagacggctcagaaataaattatgactctgctacaatcttcattcttgacattgaacatttgtttgcttc

SEQ ID NO: 123132 - DNA, 1078 bp, Homo sapiens
attttccatttaatgttttatttttatttttaattttaattttttagagacagcgtcttgctcagtcatccaggctggagtgcagtggcacaatcattcatagttcactgaagcctcaaacgcctagctccagccatcctcctgcctcagcctcctgagtagctgggacaacagttgtgtgccaccatgcccagctaatttttttgtagagatgggttcttgccatattgtccaggctagtcttgaactcctgagctcaagcaatctgcctgccttggcctcccagagtgctgggattacaggcatgggccactgtgcttggcctattttgtttctaatattaagccagataatactccagaactttcctttatatttaaaaaaatttaaattattaacaaagtaattcagccaatattcaagtgattcttggcattgaagacaatgaaaaatacacattccctgccctctaggttcttactgcctagcttcaatcaaatgctggctttgtgatttaacttaggcatagttcttctgtacaactgtaataggcatatagaatttctgtctgtaatttctcttgttttctttctctttttttactaagttaaaaagtaaaattaatgctaagtactaaattaaaatcctattactgatgttgtcttaactacataagaattgaggaaattaaatgtgaaaaatatttctcccaggccatttcctaatttagtcatgaaatgtccttacttattaatgagcttatctttatttattaatgaatacaatgtcagataatattacaggatttagactctgcaaggatgagtgagctagagtggcagtttgattcacagctttgaatttgatgatttattctatgtgaacacttatatttcagtcattttctatattaatatccaaatcagtgagcaaggaaataggctttagtctccacgtaaaaaattgaaattcctcataatttttcttttctgaaaaggaaatgtgataagttttttgggttaatcttctcctattcattttttctaaggtgatctctcaggttcgaaagttttttacg

SEQ ID NO: 123133 - DNA, 1042 bp, Homo sapiens
aagttaagaaataacttgttttctagaagtcatttgggggtggttgttccctttggtggcttttttccccccgtctttgagttgaacactattgatgagagtaagcattccaaaggataaattacaggacactaaaacaggtcatgatgagcttaagcggagagcaggatttaacataattggcataatgcttcattgttatcattgtaacatgcctcttggtgtgctttaatcaaaagctgcaaagttgtcactgcttttttttttttcttaattgccatcatatcaagtgtactccagagttagaaaggtttgcaatactcaacattatctttttcaatgggcaggaggcaaaaaaaatcaagtgtttctgtttatacctgattcaactacttaaatagaggtagattggaataatacactgattgattgatgggtggcattaaatataaatctacctttatctccagtgatgagagttttatttctcagcaaaagtgccaaggataggtacatattttctagcgtaatctctgaaacagtgtctgactggtttatagttctgagaaagatgaggcagaattccactttgaggcttttgtcctataatatttaaaatgtactcaggttgactcaaaggtcaaattacagtctttacaagatgttccctcttaagcatgccctgttttcctgaattctgagttttcctgttgcatgcatgggatgcaaatcacctgaaaattatactttaattttacctggatagatgtcttatcaagaagaccatagctacaactaagtgggtatcaagttttgccttatataatcaagcaaaggaaaaagtaatattgtgaaaatctcaaattatcccaggtggaaggagaaggaattttgtttttcatgttttcatggcttatcttatgtttataagagcaacacacctaccttcaagaaaaaatacagacttttgtacgcaacttactaggggaagtaaaaaatgtaggttgaggaaaatcttataaataatgctttaaaagaacat

SEQ ID NO: 123134 - DNA, 1787 bp, Homo sapiens
atcttgggggtggtggttcgcagccgacgtgcgcccgggaatcctggggggcagaggcgagcaaaagtggggtgcgctgtggtgggcgacacgtgtggcgcgggtctcattatctgcccttttcacttccaggactggaaatggcagaccatatgatggccatgaaccacgggcgcttccccgacggcaccaatgggctgcaccatcaccctgcccaccgcatgggcatggggcagttcccgagcccccatcaccaccagcagcagcagccccagcacgccttcaacgccctaatgggcgagcacatacactacggcgcgggcaacatgaatgccacgagcggcatcaggcatgcgatggggccggggactgtgaacggagggcaccccccgagcgcgctggcccccgcggccaggtttaacaactcccagttcatgggtcccccggtggccagccagggaggctccctgccggccagcatgcagctgcagaagctcaacaaccagtatttcaaccatcacccctacccccacaaccactacatgccggatttgcaccctgctgcaggccaccagatgaacgggacaaaccagcacttccgagattgcaaccccaagcacagcggcggcagcagcacccccggcggctcgggcggcagcagcacccccggcggctctggcagcagctcgggcggcggcgcgggcagcagcaacagcggcggcggcagcggcagcggcaacatgcccgcctccgtggcccacgtccccgctgcaatgctgccgcccaatgtcatagacactgatttcatcgacgaggaagttcttatgtccttggtgatagaaatgggtttggaccgcatcaaggagctgcccgaactctggctggggcaaaacgagtttgattttatgacggacttcgtgtgcaaacagcagcccagcagagtgagctgttgactcgatcgaaaccccggcgaaagaaatcaaacccccaacttcttcggcgtgaattaaaagaaacattcccttagacacagtatctcacttttcagatcttgaaaggtttgagaacttggaaacaaagtaaactataaacttgtacaaattggttttaaaaaaaattgctgccacttttttttcctgtttttgtttcgtttttgtagccttgacattcacccacctcccttatgtagttgaaatatctagctaacttggtctttttcgttgtttgtttttactcctttccctcactttctccagtgctcaactgttagatattaatcttggcaaactgcttaatcttgtggattttgtagatggtttcaaatgactgaactgcattcagatttacgagtgaaaggaaaaattgcattagttggttgcatgaacttcgaagggcagatattactgcacaaactgccatctcgcttcatttttttaactatgcatttgagtacagactaatttttaaaatatgctaaactggaagattaaacagatgtgggccaaactgttctggatcaggaaagtcatactgttcactttcaagttggctgtcccccccgccgccccccccacccccatatgtacagatgataatagggtgtggaatgtcgtcagtggcaaacatttcacagatttttattttgtttctgtcttcaacatttttgacactgtgctaatagttatattcagtacatgaaaagatactactgtgttgaaagctttttaggaaattttgacagtatttttgtacaaaacatttttttgaaaaaatacttgttaatttat

SEQ ID NO: 123135 - DNA, 1038 bp, Homo sapiens
tttctcttttcacattggctccaggagaattagaaattaggaagaaaacagagagcaagttttggtcattggttggctggtggctggttttcttttcttttgttttcaaacttccaaagaggatcttgaagcattcatcagaaataattggaggtggccgggcgtggtggctcacgcctgtaatcccagcactgtgggaggctgaggtgggtggatcacttgaggccaggagttcaagaccagcctggccaacaaggcaaaaccccgtttccactaaaaatacaaaaattagctggcgtagtagtgagctcgtgtagtcccatctacaaggaggctgaggcaggagaatcacttgaacccgggaggcagaggttgcagtaagctgaggtcccaccactgcactccagcctgggtgacagagccagattttgtctcaaaaaaaaggaaaaaagaaaaaaacaaaggaaaaaaaaaaagaaataataattggaggtgtaggggagcaatgtcttaattgacaggctgtggagcagctattattgctagaagcaaaaacaatgagggaatggaaccaatgcctaagaccacctactggccaccaggtgagcaccacagccctgctggggatttgcactggctcttctcttcagagctgagaagagttgcccaatgggagctccttgactattgcttgttggtcatcttaaaatattgatggctgcttgtgtcccgagatatcctcagccctgtttgtatatttccctttccaatgcgtacactagaacacttaccacttcccctgggttctgaagtgggttccaaggtgagccaagatgagcacttgtccttcaagagattggaaagcagtgacgtctcagctgttttacacagttagacactggggatccattcagtgctttttggaaaggaaacacaaacatggcaagacttcatacttaggtagcaaattacaatttccaaagtctttttataccttcaatattaaattcagtgttctaattatggtaaatgttctaa

SEQ ID NO: 123136 - DNA, 1636 bp, Homo sapiens
tccttttagagagtgaaacataaggggatgattctaaattgatacggaacagcaaccaaaccctcctaaagaagaaagacctggggatggaggggtgggatttaccttactagttatcaacaattattataaagctgtatttaataacacaatagggtattgatatcgatagaaaaattgagtgaagggaaagacctacctgcacattgacacttgatttataacagagtttcactcaagagcaattgaaaagaatagactttcaagaaattctgtcatacattggttatctatatgaagaaaataaaaaatgtgtctcctgatgcatagtagatacatgtttatggtgaattgtctaggaatggagaatatggcagatgttcacaaagaaggagatacagttctttgacctacactcccaagaaattgagtagtgcctaagtatgaatatttgaaaatatttgtttggaaattagagaaagaacaagcttcatgatgttagggtaaaatcacctatttaagagccttataaacattttatactattttaatttttttgaagttaagtgttagtgctttactttggtaccctctatgagtttgctaatatcttggacaaaagaaaaaagtagcctttctattttttagagatgaacttcattgtaattgttatgtactattttaggtactgaaaagactgaaagtgacaaagaatagatatctacagtttttgtctgtttctttgttttttgtttttgagatcggttctcactctgtcactcaggcaggagtgcagtggtgtgatcacagctccctcaacctccagggctcaagtgattctcccacttcagcctctttagtagctggaactacagatgtgcatcaccacacctgcgaattttttgtacttttttttttgtagggacagggtttcaccatgttgcctaggttggtctcaaattcctgggtaatctgcctaccttggcctctcaaagtgctgggattacaggcgtgagccacagcacccagcatgatagctccagtttttattgagcttattcaaaaacgtaatcataataactacaggtaaaattcaaatacaatttagttttgatatctagatggcattcttttgtgaatatctgtaaaaacatgtttgtgtctgtatgtgcatttattttcggagtcttaaaagcatctatgcgtcaatgtgatagcacaaaaaaactgccaaatattcactgataacactgcattaattgagcactagtccggcttgtgtaaaacggctggtggtattctgtaatcaccagtacagtcttccctctagaaagtcaaattcaatgacattctgtacatactgcagttttaaaagtatcattccactcttaagacattaaaaactgcattataaacattcatagttgtgatgtgacttcagtctggaaggacaaatgtacaaatgtattcttagatttactcaaatgtttacgtatcattttataatgactagaatggactatagtaggtcccttgactctgtggctgccttaaatggacaatttctaaattattttaacattccaaaggattctttggcttttgaactatccatctaatttacttctaaaatgag

SEQ ID NO: 123137 - DNA, 1049 bp, Homo sapiens
aaaaaaacacttagatatacttttgcctcagcaagaacaatgagatacaaacagggatatgaagggtaatttattgaaaagtaatatatagaaggaaaacatttatattaagaatgaagactccaaaaactgtaattctcttttaaaatacagattcactttcttaaaacatttcctttaataaaaaataaataaaattttaaaaataaaaaacacagtcaagaatccaatgtaagaaaaaggtacagtcagtaatgtaccatatttccagataaatatttcatatttaagtaataaaaatactctaaatgttttttttttcatatttcttatttgtgcttaatcagtggaatggcagttctacactgaggagagccaaatttccaaaaatctgttataggttttcaagactcatttattttagttgttattacacttccaagctgccagctcattcctcaaacaaggagactcaatagatatcagtgttgaggagatttaaaattcattccaaaatttatgattctcacttcaaggaagaaagatgatccttaaagccaaaatgacaggaaaaaaaatcttgtttctgaaagaataaaaatctgattaaaagaaagtttagattcttcataacactgacccctacagaataaatatatttatgtataactaggagtattataatttccattaattgttctatttgcacagtaagtacaattttattggttcttattgttcatgtatttttatactatcgtttattaagtgtaataaatatgattgttggctttttaaagtcagtttccatcatattgtaactaaaatgttcaactgtgttaattttatctaaaaatagaaagtaaattgtcaccttacatactgttttaaaatacttttatgagtcacttaaagagcataatgattagggaacataatcaagatcatttaatctcaagacaattgcaatattggagttagaatgactgctgtggtttgaggaagtcaatgtcgatattatccatagcataactaacagcccccttctt

SEQ ID NO: 123138 - DNA, 1052 bp, Homo sapiens
attattgtacacacaaataaatggaagccagtcctattatttatgttattgggattggaatggaaacaatttaagacatgagtttaaggtgctacaagtttttaataatagtttttatctataaaataaacataggatttcttaacattttcagtgaggtggcagatttctaataatattaatcatgatcatactagcaggagttaataattggtaaaaagcaattatgctaatgacaatgataataattatggcttatttgtttaacagtgaataacatttacagtaataataagctgaaagatgatttataccaataaatcagttggcaaaaatttataacaaattttaacggaaacatgaataggtaagaaataaaaagaatgtgcctaaataatacctggctaaaaattgcttatcagttgtcaaatgatacaaaaagatctttacaaaaaggaagactctgctgggaagaattccctgaatttggtagacagaacagttgggaatcaaatgatatcacagatatgatataagggatttctcttgattgtcaagatgtcagtactcaaaagcatcaatacccttgtagggtttcaatactgctattagtggatgtatggtcctagtaatttatccttgagttcttcctaaaagtctctgaaaatagagctccttgagggcctctatttgtgtccaaacaagatgttaataactctacataccctcttagagccaaacattctatatactgcatcctacagtaactgtaggctgaagaggtatttttgtgtcgatgtgggtatatgtgtttgggtatctttttgggagactaagagggtgaagagaagaaggggtattgttttagtccattgtcatgctgctgataaagacatacccaagactgggcaatttacaaaagaaagaggtttaattggacttacagtaccaaatggctggggaagcctcacaatcatggtggaagacaagcaggagtaagtcacatcttatggggatggcggcaggtaaaaaaagagagcttgtgcagggaa

SEQ ID NO: 123139 - DNA, 1048 bp, Homo sapiens
gagaaggtatatttattcaaagagagagtatatgtaaaattactatagcaattctttctataaacctcagttcaagtctcatttcccactatcccagcccattttgaatattttgtcagtatcacttatttggcacttggcaggtgctcttgtacatatggttgtttgctgtgtgctctgtcttaccaattaaattataggtgcctttgacagcttaggacatacctagtcctctttttttttttttttaacataataccaaaagagaaggccttatttgataaaaaaatttatcatgaatgtcttgcattctttggataatatttttgtgctttttaggtttataacttccatagtaaatcagttttatttctaaatttacttgaatttttaattatttattagcaattatattttaaacactcataaacatggatgtttaaaaatgaaattgttcaaattatcttacttttctttctaggtcgtttatacgcaatgcagactggaatgaagatcgatagtaaaactcctgaatgtcgcaaatttttatcaaagttaatggatcagttagaagctgtaagttaaccactgatcatttattttctggttatggttaaaataccattttattcatttgcgtgtctgtgttgtcattttagttctttcccttggcaacaatcaaacaaagccattatacctgaggaaaaactagtaataatttattttcatttatttgctgtatacttccagagaggttatgagtgttaattaaagtatgttcaagtatctttgcatatgccatcatatcttgttccacattattatagatggcctttggctcctccttttataggtgaaaaacccctcctttttttttttttaagttgagacagggtctcactctgtcacccaggctggagtgcattgcagtggcgtgatctctcggcttgctgcaacccccacctcccaggttcaagcaattctcttacatcagcctcccacgtagctaggactacaggcacacgctaaacgcgcccggctagttttt

SEQ ID NO: 123140 - DNA, 1050 bp, Homo sapiens
ttcgttttactgcagaagttgaatgttgaactattttattgataggtttggtttatcttagtatgggttgacagttctaaacctgcttattctatattctaagagtgaccaaatgattaaatatattgagggagacagttttctcacttttggggaatttagttacaatgtggaatgagagaagactagattgtgttgtgctgttaggttggaattgttgtaatcttaattcatgcttttaaatatattacactagatgaatagatctatttatataggtataatatgtatactatagtttgtgtatctgtatactctgctaggagcaatgatgcagcagtagcagtgagcacacagtgagcatccctagtgcctgattttctgttctaattttattctgcataaggaaccaggactttcgtaaaaagtgcttaatctagggctaagtccaggaaggctacagataaggccagaccttcttgtgacagaaaggaggaaagtgttatcataatcataggacccagaagccgacttgaaagggttcccattgtccaagccagggacagtttgagcataaaaataagaatgatagtaatggatgataactcattgaataaattaagaatctgtataggtccagactgatacatatgaagaaataaataaatgaataaataatagaagagcagagaaggctctttgtcatagtattctaactataaatatacaaatagtgataaaattaaattattagtgggctttaaaagtagtaggtggaaagtttgataaaaagaagtatatttacatgtctctgaatatcttaccaaattgcttattgatatcagaggaaaatagtaattcaataatgagaaaacttgtaacacacctctttaggccaagtcattaaacctaacaccactaatattgggacagctcacgtcatgtgcatcctaataagatgatctgaaaaagacaaacatcgcttcagtgataatgcttccaaaaacgtataacccgaacgtaatcatgaggagacatcagacaaatcaa

SEQ ID NO: 123141 - DNA, 1092 bp, Homo sapiens
acttgtttgctgaaattatagttgctttgaaaaatataaaaggattaaaatgttgaatgaatatcaggaaatacatgtaatctgtgactataaatatttcagtgtctgagtaattttgataataaatttgtttaatatgtttttcaagcatttctcattataccacatctcagtgttctgggagttatgtggaagtcttgtttatataataacttgggaggttgagggactaagagtataaatgtatttgtgatgttgccacaaagttagagattattaatcccatttttatcactgtctactttgaaaatcttatgaaagctgtggattctcatgctaatgtgtattgcatttttgcatgtaatttggagggtgttccaggaagaggcaagagagagtgctacatttttgagactacagtacaagctacctattcttgttcaagaaataacaaggagaacaatgtggcagaatccagaatgagaaggagtgataggataggagatgagaatgagggtggtggggggaggattcaaacagagaatttataaaatttgacttgtatttttaaagtattgttcccttctgtaatggacaagagtggaaaaggcaaactcattagtatgttattaaataatcaaggtaaaagataatgcttgctaggaccagagtttgccaaagaggacatgttgagtagtggttggattctggatatattttgaatgtagagctgacaaaattttaacagtttcattggcagagtgtaaaagatacagagaactcaaaaatgactccaagggttggacctgacaactataagatttttaaccattgtggccatttatagagttggtgggggaaaatcaggagttggttttgaacttggaggagcttatcaaacatacaggacaaatatggaattggatgtatacttatacaagatcctaaggttcagagaagtctgaacagaagatataaatttggaagttggcagcaaatacacctcatggtatttaagggtggtacatttaaagccattagactgcgtgagatcatcaagtgtagaaagaagagacaaggaatccaagagct

SEQ ID NO: 123142 - DNA, 1055 bp, Homo sapiens
gacagctggtgtaaaactttgtctttcaaggtgactttttggtatgctaatggagaataatttatatcaaatttttcatagctctagccaggaatttattattacactcttgtgagtcttacaggtcctaagtttgaaaatccctcctcccgcctatggttgctgttgtctaaccagtcatgcttcagtgtagcaagtgatttaaaaattaaatgaaaattcatgctaattcttaagtggccaaaatttgcagttgtcagtgattctcatcaatctaataacaaaacaggaacttagaggccaaggacaaaagtaaaagttctttttgcagttcctgtctcttagaaaggatgtttaatcagccaaaaggagttaatgaatttcaaaaatacatcttgaaaatttccttttaaaatattgtttagtatccagcatcctttacatcctttattttaaagaaaacaacattgaaaagtgaattagtggaattacaactgccggaaatttctgctaaatagtatatgcagcagtttgtaggaatagggatgttttggaaacaggatgaaataaaaattaaatacgttgctttactaaactgagcccttttcaacttagtttcttaaatttcacatactaatgcagaaactcaaattggtttaaacttctctacactgctcatgcttagatattaggactgaaagaaccttctaaagtcattacaacttttctactaagtctttagacaggattaaattatttcagatagaagaaaatttagcctaattttaaagaccctcaaagaaggcagtttaaactttccttagcaatttcttcatttacttgtaaaatagttttcttcgtaactaccaaaaggtacattctgcattgataaacattaagtagctgatctttaaggcttattttctgttatttcatctattttaatctgagttgcaaattgcagcgtggtaattgtagtttaccaagatagacctgaatgagtggctaactttactactaaaacagtatgaccttcagtaaattactttactttt

SEQ ID NO: 123143 - DNA, 1050 bp, Homo sapiens
ttctccagggccccctagagtcttacctgagtgtgcataattcaggggcttgtaggtatttagttggggttcatacaaacatttcatggctcacttcttggcaactttcttttatgtagactattgactgccctcagatgaacagccacataaaatcaaatgttacctggtaagatttcctcttacccttactctcatttctaccagcttttggtcatgctctagtgcctttatgttgtggagcttttttctttcccagaatgtataaatgttagagttctccagtattggggaaagtcatgttaatgtatgtaaagtataaatacatccacaaggttgcttgataaaatgcttatctcagattaggtaaatttaactttttttcttgtttgaaattagctacattgaataacctgtttataatcagacaaaaaagttatttaaaaatgtggtaggaagcagtaagatctattctctttgatgagtctgtagctctagcttgcttttattttaagttactatgactcccagtagcggctgatggtcattttatactcaaaattcagtttttcaaagtagttttcaaattcggctcacgatacagtatattttaaaagtttgcatttcagaacttttcaaaatgaaatatctcatttctttctgcatagctaaatgcaaaatttcattcctctgtttttattagctaaatgcattgaacaactcacagataatcatttagtagctagtacgcggtaaatcttaagtaaaagtccgctgtcagaaaatggagttcttattggatagcataaatgtggcatgttttgccagaaatgtccttgagtcttcataagtttaaagaaagtttattttaaagaaaaacatattctgggtgtggtggctcacgcctgtaattccagcactttgggaggccgaggcaggcagatcacgaggtccggagattgagaccatcctggctaacacggtgaaaccccgtctctactaaaaatacaaaaaaaaaaaaaccaaaaaaaaaacaaactagccgggagt

SEQ ID NO: 123144 - DNA, 1088 bp, Homo sapiens
taaaaatttacttttatcccaggtgacttatggtactaaactatacaaacactttaaaataattaatggaatgatagtcatccttcatgccctgatttctactgttcctattatgtaacacactactactttacttttatttgtcagccttattttacccaaattttttttattttacccaaattttgcatgaattacattatatgcaagttttctattttgaccattgtaacatcaagtatgattagtgtctttcctcctattttaaaacttacaagtttatattatctgcaaaaatattgctaacgttttctttaagattattgatgaaatgataattttagcactgatctttttttgtgtcttcagtcagcatatttgaccttgacttttcaatattttatggcctatgtgatgatattaatagacaaacctatttgcatttgttttggaagtaaaatttcttggaacacttttaagtattttattatgtttagaaatattcattatttccagtgtggaataatgtaagtgaaaccagctacttagatctgtttgccttagatgaatactgttcagattatacttgaaggttgaaatcctgatcaagagtcccagacacaagcattctcatagaggagccaaggggaaataaaatgcatttaggaggcaaatcatattggttatttgtttctaccccatgctaaagcataaactcagctgatatttaacttctcgtgaccttaatttttcctcttcctaatatgaaattaatcatacttacttctcatggttattttaattattaaaagggaaaaactgtaaaaatggactagtagtaggcctatcacaaaatcagtgttcagcagattagcctcctttccctctttttttcctcttccttcctatttctgtgccaaggaaagtcaaggtatttaatggcaagttaatgaacacttaaaattattatgcgaatcaagagaagtatcacaactgggggtaggatattaaccttatagaaagactgtccaaggagttttgttttagacagtatatctcaaggcagagttgtggtataggcacatcag

SEQ ID NO: 123145 - DNA, 1037 bp, Homo sapiens
taatagcaaatgtttcccctcttactcacgttaagaatgatttattttctctcatataaaggtccaggatgcacttttatcaaagggaaatccttaagataactgaaaagaatagtatgtactaatttgcagtttttagttcttccacaaaaaagcaaaggaggtgcaatgaggacagggatagtgattgtttaaacaggcgaagtgtttgcttcttgtgctttcaacactgcacagatatcacatgtagttgatacagtgtgtttttttctttctcaagaaacataagctttttatagttcatattacaggagaagattttagtaataaagctagattaaataatataattattttatgattaaagctagcctttcattgtaaaatgcagctcacttcatagatcaaaatgtaggctgtgtacttgtgtcagaagtaccatgtttgcattcttctgtaagctttgataacctgttgttgatactctggcctacgcatttctctcaaccctgtttctcatgattacactaaggtttcactcattctttccttatactgttactcatagacaatataggtaacattcctttcttcctttttctgtgtctctccaaatgctgtgttctttcaggagtctgtttaatcacactttctggatagtcttctctataaatagagatttgtttggaggattttaatttaggcagaaatgcaaattacttagcaatgaatgacattgatctatagattggaccattagagtatagtagatttaccttgttttttaagatgtatatgaatgatatatgtaatctacataagcctaggtacacctgtttcaaagcactagacatgactagtgtgaagatccatctcagattttacattctagcatttttaaaataatatatatttatgtgcctttcagtgtttggcaagttttgtggagaaaattgtcagatgtttataatttaaatatatttggtgagtacttatcaaaatcaagcaaaaaatagtcattgaataggtcagcctaa

SEQ ID NO: 123146 - DNA, 1047 bp, Homo sapiens
gccaggcgcggtggcacacgcctgtaatcccagcactttgggaggccgagatgggtggatcacgaggtcaggagattgagaccatcttggctaacacggtgaaaccccgtctctactaaaaaattacaaaaaagttagccaggcctggtggtgggcgcctgtagtcccagctacttgggaggctgaggcaggagaatggcatgaacccgggaggtgaagcttgcagtgagccgagatcatgccactgcactccagcctgggcgacagagtgagactccatctcaaaaaaaaaaaagttttttgagcattaagtgatataatatctgaatagtatttagcacagcacttgacataatgaaattctgcctgtattcataactactattgttggaattgttaagtgacatgtctcagcaatgcctgtatgtatgaaggttcagtctgtgtcctgtgtgttccatccaagtcaaaggataatagagtataccagaatgagattatccaaggcctttgacataagaatttctagaactatctagttaaattggaaagagctgctaaagactcattttggaaatatttacaaataagtgttctatcctctcttatgacattagatatatcaaccttggaaatggatgcttatgtcaactgagcacgcagtgatttttctttataccaagtgatgttatctttgatccagtgctgacccaggctctctttgccactgtagtagaggatttaactgatagttctagctctcttctgcctgatcttgtcctgacctctgaagaggagatgaagccctcttatatatagatggtcttgtctgcagctcgtctgtaacttataagctaagatttcagaagagagatatattagacaacccctctaatctttgaagcatctttaaggtccacttgcaccctctcttgttctgattatggcctctagtaaattttaatgatagaaaaaaaaaacagcttttattttggtgcattaagcttatattgacctttttgagtataaagtcagataaactgaaat

SEQ ID NO: 123147 - DNA, 1052 bp, Homo sapiens
attctgatccaaattattattttctaaaattttcaaaaagagtactgaaacaattgatgctactgtttccagcacagtgccaggcacctgcaggtgctcagtaacttcactgcatgaatatgaaaaagctgtattttaaattatttcccacattttaaaactaagttcatatagaattaaacattaattaaattgcagattttaaaatacacatatacttactagtgtagggtgctagagtaagtcttcaaatatttgttgaactagtagtatttaagattacataaaatttggccttcactgttgtgaatcagggattaccgatcccaattttaacagaagttactgacttggcatttgttgcccattaaacctaaacatcaactatcctgaagttctgttgacaatttagtcaggtatgctccagttcatatttctgatcttgaaaaatacctaccagattctttaatggtttttcaaaatatatttacactacatacgctgtctaggtgaggaaacatctttgaaaattgagtttaccttaacgctactttttgtgctttaagtctctcctatctcagggcactcttttaaatatacaaggcatccatccagaatttactggacatgctgaaagaaggctgtaatggtcagattaatctttatttttacaccattagctttagcactgtttggctgacatatcacttattaataaggtaaaacgtgtataatggcaagaactctgttactatttttgttttataaacttatctaccaaggattaaattattttaaaacacaaatactgtatttttttgtgaaataatttcaatatttaaaaaatgtgaatgaaattaacagaaaaatataactagatataaaatacataaagcttacagacatgcataaccaattatgtaactcatatataaaatacaagaactaagtaacaaccaatgtacagatttagatccaaaatgtaacttataaacatatagagatatttattttcaacaatgaaaaattaagctaaaaaatcatgttacatg

SEQ ID NO: 123148 - DNA, 1530 bp, Homo sapiens
gaaataatatgtaatggttgtttacatgtttaattgtatatttcagtgatataaaatttaagaaaccttaagaaatttttacatggatggcacaaacatgtaaaatactctcatgcttaaaacaagctaagcaacctggttttctttacataaagtttgttattcactttttttttattgaaggtgatacttacattccagctcaaatgagggttgaattggtttagtctgtgtgtattgttccatgaagagagaggctaagtgattttagcatagacaccaaagctgctatccttgtttgtccttattgcttcttgaaggaaaatcttaattcatctaagttattatgtattgccgtgtctgtggtttatattagtaataaaaagacaattgaaaagaatgaagaaaatgtatcaaagttcatgtgagattgactaaaactactgtttttacatagccttaaatatgttttttaatcttaagcataagcatttgcccaaccttacagaacactttttatattcttataaatatcccaattgttctttttcttctaggggatgttcgtctaaccccagaagactttgctagagctcagaagtactgcaaatatgctggcagtgctttgcagtatgaagatgtaagcactgctgtccagaatctacaaaaggctctcaagttactgacgacaggcagagaatgaagcctttgtatgacagacccatgtatttttggcatgaggaactaacagtccattactctatcttcagcctatcaggatcacagttttaaggaagacttggttttgttgaatatgacaatgaaatctgtgtgtatcagatttttattgaagcattcatcagcagcctcaaccagttttcattgtccatttactagattcaatcgtctctgagtatatagggctgatgttagcaagaccctaaaaatgtccattgaaccctgcttcaaaaaatgaaaacacacctctataaaatgtgtactgggaataagctttgtatttacatacattaggggaattttttaaaatctgtaatgtttggacaaacagatgatattactttgctataaaattataaatgtaacttttaataaagatagccagaatattctaaattagaaattacgtttttgtttccctcaagacataaaacaaatataaacattctaaactgctggatgaatctgaaaagacattaagttcaaattttaatttattctcatattaaatataactccattaaaagtttaaaatttcatgggagaaaatataataaggtaaagaggtagaatcactttcagacttaagaataatgttgatttcccaagtgctttaccttatctgttaaagcgtaagatgaattggtatttgcttcataggcagtttgactgcatgtattagagaatgaaaagaagatatttgtagtaatgcctggaaacttggtgctttaaattaaggtactcctctgctgctgtagaatggattccacacagtggatagctatgggtgat

SEQ ID NO: 123149 - DNA, 1028 bp, Homo sapiens
tgtagttttgttttccccatatttaaaggagagcttttcatattttaaaagtaagactacagtgttactttttaagactctatgccttagaagcattagtagtactttacacatggtacctaaaaagtattttaatttttagtaatcttagaaataaaagcagaaaatatattgtgggctatttcaggctaaaaataaagtattatttgagataaaaatgtgcctttgagaaaatacattaaaaacttaaatctatgttggatttgatttaaacttgaacagcacacaccaagcattaaagcacttttggatgcaactaaactaataatgggagtgaaaataattgcttttgatatcaatagcactgctaacttgactctgagtaacttagtagcatgaattaaaatgctgactctgaaatgaaattttgcaacaatgttcctttacagtcagagataccttttccatatgtactgaggctttgttccttgtgagctgtagtaggaagatacagttagtacacatagtgaaaactgcgtgcctgaacttttagcttgtgtttctattaatagcaaaatcaggcagaggatggttagcagacgttaaattggatggttgatttccatttttctggtttcatagcccagatataacttgatcaaaaattagcttcggtacttgtatattcattgcataagtgtggtacagctttatttgaaatacaccattaagttgaaaaaggatcctgtgaattaatttcttatgttgtagtcatccctttctgtaaatatatattagagcaataagacattttcaaaggctgataaattctatatctatcatactttttaaaccctttgaccagtaggtgcatatgtgtaacaacacatatagattctcatcacaaaaatagttataataattaaatattaaagacaaatatccaccaagaaagaatttgataattatggaatatttacattatgaaaggtatacataaccataacttaatttttgaaatgtttagt

SEQ ID NO: 123150 - DNA, 1049 bp, Homo sapiens
ggatgaacatttaaaggcttctgatttctaggatttaagggagggaaatttctaagatcaggcaatatcatttttataattatctgattaaatgatgttttttcttaagaaatctgatatcaggtgatacaataatatggacttcttcctccaaaaatttttcataaaatagctggcttccttaaaactgtaaggaaaaagcttctgcttctattctatttgaggtaataattggtaggtaagagtttatggaaaggatttgcagaagagatacacagacacagcttttaacatttctaatatactgatattcagtatgagtctacagttgtggccatcaagttgttttgtgataaagtagatgactacagggatatttgaaaaatctcctcagatgttgggaatattaggaaataaactgagtctactgccacttcaaatacagagtacttccaaatactgaggctacaacataggatgagaggaatgggacataaggagaattaggattccaaccagcccaataaaggtcagaattgtgggtcattcaataattggactgtaaaatattgttgcctgtgaaagtcaaaagagatgtgaggaacatttattttgtattttcaagttttacatgactaaaacattttctacagagtggtaaaagagtaaagaaatatgtgctacagattcactgatgaattaataacgtttttcgatacaaacatgtaattgtctctaatctttctttagttttcaattaggaaatagcctaggggaaaagtataagtaacttgaaaacatatcgtaatatctttggcagtcatagtcaaggctgttctgcttatacttgttggctgatcactataaacattgtctacatgatgaaaatactaacccaaagtttgtaaatataaaattaaacactatattaaacctcttagtttttttgtttagaagttcttttcacatcatgatcaactgtgtttgaattcaaaatagtctttctggtttacatgtcagtgaaatacatgaatttttagtgggtgttt

SEQ ID NO: 123151 - DNA, 1033 bp, Homo sapiens
ctttatggttctataacccccgccaccccagttcagttaccctctagagtagagattcttaacctgggtcagtgaacctttgtgaaattcgctgttgcctcctgaggcctcattgtactccttgaaattgtgtgtaacgtgtgtggcccctgctcattttactggagagagtttgtataacagattctcagactgtataacctcccaaatttaagaatcattgcattaaaattttttgtttctcttttactttttgttgctctattgataattctttttctcctcaagagggtttcattttccatttattttttatgattgtatgttggtatttttaaatatttactgcttgattgtcgccagtgtgtggtattctcggtttattgcatgcatctgaacccagcccttctctctgtctctcttttgtctggccagcagtgtggggatgtgccaactgccgagtggttttgtccaacccttctgggacctttacttctccatgctaccctaacgactacccaaacagccaggcttgcatgtggacgctccgagcccccaccggttatatcattcagataacatttaacgactttgacattgaagaagctcccaattgcatttatgactcattatcccttgataatggagagagccagactaaattttgtggagcaactgccaaaggcctatcatttaactcaagtgcgaatgagatgcatgtgtccttttcaagtgactttagcatccagaagaaaggtttcaatgccagctacatcagaggtatgtaaaccaaaggcaacgccaaccttctgcttttatttaacatgttctgcagtaaacacaaggaccagaagacagagttatgctcttttatgtgaatgtgaatgattaggattgggatataagggcaagaatctgttaatattctctgagcattcttgttagcaaaatataattaccagatccaaaatgtggttacagtagagttgaattcttttatattgtttatatgtggaacatttaaaggctgctt

SEQ ID NO: 123152 - DNA, 1099 bp, Homo sapiens
aaagcgatggagggcttgatgttttgcatcacattagtctgtgttctgaagttaacaggtttatctttcttgttatgttttgtcctagttgccgtgtccttaaggaatcaaaaggtcattttaccccagacatcagatgcttaccaggtatctgttgcaaaaagcatctctattccagagctcagtgctttcacactctgctttgaagcaaccaaagttggccatgaagacagtgattggacagctttctcctactcaaatgcatccttcacacaattgctcagttttggaaaggccaagagtggctactttctatccatttctgattcaaaatgtttgttgaataatgcattacctgtcaaagaaaaagaagacatttttgcagaaagctttgaacagctctgccttgtttggaataattctttgggctctattggtgtaaatttcaaaagaaactatgaaacagttccatgtgattctaccattagtaaagttattcctgggaatgggaaattgttgttgggctccaatcaaaatgaaattgtctctctaaaaggggacatttataactttcgactttggaattttaccatgaatgccaaaatcctctccaacctcagctgtaatgtgaaagggaatgtagtcgactggcaaaatgacttctggaatatcccaaacctagctctgaaagctgaaagcaacctaagctgtggtgagtttgtagcgtattcctttttttttttttttttagcattattctatgaatatgattgtcaacaaagaattatacatacacacaaatgtacctgtatgtatattcacacatatagacatatatatatatgttgtcattaaaaagctcttttaatttttaaaatgtcgtctgctcagctcttatagcacacatttgattataagccatgcatgctccatcaagacatttggttttaccattcttaagttttccctatgtcataaaatatcacagagtttatcacgaatataacaatagttataattgtggaatctcaaatacaaatgttaacactaggcttgaaacaaaagaaattaataagtaagttattggtatttttttttt

SEQ ID NO: 123153 - DNA, 1062 bp, Homo sapiens
attttcagcagatttttaaaaacatggttaaacctgtcaatacttttaaaaacgaaatgtttatttagcagtaaatctgcttcattttatagcatcttcatttttctcataacaattttattaaatacattcagttttatgaccctcatggatagataaatttttagtggactctttaattataggtgcaagtatttatttgcctgtgtaatgattcaagtttagatactggctgatgtccgtcaattttcacaaagaacagacagtgccttctctactagttttatttattttactgattactactctttcctgagggagtggtacagtataacgcaatgaatagtctaagttcaaacaaattacatttattttaacaagcatttattaggcacttccattggttagctactgtggttgtagagataagacacacttcataaatactttattgttattcttttctgaaatttctggatttgtatttttgtttccctctctaggattttttacagagtttgctaaggtttcatcaactcttggatttttaccgtttcataatcattacagttctgttcttcatagctataaaacttcaattcattattggctcctcccttgcacttctaacaaatgattgaatgtaatatttttagattactaaatcatttttaaataataaaattaagataaatcattttatctttgcaaaggactttatactctgaggatgcccaaactctttatgaacatagatgactaaatttcactttaaatatatttatttatgaaaagttgaaaaattcatcttagtagcaactgcaaagaaaaaaatgaaaggaattactgtttttatttttctgttattgcaacttattgtgaggatttgctcttcagttatttggagtatcattaagtaggtatgagaggagcagtgggctacacatcagtcttttttaccacaacttgtgtaaatattaacatatagtgactcctttcagtagcataatttggaaagtacaacagatagagaaggattaacagctttagagcttttcctca

SEQ ID NO: 123154 - DNA, 1159 bp, Homo sapiens
ttaatattaagtaaacacctgaaaacacctttctggtagcctcgaaaatcagtgaacacatacacatcatattctaaaaccaatttgttgatgataaaacatatcattatccaggagagtggattgtttgttctttcttaacaacctcctgatgtgtaaatccatcagccaaagaaaactgattgtgatattgactttttatgcagatatgctgaaaatggaactgggtagaaataaagtttgtatatacttttgatagttcatgtatttgtttattttggtgtgtttgtaatgcaagttttcatttatcaattaaatttccttttaattaaattagtcacttgtatttataccatttttacttaaaaatattccagtgtgatttttattgttatattggatcatattaaaatagtgtttattgagtgtttaaagcaatgtcaatttgctaaactagaagttccccagaaggaacagctaactaaaatactgagaagtaattgttgcagtttcccataaaagaatgctacatattgaaatttatacttgttactgtgcaatgaaactgatgaaatgttcaagaaaattgttaaatatcttgctctaaatcatagctcttctgattttcttttcttatttttacctctaagctctttaacatactgggaatgtagtttgcctaaaaactgctttcccacaacactgagcccttatctccctttgtcttccagagatattgtatcagtgccagaagtggcctaagaagcccttgactgccaacattgtgtgtaatatgagaaccacaggaactccctccagggtctcctctattgcatgctacagaggctgagatttcattagtctctgaactttaaaggctttttagtttgcggaagtcccttacaaaatataagtacctacaaaagggaggtcctacaaaaaatgggcatacagtaaatgtgatgcaagggaataatgggcaaaaagcattcaagacaaaattccacctcagtcctgccttaacttctgcctcttcaaatgttcttttttcattgtgcatttgcttaagttttcaatctttaaaactcccccttcctctctctgcttcctttcacagccaagcttcctcttcttgcattcactcgtcagaccttggcag

SEQ ID NO: 123155 - DNA, 1004 bp, Homo sapiens
cacttttatcgcattatttcctttgattcttgataagccgtaaggtagggaggatgctttttcatgttggaaaagagaggctaaaataaatgaaaaacagtatttgttcaggatgatttaattgttaattttctttaaagcagatatttctcttgaggatttatccatccctgtgattccatattttaacagatatcactgtggattggggtaattttatgggtgttcatgttaagatcagaaaatctaaacacaattttattttgtttgtattttgccatgcagcaaaacatgtatgtttaagaatctaaaatatcatattacttaatagtggcattttttgtcgttactttagagctttaaaaacaattgatgaattggccttcaagatagacctaaatagcacatcacatgtgaatattacaactcggaacttggctctcagcgtatcatccctgttaccagggacaaatgcaatttcaaattttagcattggtcttccaagcaataatgaatcgtatttccaggtaatgagccagtggtttctttcattttaattaattagttagacatataaaaacttgctgatcacttagcagttgctgcttccaagaggtcttggtccatgaagtggcaaggtctgaatgttggctaagtttaactagagcagtagccataaagtattgtgggagctcagagtgggtatgctttcataatctgggtgacaggggtggtcagcttaccttctacaagaggggttactggagctaagcatgagtaggggccaccatacttggggtgagcatcagttcagttagaggaaagagctttaagggccccaaggtgaaaagaagcatggtgcattctctttgccagtggttctcaaactgaacattagaatcttctggaggaggctgggcgcggtctctcaagcctgtaatcccagcactttgggaggccgaggtgggtggatcacttgaggtcaggagtttgagaccaggctg

SEQ ID NO: 123156 - DNA, 1026 bp, Homo sapiens
catgttgtaagtctggtattaaataaatagataacagtaacaaaatttactcttcagagatgatttatatgaagccagagtttgcctgcccacgacttcatatggccagttccttcatatattgtctaaattttattatgagtttgtaattacgcattattttttctgctgctatctgattgaatggttaattatatatatatatatgtgaagataagcatcattcatgttctctttccattttctaccttgtctgtttttgtaatattaaaaattgctggtagaaaatcttttcagaacatatcctttttggtgatgttctcttatcttttcagtttttccagaccaccaagactttgttaagagtttttcttgacttagaaactctttattcacttgtataagatattcccagagtctgcattgtcccatgacacattcaccagttcaccatatgagatgctaaaacaatgcacctcatacctataattatatcttctggtctacaaatatttcaagaatttaatgtcttctgctacatttctttgtactaaaactggctttcatgaagattagtacattttcatattggctatatcataaaagttttcatattttcattctctaaaagaacaaaacaacatgaaattgtgtataaatctgtaaacaaatctgtaagcagccttatttaatttctatttgaaattctggatttaattgtgatttgcaagtcataggtttttcaagaatttgtgacacatcacttggcaatctctcaaaaccatgattcatctctctgggctgatgaatcattggttgagttagcctatctgtgaatcaagtggcaccaactcaaaccccatcccatgtaccctgggtgccccgtgttctcccagtgttttaagggattcctgggataagaagatagggggagccccctcagactctgagcctctgcttctgctgaattccatcacttcgtgcatggcttgatgttgcagagatactgtacctgttctttactgc

SEQ ID NO: 123157 - DNA, 1031 bp, Homo sapiens
taatgccatctcacatccctgaagttatctatatctgcaagtcttccctttaattgtatttctggatatttattatccgagggaagaaaaagtcaacttagaatatttatccagtttattgatgataattctgctgaaagtgtcagtggcctttagttgttgaagaactctaagagatgaggacccaaggttgtctgtttccccccactctacctagatgcttcaaagggactttttagagcaccaagtaaatgacaatatgcattgcctcgaattttactgtatagtagtatccaaggaaactctttctagaaattctttaacttttgataaccagaaagatatgagaacatccctttggctactgattttacatttgcccccagaaagccatggatcatagcctgaaacaagcaaaaggaatgagttctatgtgggagccaaatttctagcctaaatatctaagtgtatctttttcccccgaatagttaaatagctctaacaagaccaaggttaaacacaaccccatatagtctacagtaaatataatgccaatacttagaaataggtgtattattatttttcaaacatgctacttgattgtgttctctggtagatgaaaggattagatatcaaaagttaaattcactacttgagatttttcagaatgtttctcactccaagttttgaaaaccttcttggctgcttattcaccatcttccttcactatatttgctgagccagccttggcccgtaggagtctttctctaggagtattagacaagttggcatttgataaattttctgtcctaacaacccccgtaggcccactttcagcacttgtgtgttacttgcaacaccctttctccattacaattaaaatgttatttattttaaatgaggaaattgcaaattttactgagaattaaaacattttcaattcacaattacagttttttttttttaaagctaagcatatatctctgattagtgaaagatggaagtgaaatgaaggcaggactaaggatggg

SEQ ID NO: 123158 - DNA, 1032 bp, Homo sapiens
tacacccctacccatttttcccttcctatattatttgaaaacatatcttagatataatttcttccacaaatatttcagcacattctaattccttataattttgtacatctttcaagccatagtgcatgtttttttgaagtggttttccaattattttttcattggctctgctacattcaagaatatttcgtatggtaagccacagtacaaattactagaagggaagttgacactcagtgactatcaggagtatacttagaagaagaaaaacatggaagtttagtgttgcctattacctaatataagaaagaatcggagctttattttcttttgttcttctttaatgtgcaaaacggagtatacaatatggtggcctgtaggcatgccaccagctcatcttgaacctaatttcttgtatcatttcttgcagacagtgcttccatggacaagtccttgtcaaaactggcccatgctgatggagatcaaacatcaatcatccctgtccatcaggtcattgataaggtcaagggttattgcaatgctcattcagacaacttctataaaaatattatcatgtcagacaccttcagccacagcacaaagttttaatgtctttaagaaaaagaaatcaatctgcagaaatgtgaagatttgcaagcagtgtaaactgcaactagtgatgtaaatgtgctattacctaggtaactgcatatatataaggaatgtattttgttaagaaggcttttgtgaaattcagaatttttctttttaatatatttcttccatggaagagttgtcatcactaaaacttcagtactgagagtaacatgactcagtagccacagaagctatgatttgtaaaatatataattgaatcagagtaatcataatgcaggggagacattcaaattagagacaagggagaagcaatgctgaggaagaccctagatagagctcattttactccacctaatcgttatatctggatatacccattttctgcatcttctttctcaacaataaaaaatgtaa

SEQ ID NO: 123159 - DNA, 1071 bp, Homo sapiens
actatagtaactgaaaaataataacctgcctatgggttttcattattgatgtatatttggctgtatacatagcagtgacagatcttataaacagtgtatatatccatcaatagaaagattataaagtgaaataattatattaaatattataaagtcataattttattaacaaaaataaacactttttttacagtgttcagttgatcttgaatgatgcaatgaattttgtctgagcctcagaataagtggtagcatttaactttcagacacaatttcagaattgtggacttcaagtagggccaagtattttgtctgtttcactttgaatcatttttattgctgtgtcttcaagttcactaatcttttcttcaataatgtattatctgccttaatgtctaatctgccatccactgtattatatatatcaaattttgaacttttcctctctaggggtttaattttggtctttttaatcttttccatattgtttccacttaacacagccattctttagtttctggaacatatggaatgcagtttttaaaaaactgtcttattgtccttttctactaattctatcatctgggtcggttctgatcagttaatttttctcctctttataggtcacacttttccactttctacttcataatttcggattagatgccagaattttaccttattggctactagaaacttctgaattcctaaaaattttacggaggtttgttatggggcatggtataggatacttagaaacagtatgatctttttatgtcttgctttttaaaaagctttgttaggtaggaccagggcagcatttagtctagagtggatttttctccactatcaaggcaagacctttcttagtactctaaccaatgccccataaattatgggattttcccctccggctgttgggaacagagctggcggccctttgtgaatactaggcactgttccctctaatactttcaggtggtttttccctggctgcaggtagtttcctcacgtgctgatcaatcagtactcaactgaatattcacagctctttggatttcgctcggtgta

SEQ ID NO: 123160 - DNA, 1668 bp, Homo sapiens
ctcttaaaaattgtgctgtcattcattatttacatctcagagtgtgaactttgaggatcttgtacttattagtaatgttatatttatctccatgcaagttgtgtccagcatagtacataagacacatgggcatttcctgcttattaaattagtaataatagtccaatgcttatttgaaatgaaataacttagatttggcattgtgattgtcacttcatggtgtatatgtgactgctggtcgtctccaaatgagatcaaatgatcagcatacagccaaagtgaaatttagtgagagaacagagcctagaactgaaagtgtgttttttctagcattggctacaaccatagagtattctaagctggagccacagtattttagccagagctttcagtcaggttaattaccaagtaattttttaagaaggtactattacatttctaaaatatatagacctaatctctgagactcagagaagaaaatttgggccctccaaccttagtttgtattttagtctttagaatccaggatcaaaggatagcttgaagaacatacctatctgccttattttgtattgtttcttaagtcctctcatgcccttgctaatacagttcaagtcgagttgaacaaaagtgtgtcctgtcctcaaggagctgtcattcttcaacacccactcctccccactttgagagagagagatagcgtgtttgtgtgtatatgtatatgtacacacacacacacacacacacacaccctctggtgctattacaaacatttttatagggaacttaaataaaaattcatatagaaccagaatctatcttagtatttgaacaactcattggcagtaaactcagttccttctgtacaggattaatggtttccaagctgtaaattatgatttagagccttgtgcattaagattgactttgagccaggggaggcttggaagaggacaatgtatagtttgctttaggaggtcttggagcacatttgtgtggggaaaacagcagtgagttagagtgaagaacgagaaatgccagacgcaggggatggtatctggtagtctatgtgtcctgttgtgcagagtgctaggaaatccaaagcgacttcagaagtagaactgtggattcttagcggtgctaatagtgtgagttgagtgatgaggaggtggtcgtagttgaaataggataggataacagagctcgtgaccatgagaagtagacaaagagatgaattaaggaaatataaggaaggaaaaaatatattctggaaatgggctgaactgggggcaaagaacagtagggttgaagattttgctaaataaatcattggctgtgaactcttggctctcgtgagatgcatgaccattcccttgctcaggcatttccacctcctggaaagccttgtctttgcctgtcagaatattcaagccctaatttaacttctaccagctgcataaatatttgtttcatgacattagctcatagcaatctcttttttactgcactcatgtactactattataaatgtagtagcacttaattgatgtttagagctataatttaaattttcacctgcatgctttgtgtctccaataaggttccaaatttgtatagaattgggtagtgtaaaaaaaaatcctctctattgtccaatacaaagttatg

SEQ ID NO: 123161 - DNA, 1097 bp, Homo sapiens
ccaaggaggtcatggcagccaaaagactcaaaaggtctgatgtagacgaaatcctgtgttttactgcagattaaggctttagagtgtgagagttacttaaggtcatatggtggagccggaattaaaagtagcgtctttcctgcactgtgtggcctcctggcacctcaaccctggtcttagtgccaagggaatgagtgcctttggcttctttgatgagtactttgattatgacgaagtccaagccagcttctgtctttgtttgcactttgctggtctgtggtggctttctccccacccctgctttccaggcctggaggtggtggtgaggtgtggtcatctccagccatgcctgcctctatgtcccatggcatcacaaggcatgctgtcctgtgacagctaggggatagtcaacagaaacaatagaatatttagccttgattgcttgacctagttttggtggtggtgtttcaagcaatgtgagtattatcaggggaaatctttcagccaacccagtgggctttgttaaattaatttaggaactcgtgtcacattatttcctcctcactattaggctaatagatacctgaaatatcaacagaaaaatatacagttaacagctagcatttagagttcacttcctcgtgccatttttaaatgctgtataattctgttaacaatattatttgtatccccattttctggatgaaaagactgaggcacggagaggttaggtaacttgcctgaatatttgtatgtctggcaagtggcagagatgggactgaaagcaagtattctggctccatggtccatgatctgggccactatgctacatgtccagttattactttaatgctttaagccatagttgtccaatctgtctttctttggttcggggttagactacgaatgagtgtatctgggatgaagagcctttggattttttttttttttaaatgtagtcctaggaggaactcttcccagtctgctggagctgtctctgaaaggtactatgtcatttggttcaaagtctgttcggctttaatcccttgcttgtatatattcaggcaatatggggaaggaaaaatatgttcataccc

SEQ ID NO: 123162 - DNA, 1031 bp, Homo sapiens
aaggatttttaagaatcttgaagtttgtcctgcatcttgaagggagtgccctacctctttcttggaaagtgactaacagaaagaaaagttatgctagcttctgcacgaaaccatcctgggaagtattgagaagtggtattatgaagctagctaccaaatattatttgagagaggctttgtaacttttgcataaaatgttaggaaaagtacagaaatattttcgccgctctagatattcaaatgcgaaaaatgtgtgtgttgaatcattttgcagttcattgttcaggtgattgtgtttgttgattcagtgtaattttaaataaccaaaccatttgacatttgtcttgtcatgtttatggcaagaaccctggaataaagattatttatctctgttaatgaagaagtcttttgagaccatgtccaaatgagtttcctaaataattgtttcttgaatagcagtaagactagaatctagacacaggttttcttgaaagtgaaaacatatttcccatgactacatggatttctagttagtatgtatagttactgctatttgtcttctctattgttagcaacatcttttgttttgttcttttctggagcaactaccttctaatactagtggataacatctgtttcaacctttattttttaatactgagattatcaattaattttgttaatgtggttagtgggtttgggggagtggcagtgcatggccaatttcaaattgcacaattaaaaaatcttgtgcttatggctttggaataagtttttgaactttcacttgaatatgattgtgtttgatgttcagagactttttgaaatattagtatgtttgaacatactaagtctaccttgggaagacctaatttgggagtagctagaaactgtccaattttctatttcactcttctgctcaaccctctagcattcattttaggctctctctctagttaagttaatgcttgctttctctcaaactttctcttagagctgagatagtaatttaatgtttgaaattcaggaaa

SEQ ID NO: 123163 - DNA, 1030 bp, Homo sapiens
tgcttatcttcagaacagcttggttcttttaatagcaaatggctgagtggaggggaaccatttgcagtgggtcaatttaagtatggtgtgtcctcccatttcagaccgaagtcatgctaactgctcagggattggtgcaactgtgtgtttcttttgatgttggtcagatcccagaaaactcagtattttagaaggatgttgctcattccttagataatttgaaaaattattggtcaacttaaaaaaattcaggagctagggaacacctcatctattctttttatgaatatgttaatttattattctgttggaggctgttcttaaaattcccatgggccaggataggaagaggtaatggggagaaggcttgttttttcatgcaatatatgaacctagcgctatatgatcatgccagattcagtatacgcaaatggtgcatttctctcaatccagagtggctggaaaatgtgtgctcaaaattgagaataatcatatattccattcatggattaattgttttcaaataatgtagtcaattatacttacaatgattttttaagttttaataacataaaagacacttcgtatatgtaagcctgtggtaaatcatggtgtacctcatttactagtcaatagtattggtgttcaaaataatggtggtgattggattaattctcagtccatcccagaatttgctgttttgaatatacagcttgtttttaaggtatccacttcttttgggaaagtagagataagaaaaaagtctgcttctttaaatgtcttgtttggattgggggcacacagccattttttttctagtgagtagatataaaggatttcccaaaaggtggctgtggcttcgcacaggagagctggagagctcttggtacatatactgctgagtgttgaaggcaggtgagtctgttctatgtttctgtgcagtgggctcttgctggggtcaaagctgtgtggtgtctgtaaaaaagggttgctgtgtaatgctttagaattggaattgcagattcttctt

SEQ ID NO: 123164 - DNA, 1033 bp, Homo sapiens
aagaggagtagtgagggggtaggtggacgccaagaaaagcaccattataggagagatgaattatagagtttccaaattatcaatttcattcactgaaattggtgttcaattgagggtattctatatgccaggttctatgctagtccctgtagatacaatatgaacaagacatagtcttggtcctcaaagaattcattggaagtcagagatcatggcccatgtggcactattgagtgacttttgctgggattgcagtttaaaccagggaaacagaacgcagcctgtgggtgagccatgtttggagacgggcatgggagggtcagaaggaggctggaaggctgcctggagaagagactgtggaagcctggggagggtgttaatgaagtatctgactgtgtgatctgcagctgctcagacagctgaagtcagatggcctgggatggttgagaatcagggacccaaagtcaacatgagagcaaagagccactccagcagctgtgaagaagtgaaaaccaaggagagaagggggtcttgcattagcaagtggggatctgagtttgagatagaggagaaggagcaggtcaagaggataatggggttgaatttgcagtgctagtggagggctcaagaggttggaggatggagtttattataacgggagctcagagaataatcatctctaatttattattgacgctgtgctcaacattcaacatccatgttcttcctcaaaagctccctgctggatagtgtaagtgccactaccatagaaagattctacttcatcatgcctggtctactacagcctcttagctggtgctcctgactcaaattactctgtttgtggtcagttccttattccactacaaggctcatcttcttaaaacatcacgtttaataggttactgtgaagatctaaaagcttcactgagtacccattgcctacagtataaaggatgtgcccctccataaagtgagaaatcgccatttttgccggctttcgtaatttaccaatgactcttacacacataat

SEQ ID NO: 123165 - DNA, 1061 bp, Homo sapiens
ggatttctgaagagccatggctcagaaatgaacccttagaataatatattttaaataggtttacagagaactttatcattctctgtagaattacctataaaccaataatggatggataacatgctgcagagattaggcttccctccccccgaaaaatgcaggtgaaacaggttaagaggttacacactgactttagggcagagttaacaagttgtagaatagaactggatagaatagagggttgttcccactgctcttcatgccatttctctggctatttcttgattgagagaaaggagtatgggctttgaagtcagacctaaattaaagtcgctgtcctgtcacttgctagttgtaatttgggcaagatactaaacctttgtaaatttcagttccctcatctgcaaaggggagtcagatcacttgcctggcaaaattgtgatcaccagagatagtatctgtacagtacctgcttgataattagctgttacgtgatttttcttatgattatagattatcaaatttttcaagggaaattgaattgcacacttgccgcattaggaatactaatgcaactgataagagcaattgttttactgtggggtttcttcgtgctaggcaccattccaaatatattacacatatgatgacctcatttactctctaaacaacctgatcatgtagatactactgttattcccactgaggctcagggagtgtatccaccttgcccaacgtcacccagcaagtttgtggtggaaaaggtttacaaacctgggtgtttgtgactccaggtcccactttccagttcctgcctggccaatatagggatgtgggatagagaatgaaaggactaattgtttcatgagaatgatttattgagtgggatatttgctttcggaatcttcacctttcccatagacattattggaaggggcttgcacccatccgtcatgtaacttttgctctatgttacgaagcctcgccgagctccactttcctttttggtacgatggaatgattatacttctgagagttgtagcgagcatttaagtgggatg

SEQ ID NO: 123166 - DNA, 1712 bp, Homo sapiens
agagagtgaagtttatgtttttataaaactagcacatacacactgctaaatgaaaaaggcttcaatggaagaaccacttacaggaatcagcagactgaaaatcttatgatttatcccagtatgtagagaattcaccttggcaacttgctgaaaaaatgtagatttggagccccagccctggagataatgatgtggattgcccatagactcaactttgaggaacctactcttaagcatctagttttggaagattgctatacataccatcctacatcatttgaccaggaaggaaaaaaagatgagaaaataagatgaaggcaagaaaagagacaaaaatttaagtcctgaaaaaaacatttctaccagatttttattgtttaaaaaaaaccaaaatttcagtggatgctagatagaatcacaactgtaagacaaaacagaaaacaatgtgaagtgtacaagactgcacagaaaacatatcaagatactgttcaagaagaggtaactggctataaatttaaagttcaagtgttaaagttaaaatgtagctctaagttttattttcccaacaacttttaaaattgtaatgtgatggatgtgctacttgtgatatttttggtcatggagcaggactgttataaacaattaaattggtttacttaatttttctcctgaataccaattcgtgccagtgaattatcaaggcgactttcaatttccaagatgattttctactggtcccagcgttgttgtgaagatgaattaaggtctgaggacagtgtctggcatattatcagtggggacagtgtagtggagtggttctgaacacatgctgtggatgccggagaccctgcgttcaaatgactgctctaccactaactagctctatgcccttgtccaagttaacttgatttagtttcctcatctgtaaaataaaaaaaaattagtgcctacccatagaattgttttccaggaataaagtagtaaatgtaaagcacttggagcactgcaagacacgctggacactcaataaatgtgatcttgaaacataacttctgttgtcaagttcactgttaaaagtaccttaaagtttttaaaaattattatgtaaaatagggacatataattttataaagttacagttgtcttgagctttattcagtttaatttatggatcatctacttttaagtgccataaggtactccaggctataaaatgatgagtaagatatggcccctgtgctcttgaacagtcaaactttgggaagttaacctgttgacatggttttcttgagtaggtattatgctatgttaggaaataatgttgaaattaattaaaactatattttacaacacaagtaaaagatagtacctgaaagacagaaggagaggctaataatatatcgtcccttgatatattatagattgtagcagatcacactagaaagatgctgatatttttcctgagctggacttaatacaatggatggaacacagatatgacatcataaaacccagctattaaaatggcaactctactatttattgattatataactataagcaatagacttaacttgtgcctcagtttcagcatctgagaaacaggcacatagctaccttgctcagttgttaggatgattaagtgagcgaatgtttgtgaagatgctttatgaactataagcttttacgcatttgtgtggctttatcatgat

SEQ ID NO: 123167 - DNA, 1081 bp, Homo sapiens
attttatttgatttccaaacaatagggtagtagctaagttttgaaacaagatctgagaggaacttgcagaagcatatctatgtttgcaaaagcgttctagatatgattttgattcttgaaacctatttgaaaaatagtaatcagaatataaataatctttaggtttatcatatcagagaaaatacttactggttatgcgacgttttatgtgtttcacagcatatttattagctatgaattgatttgtactttgcatttctcataaactcccctagatgtgataaggtcacaaattttctctgttaaaaagggcaggagtggggaaaactcacacatcatgtatgcactcaagttttgacatattgatttacaaagaaaagaatcagtttgctagcagcttctatgaggtaattttataaggagtaaaaaaatataaatagagttcacgcagaatacgaagatgagcaacggaaaatctgaaataaaagtggagttaatattatgcagtgattcttacctctgctgttagaagtataaaagcactgtgatccttccatctaaactacagaggtttcagctccatggcaacacgaagaacctattctgtcagagggtgtgtatacacaactgcattcaaagcacggggctgggagtgagtttggggggaaaaacctcaaccctccaagacttgcccacgcatttttatgtgtgtattataataaggtctttgtgcaaggaggcctgatagaagttcacatcagctgcactctggtcttttacatgatccagccgccatcacccacctcccttctctctccagaaaggaagccagaagaggcaattaaagaatgagactgcaagaaaaatgctcttctccctctctcttcttggaatgtcaacatagttattgcttttctgtgtgtctcaggggggcacttggctgcttctttccacagtcttattccagggagagctgtttaattgcagccttcatgtagagtaggcgctggcaagagccgtagtcagctttcttctctgtgcaaggagtactttcggtaggtcatctgatgtcctgccttgt

SEQ ID NO: 123168 - DNA, 1030 bp, Homo sapiens
agagtgtggggctaactctggagaaaccctaacttttacaggcctgattcaagggagtgatgccaccaagattaagaaaggctggctagaggtccataataaaagagagtccagtgtcatagcatctatgtgaggagaggtgcaatagagattttgccagggctgctgtgataaagtcccacatgctgggtggctgaaaacaaaagacatctattgtctcacagttctggaggctgcaagtgtgaagccaaggtgtcagcagggttagctcttctgagggctgtgaggggaaatctgttctgtgcctctctcccagcctctggccatggtttgcaatcctagttgttcctgggctcctcattactgtagtctctgcctcagtcttcatgtagtgttcgccatttctgtcatgttggataaggggcccaccctactacagtgtgatgtcatcctaactaattacatctgcaaggaccttatttccaaacaaggctgcattctgaggtatggaagttagaacttcaatgtttctttttggggggccacaattccacacataacaagaggattcaagcagatttccctcttgcgtaaggctctccaggggaagcagtgacaatcatgacccagttcccattcttacacaatattttaatattattgtgtccagtgaggttcaaattaagtgtttaatggtagctgaggtaaatgtaaggagtaggaatagaaagaagattaaatgggggagaaatagtggggaaaaacagttcttagaggagatgaaatttgaattgggccttaaaagaaggggctcaggatttaaatttgtggaaagttgaggtagaaagggcattaccggagaagaaaacctgcatgaagtcttcatctggaaaaatattcaaagccttcaaaaagtaggaatctgctctttgtcacttagcataaaagaaccatgttcttgctggtttccctttgtatggaaagaatattagatatttatgtttgatgaagagacttttggcatgagtaa

SEQ ID NO: 123169 - DNA, 1897 bp, Homo sapiens
atttttattttcaaagcaaaccaggtatacggagaagtcttatatgaacagctcaatgagtttttaggaaacacatctgtgtaaccaccacccacatcaacatatcaaacatcaccaataccccagaagctactctatcccttccgtgtcattagccccttaaaggtaaccaccattctgacctctgtcactgtagattatagctgctcattcttcaattctacagatttccatagaaattcctatggtattctgtaggaatcatgcagcttacgttgctgtttttttttcccctagattcttttcttcagtgtgcgtctgtgaggttcattcttgtggttgtgtgttctttttcattactatacaggactgcatttgttctttttcattactatacaagattccattttgtatgttttaaaatttatactccattctattgctgatgcatttctgtgttgtttccaactttcagctatcaagaataatgcttctatgaacgtgcttatacatgtaacattggtacacagggatatgcatttctggcgaggaagagacttactgggttatagagtccacatatgttcagcttcgtggagactgccagttttccaaagtggttttaacaatttacattccctgcagcagtgtttaaaagttccagttatcctgtgtcctcaccaatgctttgtagtgtcaacgtttttttctgatttattattttttttaattttagctattctattggctatgcagtaatcttttgttgtgattttaatttggatttctctgatcactagtattgttaatcatttttatttccttacctgccatttgaaattggtctttttaatgacgtgtgtgttaaagtcctttgccgtttaaaaatactgggtagtctttcttttactctggcttgtagaaggcaagttttaaaaaaaatttgttcattttcagttatatacatgacaaatatattttctttctttatggcttatcttccctctttatgacatcttttgatcaactgaagttcttactttcaatgaagtttaacttattaatccattctattattgcattgttgttttttgtccttttcagaaatatttacccaatccaaggtcatgaagatattctcctctgctatcttctagaagctctgtcattttgcctttcgcatttctggtctgtctgggagtaatttttttgtataatgtgaggtaggaggcaaggatcattttttctcacatgggtatccattctttttcccagtggcagctttgccctatagcagttgaccgtttatgtgtgggtctgtgtctggactctgtgctgccccactggtctatttacctatccttgcactgataccataccattccgatgactataactgtaaattaaatcttgatatctggtaatataagttctccaactttgttcttcaatataattttttttattcttgagcttttgcatttccatgtaattttagaatcagcttgccaaatttcacacacaaagatttagattattaattgggataataatgaatcaatttaagtagaattgacatttttcaatattgtaccttccaggaacctagtagatgcctccatttcttaagtcttctttcaccttgtcagtaaagttttgggttttctttgtggaggactgcacatcgttcactggctttattcctagttatgtgtcctcttttcagtagagagctgcttccagtttgtataaaagcaaaatcttcctttacggtcacacccttaaacaaaacattatagaggaactattttgaagctgaagagaggaagtgcccttgaaccttgaggaggaggtgcggagttttttttggttgttggtttgaggtaggtgagatgca

SEQ ID NO: 123170 - DNA, 1951 bp, Homo sapiens
gctatgatctgctatttagaccttccatagaatttgcctaaaaagccatgaaatcttggaaggttataatgggagattaaaattagagaatactgtaatatttactgaatataaatagaaacttcttcccatggaatggagtcattattcaaacgatgtagtagatgaatccacagattattaaggttggtgtgtcagtggtgttaaataatataattagccaattctgggatgaatttaatttctgtgccattagaaggcttgtcctcagagcccaaggatggattcccatctacacagccaccaccagccctccgctccacctgcgcctcacatcgtctggattttgtttgaagtaactattgcagctggacagtttccctcagatgggcagcaaggctgtgactttctttcagagatctgctgcaggcatttggaagtgtcttttgcaatggaattgtttgcctcgtagggttcttcccaagttagggtgttcgcctgtggctttgaggccttttccttcttctcagtctaattctttctggtgctttagccatgatgttgccctcactagtttcaaatccagtgctttggatggtttccacatcattttacaacatttgaggatatattttctgcagtgaaattttgtttcatcttccctttcagtttttggaattgagcactactttgttattaactaagaagcatgcattttggttacagcagtttttagaatatgtcccagggtgttcctggtgaaaagggcagcccatcacaagaaattataggggaaggaagagctggaaatcatgagtcttgagtacaaaataacagtttcccttctgcccccaattttggtatatttgaagaaaagtggtgtgtctaacaaacaaacatcactgtactgaagggttttgatcaattctttcttaagccaattcatcaaaagtggcacatctcagagaattggatttttttttagttcaattagagccacactcttgaaggattaacatggcacctctggtctatttccaaacatatcagctgggtcttgtcagttcaatttagccatccacggggcctggcatggttactatggccttctccaactttttccttttcttgaatgtgaaaagcatgtcgtaactccatggctttgcaatctcctgccccaaatgcccttctcagtctttcctgacaaattcctgctagcttagttcctatcttctttaagaagccattcctaactccccaagcaaagttagctattccgttacttgtgcttgcacagcactttcatatctctattatgcatgtctgtatccccacaaaaatgttaagctcctagtgcaaaacagcctttgaattccaagcacttcgcccagttgtctggcatacagtaggatcaatacatatttattaaattgatgaatgaattcgctatagccaatttccataattctttgccagttacatagctactattattttttttgtgccaggcactctacagtgattgtatcattaaattttcacagtggcgctacaaataaggaatgatcgcaattacaaatgaagaaactgaatctcagaaaccttatataatttgcccaaatgacgtagctcaggatggtagaagtgggatttgaacccaggcctatctggcctcaaatgtgtggccacattttatctgaacaagcaaaacattaattgattcttgataaaaacagttacattgtatagcttttataacagtaagttaacaaaatgtaagaggaacatcttcagggtattttgaagcttagtttcaaactgtttagcgtatttcagctgtctaagataaaccagtcaataattaggtacgtatttttaagaaaaagacattatgaaattcctgatctccaagagctgagttgtaaatggagataggctttgtaaatcatca

SEQ ID NO: 123171 - DNA, 2047 bp, Homo sapiens
gcagcattcaactgcccagcacaaaattagtgagaaaacaggcataagaaagcttacaggatctgaaatccacagggctttcgtttttgatttacactaaagttttagaagttagacatgattatcatgaaaggagaatgtcatatcccttcctttctattgtctactttttttttctcagcaaccaatcctagaatttatttgaagaggagaagaaatgagtaaatcgatgaattagaaaagtaacgcaatctttttgtataaatactaagttatctccaggatctatgaaaatatcaaaagagagaattattgttttaatttattgtaattaaaaatataagcatatacaatatagcacatttaaatggagctggctcaatatctaaaatcaaaaatcgttctctccttatagcctatttaactttatattctcagcaacttgcagcacatgacaaacattaggcattcaataaatgttggtgattgaaagaatgtttatgcatgtgcttttgaaacttggaagaatgtcacatttacatttctatccttccaccgtctttctgtcctcagtccactgatgatcagatgaaagaaaagcacaggtggtgttagcaaatgaatcagaatttccaaactgtaatgcaggtggccatggacagttgtaggagagagttctccatggcctgcaacatgtggacctggactttgatataattcaatctaacaaacatgtattgtaaatctatgatctgcaaatcaccctgatagatattgtgaggctgcaggatgagaaaaacacaaaacagatgcagttttaaaggttggaaatggcatatttgagatagaagaaggcaagtaggaaaacagctccgcaagccaacagcatagtccccaaagggccattttcagtttgacaaggagaagcactgtcgttattctggcctgtttcctcattgcaaaaatagaaccatgaacctttctcttctgctgataataattttaaagcattgtcagtgaagtaaatatatactgaaagcaataaataaataaatatttaaactccagaaagattgctgagcttcagtgatgctataacaggaaataacaacaatcagatagtgcctcggcttactgaagaactaattcatgtttataaagtgctttcagaatgcaaagcactgaagaaggttaggatattattattattaccaaagatctttaagcagacaagatcttggtattcttataatcacagcaggagttgttcatttcccatgtaatttatgaggagaaaaaaataataaaccccacccctcttcacacttgatttgtcagttgttcttgttatatgaaactgatcctcaagggaaccttaatttaggcaacgatttattctcttcaatattattttgacatttggtaattactacagattttgtgcatctgtctttcccagaagagaaggcattaaatgccacttggatgatcattggttttgcaggaactcagatttgatgttattcttttggtagatagcatgacttatggtaagtttccagctctgggatacacagattgtgcctttcattactcatggagtctgtgccacactgatattagatatttcataaaaataagctattggttgaaagaagaatatcttaaatatttcatatgaaaaaaaactggccttttccaattttccacacgtattctaaagtaactaagatatctggaaattttcaaaaatgaaagtaagaaactggaacagagatcagaaattccttaggaacctctctctaggactctcaaatggacctcccaaagaaaacaaataagacccccaaaaaccaggaacaaggagagttacatcaacaatgagtcagatgctttcagaactgcttcatgctattcctgtacataagcttttttcttatcaaattttatggatgatgatagcttcttccattgtaaattttcatctgtgatcattagttctaacaagtccagtcctcccatgttagattttgcagatttaaatttt

SEQ ID NO: 123172 - DNA, 1397 bp, Homo sapiens
acactttctggaaaggaaatacaattattttctctaagtgaacctaagccggtacctatgatcatttaattttctacatccttcagtgagccattctagtctttcagtgattcatcatagaaccttatagaacccttgtcaagctgattgatttataattttcaggatccatattcttctttcaaacaaacagcacagctatatctgatggcctccaagtgcccagcctaataacttgcccaagcgctcacagcccatgagagccaggctgggagtggaccattcaggggctgccctatctgtacctgtgtgccgtggtacctgccctctctgtacctgtctccatggagccttgtaaacatctagttagagatgctgctaaatttaaattgtcattatatttcaccaaacatatttcattaagtcactgataaacattcctggcatttttgattattttccttttcattcaagcaaggatgtttttctcctattgtttttaccatctctatatctgtatccaggaactgagcttacagctaatgatctaattcagatatgtgtaaacctgggtataataattagcccagattggtggaaacgtttcccctttacgcaacccatttcatccttatcaagtacattaattcattggctctggtaatatagctaattaccctgtatattcaggtgctgctgctgatattgctgctatctccatgtgctgggataaacagactgttgttagtaaacattccttctgatacctaccttccgccatcactacgcacgtactaatatgtcttttttgctctgttctttttcccacaacagtttaacctaaaaagggccacttcatttccttaggctgcacttctaatgaatgcagacatttgaaagggtcctgaaccggataacctttcgagttttctccagttttattattctgtgaagacagtttggtgtaaatgatttaagaggttagtcagaatggagttctctgttcaaatgatcttcttaaatttctgtactgagctctactcataggaaacgtggagcttgttgtgggattcacaaggttgcccttgcaagtacagaataccgtgcctgccacacagtaggtccaataaataaaacaaaattaaacaaagttaatttaaacaaaattaaagcctccctagagctaatgattttaacttattaccatataataactagcaagttagtgtcaatctcaatctaaattttcaaggaaaactgccccggtagaaatattgtatttttattagcactgaatttgtactcctaacaaaaaattaatgaaattccttaaaagctgatataaaatgtaaattacttatccttggacaaagaattcagatcttccttatttattg

SEQ ID NO: 123173 - DNA, 1070 bp, Homo sapiens
gttgctatacagttttccattttactgagcgatgtatttatgttgctgcataatgtcgcctgattgcacttctcatgctggtgaagttggctgacatttcaggctctggataacatgaagctgtgctttaaccttatttggaagtcagggttagagtggcactggaaggtctccttcagcttcccttcctgtgacctgcctactataaccctggcaaggctgagacagtccaagtttggggcagtcaaggtgggacagcagaagatttcagggtacaagtcatctattctcttatgccagctctcagatttgtatataaaatctgattctacacttcttttaacaaataataaataaataaataggaccatccaacccctctagagctctctaaggagactgtagaagacttgtggccactctcattttaaagattctaataatctccacaaagtaatcctgggaaacatacatctgtaagaccagggaaacatactggcaatagcaacttcccagaacattcctttttacactgcctgggatttttcaataagaaatttggcatttctgtaaatttaaagtgtattcagtaaaattaatgcgtttttttcttaaaagctcaagccttccagactcatcattttgtagttaaaaaagtaagccatgcaactgagataaaagtcaaagttatagattataactgtttgcacaactgttcacatttttaactttttttattttttggagactttttaagagtctcactgtgtcatccaggctggaatacacagtggcactatcatggctcaccacacccttaaactgcagggctcaagcaatcctcctgcctcagccccccaagtagctgggaccacagatgtggaccaccacccctggctacttttttaaaaatttttttgtagagacaatgggctcactatgtttcccaagctagagacaatggcctcattatgtttcccaggctggtctcgaactcctggcctcaagcgatcctcctgcctcagccttcctgaagtcctaggattacatgcatgagctaccacacccag

SEQ ID NO: 123174 - DNA, 1206 bp, Homo sapiens
aaactatgaagcattttcttacaaaaaacttcattcagtgtcctggcacagatcctccagttgaacaggggccttctttccaaagccccaggtaaggactttctcaacctgtattctaacatgatgggatgttgtcttctttgctttcctatcttatcattgcaaactctcaaacattttctacattatcatcatttatatttatactagcacacatgtttgaaagcgatatgatccccattgaaaactcttttcctttaaaagtcaatcccatttctagaggtcttgacaatgctttcttctttccatgccattgaagttgcattaatgttggtcaaccctggatggctcgggtctcatactcagaggttctgatggattcagtctgggataagactgagacactatctatttttttttaatgctcccttacatagctcccttacacgtttgaagatctttgaatttgttggtctcacaagcatccctggggttcaaaaaatgtgggtattggaagaacacaaagtgagggaagctgtcctggtgatatctagatgtgagctgaatggagcttatggcaaagagacaaacctgagttaatctgcataatcacgcacacttaactctaatgggttagttatagggtggtatctctgcctcagtttctattgcaataaaatactggcatcatctcaagattctcagaaaatttaattaatattaatatttaatataagattaaaagcatactacaagtttcaattagcattaatcctttaaaatatggagttaaatgatctgtaactaattaaagactgcagttaacaggggacatgagttttttctgggttatatgaaacaaaatataaatcttttatataactcaatttcctacagaaaaaaaacttacttgtcagtgggattttaaagttttattttattttcttggatctcattacttttccatgaatcctataagcagaattacaatgaggtgagtcatagacttaacacttttttggagtttcttctgccaaagcagcttgaaatatagaggattttcaaaaactgtgtttggggaacatgggaaggtatgggaaagaaaggaagggtgggagtctaggaggaaaggaggaagaagggaaagaaagggaaagggagaggaaggaaggacacaaaacattttactttagattacatttaaaa

SEQ ID NO: 123175 - DNA, 1039 bp, Homo sapiens
aagaagttggtgttgtataccccaggactttcctatcaatgtcctgtgataatgttgctgttttggaagagtcctggagacttgaatggctacagcaatagtggatattttgaaaattatcagaccctgtgacctatgtgcaaagagagccaaaggaaaggaaattaatcttttctggatacttctgtgtaccaagtactatgttcagtcctctatttactctctataattgatcttctatgaacagctatcattccattttacagatttttaaggtgtcatatactttaaataacttcttcatagctaggaggtggcgagggaaaatgcaaacaaaagtttgcctagaaccaaacccagccagcctttctactttgctgttttccatggcgtatgctcagttaatgtctgctgatcaccatctccaggacagaatctgacagctagtaataattggaaacatatgcagacaacgtttgattatctgtggtgttgggaatagatgctctcattagttgttagaaaaattataaaactgacattgttgagttttacattctatcttaagatatcagaacagctgttttaacagataccaaaataacagtcgtttaaaatcgatggtctggaggttggcaggccagttcttcctcatgaggtcatctagggcctgaggctctttcatctggtggcttgtggatcttctgaggttgttcctcatctgcatagtggcagatggcctaccacaccacgtctgcatttaagccattaggaaagaggggatgagagggaagggcacatttctttccagttgagggcatgacccaaaaattgcacacatcacttttgctcccaaaagttgcagggttgcacggacatctaactgcaagtgagtctaagaaacgtcgtctgtaagtgccagtatgtctattcttgtggaaaaaggagaaaagagagattgtgggacaaatagcagcctttgccataccttctttcctgtcccaatctttgataaacctacaaataagaaagatccaaa

SEQ ID NO: 123176 - DNA, 1045 bp, Homo sapiens
catccatgtcttttacctcggggttgtttcctcattctgataattttgttgtcactgattttaccagacatgtcttccacagacttctgtctgaagacactgtctgcaagatttttggctgacttgttcaatgctctttgtgtaccaaacacatgtagcacaccaaactctggtgtagtccagggcagtggggcaggtaaattggcttccctggaaaatatgtccatctatgtgccttattcccagttcgtgcttttaagggatggagcacaccagccatgaactaaggctggagtagcaaaacatgaaatctgctttctacaaattatccagataatctcttccaatccccttctggaggaaaaacagagctgtatgagggtgacagtctggcaggtattcaaagctgcagtgaccatggcttggctcctgttgtatccacagagctgtttgattgggttaatttatacagtttttcctgtatgaatccttttgataagtatctttagaagcttctaattcattttaaaggaatgtttctctttggcttcatgtctcattcttttcacattatatattctggtgataaatgatggatccataaatacattacctttgctcagtcagtgttttctgttgttgatgtaaagtacacaaattggatttgtttcaggatagctgaatttggaatatgacattttgccaagtcagcatcacacttgcccatacaacacagatgtggattttgcagttgttttgtttttaaaattgtatatgtctgtggtgctattgattaatgtaatattgcattaatgtgctattacaacactctagggcattcatgaggtctttcagccagcagcaaagaattccccaaacaaaagcttttaataaaatacagattgcagggcaaagaaaagtatcaaccgtgagaatttatggatagcagaagtgcttgaggaatcaacttttgatggccttgccaatggaaataccgtgtaattgttatattatttcatttccctccaaatcattaaagatcatc

SEQ ID NO: 123177 - DNA, 1155 bp, Homo sapiens
aatagtatatcttatttaattcaacaaatactaaatgttaccatctaacagatagccagtattttaaaattataaagatattttacatgctttattttgtgctcaaataaatcttcaaaatctggcatttacacttacagcacatgtcagtttaggctaatcatatttcaagggcttaatagctacatgcatgttgtagctactgtgtttgatagcatacgtatagatgatggaggaaaagcccagaatactaaataaaccatgagttctttgatatgcctctggcacagattctaggtggagactggtggaagatgaaagggaaatgtagtcagatatcagagcatgaaggcctcagataccaagtcaggggatctctccatttaatcataaaggcattgtggagcctttgccacctttgaaagattttatatagatcagatttgaggttttgaaagattcctctggcaaatgtgtgaaggatcaattgtgggggccacagtgcaaagaaagttggaggtatttctcaatctgttctgtttctctgtgtttaatggaattttcatataaaccccagcaattagtagacaggcagcccttctgaattagcagtgtttcctgagtttttaattctactccagaacttcatgagaattaagggtatggtggaagcagagctaagaatatcaggtgttaagacagaaagtctggcatgtggacaccctgaggctcaggcggagcagcccatgaagtgcggttcttagtcaaatagactctgtcctccaccaaaccatggtgcacaggcagtacaccatcaccaaatgcatgtgtgcaggccagctgtccctgattgtaaggtatacatcaaagggaactatccaccatcccccaaacaccttctttgccaagatgcttcttacccctaaactctagataataatccttcctttgaggtaaaaattgatttttctagcccatcttttctaaagaggcaaatgtcttgagtaggttacatgtttttatcaccataacctgctaataactgagttatttgcttccctttccctttatggcagaatacaagcttcccaaattcatttttctccccaaaattgcctacttcacagggtcctttcttcttccttttattttgcc

SEQ ID NO: 123178 - DNA, 1041 bp, Homo sapiens
tctatccatcagcagagggtattagaaaagtggtctgaaaaaaaaaaatcaacaacaacaaataaaaccataaaacacagcctttacagttaatcctgtgctgggctcaaggtaaatgttagtcacttttaacaaaggctcaagacagccctggaagtccttgacaaggaaagaaacaagccctgggagtccttgagaaacgctgtttcagcgaacaactattccaaacccctatgtgaaaaccctgaccctggtgagcaagactgaaccattttagacttgcgtggagcccttttgccccttggcctgtatccctgactcaaaccagactttcctgacaacttttccctcaggtccaaactcagacttggctgtcatcatcttgccacttctgggatgaagcattaagagacagaaagaaagtagctagggaaagagttcatttccatgccgctctactgttaaacttcctatcaaaagcttcactttgtacttcattttatttaacaaatacttccactgtgctcactgtgtgtcaggcactgttctaaggaatttgcaaacatcaactcattataatactcaggaaaaccctgtgggtgggttctgtttttctccctattttataggtgagggaactgaagcacagagcatttaagcaatgcaagtcgagcatccctaatctgaaaacctaaaatctgaaatgctcgctcccaaacccaaaactttttgagaactgataagacaccccaagtggaaaacttcacatggagatacctaacacaaactttgttttatgcacaaaattgtttaaaatatcatgtaaagttaccttcaggctgtgtgtataaggcatatgtaaaaaataaatgaatttcatgtttagatttgggtcccatcgccaagatattaggtgtatgtaaatattccaaaattcaaactgcttatggtcccaagcattttggataagggatactcaacctgtgtatccctaagtcacacagctgtgttttgatctctgtcgacacgtctccccctcca

SEQ ID NO: 123179 - DNA, 1033 bp, Homo sapiens
gttggctgttcatttgccatcagtaaattttattttgtcaggtttagacatttttcttgcacagtgattttcaaatgtttctttagttattgaaccctaaatccaaacaaaatcttccatggacatcgagcagataaaaatggaaccgttacagctgaaatagggtgggaaaggatcttactgaaataaacatatactatcaatatggcatttgcctaatccagtgtatactttatatatatgattccccacttcattggcagtttgtagcaaattcttattttctttgtttggcactctctagattttgacacattagaagaaaaaataaagttatattattttaaaaacagtccaaattagctggaagatacttattttctctgactcttgtaaaaatgtcagtagggtaaaaatgtcaataggggatgcaaaaattaagacaacatacatgtccttttcttcattttatgacaatggtgaggaggaggctagaaatcttaaatgatataattggctttggaagcatttttaagctttagtctcatttgtccataaagcatgcagctagagtcacagaatctacacatttaagatatcttatggctttccagtgaatggctatttctgaaggaatcacgtcaaagctcccatgtcatttttgctgaagtcactgtgtcaattgcaaaggcagctggcgctcccactgcctccgtccatgcccgatggctttcatggagcactccaagatcctgtggtctcatccattcctggagtcaagaacacctgaatcactaaaataaaatgaggtttgaaatgtggtgtttactatttagagtgatcttaaatatttacaagtagcataactttgtaaaaaaaacaaaaacaaaacaaaaacaaaaaaaaattgttattcagggaccttctcgaacaaatgaggaaatctttaaaaatcaaattaaacttctgaaattagtacaaataaacgcttgtgaatctttaggattttcagtggaaatacacagtgaatttt

SEQ ID NO: 123180 - DNA, 1051 bp, Homo sapiens
ctagcaagggaagatcttaaaaagacttatgttatctagtagagtttcccaaagggccaatccagggatagaaaatcattagggggaccacagatgaatcatgcattttacacttttctgccaaaatggtggtcagtttttcaaaagttctcaaatgcgttgttattgcaatgctttctaattttctcccctttacattcctcctcaaataaatctgcatagccatcctgaaatattattcataaaattaacaccacagatgagcagattgacagaagagagccacaagtagtatttgttagggcactgatgtcccagaggactgacttgaaagcttgaaatgactcttttggtcatgattatgtataaggaagatccgattagtacatcacctttactccccccagttgtctttggcctttccccagtattgcttatggtgaccaagcatttttaaatggttccctagcaaagcaaaagtcatcactattcagcaataccacttttatttgatagcttcccctctttgttttctatatcctagtcctttatttgtttttttttttctttctttcttataacttacttaagcttctacttccttctcactctcttatttctgatgtcaggaacatgccgatttgccctttctcctgctcatctgctcagcttattataagccctgccctggttcttcatatttctgtgttttcttggaaacactttattcaaatattttcctgtacatacaccacattttctttaatgtatgctttaaaaaaattttatgaatgtaactttaataacaaggtaatacccacaaattaaagaacattctaaaaaatataaaaatgtagaaacaagaaagatcactcatggttcttcagacaaaggaatcggtgttaacattatgatgtgctccttttagatttttccatgtaatatttatgaaactaaatatgataatataaatatgttttgatgttctttgatgtctaaatgtgatgtataagtattttagatgtttttaatggttgtataatattccacc

SEQ ID NO: 123181 - DNA, 1035 bp, Homo sapiens
gcaggcatcttcaaggccccaaattctctttttgtcccccactgtgaaaaactgattggcatctggtgatgggcagggcacgggtgcctggcgcttgcaggaagccccacaggaggtgcacagagccatggtggatgaagtgtggccaagccagcacaaggtgggggaccagatgtcgcccgattatgttccattgaaatccaaacaaagccccagattcaggatcatttccttgagactccccagttggaaattggcactgagccagaatctcacaacagctggtctccccatgctaggatttatgtgccttaccaaaaactttacctgcgtgttattgattggtttctgtaaagcaatgaaacaatattttgaagacccaaagcatactgctctctgctgaaaataaaaagaccatatatcactgaacacaccagcaagtcttattataggcttgagaactctgagaaggatgcgttttcctttttatttatgccacccatgttaaccttgaggctgtgtactgacatttgcagcttcgcaatgacaacactccactcttgttaggagaccaagtccaccctttggaaataaattatattataaaataagctttcaagggataccagcagatgagaaatcatgcttatgtttctcatcatctagtttgtgttgagaaatcggagagtcttcccaaaatctcattacttgttatcatccaggtcatttgcatttatgtccttctcctttcctcctgcaaaggaagatgaactacaagcctggcagtttcattgttgtggataacgaggaggaaaaacctacaaacaaaagccactccattctgccccaccctcaaagatactgaagttggttgtgctgagccacaggggaagattgtaatttaaaaacaaaaactagcatttctttgttaaataatcgtcatgaaagcatttatattcatattatacttggctaaatatgtattcctgatgtgaatccaggaactctgttttatgcattgccttgatccctggc

SEQ ID NO: 123182 - DNA, 1432 bp, Homo sapiens
cagtagagacggggtttcgccaagttgaccaggctggtctcgaactcctgacctcaggtgatccgcccgcctcagcctcccaaagtgctgggattacaggcatgagccattgtgtccagcttcatgccagtatatctttagtgcccctctatacttactaatgtccttatttaacacagataggggaggcctcaaaataatctaataagattaattcatttttattgtattttgtttttgtgattatcttctatttatgacaaatgatattccatttatgagagtttacatacagttttcctttaagtacatttatttaagaaaaatgtgagtgaattgggtgagaactttaaaaaaaaaatcaagtagcatgaacggggccacagtatggcttttgtagattttaagcactttgtgttagtgagtcccttcttacattagtgtgtacgtgtgtatacgtatatgatgttttatgacagcattggtatacagatgaatataatcttcaactctgaaagttcatttttttcttctgattctaaaagaaactaagacattttcatgggccctggcactgtggctactgtccctaaagcataggtgggtcagccctggcatgtgttatagcaaaactcattagctcttcaggagaagcactaatttaatccaactgcctcattttacaaagaataatactaagcttcacacatgtgtgagaacctgcgggtctgagagtgaggaaggacaaaatcagaactagatctcagatgccagcctcctaatctttccacttcattacactgctgtcttcctttgagcctcttctgcaaaagccctttttcttgtcccatctgcttccgagtcttcacatcagaattaatcatgggtccttccgtgaatccagccccacctcaggtgtgaggactgctctgtgtggaggtgacacccccttgtggatctcttctgcaaatagacctttgtcacgggaggctggtcagttcacagcctccatggcagtggagtcagttcactccgctccatcacgggggacccaccaagaccccattaagaaaagcacaaatgatgcaataaatcaggatagatttaggcttcgttttttggacacaatcttccaaatgatagctcctcattaaaactagctaaaatggatgatagagcttgggataggttcaccacttatatcctagaccagtactttctaggatggactttatatggaagaccaaaggtttactccttgggctgtcaaccttcattttacttagctcttcaaacaagtcaagccttgtttttagctcagctcctggggaattgttctgttgacaatgtactgcagaaaacagtccaaacaattcttaagagctaagagccacctttggtgactagactttgtaaccatctcatttatcca

SEQ ID NO: 123183 - DNA, 1052 bp, Homo sapiens
ccctcgggcattggcagtgggggagaaaaggcttcaaaggaacttggtggcatcagcacccccctcccccaatgaggacaccttttatatataaatatgtataaacatagaatacagttgtttccaaaagaactcaccctcactgtgtgttaaagaattcttcccaaagtcattactgataataacattttttccttttctagttttaaaaccagaattggaccttggatttttattttggcaattgtaactccatctaatcaagaaagaataaaagtttattgcacttctttttgagaaatatgttaaagtcaaaggggcatatatagagtaaggcttttgtgtatttaatcctaaaggtggctgtaatcatgaacctaggccaccatggggacctgagagggaaggggacagatgtttctcattgcataatgtcacagttgcctcaaatgagcaccatttgtaataatgatgtcaatttcatgaaaagcctgagtgtattgcatctcttgatttaatcatgtgaaacttttcctagatgcaaatgctgactaataaagacaaagccaccctgaacctgacgtctgcattgtgcatctcaaaatcctaacagcattagtatctccttttcatttttattacctgttgaaaatgggtttactgaacctggttctttcctataatttttggattttaaaaaatgtgaatctttttgataactccaaaacaaattttttttttctttttttccagatggagtctcactctgtcgcccaggctggagtacagtggcgtgatctcagctcacggcaagctccgcttcccgggttcatgccattctcctgccttctcagcctcccgagtagctgggactacaggcgcctgccacacgcccggcttattttttgtatttttagtagagacggggtttcaccttgttagccaggatggtctcgatctcctgaccttgtgatccacacgcctcggcctcccaaagtgctgggattacagacatgaaccaccgcgcccagccacaaaattgtttttaaaaa

SEQ ID NO: 123184 - DNA, 1041 bp, Homo sapiens
ggatgtggcaatcaagcaaaatgattaaatttgtacaaaaatattgtgtgtgctgtaaatagtctctagcgtcactgacacaggccaagcatcaccaaacttggtagagcatagagctggtaacgttcattgaataaaaactccaacagcgagagtgtcttcaggcatacctaacggtgttggtgaagagtgttcggagtcagctgcgaagggtggactctccttcaggagggagtctgttaatgaagagaggtaggcactcatctagaaactcttccctgtcatcttatactgaggcataaatgaactccaccagaggccctgagatcaaagatgtctgattctatcatcgtttcttcgtatactggccacacactagttattcacaagcccataaagagatgaaaataattagcaagaaagaaaaagcataagcagtttgtattacctgaaatggtctcccagtgtttggtaggtcagcagaggcaatatttagaacagagccacaaccaccaaatcgttcattctgacagccatatacaaccagcgggatttataagacagaattaaggtcctgcatagaatgtacatttcaagtatgtatcgtgacaaaatcagagtaggtttataccagccatcctggagaggaacgctcatgctactcttcaaaccagtgaagcttaggattcgtcttataaaccatacaatccagctacacagaagaaaaggggttaaagtattgagaaattgacatttaacaactgcaaacagaatgaaaactgagtatgtgtttgcttaaagttcacagttcagggctctctctgctctttcctaaatcactttttcagaatcattagggagtcagaaccagaaaggatgcagaaatttaatccagggattttcaccttttagaaataaaagattcttccctgttcttgccccaaataaaatataacctgtgccctaatacaaaatagactaaagcttagccactctgtaaggcaggatgaggagagaattctaagttgcctataacaaccc

SEQ ID NO: 123185 - DNA, 1065 bp, Homo sapiens
tactatgtacggatggataattttaacactttaaaaataatacagaggtttttgggtatgataaaatgtacagtctctataaaagggttgttataggcaacttagaattctctcctcatcctgccttacagagtggctaagctttagtctattttgtattagggcacaggttatattttatttggggcaagaacagggaagaatcttttatttctaaaaggtgaaaatccctggattaaatttctgcatcctttctggttctgactccctaatgattctgaaaaagtgatttaggaaagagcagagagagccctgaactgtgaactttaagcaaacacatactcagttttcattctgtttgcagttgttaaatgtcaatttctcaatactttaaccccttttcttctgtgtagctggattgtatggtttataagacgaatcctaagcttcactggtttgaagagtagcatgagcgttcctctccaggatggctggtataaacctactctgattttgtcacgatacatacttgaaatgtacattctatgcaggaccttaattctgtcttataaatcccgctggttgtatatggctgtcagaatgaacgatttggtggttgtggctctgttctaaatattgcctctgctgacctaccaaacactgggagaccatttcaggtaatacaaactgcttatgctttttctttcttgctaattattttcatctctttatgggcttgtgaataactagtgtgtggccagtatacgaagaaacgatgatagaatcagacatctttgatctcagggcctctggtggagttcatttatgcctcagtataagatgacagggaagagtttctagatgagtgcctacctctcttcattaacagactccctcctgaaggagagtccacccttcgcagctgactccgaacactcttcaccaacaccgttaggtatgcctgaagacactctcgctgttggagtttttattcaatgaacgttaccagctctatgctctaccaagtttggtgatgcttggcctgtgtcagtgacgctagagact

SEQ ID NO: 123186 - DNA, 2651 bp, Homo sapiens
ttagaaaatgtgtctgaaatagaatcagaatactgtagtaggattttgtgatctgttggattgggaacaataggttattttcaaactttttttgaaattattaaccttgtgaaatagttgcattgtagggattttcatccagaaagagaagactaagagatggttttaaaacaactgaattgtggaaagactagaagtcttattttctagtaatgttattaatggaaaactcaaagcatttgacatttattttttaaggtatttagtaaatattttcattgttaatacataaagtcatagctacaaaagaaacattaaagctcatataatcccagtctttcatattgaggatgaagaaatttagacacagagggaggaagggactttctcaaaagtcacataactacttgataccagagccgtcaatatctcctgttttccaggctaggctgccagtcgagtatatagatagtcatgagctccatgttttagctaatgaattacctgtcctcattcttatttttctaagggaacaaatctgacaaaatcagaatttatgagcctggatgaattagaccttgtataagaacttagttcagtgctaaaatcaagaaaaataatggattgtgtgattttagcctgatttccaagtaccacaaaatgggcggcttaagcagcagaaatgtattatcttacaatcctgaaatttagaagtctaagatcaggattggttccttctgcagagtgtaagggaaagatctattccaaccctctcaccatggctcatagataggcatctcctctgtttttgctttgtcttccctctgcaattgtcgatgtccaagtttccttttataaggacaagtcttattgaattaggacccaccctaatgacctcattttaacttgattaccactgtaaagattctatttccaaataaggtcacattctgaggtgttggggctcccatggcaattcattttcttttttagtttagttagaatatcaaagtgtggctaactaactactctgtaatgttcacattctgatttcacgttcaggaaaatttcgcactcaggaaaactgacttcccctcagatatagaccaaatgtacacacttatatcatactgcctatgctgaaatgtgttaaatagcagttcctaaaaaaaatcatcagatttgttgagactctgattaaagcagtggaccttctccccagagaaacacaccaatcaaatttactattgttaaagaaaaaaattcttagctgtgcaaaaagtgtcatcttagtgttgattttacagtataatttgagaaataatcattttacatgtaactttcagtaagctgttgtgcaaataagatacaaacaattccttcagatctattatgtcagaattgcctgtcatagagtaactttgtgaaatgtaagtcagtttcctttgttggtattgtagcactatcatcagtttctttagaatggagtacaggaaaggtagccatgtagccacttatatgaactctcatttcttctttaagcttggttataatacattaattgcatataaacatagcaacagcaatcatactgtagttctaattgtttttagcacatacccttttactgaactactatttttaagaatatgtaatatcttatcagttcacctatagcacctgtattagtgaaaataattcaggatatgtatttgttttgcagttgctagagggctacccactttctacctgtgacagaccaaatctaattacttaggtcatgcacaattcttaggttatgtttagtagatactgggggtcacagacagtgggaggtaggtgagcattagttaattccttacagccttgctctcaggttataatgaaaccaagttctggcacacttaaaaacatctactggcaaacagagattaaaagtaacacaacctgttctgtaagcttattgaagtcccagtgttctgcccttgtttcatgctaccgcagaactgcttataaaagatttacctgaagaaaatgcaacaatattctagctgtaggatttggttggctacctggttaactcagttgactaagaatcctttgaactagcggctaaggatcccaggcaaaggtgaaggacttgcttgatttgtatattctagttcatatgaatattactaaaatgttttagctagtccagtatcttgaaaaccattaatctatgaaaatccattcctgataatcattatgctaatcaaaaatatttggtgctaaatcagtgataaaagctagttgaagagcttaagctttggaatgtggcttttgatcaagtgtggctaactaaccactctggaatgttcacattcccagctaggaaaactgactgcccctcagatatagactaaaatgtacacatatatatcatactgcctatgctgaaatctgttaaatcacaggccacatgacaccacctatattcttatcctgtggtgttagaatttaggagtttctgtaccctcttccctcttttttttccagttaagttactaatttttagatgagagagttgtattttctctccttatctcaaagagatttttctaacacatggatggataaatagacttctgcctgactaactacctttcttt

SEQ ID NO: 123187 - DNA, 1345 bp, Homo sapiens
cttactcatttctctaacattctttcaagaacaattaatttagaaacaatttataaaggtacattctccttatttaattttaaaattagaaattttttagagttaaaggcctttattattagtttacttacctcattttacttgaggctgagattaagaagggtaagaggcacatccaaaattacaattggagtatgatttttaatatttgaagtagtaatactcagaaaaataccttcattctgcaaagcgaatagtaatcataaatactatacataatgacaattctgagagtaaaatgaacattataaaagccacttcataaatgttttgtgaggccgtgatgagataatgcctatacagtgcttgatgtatgataaatacttggtaaatgataactttttaaatttacatttagcattcaatatattgccactgcctaggacattttaatgaatttttagggaatggtccatttctgcttattatttgaattttcaaaaaataataaaatgggccaggcatggtggctcacgcctgtaatcccagcactttgggaggccgaggctggtggatcacctgaggttaggaatttgagaccagcctgaccaacgtggagaaaccccatctccactaaaaatacaaaattagccgggcgtggtgttgcatgcctgtaatcccaactacttgggaggctgaggcaggagaatcacttgaacctgttaggtggaggttgcggtgagctgacatcacaccattgcactccagcctgggcaacaagagtgaaactctgtctcaaaaaaaaaaaaaaaaaaaagtaaaatgtagctgctggggtcttaaaatacatcgcagtttgacatggacccttgtgtcagtttgggtcccctgggaagcagatgctaggatgggattagatgtacaagagatctactagtagaaatgcctgtaaaggataaaggggaagggaggcagaagaaggcaagcgaagcatttaggccacagtgcaggtctgacatttgtgaagggaaaaagacaaggaaggaagaaagattaggcaagaagagtctcagactacagcacagttctaagaaagcattgggagaccatgaagagtctgcaagccaaagtttctggtagaggagacctgcagaaatgggcctgctttactgtgcccatacaagcagtgtcattggctgggagcagtgcaaacatggtgatggatccagagcagtggcagatggggttgtcaattatgtatgctcctccagcaaaagataggggtcacacgtttccatgatgcaaccctaagatgaacaaatagctgactataggcaattaaaag

SEQ ID NO: 123188 - DNA, 2044 bp, Homo sapiens
gtacacagggaggagaatttcttaaattctggagaatttaaggtgggccacagttctcctcattcagtttcctctttaaatatctcaatgttacttcttcttggctttcttttgatttgaaattactatttgtaatttggtggggggagaagggtaatatccatttgaaaaatatttgcataaataagggcttgatcccttacaaagtatcattaaataaggcctccaatcttatgactgcttttatattaattttatatgagactctggtctcatataagcctgttgagcaagtttttttttctttaaactatttgtgataataactaagataataactaatgagaaataagtagatgatttgatagtcttattttgccaacttcataacagcaaataaacagttatcactgtttttgatatttggcactcttcttgaagactgataatggcaatgaagtttcaatggcaaaaacaaaaaaatcttaaacatcctccatcataagagaagtagaacacttcgaaaagattcgtttaattctctttactttttatttctccatgaaggtattttagtgacattaaagagtctggttgtatttaacttgcagttgatttccatcaaacaaatcatttgaaaggaatatttgtgttgaaggtacttttctctgttctacatagatttggaatcttttatgtagattttggagttttttaaaaaaaaatagcatcagtatttaaaaatctacttttaaggtctaataatgttaagtgtaaacatgaagaaatgtcctgggtaactattactgtcttctcccaccaaaatcatcccaaataaaatacagttttttgttcgtttggttttggtttttttttagatagagtcttactctgtcgcccaagctggagtacagtggcacaatcatggctcactactaagcactttctatattgaaattttcggaaccactgttttcttatcttttttcttttagaatttttataagaagtacttagaaatttttctgagggagcattcaaaaagagatatgagtcacttaggatacattaaatacctcacctttgaattgtggttgattcccagtttaatccgaatacatatgacattctgccgtgagtcttgaacactagattagattaaggttgcagcagtgtcttgcatgagttactcaacacattttctgaacctgtgccatctaggaaagaggtaactgaaactatagagtctgctcattggcaaagaaagacaagaagctagtagtatctttaaaattgtaatagtaactcaatttcttgttggaatgcaaatttatgtctgaaagtaataataaagaatatggacttgtgttttctatatctgtggttttttttatttcatgttttctagtaatttatttttattgtatttaacaaaagtgctgctctgtgacagattggaaaggaaaaggaaaaaaaatggatccttccactagtggtttgaaaagcactaaactacctccacatagtacatccatacaatggtgtactacacgttggttagaagagaaaagtggctaccatctgtatacaatagtcccatccaccttatccatggtttcactttccaaggtttcagttagccatgacaaccatggtctaaaaatattaaatggaaaattccagaaataaacaattcctaagctttcagttgtgtgccattgtgaataacatgaagaaatctccctttgtccagcggatccatgctgtagatgctatctacctgttagtcacttagtagccatcttggccatcagattggatgttgaggtattgcagtgctttgtttttaaggaacctttattttacttaataatggccccaaagtgccagagtaatgatgctggcatattacggttgtgctattttattgtgagttattgttgttaattttttacactgcctagtttataaattaaactttaacataggtatatatgtataggataaaacatagtatatgtaggggttggtactatcttcagtt

SEQ ID NO: 123189 - DNA, 1219 bp, Homo sapiens
agtcattgcatcacatacatacagtgatacatacatgtattcatttatgcatccaacaaatgtttattgtgctctaacaagttaaaaagttattgctgtagtccaggcaagagataatgctcagcttggaatctgttgggcaacggggagaattcttggcacttatttgaatataggcaagggaaagaagtgccaaggattttcaaaagattttaagattattaaaagatttcttttgagaaatctttagaatatctgattgggtataggcaagagaaagaagtgccagggataatgcccatatttgctgcttctagaacctgatagataatggtgtggttcactggagtaggggggaaatactcaacattgttagtaattaagagaaatgcagatttaacctgtaagatactattttcacctatcagatgtgaaagattaaagaaaaggataatgttggatgttgaaagaaggcataatggagcagatacattcataccctttgacccagtgatttcatgtttatacaaaatcttacttagattaagaaaatttaggcaaaaactgaaatgcccaactctagggaactcatgatataaattgtcacagctagaggacagattactgtatagtcattaaaaaacaatcagacaaacactttagaacttttaataagatggaaaatactcataacaataaaaatgcaaaaacagtgtgcttaggaggttagaggtttttggtagacacaaaaaaacaaagatatgtgtaaaaaaacgccaaaagaaattggtcatgatgtcaattagagttgttatttctaagcgatagaattgtggggttttttttcctttttaatagatttccaaaaatattctacaatggctatgtattacttttataattaagatgttaaagtcctgtggggtcatttcagaaaataatcattactgtaatgatttttcagtctttccagtgtcagcctgcctttagctaagataattccaatagtaaacggacagatccattcagtttgcagtgaaacacctagtcattttgttcaggtaagaagaaagcttgggagtgttattaaaagcaaattatatttgtggtggtggtcatgtttgtctaacataaagttacattctctgctgagaggttttttcaaaaaatcacagaacttggaactacatgtagagtatggtagagtgtcccatgagag

SEQ ID NO: 123190 - DNA, 1058 bp, Homo sapiens
taagtagaagtacactctaaaataatgacaaaacatatagcacagtaatgcataaaccagtaacctagccatttattaagtactatataccttacatcattttatgtgctagatttttatatgactggcagcacaggtttgtttataccagcatcaccataaacaacatgattatcgtgttgtgctaccttatgatggctatgatgtcactaggtgataggaatttttagctccattataatcgtatggcaccaccaacatatatgcagtccattattgactgaaaagctgttatgtggtacatggctatatttcgaaacagggcctttaaagaggtaactaaggttaagtgaggtcataagggtggggccctaaagccaataggattgatgtccttataagaaggggaagacacaccagggatacaagtgcacagaggaaaggccatataaagacagtgagaaggtgccatctgcaagtcaaggagagaagtctttgaagaaaccaaatctgctgataccttgatcttggattttcagcctccaacactgtgagaaaataaatttctgttgtttaacctgagtaggggttgtgttttctattcccatttgctgcaaggtatgtttaccaaaggctgtttgagtttgtgactgtagtgggtcaaatagtgttccccagtaatttatgtccacctgcaacctcagaatgtattctcacttggaaatcatgtctttgcagatgtaataggtaagtattgagataagctgatattggatatgagtaggttctaaatccaatgacagtatccttataaatgacagaaaaggacacagagacagaaggccatgtgacgactaggcagagattggagagggagcatggccctgctgacgccttgattttggatttctagccaccggaagtgtgagagaataaatttctcattttaagccacttgtggagtggtaatttgttacaactgctctaggaaacaaatacagttaccaaacaaactgattatgccaggtgaactttttatgatgataatatgagccaag

SEQ ID NO: 123191 - DNA, 1050 bp, Homo sapiens
tattagaaaatctgggggaggaacgctgagtagatacttgggcagactctggtttcagagccactttctgctcctgatcctctctttagctttttctccactctgagactccattcagtcttgaaaattctccttccccaacccctgcacacttctatttccctcttgagagtaaaatagaagcaagaatatagaggcaagatacatacactcaattggatgaagagtgattgtgaatcactaaataaaggtaaaaatgaacctcttgtctacaattttgtttgaactactaatcactccttcccaatagaaagtgggtgagataaagagataaatttggagacatttgcatgtatgtttttaatttcaggtgaaactactgggccatggacagccacttaactggatttctttggagcaaaatggcattatggtagaactgccacagctaaccattcatcagatgccgtgtaaatggggctgggctctagccctgactaatgtgatctaaagtgcagcagagtggctgatgctgcaagttatgtctaaggctaggaactatcaggtgtctataattgtagcacatggagaaagcaaatgtaaaactggataagaaaattattttggcagttcagccctttccctttttcccactaaattttttcttaaattacccatgtaaccattttaactctccagtgcactttgccattaaagtctcttcacattgatttgtttccatgtgtgactcagaggtgagaattttttcacattatagtagcaaggaattggtggtattatggaccgaactgaaaattttatgttgaagccatatcccccatgattatatagttatgcatcacttaatatggggatattttctgggaaatgcattgctagtcaatttttttttgtgccaacatcatagagtgtatttacaaaatcctagatggcatagcctactacacacctaatgtgtatggtatagactgttgctcctaggctacagacatatacagcatgttactgaatactgtaggcaatagtaac

SEQ ID NO: 123192 - DNA, 2102 bp, Homo sapiens
gttctcttccatgccacctctaagaagtcttccctgactattctgtttaaaataacactcccaggcccctcctttcctacctagcatgccctgtccttctaacctggcttgttttctccatagcatttaatcaacacctgacatatttgttgattctaatttcttccactagaatgtaagccccatgaggacaaggactttgttcaatgttgtatatagctctaaaacagtgtctagcattttaagatttcaataagtatttcttgagtaattgaatgaataaatgaatgaaatccacttttttttttgtccacagcatacttcccttaccttcttctttgctcccattcatcctttaagtctcagattaaatgttatgttcctggagaggcttctttctgatgttctaatctaaagagatccttttgttataatctctcaatttccttttctttcatggtgcttatcagaactcacactttcatattatttgtgtgattgtttagtgtctgctttccccactctagtctaagctccataagaacaaggactatgtgtgttttgttttttattgtaactctaacactgagcacagtactaggcacagaattgacacatgcatatcttgtcttgttgaatgaatgaatgaatataaaaatttgaataatacatgaaaagccatgaagctcttgcatcctgtccccttagatcatctccctccccttttcagctccatgagagcagtctgatgaagaggaatgctagctcaggaaaatctttgtcttccaagaacttccttttggtcttgggggaggaaggtgtttttttataccaccatgaggctatttttccttcccttctattagtggtgacattgtggaagtatctgtaaaataattccagattgttcctgatccataaatagtgagaaacatgggatgtaacttgctactatgctctttatttttttcttttaaccaggtacacatccaagcctaaagaaaaattagtctatgccatttttcttaaatggcccacatcaggacagctgttccttggccatcccaaagctattctgggggcaacagaggtaagagggaattttaccttattcctttaaattgctgattagaacatcttgatgcaaacattaacttttaaggggagccttataactgtttcacttatacttcataaaaggaattgtaaatgagctccagccaagcattgtggctcacactgtaattccagcactttgggaggctaaggcaggaggatgtcttgaggccagaagtttgagactagcctgggcaacatagcaagacccctgtctacaaaaattttttttaaagttagctgagcatggtggcacgcacctgtagtcctagttactcaggaggctgaggcaggaggattgcttgagcccagtaggtcaagactacagtaagctatgactgcaccacttcagcctgtctctgaaaaaataaaataaaatataataaaataaaatgaatttcaccaatgacagtgtttggtcaaaatctttgaaactttttgtttcccagaaaactaagctgataaaacagctgcagtatctctatgcatatcactgtaaaatagacattattcttcacagtcattttacgttgttcaagttcactgcatgcatccaaaatgattcttctcataaaactagaattcggatgctttccctgacaccccaccccagaacatatctgaatacaagatgtcatgactctactattttatgtttataaaacattttggagaaagttagagattaatctaactgttgaaaccaccagatctggcattgagttcattctgatatattttataacttatttttttaaataaattatccctttggaggtgaactgtccatatgggggttctccttgcatcacttttctgcatttcatttctaatacatgtggttgatgaggcagaaagaagatgagttcaaatctaatgtttaattacagcttagtagcccaggtatgatactgattatgtttttattttatctatgttctttttggtgccaattaacattattatttaaaagctcatgggctttg

SEQ ID NO: 123193 - DNA, 1450 bp, Homo sapiens
cacagtagtcaccaatgatcgttggggagctggtagcatctgtaagcatggtggcttctatacctgcagtgatcgttataacccaggacatcttttgccacataaatgggaaaactgcatgacaatagacaaactgtcctggggctataggagggaagctggaatctctgactatcttacaattgaagaattggtgaaggtacagtgaaatgtctggtggctattaacataatattcttaatagtgtggtcatgtaggaattatttcttctatggctcaatggcctataaatataggacattgttctatcctgtgtttgttcttctaggcagtgactatatatacatgtataaatatataaatgcaacatattagcacattaaagatggaattattttatttatctaaaaacattattcttaattttttagcaacttgtagagacagtttcatgtggaggaaatcttttgatgaatattgggcccacactagatggcaccatttctgtagtttttgaggagcgactgaggcaaatggggtcctggctaaaagtcaatggagaagctatttatgaaacccatacctggcgatcccagaatgacactgtcaccccagatgtgtggtaagtcattcttgttaccaagtactcttttataaaggaagagatttaaaatttatcagacatataaagaagagtaggataaaaagagaaattggatgaattcctacatatacaaagcactttccaaactttgcttactctaatataaagagaaggggaagaatttgcatgttttgaaacatttattgtttatcagattgagcttacatcatttctaggtatctcccagtagtggacaaattttggctgaaagtactcagctcttagaaaaattgtaagctgttcagaccaatgaaaaatgctgaatggttagtctaaaacggagattactgtttaaccagttcggtaaattctgacttttgcagatgttgcatcccatgaaattagcaaacaagaggtacccaatggcagagaaaatgttagattaaaaatgaatcaaaatagggagggttcagggaagatgcttctctctgagcttgaggaggttctgtgtgtcaatgagtacccgaatcagactccacaaatatgacagtttctgatatggtttcttaacatatataaaataagatgagtattggtgaagttctaaaaattcgctttcagttgccacctgagtactgtctgatcaaataggaaccgaaagattagactaattgttcttcaatctacttgacttatgacttaaaacattaacaacccattgaataaaatggagtaaggcaatctggacagagcaaataattgtggaattttaaaatgttgatctgggagaagccataatgagaactcaataccaatctctcatgtgacagagaatagtagaaatct

SEQ ID NO: 123194 - DNA, 1117 bp, Homo sapiens
gcttcccaactaactgcttatggttctgaaataaagacgccttttgcgggttgctggtaagaggacccgggatatgagtttttcctccttgcaaaaacccatgaggttaatgggggagagcaggggagagtttggcgggctgtttgtgcctctcatcctttaacatgttttgaaaaagcctcggccaggagcggtggctcacgcctgtaattccagagctttgggaggcccaaggccggccgatcacttgaggtcaaaagttcgagaccggcctggccaacatggtcaggaaacttcgtccctactaaaaatacaaaaaattagccgccgaggcggcgcatgcctgtagtcctagctactcaggaggctgaggcaggagaatcgcttgaacctgggaggcagaggttgcaccactgcactccagcctgaatgaaaaagtgagactccgtcttacacacacacacacacacacaaacacacaaaagcctcaagctagcccctctgcggtagcaccggcccatgtgttctcagaggctgccctgtgccccgtgcaccgggaccgacgaaatcaggaactcagctaaggccgatgctgccggccgagttgtgtgacgttgggcaaatcacttaaccttgtctctcctatctcagtattcagagtgggaatcatagtatggtaccaccacattgggaggttatgtggattaagtaatcattttaaactgcttttgaacaaagcattagcctaagaattgtaggactgttttttaaaagtccaccagatgcgtcaagtttccaccagttgtctgatgtgcaatctttgtaggatgcatgggagctgggaaattagaaatgaagctagctagcatcaaaaactacccatagcggcaaaagccctgccggggcgtgaacgtgcactgtaccagctaccactgccctggttttcaggctctgtgctccgggatcaggccttctttgggttctaactcaacctcagctaaagctgagcttcctgttcaaaaaagcacatttccatgcctctgactccacttcagctggctaactctctcaccatagccttctgtcttcttattcttgtcatattgtttttgccgcc

SEQ ID NO: 123195 - DNA, 1013 bp, Homo sapiens
actgaaagcagagaggatactcagaaagggtgtggcaggccagacacagcagtgtctctggtgatctaagctataggccttgcatcatgctcagtaaataacatgatgatgatgatgactgttcttgttttcagaggatgcatgaagagctaatttacttaaactagttaagctctagtttgtgtcagtacctcagtggcagctctgagacagatattaaagccgtggatttattctggcccctacgtactgatgaagatgctgtaggcaagggcatatcttgatttttcatttcttctttcaatcaacaaatggctagtgagctaacacaaaggttgcaaagacatccctcaggaactcacagtttagtggggaaagacaggccaataagccaaagaccacagtgcaataaagtataagctatgattagtgccctgtcctgggcctgggggagaacctaggatggtcggctatagggaatggctgtggggagaaaatgcctctggcaagaggtgaaacctgggctatctctatgcaaaaggaggaactgaaagatggagttgggttggggaggaagagtgtttggggatgggaaacagtacatgtaaaaggcctgaaacaaactggcataatcagaaaacactcagcagttgcttttggctctgagcagggttcttttgggagagaagggagagtagagagctgggcagagactgagtatgggaggttgctgtgtttgcctttttcctgggagacacaatttaggcatttgcaagtttgatatggatatattctgagtatattctgacatgaacactgaaagacagagacaatggtagaaagagcacagacaactgagattgggactgtcagggctcagaaaacaataccgcaaagcgtggtgctttgatgtgctgagtatttctaactgaaggacattggaagggcctcagaagtaaagcctctctctgaccttctcttgcccttctcttgacctcctatcttctgttccc

SEQ ID NO: 123196 - DNA, 1048 bp, Homo sapiens
gtatttttaatagagacagggtttcaccatattggtcaggctggtctcgatctcctgacctcaggtgatccacctacctctgcctctcaaagtgctgggattacaggcgtgagccaccgccccctatctttgattttgaaatgccagtctgcatcagctagaaccttccctacactggggtactgagttgaggaatgaacttccctctgtgttgtttgctctgtgaaacttttgacctgtctgtgtaatccttagatgtatcgaggtttaaagtatgctctgagatttgggagagaagagaaggggttttaaaaacagaagcaattgaagcattgagcgtcaaactttacctctagaaacgttccagcgattcccacgactctgtcatgccctggagagaattttggtatagtcgctatgcatcttttcacataattataatcacatacgcaattttaccctttctaaattcaccatgatattataaacacttattttctgttgttacatattttcctttaccttgatttttttaaaaaaatccataatatccaggccttcttccttggaaaacaaaaccactgagtagtgacactcaagagttaagggaacagaatcccagacctggttttgccaccaactagagataccaccaaaggattgtcccctgagttccctgagttttctcctccatgaaatgggtaccataattcttacttcacaggactgttacagagatgagatgaattaaggttatagggcccttgtaaactctaaattaatattcaaaaataaggtgttaatgtctatctttagaggcagtaagcaaagctgtagaaactaggtagttagttctctctgctgatcaaggctatggtactcaaaccttgaatctagagcccaacacttaaggagggagaacctgtgtgttcaggctgtgctccagctgctggctcagggtagggggtcttcctcccacatataagcaagaggaatcactaaagcagagttcaaatattcaatccagaaagcaatcagtaatggaaga

SEQ ID NO: 123197 - DNA, 1049 bp, Homo sapiens
ttgtgccttttcagttcagctcccagagctggtcctgatgaggtgactggcaactcaccccaggtgtggcaggcccctccccactctcctggggctctccctctccccgcttgctctccttccctaatccccacacctttttatgaagatcagtcctttgcacagcagccatggccagcgtgaggtgcatgtgcaagtggagaagtagcaggttcatcgactcgttctggtagggggcctctatcttattgagcacacttttgacggtggagatgccgctttattgcaaatccctccccggactcctcctcttcttccaaaattcaggctgaagacaattgccctgattccctaacctaagggatggctctgcaagtggtgatcgatgtttatcaaatgcccctgagactcgaagacgcaaattatattcctatttttcatgaaatttaaaaaactttctaatttaagatcatttaacttttagctgctgcaaaactggtacatggagttctcgtatactcttcacctggactccccaaatggtaatatcttacaaaactgtagtacaacgatggaaatcaagaagggaatgtaggtaaagagcagtacagtacagtacttctaactaatctgcagctgtcattcaaatttagccaattatcccactaacaattatcattgttagtaacaattatcattgcggtgtttgtcagatggtgactttctagttatcatccttctgcatttatcaattggaattctactacaatgaagagctacctcttctgagctatttattcattcagttatttatttgtattagtgtggtctcatggatatttcctttatcctataatccattactatctactttatttctttttttagagaccctccagctctgtcacccaggctggtgcagtggtgcaatcatagctcactgtggcctcaaagtcttgactgagctcaaacaatcctcccacctcagcctcctgagcagctgggactacaggtgtgcactgccacacctggttaattttttttaaaat

SEQ ID NO: 123198 - DNA, 1105 bp, Homo sapiens
cgtttacaatgacaatatgatccctttctcacttttatgattggtaaaaaattggtttatcctctctcaaagtttatcctaaagttgctgagtgacacaatgatatttttgtacttaatcacaaaagcagagagtctgacaagaatttgaaaaagggtgtatagaatacaaatactgttgaatggtgcagcaacagagctgtacaacacctttgtcttgcctggaaggcagtgtgttagtatggagagagcgagggctaaagtagagactgtagatattatgtgcctaatactgtaattttcccagaactgatagcttgattttgccagttatacacccaaagactttggacattggtgtggaaatacatttgctcactacatgctagatgccagactatcatttgttgattggttgattcattgtttggaaaatacctggactactataataggtgccaggcatcatacccagagagggacctagcataaccagaattcattcaaaggaggacttccagaattctgagaggtctagagtgctgggacggtgtcttatttatctctacactttttcttcctagcactgtgtctagcactcaggatattcataataaaagtttgataaaacaatggatttacaaatggtggttgaggctcttttacccactggcaggctatcttcctgaagttgcctatatccctgtctgcctgttagctgttaatacctcctaagccaggatgttccactactgtgctgtgccaaacagctgtgacccatcaccacctcctgtgagatacattctttttaccctgcatcatgctaaagatgttaactcttgactagaaccacttcttggggctgtggttgtacttttggaggcccgtcatggactgggaccagaaaactggagacttgaatatgaacagagatcaatggactagagacttcattttgcgtctccgagtgttggatgaggcatcctgagtccctccactgtacagacaggattgggcttagctactcagggggactgaactttcaagggaagatcaactagcctcagttctggaggaaaaaagataaagagtggaacaaacagcgc

SEQ ID NO: 123199 - DNA, 1006 bp, Homo sapiens
aaactgggtattgctgctactggaggggaagtgaagtaaggaatgcccctgatttgattatggtccagggagcaagcccaggcttctgcctcagtgctggccttggcctatacctagccagccgcacatgggcttcctctagagtttgccgtccatggatctggaaccaacagcctgagctacagagactgggctggagctgctaccaagtgcttggccctgttttgctctcattaaccaggtcagaattgctggctgccgttgctgtcaggtggggtgagtcaggtctgtggggatgtttgacatcataggcgccctcttattctaatcagcttgttttagcagagctcctttgtataaacacatcagctgaaggaagctctgaaatgaagactgttacataatgattttatgaataacatacagcttcctaaaatcagtctttttctgttagatcttcaaaccaggttttagaagcaagacaattttagattctcatagtaagaacaaatttagacaccttcataaggtgtgacgcatttgatgcaaaatatagatggacgaggaatgatgttgcttattaaaaagttcaattagaggatgggcactaaaatatatatgaactaagttaagtatgtcaaatgacacactaaaggctaattaggtaaagggagaagtgtacatgacaggtttctgattttctagctttttaacagtaaaggtaactttatttccagcattcgaccaaaatgcagggatttgggccacatttacttggctccgggggagtttttcaatcctgttgaagcacagcaggcaaggcctgggtcatgagaattctatggtgctgactgcatttggagcttaattatttaaatgtttccagactcaaatgactgatgagctaacatatttttaattcagactttcacagagcaagctataaggtgtgtcttgagaaactgatgctcacttgaagttccatgccatgtattttatttcaata

SEQ ID NO: 123200 - DNA, 1029 bp, Homo sapiens
gtcgaagaatgccccccgcgcccccaaaaaagaaccatatcttaaccccttaaacctgtgaatatgttactttacatggcaaaagggactttgcagatgtgaagacgttaaggatgttgacttaatgatcctgggcgaaatgatcctacattatttggctgggctcagtgtaatcacaggattccttataagagggacaagaaggttaaaagaggagaaggcaatgtgacaatgaagacaaattttggagcaatgaggctgtaaccaaagaatgcaactgagcctaggaggtggaagagaccaagccagagcctccagaggaatgcagcccttcagaacaccttgatttgagccctacaagataagactaattttggatttctgacccagaaccatcagagtaaattttggctgttttaagccactaaattggtggtaatttgttacagtagcaacaggaaactaatactgatgaaaagataataggaaaggaaagtaaaagcagaagtgtgggccagggagggatcgcagtcatctgatggcaaagcacttctctaagaacaaccacatggcttccccttcctggcctatgtccctgtggatatgttagaacctggttaaccttgactgttatccagtgcctttcctggctttgtccttcgtatcagatgcagatgttttatctcctttttttatggctcccaggaactttctatgacccccttagaggaatcactagacctcatgtctcaaagactagctaagtgtttgctgtggtcctaacaagtccacctagagccatttaaatggctggcattgatgctttctgttatctgttccaggtttagtggcgtgaatagtaaacatagtagattagtcctttgtaattaaatttagatagcatctcacccctgactcttttagaacaatgatggcagtgggaggagtcagagaggtcagtccccagttaaatcagtcaggcatttattgatgaccctctgggtactcagcgctttgctctaggtgtcc

SEQ ID NO: 123201 - DNA, 1008 bp, Homo sapiens
gttgccacctcagccagacaggcccggcatcccaaacatcatacaaccaaccccaggcaaacactctcttaaaaaacccagatagtgaggggttgtgtccttctttcgaaggtgggatcacactgagggtacttggatgcaggtgctccaaattaccccagcctcaaacaagtttgtcgaactctaggcaagctgagtatatactcatgggaaggttaataaaaatgggaacgaaccccatgtttagaaacataatggagaacattaggcttatcgatgcctctaccatgcccacagcatctctggggccataggaaagggcctggtgaacattttataaccaggcattccccagctacagcatattaattgtgggtgtgaattaaatcaagggagggagtggattctccctggagcttgaggaaaatggtccacttactgtgctttttcacggttgcattgcccttcctctgatgctggggagggacagaggaggggcagtggtggagccagttaccaatacagagaattgggaagcagttaggtcctcggcaatgaatgcagtttttgaacagggcttaatttataatggacactcaacattaattttctgatttctagacatttttccatgttgcccatttcttgtttatctcttagtggagatgtttaagtatttataggcaagggagggagatgttaagttcctaaatacctaggggaatcctgtgacaaaatagtattaagaattattttctgccattttatttttattttattgtaaattgacaaattataactgtatatatttatggggtatgatgtgatataatgacatatgtgtacaatgtgggatgattaaatccagctaattaacacatccatcaccacaaatacttgtcatctaccattttaaattgcaaaaatggactgaaggaccacagtccttcaactgaaacccttggagtcagttgtgtttcagaattcagaattttattttagaaaggt

SEQ ID NO: 123202 - DNA, 1018 bp, Homo sapiens
atttttagacatgatttagtatatgtattttaaactaaattaataaattaaatattgttataagaaaaaagccaaattaccttccctagaaaaagaaattattttcaaactcctaaaatgtattagtatatttaaattgtcccttgctcttaatatatggagagagaaaaaaatgtcatcataatacccaaatgaaggcccaggtgagcagatcacttgaagtcaggagttcaagaccagcctggccaacatggtgaaaccctgtctctactaaatatacaaaaattagccgggcatggtggtgcatgcctgtagtcccagctacgtgggaggctgaggcaggagaatcacttgagctcggaaggagaaggttgcagtgagccaagatcatgccactgcactccagcatgggcaacagagtgagactctgactcgaaataataataatagtaataataataataataccaaatgagagagaaataattctgaactcttgttgaaaatcagttcatgggagtacagcatacaaagttggttttatttttataaaaacattttgtgtgtgcatagagcaatgctcaatccctgaagaataacagaaagaataaaaggggaatttttatattttactctagacttttctatttttggttttgtttgtacagtcattgtgtcctgctttaaaagccaataaattatgttttaatcagttaactggatagcagcacatattatattgtcttaccatgtatgatgcacaatattctgggtacactcagagcacccccataataagttgctaatgacatgggtccctaccccagagtaacttggggtgagtgatatgaagaccctgcctccccacccactccccaccctgccccagtgtaagctattattgaacttgtttctttgttaattagaactagctctgaaatcttgttaattttttttgttgttttttttgtttgtttgtttgtttttagacagtattgctcttttgcccaggctggag

SEQ ID NO: 123203 - DNA, 1047 bp, Homo sapiens
tctctagtagctgggactacaggctcgtaccgccacgcccagctaattttttgtatttttagtagagatggagtttcactatgttagccaggttggtctcgatctcctgaccttgtgatccgcccacctcggcctcccaaagtacaaccaccacttctatctggttccaaagccttttcatctacctcaagaaaaccctatacccattgtgcagtcatgactattgtccccctcccccagactcttgcaaacaccagtctgctttctatctctattgatttacctatttgggatatttcttataaatggaatcataaaatatgttaccttttgtgtctggcttttcaaattgaacctaatgttttcaaggttcatccaggttgtagcaggttatcaatacttcattcctttgtatggctgaataatattccattctatggatgtaccacgttttgtttctctattcatttgctaaagtacattgggttttccccaccatttagctatcatgaatagtgctgctatgaatgtttgtgtacatgcatttgtctgcattagtttcctattgttgctgtaacaaattgccacaaactttgtgactgaaggcagcatatatttattacctgacagttctggaagtcagaagtctagcagtctagtgtcagcagggctgcattccttctggaggcactgggggagaatctgtttccttgcctttaccgacttgttagaggctgctggcattccctagcctgtggtcccttctcctaggttctaagccatcagagtagcatcttctcatctcagacctctgctcctgtctttgcaccttctccctctgactctggcccttcgcctccctcttataaggacccttgtgattacattaggcccatccagataatccagggtaatagcctcatctcagaatccttaatttaatcatgtctgcaaagttccttttgccatataaggtaccatttataggctctagggattaggaggtagatatctcagggcagggaggggctgaaggtgggggaagag

SEQ ID NO: 123204 - DNA, 1022 bp, Homo sapiens
taatgagaaggaagaactataagaaagatttttgtaaaatacatttctgaaaaggaggctgagcccttttcccttttagaactgtaggcggcaaattctgaaaattccaaaaggaagcaatcatttatttaagacttctgttcatgcattctgtcttggataatgtttggctttttattttcgcctctgtttgtacttcaggcatcctttcctttcaattgtgtgcctatttgcagcccattgcccactgtgaagtaaattccattcagtcttaattggggtctcttaaaagctttttctaaagaatttttcagcctccctatggaaggccactgttcgttgcctaaggtgtttcagggtgtgctgagcattccctctgaccttccttcttgtataaagatgtttctgacaacagctgggtggctcacaggactggggagggcagtctaaagggatgattcaggattgcactgatcaatttcatctattataaagggattttgtgtttttcaaaatttcttctgcatctgtaaagttagcttgtgttgacctgccaacctgtttatgaaagagccgggtgagaatggaaacttggaataaaccagaacaagttaactgagctcatgccgtgggttcctgttggcctgactgcgctgtttcattttcctaaaggcctctaaaccagaattgtatacatctaatgttctgtcgcttggaaagtacttgactgccaattttttaaagaaaacatgaaaagaataaaatcaaacatgagatttttagaagaatttagaactgtacacttttaaaaaactgaatccccttcagtcatccaaccacagaatgtcagaacacacgtatacctcattttccaaacaagaatgttttaatttaggaagccattataaagtaatcatagcaaaatccttcaaagaacttttctttttccttctttcaagtgggctgaggtggaggtgaggttgaaagctgtgtgacattttcactttaccttcgacatgtta

SEQ ID NO: 123205 - DNA, 1049 bp, Homo sapiens
ggaaaaaaggaaggaagggagggaaaggaaaggaaggaagaaaaaaggaaataaataaagaaagaaatggaatatgtgacattatgtttctgccattgtgtaagaaatcaataccagtatcttgtgattggagcaccaaattgatcgagtaatgttcaggaaagaaacccccaaactacttatcaagatcctaatcccagtgtggtcagtaactaatgtggccacctgactggttttataatcttctttgagggccctgaatgtgaagccctgtatttggagaaatgttttgttctcaaatgtcactacatatatagtcttccttttctgtgtttggttttgctggctctgtatgctttcattgtcttagatgtgtttgaaatccgcagggtgacatgtctcttttcaaagagctgctaaaataagaaagaaaatgaataagcgtgttaaagaaagatggtgtttaaacacctgtcaaagtaaagtcagaacaagaatgttcttgccagaaaacgcagagccccattgagacaggttggtaattcgaagatgattcattacgactaactgcatttgtattctagcccatatgcattgtaaaccacctagcaggcttccaatgatgtcttcctatcaattcgtaaatctcacaggaaacttttaactggtgcagtcagttttggtggactgcttatcttgtcaacgtgaagataatgcttcaacagcacacccacctcctctaggttcaaaattccttattttattgaaaaaggtccctcaagctggttaagcacacaaataagaattgggtgcatcagaatctagtgaccctaggtccttttgtaaaatgattaaaactctccttaaacctcagaaattatttaattttataggcatctcttggaccaggaattgccttgagatggcgagatacaagcattctacaaaggctgcaaacaagactcacttctcttaggccctgatccgaatccagattatgatggattgggcatggggatcagggcatgcagaagctcttagccaaacct

SEQ ID NO: 123206 - DNA, 1086 bp, Homo sapiens
tatttcatatgtatattagtctgttctcgcactgctgtaaagaaataccagagactgggtaatttatgtagaaaagaggtttaattggctcatagttctgcaggccagcttctgcttagcttctgggaagatctcaggaaacttataatcatggcacgtgagtgaaggggaagcaagcttgtcttatatggctggatcaggaggaagagagagagggaggtgctacacacttttaaacaactggaattcatatgatttcactcactatacagtatcaagaggggacggtgctaagcaattcatgaaaactctgccaccatgatccatacctcccaccaggctccacctccaacactgaggattataatttgacatgagatttgggtgaggatacatttctaaaccttatcaatatgataattatctagcctcatttatttttggcttatatggtcacatttgcactgggactgcctaactgatacatttctgtttaaataaaaaataaaacctgtgtatattttctgatttcttagcaattggtgttgtggggaaattctgttaggggtgggcttgtttcagtgggaagatagactgagctgtgtcatttaaagtctctacatttgattagctaatgactgtatttcaaaatatgctgtgttttaaaatgtagaactcaagtgtgaaaaggtaagttctgatgaatgacaagttactcttagtaacataaaaatggatcaaaattaatgctgaaaacaatcaggaaattttacctttcatctgggatttacctggcagtttgttcttatctgcatgtaaatgcaaaattcaccagacttactgtgaaataatttatggaaagtttcaaatggattttaatggaaaactgatccacaagaaaaattatagaaatatcaatagcaatgcccagtgtcctgggtatctaaagaggagagttaatattctgcccatactactcaaaagcagatgacagtggtcctcacattcatgatttaagagaagtacaatggcacatcggccaactgtgccaacatatggtttctaattgcaaatatggtctatgat

SEQ ID NO: 123207 - DNA, 1078 bp, Homo sapiens
gttcccaaacacctcccttcaaaagaaaggggaaactatccaccattggtaaaatctttaagccttggaaatggaggaaaaagaagaccagcgacaaatttagagaaacctcggcaggtatgagtatcataacttgttagaagatgggataaattgtaaaacgttttaaaaggtagaaaattatgttttacagtgtgttttttcccagaaaaaaattaatccgtatttgaaatgaaattctttattttaagaataaaataaggatgaaacaacttaagagttctgatttgccttctttctatactgaccttgactttctaatatattcttatttaaaaatatatatttgtaaatttatataaaaaatggattggtgaggcgagggagtgaaatagtagaaaatgataagtggaaatgctattcatcaacattgtgatgacaggtatccatttttatatacacatgatgttatatatttagttagactatactatttatattaatatataaatatttaacgatttaactagtagactatactgctatacacataacgtaatgttaacggtcttgttcgttaattaaaacttttttaaaaatgtattttttgatgtatttattctttaggaaagattttagtggctatatgaaagaaaagttttgttatatttgattttagatttctatcatatccttaggacaaataaatggtctctgtcttaagagagtagaggcacaaccctattggtgtgaaaatgtttgattgttaatttagtttgtagatttgtgaaaccttaaaagttacattgcttagtgcctttcatatcaactcgtggacaaagctggctttaaatctcaggccagaattcagcccaatttaaacaagtgttagtgtgagtgtattgtgtctaagatagaaaagtgtttagtaagttcaacgttccccatgcttactgtccaaggcaatcccttcatcaaaattcctcactgcaccacagtctaatattgttagtggatgtacagggtcacagagcatatcttattggtctgtactaagataagaaccagagttttgttc

SEQ ID NO: 123208 - DNA, 1050 bp, Homo sapiens
ccacgcccggctaattctgtatttttagtagagattgggtttctccatgttggtcaggctggtctcgaactctggacctcaggtgatctgcccgcctcggcctcccaaagtgctgggattacaggcatgagctacggcgcccagccagccccactgtgttgtggtgtagtattctttttatatgttgctggattttattgaataatattttgttgaggattcatggtattgatctgtagtgttcttgcactatctttgtctaggtttgatatcagggcaacaccaactttatacaatcagttggcaactgttccctcctcttctgttcctggaagagactgtgtagatttgttgttattttcttcttgaaatgtttggtagaataaacagtaaagcattatggacctgaagatttctcttttgaaagatttaaatagcatattcaatttcttttatagttataggaccattcaggtgatctcttttaacttgggtaagtttaagcaggccctctggtgctttgaaatggaaaagaaagtgaaacttttcctctagatttctttatggttaaccaactgccttatctccttccataaagtctatgtgcaaatgctactttctcagtgagatctatctggattgttctatttcaaatctctcctctcccccagaattctttaaattaaatggccttgttgacatataattgatataccaaacagttcacccatttaacgtgtgcaactcaataggttttagtaatattcatgagctgtgaaaccatcaccacaatcaattttaaacatttccatcactctagaaagaaatcccatactcattagcagtcattccccatttcaccagtctcccagctctactttctatctctgcgggtttgcctattcttgatatctcatacagatggaatcatacaatacatatgtggtcttttatgactgatatctttcacttagcaagctttcattggtcatctatgttgtagcgtgtatcagtacatcatttcattatcaaataccaaacattccattg

SEQ ID NO: 123209 - DNA, 1034 bp, Homo sapiens
tttgagccctcatgtgaggagaataaatgtgctcaattctacttggaatgtttttcataattatcttaaggaatgacttgattcttacttgtgcttgttctttttaaaagtattagaaaggaagatatccacacgacaaagtagagaggagctgataagaaggggagtgcttaaggaattgcctgatcaaggtgaggaaattaatcatacattttaaatattttggtccttcattctttggtttttcttttgttttcttttgaaatttaaagggatcatggtctttgtaaggtaaagcggtgattactgcattccaagcgccgtgcttccattggtaatgcctttgtgagctgcagagaatctgaaatattatagaattctagtgactttcctggtgaatccatcaccatatgtcattctaaacctaaaactctgcaaaggtacatccgagggcaatacagatgagatacaaatgcttacggctccttctcttctctattcttgagcttcagtctttctattcacatgaaactcatgtgtttgagtaaatgcaaagttttagcttggttcatgctattttgtttcttaagactaccaataaaagagaagagagaaggcacacatacctcttgtcctttgcactctataataacactgaaatgtacaatcaataaagcatgaataggcaaactaaactaacctgctttctgctttctctcatgtaattttgcagtactgttctcttttcatttctctgaatctttccctagcaatgattatttctaattttttcccctatctctgatcttctctttttttctctatcctcccgaggaggaactttgttcagaaaagacaaggatcagatagaaactggtactgaccctcaaaagaagacgctaacattggttatttctccaaataaataatacctaatgattttcatcgcttccactattaaatttaaaattaaaggacattttgttgcaattttgttgattaagctcatgcctcccttcccctcacatttactg

SEQ ID NO: 123210 - DNA, 1049 bp, Homo sapiens
actttccagcttttccatggtccctatctagaaccgtagaaattatctaatggttgaaggttcctgaggatgtcagtagtaaatggagtccttccccttttcagctgagggctggagaaaatagttttctgtgattttcccaaaagcaattatctggagaatttcagtctgagagactagaagctgctgttcttggtaacaacctcctttctgctgccagtgaagattcattgtttgccttgatcttcttgaccttgcgtctgctcttgacagtgcctgtccatcaagccctttattcagtgagccagatagactttaaaaatccctctagctaccctgagtctgaccccatcccaccatatcccatactctcccggctattgttatttttccttttaggttctcttatttacatccagacataccttcaacctaaaagttcagtgattcgtcttctctcctgggaagtctatgatctagtccaagtttgctgcttacctctgcttttttccctccatcttttcccttagcttttgacatgaggttgtggaggtggttttgcctgtgtgccatcctttccttttctcccactgtggacttttgtcacttgccttttggtcatacatgattttctctttctatctgtccctcctttaactatgatatatccccaatacacctgtttactagaaggaggtgacccccttcaaacaccctcgtgttccttatttaaccacttgttcctgtttgtgctttatctctgttttctttaagctgacaactacgttttgagttttctctttcctttgctctcgtgagatgtgttgacttgggccgcttattgtcacctgccatccagctcagcatcttcttgccttcctttgctctgcttgtattttacttacacacacacacacacacacacacacacacacactatatcaaggatttaacttattttaattctaaaacaacttccttaacactcaatactagaaagccttttcaatatacacaccagctaattaataactttacttcccctctgt

SEQ ID NO: 123211 - DNA, 1050 bp, Homo sapiens
gattacctattgtaactgaagtcatctatgctaattatatatgtggattgatggggaatgtggttaaaagagaattctatacttcacactcattaggataagaaacaaaataatataaataataataaaatgcagtatattccaatattaaaaccctttctagagcattcaattatgggagccttggttaaggctcgatcttgtcttaacactgtctcaaggtttttattgtgccccatttttaaagaaatgctgcttagctttttggactagaatggtattttagtttaattctcatcagccactattagaaagaatacagatgtgaatatatgaatgaactttcagcatctcatctgtctttcagtaacaagagactaatactctttctcctccggttacacaaaaccttgtgagaagctgctattcttaggtatgagttttggatgaattttagcctttgtctttccaaaataattatttggtttacattacaaaatagacctaagtatttcttcgattcggcaccatctagatgtacctatagttgtgacagtatttgaaaaggccaggcatggtggctcatgcctgtaatcccggcactttgggaggccaaggcaggcaaattgcttgagcccaggagttcaagaccagcctgggcaatgtggcaaaaccccatctctacaaaacattcaaaaattagctgggcgtggtggcaaacacctgtggtctcagctacacaggaggctgaggttagaggctgcagtgagccgtgatcataccactgcactctagcctgagtgagagagcgagaccctatctgaaaaaaaaaaaaaattttttttttaagattttctttcatgcacacacatacaaaaaaaaaaaaagaaaagaaaaggaaggaaggaaagggcagaggaagttattttagaacaggaagctgccaatgtactgggaaagctttagaaaattttgctagtagaagatgattcattctaaagcgcattgttgcctcatgtaaaagattctccagagtctctcttagcttac

SEQ ID NO: 123212 - DNA, 1053 bp, Homo sapiens
atgaagtgcctcccattaaaaaaaataccaaggctcctggtaagcaggcccccgtccctccacccaagccagcaagccgaaacacgacccgagaggctggtgagtatgcccccagtgccctgtggggtcacttctagggtgcttggctctgggatggggctaattgtttcttctaggtgtgatgggcttttggtgtcttaggacattacaccagcaggttcagctttgacacaaagaatgcccaggagattcctttgttgctctctaccaaaggaaattcaacccattgaatagttcacctcattagtttttgagtgaatatactggtttcatcttgagtatccactatcagcaccagttgaaggatactgggagtagtatgcctgatgaatgacaatgatctgatataacattatttagacattgactgaccttctacctatatgagcctatgggtggctttttggcttggattttctttcaaaatatctaaggtttgcatataaaaatgtgacaattataactttgatatatttactggatgttaatgtgttaaatcctcagcatccatagtcatctcccttctgataaatgacaaagggttcatgtcacttgtttcagctccaccccaccactttctactgcagtgaaaactatttcagtggagtggaaagttacactctcagtgttccacacctcccctgtagacttgtgtgttctaaggcaaaacatcctggtgtcatgtggttataagttactattataaatcaccagtggatgtttgagtgacctgcaataactcatgcaatatgtatccagctttgctttacaatcagatatgcttgatgcaaagtggaaactcccatttttttagtgaagaggaagaaagatgcctaccatgtcatttatcttttaaaaggacattaatcaggccaggcccagtggctcacacccgtaatcccagcactttgggaggctgatgcggatcgatcacttgaggtcaggagttcgagaccaacctggtcaacatggtgaaaccctgtctctgctaaa

SEQ ID NO: 123213 - DNA, 1095 bp, Homo sapiens
gccaagactagaatccctgccttctgactcccagtggaccgcttttcacttcctctgctgaaaccttacatttggagaagaaatttaaaatgaacatcaagacaggattctctgccactattcaaattaaaatacctcctttcggccgggcacggtggctcatgcctgtaatcccagcattttgggaggccgaggcgggcggatcacaaagtcaggagtttgagaccagcctggccaacatggtgaaacctcgtctctactaaaaatacaaaaaattagccaggcacggtggtgcatgcatgtaatcccagctgctcgggaggctgaggcaggagaatcacttgaacctgggaggcggaggttgcagtgagccaagatcgtaccactgcactccagcctgggtgacaagagtgaaactccgtctcaaaaaaaaaaaaaaaaaaaaacctcctttcaaggaagaacgttttatagatgttaattggcgagtggtatagagcagcctcactctttctccttctggttctaggcatcactttttgcagtaagcaaaagtatcctcactgttgatcggactagtgagacaaactggacagccatgtcacagaggactcaggctcacacatatttctctgcttgcttcttcatttccaaaagtcagtagcaagcattattgtcacagttcctagtcacaggttctccatagaaactacaggggctgaggaatatatctggggagaagagacaatctgtgacatggacttaaatatagcattgaaaggagtgttgagggaaaggctcgtgtattgcagaatgatggttagttatgagagagagctagagacaggcctcagggctttttttctgtctgttccctttcctaaaatgtattattttccaaccacaaagaagactttttatctcccagtgaagtcactccctgtgacttatcattcttagttttggctgaagagtccattttgcctagaggttacaggggtgtttttattagcacctttttaaaaacatgagtaaaacattctttatagagaagttaggaaataaaaataagcaaaaatttgaaaccacgaacca

SEQ ID NO: 123214 - DNA, 1025 bp, Homo sapiens
catcgtccataacgaagagtgagactatttggaaacagagactgatcatctttgggggaagccctgcttcctgaaaacctgatattgcactgggatttgaatgtgtgtgtttccgtttaacttgtggtgaaggaagtgtgtgactcagcttggctgggaagtgctcctcacctgtgtggcccagatggctccaacaagcaaaaggaaggatgcagtgactcttgctgcccagaatgcacagcgatggtaagagacaccgtggatattcttcatcagaagctttaatcaaagaagatgagcagaagacaatcactggctccctgttaccagaaagccaaattttataatgcgggtgaaagaaaaatatagattaaaattgctgggcactgaaaaggggtgggagttggaaatcagaaagaaagagaaatatttcattatgttaatgaagaaaagagaaaattgaagcataaatgtatttttgaagtagttattcggtagctgagaacttattaagggatttaggaatttaacctcctgatgtggattcctcaaagacttgatcggagaatactcttgtttcaccattatgttggtacagtatagtaccattattttatgttgtgccagtgaatccagttgccagaaataagtctgaatgttttcatgcatctttttcttaaatgcaagagcttctactgactcttaacaagcatgcttacccaaattttgttgcatgcttttaagtagcattagctatgcacacttgacatttttaaatatccctttcctagtgtaccagccttcacaggataagaggactgggaataaagtcagatgtaatgtgaccctagaaaactgtagcaagcttcagaaataaatcttttgatctttccctatcttgattagatccaaagtcaaagcaaccatacttcacctagagaagacagtattggcaatcatgacacctgtaataaaaacttgaatccaaagtcaaaacttaagcaagatacaaatgtgctgcctgc

SEQ ID NO: 123215 - DNA, 1025 bp, Homo sapiens
taaccctccaaatagatgataaaataaattgtatgtttgtttcttgactcaaaatgttgcacagaaatgtctagtggaaggagcaattgttatttatttttattgcccttttaaaagcatgaatgttttcattccattttaatgttacgtagcactctggttttgaagctgtacatttcctgtttgtcaagaattctttgtctttttcccatcagccaaaatgttcatgtgccatctgcctcctacttggaaagctgtactcattgtaatattcccatgccttatccttggaaggcttactgattccattttgtttatagatagtgaagaaagtactaattccatttcgtttatagatagacaatgaagaaaggcgagcagaacagaggaagtatggagtgttctttgatgacgactatgactacctgcagcacctgaaggaaccatctgggccttcagagcttattccctcaagtaccttcagtgcacacaacaggagagaggagaaagaagaaacgctagtaattccagtaaggcttttcagcaatttaattgtgggagtgaggtgaagaaatcatttttgaatcaagatatctgtttggggcaagaaatggtgtccgtatgaagagcacaaagatagaccacgcctccacttaaaattatatatgtgtatgcatgtgtataccatcaggagagaataggtcacgtcttctctggtggcaggtgtcaacagtaacagcctttttataggttcagaacttttgattgatagacatggccatgttagacagcacttttcaataggagaaaagcagctgacattctacatgttaacaacataactgttttcaggatcataaactcttgttctaagataggacttaacttttgtggaatattcagatctttaacacttttgtaaaagctgcaggctactcataagcaaacagaatgagtggatgataataacattcctgtcttgtaaacaaatgttcggtccactttaataccttctctttcaggac

SEQ ID NO: 123216 - DNA, 1078 bp, Homo sapiens
gcaagcacatgtttgagtagattgcagcgtgtgaagaaggcgggaagttcacacaaagggaagttctaggacagtgatcagaaagggcttcatgtcggagggtaggaaccgagctggccaccaagtggtgggtactgttgacaggagaaggaacattttcagtcaggctgccgagacagtgagcactgtggttccgtgtcaggcacatgcgcgccaagtaaagtgttttgcattattacatgactgaggaatgaacttgatttgcatggtcatatagaataactgagaaatttggatacacagagtaggccttgattttataggtccttgagaaccagggccttaaatacagagtgaaaaattgagacctgtcagaaactcaagaaggtcacatgaaaaactattaaaggagcttaatctcgccatgggtatgaaggttgtagtagatatagactagctatatgagcggttgcagtcatttatgttttggttaactataaatgaggtgatgccccaaagaatagagtgaaatcactgtatgtaagagatttcaaggggacataggacagagcaaaatgatttataaccacccgaggatttaagattgccaattcatacaagggctgtgccattactagagattaggacattatctctagtttaagaggaaaatgtttaattttggtttgaaatttcaggcaagtggagttaagaaactctgggatttgaatcccagaatctcacttactgatcattctcaggcaggtgggccatttaaactttcctagtttttgttcttttggtaaaacatggtgatacctcatgggatctgagggataaatggaataatttgctagagaaggcattgtgatgtattatagagagttacttttgggtttatgatggaatatacatgtttaacatatatacaacctggagcacaggtgagagaacacagaatgtagttgtaatagtttcctaggactgcagtaacaaattaccacaaactaggtgacttaaaacaacagaaatttcttccttcatggttctggaggtcagaagtttgagatgaaggtat

SEQ ID NO: 123217 - DNA, 1321 bp, Homo sapiens
tggcatgtgcctgtggtcccagctgcttgagaggctgaggtgggaagattgcttgagcctgagagtttgaggctgcagtgaactatgatcacgccactgtactccaggctgggagacagtgagatacttaaaaaaaagaaaaagtatcttcaaaaatgttctgacgtaatctgtgctgcctagcattttgttctccaagctgagtggaataatgcctttcatttacatgttaaatggaagcctatttttaggctaaatgtaagtcttaaagtactgagcagaaatatcttccacatcctattgttgcattaaatccctactgatattttaatggtaattgtgatagtacctgaataactattgtgtaagaataaagttaatgtaaaaaaatttttaagtgtgtagtcttactgagtacatttgcttttcatggtatcttttctctgtttatattcaagttttatgagcaatatgatgatgatgaaattggagctctggataatgcagaattggaaggttctattcaagtggacagcaatcgcttacaggaagttttgaatgactactataaagagaaggcagagaagtatagtgacttttccttccttgtttagctgttcttttttttaaaaaagaaaaaattccaaagaaaggtctatagtataactgaattgaggaaaaaattaacctagtcaaaatacatattgagaaaatgaaaaaggaaaaaagaaaaggggaaaaaaaaagatagggcggaaaaaagaaagtggtacattttccataaacttgggtcatgtatagctcattgttttgcctacattttggtgttaaatgttctgaagtagaacgtaatgggaatatacgaggagccactttctccgtatctttgactggagaagagtcatggtagaatgtgtattcgtttattaaatttttttttttttttgagacggagtcttgctctgttgcccaggctggaatgcagtggtgcgatctcagctcacctgcaacctccgcctcccaggttcaggtgattctcctgcctcagcctcctgagcagatgtgattacaggtgcacaccaccatgcccagctaatttttgtatttttagtagagatggggttccaccatgttggccaggctggtctcaaactcttgacctcatgtaatatgcctgcctcggtctcccaaagtgctgggattataggtctgagccactgtgcctggccaatttttaatttttttttaacttttatttattttgcttaaaagttttgttttgatagaagcatgaatattattagggtgtgaaatataagga

SEQ ID NO: 123218 - DNA, 1040 bp, Homo sapiens
gcaattaagagaaaaagactaggccatgagtcttgatgaagcatattgtgatttaggcaggttatactccaaacttaaatattttaattttattctgaagaacaaattcatgatactttaaatgaattttctgatatcttggttctctaaaaatctataaatgatgattgggaactgaacataaaagctccatgctaaatgttgggagcccaagagatcagagggtttttgccttcaggagccacatggtctgaggaggcaggataggtgcagcgaaatgtaactggcaatactatcgtggtaagtaccacttgtaattagaatcttggtacttgctgttcccccagaagtgctttcactgcagacagaccttcctcatggttggtgctcagctgtaaccttcactataggctattccctgagcttgtatttaaaaatcctgcacgcatccctcccctgcatccttgaccctccttccctggtttatgttctccacaacatctgttgacgcagaggactgtttttcagtctcctctcgcaggacaaaccctgaaggcacagtgttttatttattgctttatccttaggtctggaagggtgcctggcattcagtatacagtcacaaagtagtgtatgaatgaatggatagatgggaaagatttcagaaaagaattaaacatagaaccatagcagggcctagaatcactggggttagggaggagagaaaggcctaagagatccaggcagggggcaaaatcttgaagaatttgtatcttaaactttttttttttgccaagacaggtcttgctctggcgcccgagctggagcgcagtagtgcgatctcatctcactgcaacctccaactcccgggttcaggcgattcccctgcctcagcctcccgagtagctgggattacaggtgtgcaccaccatgcccagctaatttttgtattcttagtagagacagggtttcgccatgttggccaggctggtctcaaaactcttgaccttatgatccgcccgcctcggcctcccaaagtg

SEQ ID NO: 123219 - DNA, 1347 bp, Homo sapiens
aaccaacatccaaaatgacggctgctatatataagtgtttgtcatatggaatttaatcgtaagccatgatcataatgttaactaaataactttatgtggcactgcctagtaagggaactatggaaaggtttggatttctccaaatctgggagaattttcaaaataagaaaataacctttatatgatatactatgactaggctgtgtatttcttttcagggatttttctaccttcagggttggatgtagtttagttactattaccatagccaacctgtagttttacatatacattttcttgtggagcaatagagttctccattttacagaagcattttaaatgtagtttgaatattttccacaagatgctgcaatgtgagttatcacttcatttatcttaaagaaagactaaactggttgtcagttacatctgacagaaaaaaaaaaaaaatcactgtgtaaccaggttaagtggtaaaataatccaggcgtcagtcaaaggcattttgctgactttaatattgattatatttttaacaggaatttaagaaaatattactggaattaaaaatatatatatattaaacaagaattttctttgctctgtctagcttaaactactactcaagctgcttaagttcttaagtattgtttgtaatcaccaataaataagtgcatttgtaattcatcagtcattattagcttttattaaaagaagattacgttttacaatgtaactataatctcttgaatttggtatcttattaatgagttttaaagatgtaaaacctaaccttttttaaagctccattgtcttatgtttttagaggcttttccgtaaacatatatcttacatataataaacttttcaaatcttgcaatttggcttgattaatttttcatacagctccacctgtgtcaacaacatgaactacatacactcagatcaagacagaaaacacttccggctccacctggctccctcatgccccctcctggtcattacttcccccacagaaaccactgttttgacctctactgagcatctattagaaacttcactttttttgagtaaaataattatgacttaagatggaagcttgtatgcgtccattaaattcacagcactaagagcttattatttctaaaaatgcaatatttaaatcattctataatgtgacataatttatttctaatgtatagatcagaatactatccaccagagtttagtctaacctgggctaccatgatccacttttacaacggtgtttaccattaatttctagccaaattagaaataaatgtacttatttcttattgggattttctcaaggtattatgcccctta

SEQ ID NO: 123220 - DNA, 2004 bp, Homo sapiens
ttccaacttccagcaaccccttcataccatgccccccagtgtcacctttaaaatgacatcattgcctggaggtgaatctgaatatcccactcaggcttcatttcaaagaaataatctcattgttcaccatgatccatcttgctgaaataagatttagttgtctgtaatctaccaaatcaggtgggctcctttccatctggaaaataaaataaaacatattcgagaggcttttcaaaaacaaaccttgtacatcttcagcctagaggattctttcactgaaaaccagggcagacttcccagtgtttgagggttgcccaattctttcccactcaaatcattagaaataaaaaagtcagtttggagaatttgcttaagtaaaaccaggagtcgctagaagtgaatgagctgaaactggaaggaaatccctttgttcaatgtgggtttcagtgaatgcccagcaggcggctaaaccagttcattaagagagaaaaagacgggttcttaaatgctgttctcagaagcaaatgcctagaaaaacatattgtgacagcaaaaacacatcctggaactcatacactctatgaaactttggtttttgtcatcaacgaataaacaaactttccaaaaaatatttcccccttcatttaaaacaattaactaatctgtttaccatctgccagtcttcactcccacaaaaatgtgattcttcttgttactctggaactcggaaacatttatctttaggattgtttaattttatagggtcatttttaaccacatacttaaaaaagaataattgacgtatgaaaacccttttttccctctgctttagaaatctaaattctgacctgaaaagcaatctgcaagtagcatcctgtcaaactgagatgtgttatttttcctgtctgttctctgctttattaaatcgtcatatactgcacatgattttccccccagaccaggcctgccttgggctctctgttgcattgttaactatttaagcattagactggcgcagagatggcaggtgggaaaagctgagggatttgatctcctccctgccagagttctcctctttcacgagtgctgcttacattgaacagcttaagaataagctcctgtgtgagcccttggaggccaaggagtattgttgaattcagaaaggaatcgctttctttttgtgataatttgaatattttgacaatgaagctaagctacttcactgcctggtttgcgtacctcacgttatgtgcaccctttcctgggaagcagaagaacccctgcctctttgaatacataaattggtattgtccgtttgtgagatgggtaggtgcaaaggaagaatcatccggaagaattttactcttttgctttaatgtctttttaaagctctttcaaaaaaaattttatacaagcctttggagaccacccaattaaaccagcacaataaatgttgagcattttgaggaaagagatggaccataaagatgatttgtaaagtgtttatacaagcaaaacaaggaatatgttggaaacaatttccctaaatgactcaggcaaataacctgctcacctccagtattttcctgtattgtgatgcattaacgttaaaaacagttgtcccaaaatggccttggtttttccatttttaacttaaaaggatgttctcatacaaaataaatggacatagcctttttgatcaaattcacagaagaaaataggcaagtgaataaatcacttaggcgagatataaattggctttgttccatagcagatttgcctttgtactagttaagaaaatcctgaaaagctttccctgtaagaggatcagttggttggaatagccttggtaggaagaagccaagtttgataattacttggtgaacggaaatgctggtttccaaatgctcatcagggttcagtggcacaaagctggctgtagacttggcttctgtagatttggtaaaaacgtaaattcctggggtcccagtgatgctgttttag

SEQ ID NO: 123221 - DNA, 1033 bp, Homo sapiens
aaagaaaataatttctctatcaatgtttaaaatgctagaaattatgcatgcttatactataacaaagaatactttatttggggaataacttaattgatccatgatgtggcatttaccaaggtaatttttccctttttgttccagcagtaggaattagaggtggttcataaaacacacaatcaccatgtaaattgaaaccgcattaagatcatagtcatcttatgttgtttccctaaaatggttctcatttgccccacatattcaaatcagagtgcacaaagatgttgtgctgagtcagggaagatttagaatgctctgtgaacagttttatactgaacttcagagttcagttattgtacttattttttggtgtgtgtgtgtgcacagttgggttttttgtttgttttgctatttgaattactgtttggccattttaatgtatataactgataaatccaggaggataatctgtatgtctgctctctcagtttctttctataacacaagcctgaacatattgctctcctgattaacaactttcagtggttctgattagacaagacttttcgttgcagtcgacagaaacctaatgggaccattgaagaattccaaacaggcaagtgacaggaacatatttgcatgttagaagaatcagcctggcagcagcattgtgattagaatgaaggggaaccgtccaaaaacagactggggaaccaatatggatctgcctctagcatgcggaaatatctctctacactgacctaactgactcactaagcttgtggtttgtttaaaggaagccacatgaaaattgagtttgggccaatagagtgaactcgttctccattctctagcatccctccccatgcaaccaccctatccctgccaagtttctgggcaccacagattggaaagtagcctcctgtaggtatttgcccatgttaagtggtggggtctctttctgtcttcccttcttggtctcacctgtctggtgtgacaagggaagcatgtgccaaccaaggctagacccttg

SEQ ID NO: 123222 - DNA, 1125 bp, Homo sapiens
gctttagcacagcagtgaactaatagaggctgcgtgtatagccatcttcctctggctattagaacgaaccattcgattgagaataaagtttccatatagtttgggtacggtgacatgaaagaagttgcagattgttcagtgagactatcgcttgtagggttgtaggatggaggaagaaagggagagtgagagggagaagtttatttatggaatgtcagggggccattgaagctcagcaggccctagaagcagaggacttccccccgtgcttgttttctccctctgaccttggatgaactagcgagcagtatattatgctgggtgattgtgctggtttgtcatggttagcattctgaactgtcactggaatgtaggaaacggatgaatttgaattaaaccatgaggtggtctgctgagccctctccttgtctcaaggaaacctgtcgctgtttgtctgggctgggcctaatgaaagcaatggagggaaagagaggtgggcctttgatctctttgttgcagctgctccctgggaactcgctgaaatcaatgccctgttttcctgaaggaatgaatggctctgcctaactagctttgtgaagccgtggggaattcactgcctctgtttattgacagctgaaaaggagcacatggggtggaatggaccttcttgtgaaaaccaggcacagggaaaattagacctcaatttaacacagaggaattgggaaattcaccccaaaggagacgggagtttctcatgcttacattagaattactcaagtttggggctagtgtgtaatgaacaatggaggttttgtcacaactatgttataagtaggaatatggtctgcataataaatgatgttaagtagaagttgattctccacccgccctctttttttaaacacagaagtagagtaaaacaaatattaaccatgatacaatcaggtgattcttttatttttgccttgagaggaaagaaaacagtgatacagtaagcattattgatattatatgaaactctctaaaatccatctttcattcattatattttaaaacatctttgaacttggaagctacgttccactcaagccagtgattcatgccattctggattgtgtgtattgc

SEQ ID NO: 123223 - DNA, 1014 bp, Homo sapiens
ttgaaggctaaacttttaatgcaaggaatcatgcaatctagagactgaatgttaaattttatgtctttttctttaaaagaaatttttccttttaacaagtttacactgttttgattttcagcattgataatagctataattattgatctttcactgtatgccaatgctgttttaggagctttatattagttatctaatttgatcctccacaaaccctgtgaggttattattcctcttttacaaatagggaaactaaggttccaaaaatattgttaattgcttaatttataaaattattacaaagtgacactaaaatttaaatacagatctgactccagagtccatactcttaagcaactacctcattgaatggaagtggtacaacccattggcctcaaaaactaggatgacttatttaatataaccttggtgagagaactccagtgaatgattatatccccagtacatggtagctggtgtaatggaaacagcatgagactcaaagatagaatacttgaatttaaagttttaactgctgattattagttctatgactttggcaagtcaatttacctctcttgagcctattatctcctcattcaaaaatagattaataaaaccatctctctcaggtggttgtggcagagatccaatggataatgtttctcagtgttttgtaaatgcttttgaaagatacgtaaatggattgataagtgtttttggtcatttgccaaagactttctttcagtagtatttttcctgagtgcttttaaaaaacaatttgatttatagaaatgtagcaagtttccagagaacctctactgagttacagggtgatcattatataaggaagttctactcataagcctaggtttctttgatgagatacatagtttttgaggaatggttatttcatagtactgcgtcaaggaattcacagatatttctgtcgtgattttggaagagtgggaagacagaggggttaaatgtgtcccctaggcccaaagcaagtca

SEQ ID NO: 123224 - DNA, 1038 bp, Homo sapiens
ttgggcccaggaattcaagactagcctgggcaatatagtgacaccttgtctctaccaaaaaaaaaaaaaaaaaaaaaaagccagtgtggtggcacatgccagatcttgcctttcagggaagatcttggtttcctcctccagaacctctgatgaagtagagccaacctgccattaactctgctgtgttcggaggctgaggtgggaggatcaattaagcccacgagatcaaggttgcagtgaaccttgatcacgtcaccacacttcagtctgggtgacagagaccctgtctctaaataaataaataaataaataaaagccttgagtaactgggggagattataaagctagttaaaatcaattaatagtgatttctagaaatctcgtaagatgtaagcattttaatttaaaggtttctttttagctaccttttaactgaaaatgtttttaatatatttcagtgttaacgaagtaatgaattaacttccctcccagaaagtcaagaataatagcatgtatcttcctgtggaagatgaacttcagagctccatttccctagttcctatgtataacttggttatacgcacaccaaaccatgctaataatgcattctcctcccctggctgcctcttgaacttagatcatccaggagacgtctgtaaaattagcactgtaaagaaagcctcgccagggtatttggggcagcatatcaatggcttattgagcaggcgccttttaagcactgttgaatgataggcaaaactgtcacagctatgcataaatgtgctgtgtagtttcacagaagagaatattagtcctcagtaataatgctatattattaagctaataaacctacagaaagtttgtcacaataggtgtctgtcaaattactataatctgaacatgatctttggagttttagatgtctctattggctgaagagcctaattttgaagcttttatctgttcaaaaatttcagttctcccatcatcatctctgctcaattgaatatgtctttttcaagagtaatcttgactatg

SEQ ID NO: 123225 - DNA, 1037 bp, Homo sapiens
gtgatcattttttttaaattaataaaattgaactttctcttccatttgcattctgaaatacaggaaaaaaatttgaactttctaatatctttccttcctgcttctttcactcccctcagcaccttggtttaggcccttgtcaccctatgctatttttccctgtattgacttttcttcccttcctatcatgtgtagtgaccactggggtcagttccctgaaaaagtcctttagtggcatcccaatacttacaagattcttggcttcttagcatgacaatggtccttttttttgtctggtcctaacttactttactggccttctccgatttctcaaaactaatccagtggcacaggtggtcctaaccacgcatcagcccctaaaggtttcactctcctgcttttgcagctgtgttcttatttgtgccatttcccctgccttaaatgttttctccccaactaattttcaaccattttttttcaagctctgttcagagaatactcactctacaaccctactagctacatagaaaccctataatttataatctatagcccttgttaaattcttacctttcgtcaccaatctttatatctaaatgtcttttccagatggtcaggttcttagatagggttcaagtggctgacatgatactttgcatacaaagagctattgccaaatagctaccactactaagtacctactataattgtgctacaattttgcaaagtaagtattattatctcttttaaattgtgaagaaacttagtatcaaagagattaggaaactttcctaacaccatatagttagtaagtggcaaaactggtttgtctgaatcaaagctcttgctctttcttctatgccatactgcccttgtgctaaaaatgaagaaataattaaataaaattatgaacagaagcatttatggtaaaacacacactgaaaatgacatacacagtgaaagctttgctttcattgccaatatactatagaatcttcactttggtgaccatgatagttgctatggattaactggtg

SEQ ID NO: 123226 - DNA, 1084 bp, Homo sapiens
tttcccattccatatgagttttagtacctgtttatgaagtttcttgaaaagtcctgttgggatttttatagaaatggctttgaatttatagatcaatatgagaagaatgggtatatttgcaatactcaattttttcatttatctcacatgtcctttttgtgtccttcaatgatatgatataaataaaggacttgtacatattttgttacatttatttctagatcctgatgatttttgttgctactgtgaatagtttctcttagtttcttattttctaaccagctagttactacttcataaataacattatatttccatttacataaatacataatttgcaagaaatgatttttttcttttccttctgatcttcaaatctcttattcttttgtttatgtctaatttcactggctaggacaaccagtacaatgaagaatagtggtactgatcatgggcattcttattttgcttctgacttacataagaatgcttttgtagcactgaagcttagtgtgatgttgttgcgggatatttaaagttctcttcttctagttctctaagagttttatatcatgaattgtattggattttattaagtattttttctgaatctattggactgtgaagccagattgcttgcattcaattcctagttctgctcctctgctgccatgtagtataatcttgggcagttacttctctgtatctcaattttctcatctttaaatttaggtacaactgtctaccatataaggttgttgagaggattaaatgagttaatacataaaaaggggtaagaattgtgcttagccctaggaagtactcgtttttttcttcattacttagtgttaggttattttaatttaaattatcataataagtaaattaattactaaatcatcttgcactcgaaagtaaccttacacatatttattcacatgatttggatttaatttactgttttaattttttcatgtaatattcatgagtcataaagtgactgttcttttgctatagcaaagaatgatggattcctagaacaacattacacaagagcttagcaactgaggtggcaacattccca

SEQ ID NO: 123227 - DNA, 1178 bp, Homo sapiens
tgtgcaactgtcatcccagctactcgggaggctgaagcaggagaatcgcgtgaacccaggaggcggaggttgcagtgagccgagatcgcgccattgcattgcagcccgggcaacagtgcaagactccgtcttaaacaaacaaacaaacaaacaacagaacgcgaccaggagtcccggaagcctgcgtgcacgaactcccaagaccacaagtcccagcatgcaacgctccttgttggaaaagggcctcccttagccactaagtggaccatcatgcaacattctctgatggggcggggatctccatggaggggggaggcacacttgttgcgtcgcctcagcaactccaattgcgtgacagaatgtgcttccgcttccgcctctgagccctatgagcgagagttacgctacttagtcgttgtgacgccattcttctgcgacggcgcggacctggagcttccgcgcggtggcttcactctcctgtaaaacgctagagcggcgagttgttacctgcgtcctctgacctgagagcgaaggggaaagcggcgagatgactgaccgctacaccatccatagccagctggagcacctgcagtccaagtacatcggcacgggccacgccgacaccaccaagtgggagtggctggtgaaccaacaccgcgactcgtactgctcctacatgggccacttcgaccttctcaactacttcgccattgcggagaatgagagcaaagcgcgagtccgcttcaacttgatggaaaagatgcttcagccttgtggaccgccagccgacaagcccgaggagaactgagactctgccttaccaccgcagtgcggggcacctctcccagcgtttctccggtttgccaatcctcttaagtattcctgtctccaaaggaccggctctccatggctcctgcgcctcgtgctttccgcgtacagaagtgcttgcccggggagtcccgcctgacctgccttcatgtggacccttagaacagcactgggagaccagcaggactcctgagaactgtgctggtggagaggtcctagagccggcgagcgtttgagaagagggcatggcgctggagtgagatgggatttggcgtctcgtttttggctaattgattgtcattggctttttccataaagtttagaaatcgttcagtctcttggtgtgaact

SEQ ID NO: 123228 - DNA, 1590 bp, Homo sapiens
ttgctttcactaggactcttctccttcctgcccccattatcctctcatgttttattttcaaattttataaaagataaatgttgttttatggagcaatgtctcaacatcactttactgtgagaagcactttacatatattatcttatttcatttattttatctaatttcccccatttcaattttacttgtttattctttaagtattctgcctctattttgtttttcctactttgtctttatttatatttccattaaaaataatactttcacatccttttgaaattatatttattcctagttcagcctagaatttttgtttttaatccatatttatatttttcataaaagactaatgaatctagcttttttttttccccgctcgctcccctctccaccttagcaccgctcaggctgcactgcgcttgctgcaagcttcaggctcctgctaagctagtgctgcatcgtctcccttcagccgccatcatgattatctaccgcgacctcatcagccacgatgagatgttttccgacatctacaagatctgggagatcatggacgggctgtacctggaggtggaggggaagatggtcagtaggatagaaggtaacattgatgactcgctcattggtggtaatacctccgctgaatgaccctagggcgaaggtacagaaagcacagtaatcactggtgttgatattgtcatgaaccatcacctgcaggaaacaagtttcacaaaagaagcctacaagaagtatatcaaagattacatgaaatcaatcaaagccaaacttgaagaacagagaccagaaacagtaaaaccttttatgacaggggctgcaaaacaaatcaaggacatccttgctaatttcaaaaactaccagttctttaattgtgaaaacatgaatccagatggcatggttgctctattggactaccgtgaagatggtgtgaccccatatatgattttctttaaggatgatttagaaatggaaaaatgttaacaaatttggcaattactttgatctatcacctgtcattgtaactggcttctgcttgtcatccacacaacaccaggacttaagacaaattggggctgatgtcatcttgagctcttcatttattttgaccgtgatttatttggagtggaggcattgtttttaagaaaaacatgttatgtatgttgtcgaaaaataaaatgcatttaaactaaaaaaaaaaactaatgaatccaatttgtatttttattttattttatattttatacctttttatttccttgatcatcagtctaattgttttatcttataatcattacattcatatttaatctgtattttaatttcaatatttgtttttttttaaattttctctctttcttgtataattttacttaaaatttttcttttttcttttttttttgagacagactcttgctctgtcatccaggctggagtgcagtggtgtgatctcagctcactgtaacttccacctcctgggttcaagcaattctcctgcctcagcctctcaagtagctgggattacaggctcttgccaccacacctggctaatgtttgtatttttagtagaga

SEQ ID NO: 123229 - DNA, 1050 bp, Homo sapiens
tatatatttaccatcctgcccagcataaattcctattccctttgccccttcctcaaagtgtctgtttctggcttctggccagaggctatatttcctcgcctgtcataatggccatcctgcaggctggaactctttatgagaaataaagctctcctttccaaatttaagaacctcatcattcttcagttgacaattgtatttgccacagcaattgcaggagagtagaatgagatcatcagcaacagatataatttttaaaagagagaaaattgggagagggacatagattgcattcttctgacttattaaacttttttcatgtaaaagttttgaaatgtctaatttttcatcatcaacagcctcttcttaaagaaaagtctgggtaattccctgaataatttctgaaatagcagagttctaaactctaacttttcaaatgcacaataagagaacttattgtttctccctgtgtatcacacccactgggttagtcacaaatagctatattaaggatgtttttcacattttttaaacactagcaatttggacccacccagttcagctttttaaatgcaacctgacttaaaaaaaattgtttttaatcccacataagaaaaataagaaacccgtaacactcggaagatgtgcaaaataatatatgatatcctgcttttaagagcagcaaaagtgcaccagagagtataaagtggaattgaagtctattattataaagctcttttactgtgattcagtgtaatgcctaattccattagtgctctacaaagaacaacatgcacaaatgtactcttttagctgcagataacaaatgaagttttaaagtggcctaacgagttaaagtgacctcaacattatattaattgagtcaattagtcaatttctttctttcttttttttttttttttctttgagactgagtcttgctctttcgcccagactggagtgcaatggcgcgatctcagctcactgcaagctctgcctcccgggttcacgccattctcctgcctcagcctccctagtagctgggactac

SEQ ID NO: 123230 - DNA, 1031 bp, Homo sapiens
tttgagggaagggaaatctagggcagaggtaacaataaattgcatttgtatagggcttgaagcttctaaagcaacatctcattcattgattctcagtttctcacctagccttctgtgaagatggtgttccctccattttataggtgtggaagacggagggtcacactgggatgcattgttcgtggtgaaactttgattctgtctcctgagaaccaaagattctgcatttggcaattagaaggagtcatcctttgccttaagtgtactcaaattcctctggccattaatggcaagtaacctcagtggctatcactatttaaatagccttctgttattcttctttctccccattttcctctgtactctgatcaccttttctgctgtatctttgcaacctgtaagggattttcattatcaagaagagaaaaatttgaaaaatcaccttgaggagagtggcaagtgaaacattatagtgaagaagtgttactgataatgggcaaatggaataaagtagtgtgtaaacagttgacttttctcttttatgggtgaataaaggctttgggtagcatagaagtggagatcttggctaagaccaatagtgaagaaaagcattagacttactgctccaaagtgatacactgtagttctttccaggaaagagaatttttccctgggcaaacttaattttccatgataaacttttatagacattcttctgaacaaagtttttgattcttgaatataataaaatacacttaagaatttagcaaatcctttatagttatgtacttgaatgaaagaatgtaatcatataataatccataaatttttagcagtagtagagcctataaaaaatgaaaaaagttttttagactctcataaaatctgtcagattgatgatccaatcctttatatccaactctctctctctctcttttttttttttttttttttgagatggagtctcacccactcggtcgtcaaggctggagtgcagtggcagcgatcttggcccactgcaacctttacct

SEQ ID NO: 123231 - DNA, 1067 bp, Homo sapiens
ttctgggctcaagtaatcctctcgcttaagcttcccaaagtactgggattacaggtgtgagccacctcgcctagacccagatgccctttaacaagttttcccacttactttattttttttgagatggaattttgcccttgtcacccaggctggagagtaatagcacaatttcggctcactgtaaccaccgcctcctggattcaagtgattctcctgcctcagcctcccaagtagctgggattacaggcacctgccaccacacccagctaatttttgtatttttttttaagtagagatggggtttcaccatgttggccaggctggtctcgaactcctgaactcaggtgatgcacctgccttggcttcccaaagtgctgggattacaggcgtgagccaccttgcccggcctagttttcccacttattttacaatacttactgcatttttctgtctgtctgtgtgtatgcatatatacatctacatacatatatcaacctaaatatacctatatcagtatagacagatatatgctattctgtttgaacttaagttgaagataccatcacacttcattgctaaatatttcaccacatgtctcttacaatcaaagacattctcctgcaacaataccataattaatgttaaagaaatttaacattgatacaataatattgtctaatacatagtccaaattcagatttttcaaatgatcctcaaatgttttattttaaaattctgaattcaatcaaagattacatttcattgtcatgtctatttagtctcctttaattcacaaagctccccctctcccaggtaattttggttttcaagacgctgacagttttgaagaaaccaggccatttcttttgaaaactagccacagtctagatttgtctgctcatgagaagattcacgttcaacatcttggcaaggatattgtgtagatgatgtggtgattttccattcaattgcatgatgccccatgattggttatgtgaattttgatcacttggttaagattaggaatttttccccaacatattactatgaaaaaattctcagacata

SEQ ID NO: 123232 - DNA, 1039 bp, Homo sapiens
gaaacactggcttgtgctccattctttgactgctccatgattctttctgccacttcacataggaagctcttaccttttctctttctgtttccctttttggctaattaaattcttgtcatctttaaaggcttggctcaaatgtctcttcaagaaagccttctctaattgcccagggcaggtcagactcctctgctgtgtgctcttaatactctgtgcttctcctttgtatgatttgtagtctgtcagtattgtaatgaaataattcattatgtaattaattgcttagtgtgcataagcgccgtaatggcagaggctatgtctcttgttcatagtcataacaccattgcctggcttggtgctttacacgtggtaggcactcaataaatatttggtgaatgaatagttactacgaataactatataaaatatataaatacattttttcaagtcagtactttcccttttccttttaggtattgatgtcaagctgaaccatcgtaggaagttgaaagccttagaaagaggacttggtaaagtttttggattatcttgaaactctggcaagatggccaagtatggagaacatgaagccagtcctgacaatgggcagaacgaattcagtgatatcattaagtccagatctggtaggtaaaggaagctcaagaaagctatggatttttatgtatttagaaaacctatgtttcttggattgatttgcattgttcttgcaagaacttcttggaggtgaagttcttttaagaaactgaattctgacaaatgactataattttgtaaaaggtatatgtaaaaggtataatatctctgagtgtcctatcctttctcaacccaattttgtgcttagtgaaactgctgcttgtagctaaaggttgttcatttggaagactactccattaaaataaaatacgaccgaacatttctctttctattttctggaaattgaagggattatatgcttaatgtaggaagtgccacagtttctggcaggaaagatctttcacagtttgatttcattaccata

SEQ ID NO: 123233 - DNA, 1236 bp, Homo sapiens
tatcccagagccctgtagaaagagtagacctcagggctaaggacagtgtgtcagctggctccatgtggagttcttgacagtttgggattatagactctcagctgggaaagaactgtttgatgaatgaaatagttgggcaagcttcacatttttggataattcaatgtgttcttcaagcgaccttgggctggaagcctgtgtgtaacaattttatcatttcttcctttgcattttctcttcttgtctaatcttaggatctaattgttgagggaaccttaaacgccctataacccagccattcctgtgatgtgctcacccagtctctgtttgcacacctccaatgatggcatctcactgctgctgctgatgatgacgattctagcaacttacactaattgaacacattctgtgtgcagatgtggtgctaacagtttaatcctcacaaccgccattttgcagatgataaatgtgagccatactgaagtgatttgtggcactggacttctttctatttctccaaaggcccagtgtgtcttcctcagggcctttgcacatctctcttcttccatctttgcctggctggttccttcttgtcatttagatgtaggcctaatgtcacctcttcagagatcttccttgctgactttagaaagtagctctcccagtcactcttgactgcatctctgtatttacgttccctgtgttgttcttagcactctctggtaccttttctggtactgtgtgttcattaatagccttcccactagaacagggctccccaactcccagggcctggactggtaccagtccgttgcctgttagggaccaggtggcacagcaggaggtgagtggtggctgagcaagcactaccgcctgagctctgcctcctgtcagatcagcggcagcattagattctcataggagtgagactctatggtgaaccgcacatgcgagggatctaggttgcctgctccttatgagaatctaatgcctgatgatctgaggtagaacagtttcatcccaaaaccatccccctcatcccttggaaaaattgtctgccatgaaactggtccctggtgccaaaaaggctggggactgctgcactttaattaactccccaagagcagggaccaatacatccctggtactgagcccaatgcctggctcataataggtgagcaataaatgtttattcaatgataaaggctacagagtctggaagtgccagagctggca

SEQ ID NO: 123234 - DNA, 1026 bp, Homo sapiens
tcctaactcacaagacattttattccattgctgctcggtgactcttcttcattttgtgcctaattctgtcccttacacattttgcactgtattaattgtatttatacagctcttctatctctttttttgtagttttcaggggtgggaccctggactgtgaggtagagctcctctggaccccaggttagtatctcagagccctgacaagggaaggccaattgtaagagacacagcctactgcttctgggccagttgcatcctttcttgatttttggctctagtctctgtcattctctgttgagttagcaaaggggaaaataccagaggacaaacagtcctttgggtggaagatagagaaatggataatgtgtttctgacatgaattcctttttctcttttcttctgactactgctcaaggcttttaacgagctgaagttaaaaaaaaaaaaggtagtggatttcataaggactgacatttggcacagtgtaggtcctggtccgatgcccagataggtatctgtggtactgaaagagttggttgaggagtgtaggggaaggaagcaaagggttggttgaggagtgtaggggaaggaagcaaagagagaccagtgaaataaaaataaaacaaattattaaatatgaaatattataccaggttacatttatagcaagcctcctgaaaatctgctatgtttggaaagtaaacttgcttaacaagattcaattttatgaaaattctgaggaggattaccttatttgtttatctttctgaggcctttcttgaggaaagacagtggttaagttgtatttaggcagtcatcggtctatttctttcttttatgtttaaagcagtatctgtgaggggatttttctaaacagctcaagggactgtgaaaaaatagttcattttttgtttctcctgaagctttccttggctggaatacctgtgctttgaagggaggtctttgagcaggtttgtttttttccatgagccctggggatttgtagtgatagacagtaaccct

SEQ ID NO: 123235 - DNA, 1028 bp, Homo sapiens
ttaaaagtcatagaaccaaagtgaaaatgatctgcattttagaggagcaaggaaagctacaacgtttattatttctacttataaacacttccctttaaataatttgaaaagataatagatttcatgatgttgggcattttttcttttacactgtattttgaagagtttgggttgtgttgggtgaagttaaaagtgaggaaagtgggtcaggagagtgatgaaacctggtgcatttcttattttggcccattgaaccagaagatgataccaatatatctagtgccgacatatttctccactgcgctccttagttattgctgcagtgtgttcaaggtcttcttgctgtgagtgtaacatcacatcttgaactctttttctagggaatgcatcagcttagagtccgctgatgcattcattataaaaatgtattgtgtatattttctattacattatttcaaagacagacgtgtttttgaatcatggtgggaaaaaaactcctcacattcaacctctatgctagttttcttatcttaagggggggtggttagagaaatgtattatatatgtattaatatttgcctccctgttttttaattctaaataggtgacatatttaatataactatgcttgcttttgaaataatttgcctaccattctttaaaatgagtgaattttaaaagatgtatagtgatttttatgtgaagatgaattaaagagttaagtgacatagaccaccgtagcattttccctatggatctgtaaaaacagcccaaaagtcttgtgatttttttttttttttgagccgtagtcttcctcttgctctgttgcccaggctggagtgcagtggtgccatctcagctcactgcaacctctgcctcctaggatcaagtgattctcccacctcagcttcatgagtagctgggactacaggtgtgtgccaccatgcctggctaatttttgtatttttggtagagatggggtttcaccatgtcagccaggctggtctcgaacttctgacctcaagtga

SEQ ID NO: 123236 - DNA, 1312 bp, Homo sapiens
gtatgaatatttacactaagtggaacacaaacagggttataaatagcctcaggtcagttcaggtcacgttttgctgccaaatgggttatggaaaaagcctttggtttccagagcttttcagatcctggcattgtggataagggattgtgcacctggtatggtgactgctttctcagtgtccatttggtgccattttacatgtattgcatttgaagtactcacaacaaaaatacctatgtatatatatacctctctctatatatttttttccttatttatttatttatttatttaacagctaaggaaacaggtttcatgagctcgaatggcttacacaagatcaagaggagatgatctcctttgcaaacagaggccaggacccagggcctgggcacttagtgggctataagagtttctaatttgcttgtttgaagcattggaacataagccagcctgcagaatcctgtttcacatttaatggtagctgaaagacaatactgcagtaaaagtgccataggatgtaattatcctaacattgtttcttaagaaaagacatcttaagttcaaccagcggggtcaggaagtggggtccctggcctgaacagtggcttatcttccttcctggatggctggcaggggcagtaggtcagtcagggcactgttccaggacccagtggcagtgtgggcagcactgtggtgagatgggaagagaggaaggaaggttcgggtgcttgatgtgcattgaaggggtcagggaagggggaattggctactggctgaggttctgacactagttggacagggcccgatgccaaactcttgttcttgttctcacctagaaattgccattagttagtgctgctgctgggcattattttaacttagaccaaggcagcccttttgcgtgggcaattagataacggcgcccactctggagagacacagtctgatggacacactacttcgtgggctgtgcctttgtgcaaagcaaaaggtgttctttcctccgtgccgctgtgctggctggatttcagcgtcgtttttcaccttggcctcgtgcctttatgcagtggacagatttcaggcagcttggcattagtaggaatctacctgaaaagcactttatatgtgtttgaatccttggcatgatctggtgatgatctggcagaataggtattaccatgatttgccagatgagaacgtcatggcgctgtgaactgctgaaggtcgcctcggctccattgctatctggacaggactgttccctgtacactccctctttcaaaatggaagaggcagctagaggatttca

SEQ ID NO: 123237 - DNA, 1053 bp, Homo sapiens
agttttctttttaattcatcattccaagtaggtgtctttgtctgtttccacattagaaaatgaaaccaatacttaaatatgatttccctgcttttattggcagctatttaagatctatgtctgaggtctggctccgtgtggtttggaatactttattgttattattattattattttgagatggagtcttgctctgtctcccaggctagagtgcagtggtgtgatctcagcccactgcaacctctgcctccctggttcaagtgattcccatgcctcaccctcctgaatagctgggattacaggcacacgccaccacgcctggctaatttttgtagttttagtagagatggagtcttaccatgttggccaggctggtctcgaactcctgacctcaggtgatccacccgcctcagcttcctaaagtgctgggattataggcatgagccattgcgcccagcctggaatattttctaagctctttgatgatggcggcttcgatttaactctctctgacttaattctgttgattataatgtcattcaatcccattagtatactcatatggaaacaaaggcatgatttcagattttatttatatcttcatgctttggaaaaacaatttcatgagaaatcactcagcccatgaagtaccatccttgacattacttttttgggtttgcttgtttttaaaacagtttttattggcttttgctttttataattttttgaaccataccaacagtcgcataatgagtatttttagacatgtgcttttaaaatcatgtgaaaattcttttaatgtcaacatgaagagttttgtttataatcattgctgtgatcaagaactgaggtagaatttcctagctggacacaaatgggttaaaaaaaaaacccgacatgctctttgattattggataagttgtattctaaacaatattactctgatgaagatattaaggggagttaattagattgtgagactcttgaggacagttgatgcctttttcatttttgcattcttcttgggtgccgtgtagttgatcagtatagtc

SEQ ID NO: 123238 - DNA, 1238 bp, Homo sapiens
aagatcactctgggctctgtaggagagtgatttggagagaagagcccctagaggcccagggaacattgcaggtggctctgccaggagaccaggtagaagatgtggtgagggtgggcgggagatggatgaaactgtggatttcgtaggtacagattcatcatccttcatctgtagctacactattgaagaagacctccgaaaaccagaaggtgttttatttgtagttcatttggcaagaaaacttgagtttgacctgaactcatttggtgttgaagcctgacttgaacagctgggactcttttaaagtccttatgtatgtcaggcatccttcataaacatatgtatttactgcagggctattaatgtgtttgattaggggaaattgccctggatcttgctgttttttgttttcactgtaatatatgacttgtgctatataacttttctcaaatgggaagagttctggttcagcagcacctctggccctagggttttggaaaagaggttgtgaaactctttgacatgtgtttacaggataaggttgatgaaactgactgataagaaatggaggcaagatctatggaagaaaagaacatttctggaaagactcaaaagttaatgatgacactgcctcattaacactgaagggaagtagaactttaggaggggtcagaaatattcattagataggcatgattcattgaaaaggatgcatcttgaatttttgaagtattgcttgtatgtgatcttggattgaattgtagaccagaaaaagggggcaattgcagaaatttgaaaaagacctatagattagttcatagatttgcatctatgtgaattgtctggttttcatcattgtactctggttatgtaagatggtaatatttgaggaagttggatgaagggaacatgagaactctgtgtactcttttcttttttttttaaccacttcttttataagtctaaaattatttcaagataaaactttgaaaaataagaaaaagaggtgtttgtcatatcagggaacagtatcattcatgatgcttttaggtagagagtatctatgagcagaagtctagttttctaggagaattcaaagtctagaagtgcaaatcgagtagaatttcagtcaggccttcaccccctcccaattttttctttttaaaaaagctgacctggtttctattgtaagattatctttttatattctgatctgagaaaaatgcttgactgtagcg

SEQ ID NO: 123239 - DNA, 1954 bp, Homo sapiens
agatcgcttgaggtcaggagtttgagaccagcctgaccaacaaggtgaaagccgtctctactagaaatataaaaattagccgggcatggtggtgcccacccataatcccagctactcgggaggctgtggcaggtgaattgctggaatctgggaggcggaggttgcagtgagctgagatcacaccactgcactccagcctgggcgacataacaagactgcgactgcgtctcaagagaaaaaaaaagaagagttataaaatggagagctcatgggaagtgccataacttgtcctttgcatttagtctccctggtgttggagggtgtggtttggctctagttcttgttggtagctctgcagggcgaggtatagttgtattagttaggactgacagttataatatgatgttcaaagccaagaaggtttacagataacagggaagaatgaagaagatgtgtacccttcatggccaaggtcagcttgcctggattttgtggggctgatgctgctgggtgtatatttcctccgtggagagaggattagtttctgaattcctttgcttccctctctaacttcaacattacctcctgtagtttcagctaatttgttctgtaattctctctccactccaattctttctttccttttttgatgagagtagacctaggctggcagccagttgctattgagctataatagagctagtggtatgaacaaaatttgattactgctgtcaacactagattgaataagaaagcgcataccctagacagatacttgcaacataaatggtctattgatttcacaagaactagaaaatgaggccaccgtgtaatctagcagaagaatggatctgtgaatagagtgggtcctgacattgcacaacagttttcaaaagcgcccccctattgatctttttagaagaatcttcagataaactgattttagcttctgattttcctcaccatcaagtgtttacagaaacttcaatgaagcctttgcacttgtgtgtgttcaatggtttgcttttcctacatagaatctagtttggaagttatattggctgttacagaccttgtttgctcctgagctatcatgatatttccacttagcttaatatgaatgttttagaagtttcccactatggaaagttctatttgacatatgaaagttcaacggtcaatttcatagtcagctccacggcaagaaataaataagacaatggattacagagtatagccttgggacatgggaaattttttagaagatggatgagtcatattattaatacatgttgcaaggcccaaggccttacatcaaaaaataaggaaaaaagtttttattttttaaagttaatagccttctgatattttctttgttgtactttgtatagtttttgttctgtttagttttggggggatcaaaaaataaatcctaagatagaatgttttaggaaaaaggtaattaacatcattgtacatgaatttgctcaaacacagtaaggtctgaaaaaaaaagatctctttgatgttgatttgtttgaataattactattctcccagtactgcacttttgagagggaaggagaaattgttgctagtgtctaaattttaacttgtcttccttggctaccttcaaaatttgagatccttaatcttaaatcacatctggtctaacaattcttcctataaacagttatgactatttactgacaaaaggctgcttttattgtgcctgtttctatttcagaggaagacacataaagacaggtggaaagaactgatttgtaaagattgaaatgtcatatttacattcagaatttcatttccttaccagttttcagaagaaccctttggtagaggaagcagggccaacttctttcacagcctcttactatagatagaagtatgaaggccagcaatatttagctggtatgaacccatacagctgtaccag

SEQ ID NO: 123240 - DNA, 1064 bp, Homo sapiens
gctacttgggaggctgaggcaagagaatcgcttgaacccgggaggcgggggttgcagtgagctgagattgcgccactgcacttcagcccgggcatcagggcgagactctgtttaaaaaaaaaatagatctctatctctatcactatctctctgtctatctatgtatcatctatctatctatctatctatctatctatcatctatctatctatcgatctctatctttatccagctgtatcatcattttcactagatgctaacaataatataactgagataaaccaaagtttcaaaacaagcttgaaaatgtgaaatgaataatttggaggcgggactggccatttaggcatctatgaaggcccagatgactcatgtctggaaattgccactgctcaggaaaccactcctgggagccctgctcgttttgccatccttcctgctttcttgcctgctgacaggactctatgtcagctgtttcctttttagatggaagggttaaaagattcactacttgggtcccccattagaatcaccaacatgcttgtgccccacagtcagagatcgtgacttgattggactgaggccctgctctgtagcttgtcaaaagccagccaagggtgtccaatgtggagggtacaggggaatgtattcgtcccccactagactgaaagctccatgggagggagtagaggcagctttgttactgctgcctcctagcacctgaatgtgtgcctgatgtgcagaagaggctcagtagctgcttgtggaatgaatgaatgaattagttcctttgagtaacaggaagttggaagaagattggacagaggcttagttatggtctttgctgatgtaggagagtgtgctatgttaggctgaacagtggctgtcatcttggaagacactccaggaaaaggtcacaggggaacaggtggctgatctgggggaatgctgaacagacctctcagaagagacaaggctccagggcagtggtgtccttatgaggcaaggcaggttgagaactttgggaaagagaatttcatcaggggctgagtgtgtgtgtgtga

SEQ ID NO: 123241 - DNA, 1002 bp, Homo sapiens
ctggggcaaatatgcttttactgttaaatcgtcatctacaacagatgacatgtagagagatgaaatgtagtctatagttgtttgaacttgcatttctttttttgtggaactgaacttctctgcatatgtttattggctctttggacaaattcgtcagtgatttggcttttcatgcattgctcattttcttttgttgcttggatccctgacttttatactcttaatgattccaagggaaattcctacaaaatggcagatttgggaggacttatttgaatttcttttgagttctaaaatggttaactgctaccttaaaagatagatattattttcagatatctaggacagaggtttgagtctttggacttagattctatagtattttctttctttttttggctgatatggaagacgtcatcatcccaaactgtgctgagactagtagttatttagatacactattttattacattttcgtatactgataaattatttccatatggatggtaagtcccagatttatttatgaaaaaaaccattttttatatattttatggaacatggagttagcagaaagatgctgtggagttaggcttaaaattaagccctaactattctgcctcctgttttggggctgttgtcagtctttaaaggtacatctttgtaaaattttttgaacataacttgacagattgcaagaaggattataataaatggtgtctgtttgtgttagagtatttcaagtcagtacaggaaaaaatacatttagatgctaagtgaagataagacattagtttaaatgaggccccgtatgcaccatcatattgaaaatttaccagtgtgtcctcgtccttcaatttagattcgttagtgatttttcacatcaaagcattgaagctgtaattctatgttgggttcatttaaccacagatccagtaaatggcaggaaatagagagctatacaggacagcaaatggcctgcagttgtgtggaggatatctt

SEQ ID NO: 123242 - DNA, 1040 bp, Homo sapiens
cttgttcttccagacttcctcacacccacccatagcctgcttttagttgatagtggctcagcaagggtaggagcctgtactttggctcataccaaattcccctcatttccgcacgatgatatgttattagtattctgatccctgttatttgttaagttaagctgtgcttcaggaatctcagaagatcacagcattttgttttcagtgacttcatttcataatatatgctctgggcaggtgagactagacttagagacattgaagcccaacaatttaatatccacaaatagtgttttatttgtagtcttcctatcctttcctcttcggtgttctagaaacagatgcttacattgtgtaaacactccttctgttactgattctatggtatccattttcctattaacaggatgaagattttgttttttcatcctcaagtctacaagaacggaatagtcagtgggatatgaggatcagataaaaatccccccactttagaatcactgatcttagtacttcctgcagaaactctgacagccttattttttttcctcctttgaatccacgtaggtgtttttgggaaacatttatttgctgatattggttggtaataataattgttatttttatttcaaataagatgctgctggtaaaattattgtgaagtctactcaacttagtaaacttatatcaaaagccaggttttacatctggtagaacagagatagtcaattccttgctgtagggagaggaagggtaggagcctgtggctccctccccgccatcttgtccccaaccattcttatacactagtttgattcaagcacttgagctttggagccagactgcctgaatttggattcagctacttttacctgggcaaactgcttaactttaaatgtctgtgctctttgctgaaaaatgtggacaatagaagcatctatcttatatggatattgtgggtattagactatatggtagtccatttaagaaacgttcagtaaatgttgctcatagtaacagcaataatgttactactccta

SEQ ID NO: 123243 - DNA, 1056 bp, Homo sapiens
tatcctttccatgttttctcccatagttaaacaaggagtttttacttcttttgggcagtagctacatagtatgagacttctagtagtgcactatgctaacatcatcacacttgaatgttttttgaaaatattttacgtaaaatacatgtcccagatggactctattctttagttggttatctagaattaacatttggattatgtttgctaaatgcgtcagccatatcctaagcgctgtgatccttttagaactattaacagatgagactggggggcattttatggttataagagctaaatgatatttatgcaagtgtgtaaacattaataactcagcgtttataagcatgttagaatatttgattatggctagggaaatgcatattagctatctagcacagatctaaaagtgatctgggctatacctttcatttctggatttctttccttaagcttaaagggtgttctaatttcattattatcaatctcaagatcatttcacagtttcctggtggttgggtgtcatggtgactttttgttttccaggctctttgtttggatatgtggccttgtttgagttgtctttgattgctatatatctgtacccttgtttgcttttgcctggctactgattctcagtgtttcactttgacctttgataaagctgtgactctgattcatttttaggggggattcacctcgttggtggaatctagccttgccctgccaggcggctgcctgggtgttgcttgctggttggaatgtatccattgaaggccttagatgttggagtccttgcttcctagctccacctctttgtttcagggcaccactcttctggtctagtgcacagcctggtctctgtcaatcagcacgttctgcctggcgttttatggcatgttttcttcccccccacatagggtagcagcctttttataagttgtaatgggtttttgatacccactgtcatttttcttttcttttttttgagacagggtttcactctgtcacccaggctgaatgcagtggcacgatcacagcttcctgcagtcttga

SEQ ID NO: 123244 - DNA, 1040 bp, Homo sapiens
cagattgtttaggactcttctacaacaagatgaaaaatagaagtttctcagagaaacactgttgtggtcttttaaatagtataaaagctattttaatgaagagttgcttttcaaaatttttggttgcttttcaaaagttgtaaaggtcagagagacaaacattggtatttcttgaggaaaaatgaggatatcttaaggttactttgagtagcagcatagtttaaaaaatgctccacgtcccaatatttatagttggttatttgatttcactgctttttgggctttgcgagtttatcttgaggggtattttatcttgcctgtgagtatgtaaggaacatgaaaaccaactttgacagagggttaaaaatacagagaattagaacataaaggtgcttgcataattggcagttatatgtgtaggattattccaaatcacatgcaggtgtgttttggtaaattttagtttgttttattccagagacacaggtaacatatgtgcatctcgggcttgacatgaataaaaacttttgaactattcatctgcatgtgaccattttccagagaatgtagttttagcaactgggagtctggatatgaggtgttttattccagtggtcttatgattgctcataaaagtaagattatttttcctggttattcacgaggataacacagtaattgtttagatagaacaagtgaagcagtttttagcagcttaatttagtctttggggaagaattgccttagaactaattttgaagattgttttgaaagcattaaacttggtagacctaagtttagagagcatttgaaactgggtaaattactttttacctatttatgaaaatggagagaaataggtagtaaaataggacatggaaagggtttgtagaggaagagagatgacaactgagacagaataattgaaaagaaatttctcaatatttatggtgggtcattgacacctttaaaaagacctcaaagaaaacaaaatctggtagtaccagactagtttattaaatgaacttgatatttaaatt

SEQ ID NO: 123245 - DNA, 1030 bp, Homo sapiens
agctgttgagtgtgcagaaatatggaatctttattcatctttgtaattcaggtctcttcaggtacacacacttgtgcgcacacagacacagacacacacacacacacacacacacaataaaaacagataaggaatcacgagggaaggaaggaaggaataatgccaaattttaggaaacttcagaatggctccttcttccccctcctccatttcaaactcagagtaaagttttgcttcatatgaatgatatgtatatattttttaaagtgagaaatgaagaagataaaagaagtattggttaaaaaatatctattattgacaggaagtgggactgttcatctctgtggagattttattatataaggcagtaattcgatacaagataatacaacatttattaaatattacattgtattctgtagttctcagggcattttcttataatattctattatttgatctttacagtgacttttgatttaaaaggttaggtagctgagccaggttcaccaggtagttaaaggtcaaactggacttaaagccgaggcttcctgattttctatgcggtgatcaccccattgcataataattcattgtatcacagacaggcaaggatctaccaaacttacagtgaatggagtgggattttctggcatcagacactagagcaggattatctgtgggagttgatgctatttatcaggaaaaagagtttagaaattctataagctttgtcagttaaaatcttggactggtactagttttaagcacaaaaagtatttaattgttaagcccaaagtgccttaagtgttaagaaattaataaccagaaatacagactgaacacctcagccctgaaattgatgaccaaatcacgtactcccataatggaaaggctggaagacattgtcacactgtgatgtgagacgcagtgatgaagtgacagtccttatacttttagttggcctctgcacccggatgttgtaggctcatttacatttttaatgcgtctcgttatcattgctttctca

SEQ ID NO: 123246 - DNA, 1054 bp, Homo sapiens
tagaaaacacagtaatgtataaaagtgaggtaaaaatcacctcaaattctagtcccccaaaataatcactgttaaaatgtattgctctagtgtctacagaaaaatctgaagtaaaatgaatgccagttacctgatccataatggttaattagtgcaatattgctttttcaaggacttcattgaagtaagttgaagtaaattactgaagtattagttatggacaggcctggtttctcttacataggtgaaagatgtcatgaaggatgtcatgtcggacctgcagcagacgaacagtgagaagatcctgctcagctgggtgcgtcagaccaccaggccctacagccaagtcaacgtcctcaacttcaccaccagctggacagatggactcgcctttaatgctgtcctccaccgacataagtgagacattactctatctagaagtgggctttacaaattcatgtctcctctctgtccctttgctgccaccactactccctgaagccccttctccagtgccactgctctcctttctgcacatgttctaccaaaaccttaagaaaagaaatatcatggaagaaaactacccatcaggtttttatttccttaggacttaaatgctgcaatacaaggtccatagtttctcctgcatatttatgaatttaaaaaatatgaaataattcacaaagttcaaccccactcattcagcactaactgataatgtatacaaaaaattgtgttagcttttcttctcaaactgaaagtaaaactctgtaaattcaatgcattcccaattaaaaatagccaaattgtctttaatgaaacttgtgaacagattctaattatataaaagacgaggcccaagaatagccagtagacttctgaggaagaatcaggctgaaatactttccaaaaagaaaccaaaactatgaagctatattaattaagactatgcagtactatcaatatacacaccaatataagctgaaccatatgaaattgccgacatgtgagtgtttttgctatataagaatggtgttttcatatggttcaacct

SEQ ID NO: 123247 - DNA, 1978 bp, Homo sapiens
tcacttgtaccactttaggttttaaactgacctttcatcgtgttctataatgatctgacattttaactataccttttgtgtgtgtgtgtgtactgtctacatgttctgtctgatggcatcattatttatgtgcatatcttaccagcctcactagactgaggacagtatccattggggggtgaaatatagaggcaaggaatagttgttaaatatttaattcataaataaaattgctgagaaagaattgattccgttgcaaatacagaaccaagttgttttcctccctactaaatagaaaagggtttccaccctaaatgctacattttgggagaaattatcacaatgtagctacggttgttttccatcccttcttcaggattatctctctacatgactgaatatcctctgcttagaaaacacacattgttgtccaatgaagttgaaaaatctttatatgggctttgggtgctcttcagactccctcctttaatcataattgctgttgaaccttgaatgctagtgtggatttcctacatgatgccatggaaaacactggttttggggtgtggaccctggacccagctctgccattaactatccaagtgatctgggacatgtaacttgacttctctttccttcctttctaaaatgaggggctgggacaagacaatctccgagcttacttctgcctctaggaagttgtaatgtaattcctttggagacttgcatagttggattttcccttttccctccacctatctccttgagaattaggtttagttccctaggtatgaggctaatgtctgattgttctgttacaaatctgagaaggataatattttaaagaaaggtatctttctgggtcatttgtgcctcagacttaggtgtttgaaggccttcttatccccatgtaagggtgaagcctctaataaaataaaagttagaaatttggatgcatgatttaattgaattaccaaatgattttgcagataaagttcaacttttgttattacttgtagtgcttgttgaaagcttggttaaccgaaaaagaagaggctttaaataaagtccagacaagcaacttcaaagaccaaaaggaactaagtgtcagtgttcgacgtctggctgtaagtgatggggttgtcagcatctgtgttgtaagcctatgatatcttaatgttttatagctaatggttagtagaatttagtgaatgcagattacagctcattacctagcattagactgctgccctgtaacaatctggaaccacgagtcttaccttttagcatagtgaactgcaaagcatgtacattttactataaaagatacatgtttaaaatttttggctggggaacagaaagacaaagtcctgttaaaaagagtcatctaataaatatctgaaatactagattttgaaggaagacatggaaatgaagcgtcaaacattggatcagctgagtgagattggccaggatgtgggacaattacttgataattccaaggcatctaagaagatcaacagtgactcagaggaactgactcaaagatgggattctttggttcagagactagaagattcctccaaccaggtactttttgatttggatcatatgttgtgccatgaagtaaacatttaaaatttaaatgttcaggttagttttaatttgtatgaaataaactaaaaagttgtttccttacacctgatgaaaaattgacatgtgaaaatcaccttcagttttctaaagtaagttttaatagattatcttaatatcctataatttaatttatagtaactgattatacttagccaataaataatcttaacatcttaaatcttaagtaatcttattaatcttaaaaatattttaatgaattagtcaaacataaaacattggtttgtagacagatattcttagcagcattatttataatagccaaaaagtggaacaactcaaatatccatacacagatgaatgg

SEQ ID NO: 123248 - DNA, 1841 bp, Homo sapiens
agttgtgactcccgttgctttcacagcctgttctcgactcgtctctctttaatgccttctcctcagtgaacactaaaggataaatagaatcatgtcagttccatgcatagaactctcccttggctctcaactgcctttgggttaagtccaaactccttaatatgtcctgcagggccttcttgtagctggtccatgtgattcttggccacatcgtcaattgtccctcccttgtgagttcagtactcattattccagacacgcctaactaatacttgcagtttgcaaaatgtgatcttccctttctctgctttcccttggcaagggaaactcctcagtgtaatgctgttgttctcctttaggaagccatccatgccccaattggattagaagccactcctgtgaattcctggaattagcacctagcaaattcttttgttattgcctgttactttccattgcttactagactagaagctccttgggagctgagatttgtatctggttcactttcatatcaagagcccagcccagtgcctgacatttagtaaggctcaatcattacatattgaacaaaagaagatgttaactttagtaatgtctgtacttgttctttgctgattatctaaccaactctggtttttattatctataagcatttataaaaatacaagtgattccttataaaggtgaaaattgttttaatatgtaaagttttaaaaatttttatttaaggccaggcatggtgggtcatgactgtaatcacagcactttgggaggccaaggcgggccgatcatgaggtcagcctggccaacatggtgaaactctgtctctactaaaaatacaaaaattagctgggtgtggtggtgggcacctataatcctagctactcgggaggctgaggcaggagaatcctttgaatctggaggcggaggttgcagtgagccgagatcgtgccattgcactcaagcctgggtgacagggcgagactccatctcgaaacaacaacaacaacaacaaattatttaattattttcttcaattgtttattaaccctataatattattactcttttcatacttttagttgtaaatatatgatctcattttgcatggttaccctatttctgggttgctgtttttgggggagtgataaaaagacatattcctgatgagcatttgagttgctctttctggagtcaagtaaaacagtagaaggaaacatgacaaatggtcacctctgaatcttcaaacaggtttgatgctataagtgcagagctgttgaactggattttgaaatggaaaactgccattcagaccacagagataaaagagtatatgaagatgcaagacacttccgaaatgaaaaagaagttgaaggtaaaaaacataaaccacatatatcctagtgcataaaatagttcatcatgctggattttctgctggcataaagacattatggaattcaaaagcctcctgtaaaataaatgtaggcagaaggtagcttttagtacattgtagtgaattttgaatccattcatgctagctgtcatcagatccctatttggaggacgttttttttttttcatctttgtcagtcactgagatgtacagtgaggaatacttcttatggtgatccagttagtggtactactttttagttagtttagatcacccttaatctggtatctaataatttatgactctatattaacattatgctgaagatgttttgccttcggaatacaacaaactattttaaatcaaaaagtgtattcaatatattttctttagagttgtaaaaaataaatacaattaaaaggtgtgggatcttagccctgcc

SEQ ID NO: 123249 - DNA, 1033 bp, Homo sapiens
gagagcagtggtgcaatcatagctgcagtcttgacctcctgggtttcagtggtccttctgcctcagcctactgagtagctgggactacaggcatgcaccaccatgcctggctggttttttatttttagtagagccagggtctagctatgttgcccacgctggtctagaactcctgggctcaagtgatcttcccacctcagcctcccaaaataacaggtgtaagccattataacaggtgatataacagcctcccaaaataacaggtgttaggcaaaataacagatgttagcctcccaaaataccagggataacaggtgtcagccattgtacctgacctggatataatgatttttaaagattttttttttttttttttttgagaaacaggtgcaatttcttcctttggttgaggaggccacttaatatcattgctaggaggatcaaaatgaatgatcccttacttctgtttcctcaaaatagttaaagttttggcagtctcatactgtcttttaaaagaaatcatattccactgtcagattcagaaaaattttagagttcttacttttggaatacacttggttttggaaggttcactgttaaagattttgaaagctcatccctcctacgttacactatttacttcctagctgccatttgagttaggaactgtgttgcattgtgcattattttgtgaaatgcattgagcattgtgtgaaatgctccacatgtaacccagcctaacttcagcaattgtagattgtgtgatgactggaagtgtctgtatgtgtgcatgctaggcaaatgtgtcgtattgcctttcttctgaaagtgcatctggacagcatgtctttgttccttgaattcagttatgtgaaatatgtctttgagggtacctctttctccacttattggtacaagctgtgctttcacttttgacaaggatcagtaggcagtttaacttttgctgctagttggtttcacctctttgtgcttcaagagaactcacttcctttccacgcaagtgttacttctg

SEQ ID NO: 123250 - DNA, 1040 bp, Homo sapiens
tagaacaagcattaatgttggcagcaattaaaaaagtgaaacccatgcttatgcaaacacatgctcatcctggctgttcattcctgtggtgcctctgatgggacataaacaccaaaacttggatgtggtaactcttttatggtctcaatcttggtcataataaagcagttggttttgtagatcttagtataataatcgctaccatttagtgcattcttctatgtgggagtctctgtttttcagaacaaccagacaagatagttgttatgattccagtttcacaatgagttattaaggctcaaagaaaaattagtttctcaaggccccatggctaggcaggtgctgagcttggtagtcagacctcagcatttctttatatgggcacactgtctcttttagagcacagtgtggttagaattacatgcaggatttttagtagtgaaaatattatagtgtggctttacaggttcccttctattccctttgtcacttttgggatgatccattggcctacatggcttctctgtctgtttctttcctttttttttttagtatttattgatcatttttgggtgtttctcggagagggggatttggcagggtcataggacaatagtggagggaaggtcagcagataaacatgtgaacaaaggtctctggttttcctaggcagagggccctgccgccttccgcagtgtttgtgtccctgggtacttgagattagggagtggtgatgactcttaacgagcatgctgccttcaagcatctgtttaacaaagcacatcttgcaccgcccttaatccatttaacccttagtggacacagcacatgttccagagagcacggggttgggggcaaggttatagaccaacagcatcccaaggcagaataatttttcttagtacagaacaaaatggagtctcctatgtccacttccttccacacaaacacagcaacaatccgatctctccttcttttccccacacttcccccccttctattccacaaaactgccatcgtcatcatggcccgttctcaat

SEQ ID NO: 123251 - DNA, 1200 bp, Homo sapiens
aagcaacacagtgactaatgttttacctcaaagttaacttacctagaagtgtaactaaagcaaaaatctgtgatttttttcaaaaaagggattatatgacattcatacattattatacatgaatcaaagtaaatatgacaggagacttgttggaagttgttttttcactaaaacatcttttttagtgtagctctttttgaaagatttaaaaatactcagtacataaggtattttaaaataggctaccatgttaagaattgtctcatttattgtctttctttacactattggcattgtagttctgtggattttaaaagttgctatagatgagatttgagaaaaatgatatttaaatatttgattgggcaacattttatttatttttattctttcaaacagccattaggacttacaaaaccactacacttaattactttcccccaatctaaggaagttcaaaaccattaagtagtagagaaaagtaaaggggaaagtgaaagactgttttatttgtatttattgccattaaaagtaatggcataaactgcaattacttttgcaccaacctgataggttgattttcctgaatgtcagattgtttatcttagcactgagaaacagctatttctggatcagatcatctcagtctaactttatcattgaaatgctattaattagcagaaggatacatgtgcctatgttctataattttttaaaaagcttaaattatttagagaacttttaaagatacttctaccatagtgtacctcaatttttgtgaaaatatatttatcacagtgtaatctgctcagccctccagtgataatgaaaattcactcacttaaattctgatcttggacccagactttgaaaatacttcatgtcagtaaacatactttggataacttacgttaacactgctgttatgaaatgaaaacatttgtgggagctgagtacattggatgcatgagtgaaatttcagagttagcattcttatttcaaaaacgctcaactgggctgggtgcagtggctcacgcctctaatcccagcactttgggaggccaaggtgggtggatcacctcaggtcaggagtttgagaccagccccgccaacatggcgaagcctcatctcgactaaaaaatatgaaaattaggtaggcatagtggtgggtgcctgtaatcacagcttctcgggaggctg

SEQ ID NO: 123252 - DNA, 1021 bp, Homo sapiens
catgagcatttccccatataattaataattatttttaactttttattattcatttatttattgtttagagacatagtctcgctctgttgcccaggctggagtccagtggtatgacagctcactgcagccttgaactcttgggctcaagtgatcctcctgcctcaccctcccataattaataatagttgaaattatttttgtgaaattatatcatatatcacttgtgctaatttctcaattttatgcattttttaatcccatgatggatatttttgtgaattagtaatttacttaacttttggtcctgttacttaggtagatttttagaaaatataattacttgtttaacaaatagacattttggggatccttgataccttttgccttagtaaatgcattattatttttttttcccatctccattccagtctctggaatctgttctgcgccacccggcagataatcgcacccagattcgagagcttggccagactctgattgatggggggatcctggatgatataatcagtgagaaactggaggctttcaacagccgatatgaagatctaagtcacctggtaagagttgggacatacatgggtgttgattaggtattgatgaagtggagctggccctaagctccatatcatagagctttaatgttggaaaaatctttaatgttggttaaagttggtaaccaatgctaacaggggcattgagggtattgaaatattcagaaaggaagaatagatctaacactctaagacagaactggatgattaaaaaaattatttttgagattacttctacttacaaacatttaattttcattaaggatcatatgatagctgtatataagaacaacaactcatactatcctagtaaatattagggccatgatatttcacataagctgctgtgaaagccatagtctcttagttcatatccaggttgtaacatacatattcgtatcacaaattagagaaagaacatttcttttataggaaggttgggtatgaat

SEQ ID NO: 123253 - DNA, 1939 bp, Homo sapiens
ctcactctgttgcccaggctagagtgcagtggcgcgatctcggctcactgcaaactctgccccacaggttcaagcaattctcctgcctcagcctcccgagtagctgggattataggcgcccgccaccgtgcccagctaatttttgtatttttagtagagatggggtttcaccatcttggccaggctggtcttgaactcctgatgtcgtgatccacccgcctcggcctcccaaagtgttgggattacaggcataagccaccgcacctggcctacaaaaacttattaaagcttctgtggaggtcaacattatgtaaaatacgatatcatgtattacacaacgatatagaacttttgtattgtctctttttatacttaagtaaaaaaaaaaggacatcctctcccctttccaatctctttttagaaaatccaagcagagatctcagcccatgagctaaccctagaggagttgagaagaaatatgcgttctcagcccctgacctccccagagagtaggactgccagaggaggaagtcagatggatgtgctacaggtaaagaaggccaggagcttccttttacttttcaacttgttgggaattttcttcaaaaaagagaaagaattgattacttgggcaccgtttgtattctttgtgatgtaaaccatgggatgggagtgatgatgtgttgaaggttgcatcctagggcagcagaaacaaattgttgcatgtgtggaaaaatatgaaatctgattttgatagctgagatgagaaacaagagagtgagccagatttagaagttagctttatatacactttttctttaatgcagagcctctgtcagtatcgtgtggctgatgctgtgggcaggccgagcatgaattggatgcagcatcatttagttctttcatggttgatatgacattgactttcactctgaacttgtgatgaagggcattttgagttctaggttcctgaactatctttttgaacatgaagttttaattccagtgaggtcagctttatctaaatttcttatccaaatctattacttctgagattgagacactgagtgttgtaatttttgacactgggctatgcagttcacttaggtgatcgggtaccctcactgagattcattaggagttttttattttgggtcatatttctgaatttttttcttttggtactttatggtacaaatttttagtagtatctgttatgctcatgatgagagagataatcatcctgatgggaattgcatattttcatttctgcaaacagaggaaactccgagaggtgtccacaaagttccagcttttccagaagccagctaacttcgagcagcgcatgctggactgcaagcgtgtgctggatggcgtgaaagcagaacttcacgttctggatgtgaaggacgtagaccctgacgtcatacagacgcacctggacaagtgtatggtgaggcttttgggtgattggcacatccagtggctttttcagcagctgttatggcttggtctagcaagtacatgcctagtgtgtccagtgatcactagtctacagtgtgctaaacataaggattgatgatggaaaacgtgttaaaaaataagaagtgtggtctttccctccaaagaaattagaagagataagagagatagctaaggaaactagaatagacatgtatataacatgatgacaaaaaccaaaacaaaagaaatacagcttaatcaccatgtgaagttaggagggcttcagcagagtgtgactaataagcaaagttttcaaggataaatttgaattagctagaagaaccatacttagaatggatatcgtaaaaattccattttctaggaaaataaaaatttcaatagaaatttaaaccttaagataggaaagaagaaatgatatataaggccttattacttttttagtcttgaactttat

SEQ ID NO: 123254 - DNA, 1074 bp, Homo sapiens
ttttgatgggagaaactgagacaataagagacaaaataagagacgaacttgaaattgaaagacttgtaagagatttcagcacaatcaaccggagtaagacctattcacataagatgccaatgagtcttgctgattgctgacttttgtattctccattgagtgctgcttacttctgtattctccagtgagtcttacttacttttgtattctccaatgagtctgtcttacttctgtactctccaatgagtcttacatacttttgtattctccagcgagtcttacttctgtattttccaatgagaattacttacctctgtgttctccaatgagtcctatgtgaacagctctcacctggttgattatgctgaaatctcttactggggatcccagatatttatttaaactacctttccttctgtataagcatcacactcatgtttgggtttgatttttcccatgagataattttgtgttttcttataattagcgtttagtatctgagctggatgatgccaacctccaggttgaaaatgtccgcgatcaagcccttattttgatgaatgcccgtggaagctcaagcagggagcttgtagaaccaaagttagctgagctgaataggaactttgaaaaggtgtctcaacatatcaaaagtgccaaagtgagtaattatgcttttagagtaaaccatttttcctatgggtatgtatctaaatgatagtcatacagtacatacatcaacaattttgttttattattttaattttattgttttctctctctgtcaccgaggctggagtgcagtggcatgagctcactgcaacctccgccttctgggtgcaagctattctcctgcctcagccacccaagtagctgggatttccggcaactgccaccacacccagctaatttttgtgttttttttaggagagatagggtttcaccatcttggccaggctggtcttgagctgctgacctcaagtgatctgcccgccttggcctcccaaagtgctggaattacaggtgtgagctgctgcacccggccaacaatttttaaattaaaatgtttttaatcac

SEQ ID NO: 123255 - DNA, 1017 bp, Homo sapiens
ctgccctgggggctgggtggctgttcttcctttctgtggccatggtaaggatagtttctggatcatggccatagtttcctgctatgctcgcatgtggtctccaaatccacgccacaacactctgggcagccacaatgaattgcaatactacgtcacatccctggctagagtttggagaaaacgggtcattcagagaagtctgaattggtaaaatcattgccatataaatgaatgaaacaaaagttagctgagctgaatagaaaagtcagttaaaaaagtgttagtttctctcttgacaccccatctctctgattaatgatggaaagtcaaattaaaaatctattttcagagaattcttttccttctacagttgctaattgctcaggaaccattataccaatgtttggtcaccactgaaacatttgaaactggtgtgcctttctctgacttggaaaaattagaaaatgacatagaaaatatgttaaaatttgtggaaaaacacttggaatccagtgatgaagatgaaaaggttggttcaaggagatttcaaaaccatggtggtctcatttttcttctctattaatttcatttttacatcaagatgtttgcccatataatctgtcaaacatgatgaaacagattcaaatgtgattttttgatgtgtgtcaatgtaagagtcacatgattcatgtgcttaaaaagaaaatagactcagtttctgaactagacataatccttagtattatctaatgtttgctaaactctctttgagacattttatcttcaaatataaaatatatttaaaaaaaacataaattttttgatcgttcaggttaacatatcttgacgtatactatactaagtaggttagttttcctccttaggagttgataggaagtgaccttatgcatttttcttttgagtcattttttttttccttttaaaaatttagatggatgaggagagtgcccagattgaggaagttctacaaagaggagaagaaatgttacatcaacc

SEQ ID NO: 123256 - DNA, 1052 bp, Homo sapiens
agtattatctaatattttattacatgtattgcacgattatgtgagaacttttgtgattaaaaatgaaaactcctagctgcaaaaacataaattcttattaggaatgatacaatacaatttatttaaaaattgcattcagtttttaaaccagcagttaattatagcagctataaaaataaagataccaccaggcttttaatagctttcaaatccttttaaaaaacacataatcttatttgtcatatgagttctaatcatattcctctcttctgacagatggtttatattcttataaatgttattcttataacactataaagatctaattgaggcagttccttttttatattcatttgactgttttccttgcatcatttaaaatttttgctttgtttttttctatatctctttttgtaacagtgctctattcaaatataatagttattttaataaacaagccaaattcacatgtttcttgtcttccctaatacttgtaagattctcccattcttgataccttgctttgttcttattctttctgttctatgaataaagcagagtaatagttaccacctaatgtgataacatgtcatataatgattcctttcaatattcgtgaaacactcaaagagaattatgctttttccctattattttagataaagacatttttcatgttttaaaaaatttccattatgttgcggagtggtatctaactgtaaaaaaggcttttgtattcaatttctacataactttttatgatgagggaagataatattctttagtttcaatgtttttgaatttaactaaggaaaaaagcttcttggtctattattaagcaatctttatattgtagaatatatacattgtttcacttaaaatatatattaaaataattattagaaattatttattttgggaaatatttagtcaggatattcaaagcaaatatgtaaggttctgcttaattggacagtttttcctcaatatttttaaataatatattcttttaggctaaaaggagaaagtaagcaggtgatgaagtacaggca

SEQ ID NO: 123257 - DNA, 1047 bp, Homo sapiens
aaaaatttcagtggtttttttgggaatgtctcttttgtaaacaatttgaggagagttagaaaaggtggaacagtatattaggatggagtagcaaggaggagataagaacagaatgttaaattagcagtgtaaaaataatatatgacccggttaagagacagtgagtaccagagagcccgtttgtgcacaggagtgcaaaaatacacacagaaggcatgtgctcactcccttcctagttatcatttgttagcatgagcttaagcttcttataagtttattttttcacttaacaaattagaaagttacatttgtaataataccaaaaaggtttctaatacagttcttgaattttcccttatctgactaccttctaaccacacctatcttttaacttctccaggacttaactcaagaaatggaagtacatgctgaaaaactcaaatggctgaatagaactgaattggagatgctttcagataaaagtctgagtttacctgaaagggataaaatttcagaaagcttaaggactgtaaatatgacatggaataaggtgtgtgtaaagttactatcacacatttctcatatttattgattttgttgtcagagatgtgggatcatgtaactgctttactttcaagtatgtccaaatggggcaaattttactaaagcttactaatgtttatattttttatctgtcatagacagaggcatatattctagaagaatactttttattttatacagaactctttggcctaggggatttatacattatatactacattaaataatgaatatatgttggaattagtaagaaaattccagtgatgatattctgaaaatgaagaccttaaaatagcattctgagccgggtgtgttggctcatacctgtaatcccaacactttgagaggccgagatggggggaatcacatgagtccaggagtttgagaccagcctggccaacacagtgaaaccccatctctactaaagatagaaaaatttgccaggcgtagtggcacacgcctgtaatcgcagctacttgggag

SEQ ID NO: 123258 - DNA, 1069 bp, Homo sapiens
tgggttttcttctcttaacttaggctttcttttagaggaataaaaaaaggttaaaggaactcacaagaatgcaaatcctttctctcattatactttattctctaaaatcaggtcttactgtgtcttttaactcaacccaaaattcagtccacaaatatttattgagcaactactatgtgcttatgtgactggcattaatttggggatactttagttataaatgagagaaaacaacaacaaaaaataaacatacaaaacaatagcaaacaaagatccttgcttggggtttgcattctagctcagaagcatctaggttctacaaacccttcttagtgggaatgtactaccaatagcaaacgaagtctaaattctcaagagtgacacctagggattgtcacaatctgctgccactaccccttttctcacttcagccctcagcccggcctgtaattatgctgttattccttaaaatatcctgacatttcctagtcttcttacctttatttgcattattttatttctcttggccttttcttcccaggtgcaattctacgcagcagctaaaatgtcatcccctttgtgacatctttccctcctcttctggtccctggtgaatgttaatttctatttttagttccttctatggcctttccccccattgctttattatagatcttacaactactttaattgtctctctcttccatagattgtgaatatccgtctttctgcccttgggcctttaacagtgccaatacaaattaactacctaataaatatttgtgacaaaatataaactggaaggataaatcctaatatttgtcaagggaagaaagtcagctactctccctgtaaaaagtatgttttgatttcaaaatagtcatggtagcaacagggttattataggagatacattagaaaagaacttttaatgtctaacagtgttggcttatttttactaaatacatcattttccttcttttctctttttatgaatggatggattgtgcctattatggaactttggagtgagctggtttccctcacatcacaggggagctcctctgct

SEQ ID NO: 123259 - DNA, 1049 bp, Homo sapiens
ccattgtcctccaccatgcaatcctaggcaacacctaatctactttctctatatatatgaatttacctattttggaaattttgtataaatggaatttcaccatatctggccctttgtgtttaacttctttcacttaacatagtgttttcaaagttcatccatattgtaacacgtgtcagtacttcattcctttttatgggtgaataatagtctatgtataaatatagtgtattttgtttattaatttctgtctcaatttaggttgattctactagttggccattatagataatgctgctacaaacatttgtgtacaagtttttctgtggaaatatttccagttctcttggatttaaatacctaggagtgaaattatcgatactaatttttaaaattgagttgttttcttattatagagctctgaagaatataaagttttaaatgttgaatttacaggtgtgtgtatctcttaactcatataactccaagatagctctgtgttctaattttgatgtagatttaatgaagggtttatagaagctcatttgtccaatgcattctaaatattactaaataagaaaccaacttgtatatatatgaattgtttaaaatatataaaatcagctgcttcaattatttttattttgtcttaaatatttcttcagatattatttcttcctagaattcatttagccactgactgtaggagtatttgttgatactgtctttatgtaagtcaacacaaaaggtaattgtattgacttacataaaggcagtatcaacaaatattcgtatagtcgctgactgtatgaatatttaatccttaaaggagtggtaggattcagtgactgaatgaatagaattgccttttgtattgacctacaacatatgggggaataatttaacttacaattatgagctgtaaaatgtagttataattattttatgatatggatgtgattttaatatttttatggctctccccctttcactcttctcagaattcacatgatccctccactaaggattattcaagacacacatacaga

SEQ ID NO: 123260 - DNA, 1021 bp, Homo sapiens
aaatagaaatgtttaaaatctttcaaaataaaaatatctaagcacaggattacttatggcaaacagcatcaagaaagggtgctgataaaaatattaaaatacattataatgctttataaaatataatacattattactttagtgttgctaaaaatagtctcttttggctggtagaaagtaataaagaggacatttactaagagtccactaaaattcctttgtttaaagataaatatgtacatttatgtttagaatgtttcacattacggtaattcgcatgatttttcactcccttgctttgttattaaatgctcttaattttaaagtgttctctccattctatttttaaaaaagttccatggttttattttcagcaccttatagatagaagattgttagagatttagtaccttttactgagtttttctgaggcaagagaattttaatttttttatggtgttgtatattaatgattctccttttgtatgagtaaacagacatttaaaatagaaacttgtttggaaatggagagacgtttgttggagaaaatgactgtacagaagcatggcaaatcataacagaaaagttctggtggcatggtggtggcagtggtggtggtggtgctggtggtgcacagtctttgtgcactaaggaagatggaataaggagctccgtgtatctttgctgcatgcacaggatgtgtatgtagaactacttagctgacacattcgctgtttatacttgcttcatgtcttatgacaaccagatccaaggccatgggagtatttcaggaagataaagcagtttattctatgctcagtttaaggtgaatcttgggtgaattttgataaggataggtctaaagcacatggaagatgattaacttttgggagtatgctatgatacatgccattcttttaaggatggatgatgatttggatttatgtatctatgtttcattgccctgctgcaaggctgttaggatttattccccagcagaagccttttggcaagagaaaag

SEQ ID NO: 123261 - DNA, 1017 bp, Homo sapiens
tatgtttgatcatagttttgttttattcaaactatgttgatactatgtcattacttttgtcaaaattagagtgttttgatataaaaggagagagttataatagcaatttttacactaccgcagtactatattcctccttcctatcatatttttagtaccgttctcaagaatgtatcttgttgctctgttagctgcccaaactcatttgtgatcaaaacaactgcctctaagaaaatattatttttctgatgatatacagtatggcatgtccaggcatctagatgatgcttatatggcagcagattgaggtgggaagcagtattccattaactttattatatcacactgtaatttcttacaatttggccaattagatatattgctgtctggaaactttttttttttccggaagttttgggagacagattcaggtagtggggtattcttttcagaaatacttacaagagttttatttgcataagaagttaattaaaacttaatggagcttaattaattcagttacaaagatttgtaaacctagttatttcaatgtgttgtgttttgctctacttcagtggataagtttattctggtaaaacatttatgtttttcatgaaaaggcaattttgataatagataagaaaagctcattcactaattcatgctatttaatttttttaactaccagtatgaatgtataaagctttcttttttttaagagcagggtcattttcctgatccgtttgtgtgtgtactttcacaaaaccaaatatttttctaaagtcgaaggtattaagttagtgcaaaagatgaaacagcagaagtcaagtattggagaaagttgctaattagtttgctaattctaccgcaaataggcacaagttaagtcactgaagtcattggataaattaccatcagaagtgctttttgggaagacttcttgatttataatttcctaaagataccatgaaaatttaaatgtttagaataaatgttacttatttcatttagagaatt

SEQ ID NO: 123262 - DNA, 1055 bp, Homo sapiens
gagttaaaatatactcccctcccacaatctatttacacattcacgtgtattttttgcctttaaaaatatttcttctcggttatacatccaataaaatttgagcaggaagcaaaaacgtaagtgctgcttacttggagatataattagcagcattgaaattgccctgatgacctaaaatcaccctacactggatgctaattttctcagatatggttttgtttgcttagtttctttaaaattttcatgcctataaaataatttttcttttagtagagcacagtagaaaaaaagctgatgtaaatgatttgaaaaataatattgaatttaatttgtttttattgttacgtgattactttggggtgttttatatcatgaagtctttagattagaactgggttatttgtgttaatgttaaatcagaagagatttttgtaagtcctccttatttttttcttagtgccaatttctgtaaaatatttagcaattgagggcatggtaaaaagcagtttcctgtaaagtagattgggatatgaacattatagaaaaatgagaaaaatttaaaaatatttagtgctgtaaattgactccttcgtgactcaagcattttagaaaatgttgatttaagtgatataacttctatttgcttgaatgtatatgtaaatcattttagtttaagtggttttagtcaccccccaaactattctgatcatatttcttcagcaaaaatcttttaaacatctagctgtatatagatgtgtattcatttaaaaattatacatatatgccatggtgaaatcatgtattaaatattagtagtgtataattttgttcttactttctactgttgcctttttgtaccacagttgattctttttctctatgtggtatacacaacacgattttggtgactagtcatttacatacagagtgaaactatggctattcttagcctggccttctagggggcttgagctttcagtgtggtgctgatctcaaagtcttccccggaatactgtgtcttctgtggtattaaagcaactacttctgaatattct

SEQ ID NO: 123263 - DNA, 1080 bp, Homo sapiens
gtactatctagggcagcttatgttaaatgctatgtaaatcatatctataaaatatgcacagtaatgtacttttaatagaaattatttagaatacagtacaagtaaagtataatgggaaaaatgctgaatttggaatcacaagatctagatttgattccttacttgtttgatcttatgtaatacccaagtgacatatcagtcctcagttttgtcttctagacagtgggaataatttacattccacatattttagaaagctgttataggaccagtgtattaatgtttatgaatttgctatgcagagctggagtattatggaaatcgaaatattaaatttcctatgaataaaaacaacaaataacaatcaatgacaatatttacctacatttgagtttctcaccatgcactgctgaaatgcgttttgaaaacagtgactaactcaaacttctgtgtgtctcaactgaggcggaagaatgttgaatactaaccaccttaggtctttctgcaatgcagggtcagttcatttttcttctttcctggggcacacagccagcttccatattgaggtacattctctgccagtaaaatcatactatttccaaacaacttagattcaaactggggctacataaaagggtccatgtcttcagagcaggactaatagcccctgagtctgcagcatctagtcaaatgaagtattttgaagtctttattcaatccagaattagggcagccataattttaaaaatctatacattagtaatcttagatgctgggaaggcttgaagaaggaagatctttcttgaatttcaataataattaaacattctggtaaatctcaagtggctttgcataatatgttttttgagagtgtgattttgataggtagtgaataacctgaattaatgaccataatgactgagtgctgttttgcattaattcttgaaacaaaacctagattgcttcattacatggcctgtctttgtggaagatccttatacggtgtggtggtaaagaaaggggaacatttgctctattttgaagtaattgcttctaatggaagcctaatgacctattatg

SEQ ID NO: 123264 - DNA, 1341 bp, Homo sapiens
ctaaaagctgagcagtaagcttgataggaagctagagaaagattggagaaattatgtcatataaaccaaaatttcaggaagttgcatgtggttgagaatcagtacctcattagacaacttaataattcaatagtttacttatgccaaatgtcatccttactttaaaagctggagtgatttctagaaatgtgtccacatccttgcgggttagggtacggggcagcttctggccagctgtcgtccaggtgtcttatggtttttccgagtttcatatgcagatcaaacagggcagtgagagtagagttttcctgtgggtattgaaatggtaacatttaataacctatggtgactttggatattctcaagtttagcttcctgattttttcaagatcaggagacagaagcttaaaagagttaatcctataggattaattagtagtggcaatgaccaaactgcgatgatatggatatattccatttttgggtttcatgggactgtactaccaaagtgtattttatatgtttctaatttggactattgacatcaaatgaatcaaatagttggagtaaatgatttacttgaaggtggttccaaaaattaattaatgaaatgtatctctttagataaaacacatatggtaacatcttaacagctgttgagtctggttgtcagtatatgggtatttattttactcttttttcaattattctgtatgcttgaatatttttatgataaaatgtcttataggtaacaacaaccctattctaataaaagcttgtcagattacttgagcccttgcatactttactgttgagcatcataaaagaacttgaaatgcttttgtttttggattcttcatgtttcaacttcagatggtgacaagtgcaaaatggcttaaaagtgccttggctaggcacagtggctcacacctgtaatcccagcactttgggaggccaaggtggacagatcatgaggtcaggagattgagactatcctggctaacatggtgaaaccttgtctctactgaaagtgcaaaaaattagccggatgtggtggcacatgcctgtagtcccagctactggggaggctgaggcaggagaattgcttgaacctgggaggcgaaggttgcagtgaaccgagattgtaccactgcactccagcctgggcaacagagtgagactgtctcaaaaaaaaaaaaaaaaagtgccttaacttacctggcaataaacatttattgagtctgcagctttcattcatttagctcatttacatttaactgaaacacatttaaaaattcattttttccttttgcaaaagctaggcatgcctactataaaagt

SEQ ID NO: 123265 - DNA, 1031 bp, Homo sapiens
gagcctcatatgatttccatcaaataaaatgtttgaattataggggtgtgtttgaaatatgatgctttccagaatatgaattctacctctgcatcctgtctccatttttctgcttccttgtaattccagatccactgggctttaaaattagatactgttttacatttgattatgttactttcgaggtctatgagcccttttcacatctaggcagtagaaacagtaagtcatatctctgagctcgtaaggtaaaccatgcatggccatgtcttacccagcacattgcctacacatgtataaggtatgccatatatgctgtagttatactccgtgtggccttctgaaaagccatataggattatgagagaaaaagaagagtgtgaagtggggcaacttccactcaattatgaatgatgttgcctgaagaaatcaattagctgattttaaggctttaaagaattaaaaattgcatgttgttactatacttcataaaattctaggccgatctgcaagattatgaaactgactttagactaatataatttgtttaaactcaggagctttgtataaatgaattattattattcagctaatggtgtgttctttctatcatgaagaagttgtctttttctgtcatgtgtctccccagtacaatatgtggaatactttgtaattttttttcaactttgaatattaaagtttgatagcataaaaaggccaggcgtggtgactcatgcttgtaatcccagcactttgggaggctgaggaaggtggatcacctgaggtcaggagttcgagaccagcctggccaacatggtgaaacccgatctctactaaaaaatacaaaaattagccgggcatggtggcaggcatctgtaatcccagctactggggaggctgaggcaggagaatcacttgaacgcgggaggcagaggttgcagtgagccgagattgcaccgttgcactccagcctgggtgacaagagcgaaactcggtctcaaaataaataaataaatgaaaaataaacgaca

SEQ ID NO: 123266 - DNA, 1028 bp, Homo sapiens
agattcctgggaaggtttccagtgagtttttgaacctaaccgctaggttaaatacatccctttagtctcagctcatcttcctaattaagtacaaattcgaaaataattgtaaggttttctcagatatgtgatggattacatgtcagttgcatcacattcttcaagcaaagtaaatgaatgaatgaacaagggaatgaataaacaaaaggagctagatattccctgaacattgcaagcttcctttggcctgtggtgcttccattaccagcagcacttcagttagaatgatccctatgaattaacttgtaaatgaggaggtcaaatgtgcttttgcacagtggtgttaaatatgtggatgaataaattctttcttgtactttgggctatggagtctatgtagggttagaaatataggctttttctaagttgttctcctcttaggaaagttatttacatgataattaaagaagtttagaagcaattcctgaccttaaacaaagataacgtgtagctttcaatatatgaacctttaagaaaccctcaacatttcaaaggcacaaattagagcattagtctaaataacaaacccccctctttcccgatattcatttatagggtataaaatacttgacagaaaagttgagatacagaaaagatgctaaatttcatgaaacattgttatgaatcaattacagacattttagtttatttaaaacagtttgtttgtaactgttcagaaatacttacattgaaagaatgtccacaaagcactagatctgtagtttcagtggagagtcagtattatatattataatattataaaatgacacacttctcaatggcgcagcttcctagaagtcatttcctatattacttggccataatcactattaattcagtttcataaatgattggacatgatcttttaattctgagccttcataaatatgatttcctctgtctgtttagactgttttctttaggagtccacttgtctaacttcagttgccatctcaggcattacttct

SEQ ID NO: 123267 - DNA, 1031 bp, Homo sapiens
attattgattttcaagcagaacttgtgccataatactgttatactgtagttggttacattcagggtcaatagaaatgatttcttgagatatcagtggataattttcattgggattagtcaggaatgtgttctgtcttccatctgtctgcacattgtgagttcttaatgatttgatgcctcttttggctgaattatatccaccataccatcactctggtgagcaaaaagagaagcattctgtattatacaaatgatatgtttagaaacataactaagaatgtttttaatcacccactggcctacccatccaatccctgctatcaattaactattctgaaaccatcatcatgatttcacatgatatttcctctatttaaagtagtgtaactgtaagtcacctcaatttggtatccaggtttgcgtttggcaataaattcctcttggcagcttcagcaagttatatttcttaatactggatctgctgaggttatgtttatggagaccagaactatgagtattgatttatgtttgctttgaacatcttccagtctaaagtcattgtggctatgctttgttgatgaactgcaggagattgcccttgggattgcattgagtgaacttggcccctgtacttcttcagatcatttcaggagagttgaggtggacttctctttaggaaggtgttcttttttttcagctcttcgtaaatgtccatcagtcttgctctgcatagccaagctgttgaagcatgatcaccttgcattgaataagctgcacagagctactgttctaccggggagtatgcttgcaggggagcataatctcaaatttactgctacccactcggtaccatgcagagcttgcttgggagttcagggaggattgtttgaaatgggcagttcaactattcttccagataatcaaaaaagccatccctcgatttagcagaacattgagaaatcctttcctttgactgtattgtattgtttctctaaaagcttgctttgattaaattgcacctgggtgtttaa

SEQ ID NO: 123268 - DNA, 1025 bp, Homo sapiens
caatgccacactaaatttggaaatttattcagctgaaattttttcaagtttaaatattatatttactttttattgatgatactactaagtacagtgcttccttgagtgtattccttaataaatatttcttcaatttgtttgaatattttgccacaaaccagtctttagcttgacatttgaatttaatcttccatgtattaactaggcatgtacaaaacacatgcttatttattaggcatgcactaactgtactttggttacaggctaaaagactttagagttggttttcaaaatctatttgcttcaaagaatcttagtagtcagtagttaaccaagaaactttaaaaaaatgagccccattttaattttatttacccatctagctattcatttatttgacagatatttatttttgtgcctactatgtacttggcacaatgataaccttttcccagttcttttactctgttattattgtttaaagtttggaaattaaaatactctatattatatgctatattagttaaagctaagcatggtgctgtatcattaaacacaacaataacagccaaataaagttagaacacaccaaatatgttttatttacatgcaaatatttaaaatgatatatttaggtatagtatttaacaacttttatgttcctcacatcagaatttatattctttcaacaagagcctttttaaagataaggattaaattgaccatgcataactttgatgtgattaagctatttgatcttttaaatagaatcattcgattttgctgacacttagcaatagcccattattttagatataatttctttgtgatcatagtaagtttagagtcatagatgactccctcgaggtcttagtagcatattatgaatttggtatctatgtgattaaataagcacaacaaaattcatatcaaattggtcgataaacacatttttaatattgtgccagactatcattattaatttttaaatcaatatgtagtagtatgaccacaatgtcatattc

SEQ ID NO: 123269 - DNA, 1646 bp, Homo sapiens
ctttgtgaagttgctgtggaatttggttgggtttgtcaaaatgtgtcaaaaatgtgaaatatcccagttctactaattttctaacacaaagttagatggacaaagttagatgacaaagaagaagacaaagttagatggactccataggagagaagaggacttaaaaatgatgccttaatatctgcccccattttgaaagtgaaattttgcggataatgtttctattgcagttgagttagaaataaggaagcattttaaaaccaggtggatgattcaacactagaccacccaggaagggcattccttctgtaataggaaaggtctttaaacctggagtaccacatcacatgtaatgtgtaagtgtggatatttctggagctctcccagatatccagtgtgtctgcatgaatgtgtctctctttatcttttttgttaaggatgcaaatggagagttatatattggattcctcttgcatcactttagatgccttctgtttatattgagcctggcttatttggagttagcttgtaaatttaatgagatcattgtgatggccatgattgcagaatggaaaatgtcactactatgtgccagtttgcttaaatcatttttaagtacccacctgtgctgctaaactctccatttgcattttattggctactatgtttttgctccagagcgggttcctttaactctgatgcctgggtaaattaatcggggtgtgcatgccattgcccttttagcttctgctcctgttctaataaaggctccatctgcttaattggtagacttacaggcctttcttatttcaaaaaatcactttgaaaaaaagcatagcttctcaagggaaagaagaaccagaactcttgaaaaatgtattatttgggagatgttaaatttctgccatcactgtgctgagatgtatgtagtcaatgagaaacagcatccaagataatactggttttcttactactttttttccatctcttgtacatctctatgtctgtatttcatgaaaacctaccttctctaataaaggtgtggtgagctggggacaagacaactctggggatttacctgttatagacaaactctttactttttttctttttgatctggctgccttcttggtgatattactatgagaatgaggagggaattaaggattattgtaaagtgaaatagcagctttgaggtctgaaacactgagggagaagaaggaaaagaagagacatggtaaggattctaaggaggcctgaagatatctgggattcccattctttttgtccacagcatacttaggttggtcaggtgtaagtgaggagagcttgcatagtaagagcagctccagtgtggtattagtagggttaatgattgagtgtgtgatttacagtattggatctaagggtatcatgaagtcagactgtaaccttggacaaactagttaacctctttgggccccagtctctccatctacaaaatgagagtaattaatggtggtattacctcttagggttgttgtcaagattaaatgagctattacaggtaaagtgcttagaaaaacgcctatttgtaatattcatttttactaataactgttattaggagtgggaatagcaatttcagtgagttataaaacattgat

SEQ ID NO: 123270 - DNA, 1010 bp, Homo sapiens
tcctaagtaacctcctgtctggcattcactaatttcacctggccaactccagcaatgctgatcttaggatatcttattgtatagcttatattccaaatattggaggaaagagagggagtttggaaagaagttttagtttagagagctcttaaagtactcttggctcatcattctttaaattccaaaaatgactaatttgtggggatacataattaaggaagaaaaggttttgtgagggaaaggagtagcagggagtgctgagagcttggcgtatgtattggaaaattgtggtaacttaacaggtaatcaaggatgttgagagaggtgcttgtcatcatttcaaaagagcgtagaatattttatttcattttgtctactgtggatcggttctcctctcatttacttcttttcacatttcatatttgggagggctttgggctctatcttctatttccttctattaaaaaaagttttataagttattccacttggcattcggaacacaataatgtcatacttcactgaggcatactaatgctctggaaagaaagaaaaagaaggaaaattaatttagagggaatggaggctaaattttccatggtgaagaaattctgaccttttctgagttatcgtaaaagactgacattgctaccctttggatgttaagaaaaagtctttcagataccttggcttgtaagggacctgggaagcgccagggtccatcaaaaatgtaaagacatttattagaacatgcatatccgaaagctttctgaattctgtggggaccatctagcttttacatgatcttgagggaaccaaagttgtactgagaaaacccagtttcctcttaattccatcctatgtgaaaacaacttaagtctcaactgcactaagttatgaaaatggatcctctttttttaacatttggtttttggttattcatattgtctatattctgttctataattgtatccaagtgttaaaatatattttataaatatactgacact

SEQ ID NO: 123271 - DNA, 1108 bp, Homo sapiens
aagaccagcatgagcaacataacgagaccccgatctctaagaaattttttaaaaaaagttagtcaggaatggctcatgcctgtagtcctagctacctgggtggctgaggtgggaggattgcccaggacttcaaggctgcagtgaactatgatcttgccactgcactccagcctaagggacagaatgagactttgtttctaaaaaataaaataaaataataaaaataaaagaaaaggaaggcaatgatgttctgcatcagtgacaacagcatgggcattgccaagatctttgatgaccttactgcttacctctccccagattttacataattttatcttcctgtcccattgtacactgacaatactctccttcaagtgtcctcacctcttgatttgtcatatactcttaattttattgctacatttggccatttttttcactttttttctttgttcactttcctttgctccatacttaactaattttccagatttctgtccttaaatctctttcattttcactggatatactcttcccaggcttcccaggcttctgtaacaatctatttgctttgtctccatcccataactctccctgagctctaaattattatatgcaactgctcactggacatacaagttcgtgattcaacagaccctttaaaactcaaatctgtttcccttagtatattcccttgtttgttaatcttgctcagttacccaagccagaaatttaggtatcattcttgaatacattgtttctcttcctttccacacccgatcaatcaaatacacagtcttattgcttcttactttttttttttcttatcttattgcttttattttcagtatttttttgaatcatgaagctgtataaacagacaaggtgatctgtgttgtgttagggctgtctgtgccatgttgctgtgggagtttctatatggaagaggggcattaacaaagctttgaaatgccaaagcagactttccagggaagagcgtctgcagataattctgaagaatgtgttgatagtatcttggccacagggccatgaggcattatcaggggcaggagagagggaggctattcccaggaaaggctccagcatg

SEQ ID NO: 123272 - DNA, 1257 bp, Homo sapiens
ggcatcaaagagatcgaaacactttaaaactattttcttcatcagttgcctgctaacacctttttgaaaaataaaattaatcaacgcgtatttccttttgtgatttgtattgttttgtacattcactcccttttcttttcatgggttggctcccaactggaacatggaacctgtgatccattcaagattgagacaatgtaaaagatagagaactgacttttggggcaggcaggcctccaggaagtgggagtgagctttcacttcaaactgggtgaggggtggtggaaagggaggatgctgattaaaataataaacaactgctggaaagagaagttgattaccacactgctgtcagatcagccaggggagctgccagagcccactgaggctgctctcccctgccacaaagccggcagaagggactagatttgctgcgagagcttttctctggacagacagaacaccttttaaaacaagtttagttctgttgcattgacagcatcccttaggccaggctgacctagggaaatggactgaaactagcttggtggttaccatagcaacccaggctgctggtgtctgggagagtgagaaccggtggcctcttgtcctgtgttttggtgtttcttcagctaagagtacactcctccttcgaactctacataagtcatgctctttgaaaactggctctttacccaggattttttttttttcgttctgaaatcggtctgaatggaggaagttggtaatacttggctttttttttttcttctctcatgcaagtttccaggatatagcttctttttttgctgtatgtaattgagaccaaactctaagcttggggccctggagagaacagttgtggcctgcaggtcattagtgaggtgagcagaagggaatcctggacttcccagagaaagaggagaccatgccagcctcgtggaacacagctaccaggaaatacagaagcaggtctattccttgcgaactccgaagtccatgaaaaaacggacccacagtggggtggctaaaatgtcccagcgcaagctgccgctgctgctgatggaccatagctcaagggcaaggcttgtaaaggattttacaaaggattttaaagtatagccagaaaagatacggtgtttagaagttaaacgctgttgtctgaaggaagtttgccggaaagatgtaggcttcaagggctactggacaatgattggtctgaacttcaacttacgggaactgctgacaaaatttgaa

SEQ ID NO: 123273 - DNA, 1004 bp, Homo sapiens
ttcattggtttattggcaggaaaactggaattacggaaaagtatcagtacctcacacgtctcaaatacaactaaccaccttcccccaacaaagcaataatgccatttctagggaaagaccaaggcctactgctataatgcagaagccacaggatcccttcagaagctgagtaacagccattctacacgcagaggtagagtccctttaccctcaattctcagtcctgtctcttcctcagtattagtaacctgtttctagagagaatactagccttaacgatttaccacttttcatatcagcagttgtcattgttcagtctgaagtttaggtgaccacagtagaaaggggattttgctgtattcctgaaggaatttcaggctttaagaaaacgagggtccactgttggactagtagactcaaatcctgatacgcttagtagttgaggccaacagctgagcagcaggccttccaatggtggctaatctggaaagttatagactggtcagatcattaaaattcccaggtgaaagcagaccttcagcataactttaagacagcagtttttttgtgaaggtaaattgaaagggatattttagttgatatttttgaattttggagacatccagtggttttgtgatttttactggatataagaatgtttggcatgttatactcatataagaatgtttggcatgtggttgagcaccttgtctcagcatgtgtgatgctgggattgtagtttcccagcacaggcaggatgggcaatttcttacattgggtactgatttctagtcttctagaaccagaaagggcaaggctaggagtctcttgcaggcaggaagtattatgttcctacaagatgacagctcattacagattaggaaggcccaattggagggaaccatgccaactcgagtggtacctaaagaggaagaacttcttaccaggggaggatgaccccataccaagatgtgcctgccagcaagcaggtcctaatcatctaa

SEQ ID NO: 123274 - DNA, 1071 bp, Homo sapiens
ttagctctttgtcagatggatagattgcagaaattttctcccattctgtaggttgcctgttcactctgatggtagtttcttttgctgcccagagtaattgatagattcagtgctattcccatcaagctaccattgactttcttcacagacctagagaaaatgactttaaatttcatatggaaccaaaaaagagcctgtatagccaagacaatcctaagcaaaaagaacaaagctggaggtactgaagatttaaagactataattttcagaataataagaattttggaagcacttgaatttcttataatttaaggtgaaatgaactattttgcttgagagcaactcatctgtgaatataaagatatactgattcctaacacttgcattatctatttgcttttttctgtttaggacatccaggcagaaattgatgcccacaatgacatatttaaaagcattgacggaaacaggcagaagatggtaaaagctttgggaaattctgaagaggctactatgcttcaacatcgactggatgatatgaaccaaagatggaatgacttaaaagcaaaatctgctagcatcaggtcagaatagtcaatatcaaaataaaaataatggggtggaaggggtagatacttgtgatttttgtatatcagaaagagaaagcgcagccttaccaccacttctatttcatcagaaatagtttaagattttaatgcaaagcctgtttccttgagttatatagttcaagctctatttgtgtccaatactttctgccacctgttctagactattcataaatgttcatatattttaaatctaacaatactagtaacaatactgttagcaacatctgctaattactgagtgtttaccttgactaagtacttgttaggatctttacaaatgttactttatttcgtaatcaaaaaatcctagtaaggtgggtggtaacattatttcttctatgaggaaacagaggtttaatgaatataaggaacttgccaagttttggggctaagaagtgccaagtcagagtttgaatctagatcttttttactcttggcagtg

SEQ ID NO: 123275 - DNA, 1050 bp, Homo sapiens
aattgatgattcatgtctgcatttggagagagtaaaattaaataaggatgaaccttaggaccagaattctgactaggaaaagaccttgaaaattacccagagagacagtatgattagtgttattgggatcaagaatattttaagatcatatttaatagagagtggacagctcctaattatatataaatttagtgaatactggctgaaaaatatgttattgagcaaaaatctaaaagcagaacattggcaggaagtcctggatcagcttttgttttgttttgttttttgccttgtaccaagtgtacatcctttaaaccaaatggtcttgaatttgactctgacttcactatttactctctgatcttgaacaaactactcagcctctttgagccttggattattttatttacaaaatcagaatagaaatatttaacactcatgattgctatgaagatttaatggaatggtttgatagttccctaatctatgtaaatcctgcctaagaaagcatctagttaagtatttttatacataaaggggctcactggatctgcctcagctggtttcaagatttaatggagaacagaattttcaatgattacttatcataaatgaattaaaatttttttttctaagatgtattgaaaggtttttattcttctggagctcagagagtggaatttgcagttcctcttacatgtgaggaagggagcaatgcagcatggacatggatgctctgtgtaaagttcccattgggaaatacaataggtcagcattggccaactactttttcttagtaagagaagaaaattagggagttctatgtagtgagggattatacttttttaagatttgaattttcaactgcctagatcccatcaggttgcaactttccattcctcataaatatgaacaaaaatatttaaaatattaatagtgaaaagcattcactgagcatccagcaagtcatctatgccagcaacctaagaattccagagctggccctagtgaagatggtatacatggtgctgggattttcagaggttagag

SEQ ID NO: 123276 - DNA, 1058 bp, Homo sapiens
tttctgattgcatttatttgagtcttctctcttttcttctttattagtcttgctagcagtctatctattttatttcattttttttcaaaaacccagctcctggataagttgatcttttgaatggtttttttgtgtctcagtctcctacagttctgctctgatatcaccatgcctattttaaaagattttgatcctttttagtccccaaattctctctctgcaggtggccttttttttttttttgagagtgaggctatctgattgatactctttatgctacttggagtatttaatatgcattggttctgtatttcacattatgcttttattgcgctaaagttgatattaaagttttatagcataaaatgtcatggcagggaacatttgctctaatttatcataattttttaaaaagaaaatgtctgctaagatcataataacagctaatatttatatgctagatctaccctaagtgttttacaggtattaacttctttgaccatggtgtggccattggaacaatgtaataatatgtggctcaataccataggttaatatcttaaacgttatttttcattctctttggatagccatgattaaactttttttttttttttgagacagagtctcactgtgttgccagggctggagtgcagtggcatgatctcagctcattgcaacctccgcctcctgggttcaagcgattctcctgcctcagcctcccaagtagctgggattacaggcacccgccattacgcccagctaattttttgtatttttagtagagacggggtttcaccgtgttggccaggctgctcttgaactcctgaccttgtgattcacccgcctcagcctcccaaagtgctgggattacaggcgtgagccactgcgctcagcctaaactttttatatgctaaaatccaacatgctacatctcctttagcatctaaaacaatacatacaatgataaatttcacttcaatctgtacaagagaagaatgctaatgatttgaaacgtcagctagaagacaggctgtcaggaacttttattatatttt

SEQ ID NO: 123277 - DNA, 1050 bp, Homo sapiens
tgtatagagataaaatgagaaaaaaatatatttggatgtgcgtatatactatacataaactatcaaaacttggtttataattgtacattctatcacggacatccttcttgaaagccttcgttttgtataggtctgtgttttaaattttgatagttattaccaataaatcctctgaatattatagcctattcaaaatagctgtttcttacaggaaatggatatatgtgtgtatacatatgtataaatatatatacttatgtaatatatgtattgtatatatgtatatcatacatatatatgtatatatagtatattataaatacatatatatatgtatttacaaggagtcagtctcttttgtggaagtaaacattacttggtcagataagattattatgctaaaggaaggtagataattttgtgaatgtaatttgcatttctaaatgtggttattattattattattatctctcaacagggcccatttggaggccagcgctgagaagtggaacaggttgctgatgtccttagaagaactgatcaaatggctgaatatgaaagatgaagagcttaagaaacaaatgcctattggaggagatgttccagccttacagctccagtatgaccattgtaaggtaagtggataacctatagtgagtcgcttaattcaaattctagtgaggtagatatttgaaatacaattatagataagtatcagagttgaaccaattatcacaggattcccccccccaccaccgtctgcttttagttgccagtagacatttaaagtgcatacattgtttccatttgtattatcttcacatttaactaaatttttttcaaacactaccagtatctgaagtataatattgcttttagcttattatgaagtttatctaaatttctaataggttttagaatcataatatattgaggttttgggttttttttgttttttgtttgtttgtttgtttgttttaccaagtttcactcttgttgcccaggctggagtacaatggcatgatctcggctcactgcagcctctgcttc

SEQ ID NO: 123278 - DNA, 1025 bp, Homo sapiens
agatggagtctcgctctgttgcccaggctggagtgcagtggcatgatctcagctcactgcaaccttcacctcctgggtccaagagattctcctgcctcagcctcccaagtagctgggactacaggcgcatgccaccatgcccggctaatttttgtatttttactagagacgggatttcaccatgttggtcaggctggtctcgaactcctgacctcaggtgatctgtcttcctcggcctcccaaagtgctgggattacaggcatgagccaccttacccgacctgagaaaatttttaaactacaaattaatcttaaattcaaaaggcatcgagtcataaggaattacaaactatcttgtttgtgtttaataaaagtgaaaaataaggacttgtagtaaaaaaaaaaaaaagtaatgcagatgaagaccatactatttaaaatcattttatgtgttttacttttctgagccaagccttttctttgattacatttttatactgctcaaatttctgttcctatgcaaatgtatacttttactctgatcagccaaaagatatgctgaaatgttatcaactgacacattaatccttagatccttgtgtgattaaatttgtgccttgttcactttccattgatttctttaatatctctttatgcccattttcttgtatatacatatcatcttattttattgtatttttcactcctcccatgtaatgaaagttctcattctaaatctggtcattttaaggtgacactatgattctatttccattttaaaaatgacaaacacgaatgcacacatctcctaaaggaaaatgtcatttatgtaataagttgctttaatacaaaatgataagaccctgaaatttatttatttgctttttgaacccttgtgactagattatcaaaattaccatttgggtgtattttttttctttctactcgaagcaggaatatgatagagaaatagctccaagataagaaaaaggaaaacactgttgatgtatgatatgcaagataata

SEQ ID NO: 123279 - DNA, 1019 bp, Homo sapiens
cttagaatagggatataaagcaatgctttaaagcatctcctatgttcaaacacctagcggttatagatcaaatataaaaaacagaaaaccaaacatggcattgtgggctccaaaacatgacaatcattctacaggccagaaacaaagcagaaaagcaaactagctagtgatgttgatgctgctggaaaaatgtagcagaccctagtgatgagcaggcaggaagccccatagcaaagactcagctcaaaacccttctcttacacacagaaatgagtgattcacagattggcatcctttccttccgtagtgtaaatgccccaggcactgctattatgaaacttcagtgtattgttgatccttaattaaatgtgcgtactttcttgggtgttttaatcagtgtctcagaacattgatatattttcagcaacatcaataataaatactttgttcagtgcttcaacaatacataaacatttgagacctggggcctagcacatagtaaacactcagtaaaaggtggctgatatcttttcccataattgttgggagtcttttctgatagttttgatcatttttattttgtttaaaactatataggctacatgagcagttttaactaaataaaactgtattaatacctgttatttaccacctagtataacccaacagaactagctttcaattactatctagattaacccgtcaaattagacaagggtcaccttatagtctttgcaagtatcagtttggtaaacagcacactcattatttttttcgtgtaagtacatgtttaattccctcaaatgttaacataaattgctacttaaaaaatatgtagtgttttaaggactgttttaaaataaatggataggctaggcactgtggctcatacctgtaatcccagcactttgggaagccgaggcgggtggatcacttgaggccaggagttctagattaggctggccaacatggtgaaacctcatctctgctaaaaatataaaaattaggtgtggtggcgg

SEQ ID NO: 123280 - DNA, 1043 bp, Homo sapiens
aagagcaccctgagttcgaaggagtcggagaggtgggacaggaggaagggtgtcttcaataaagtgaattcaggctcttagacattctgttgagaatggaaactgtgatttttagtagctacattctgatatttacaatcaggtcttcattaatctgccatttcacggcttcatttagtttaagtaagtatgtggaaggtacacaatcggacaagccatgagagactacattaccttcaatgtgtttattctatctgttttcttgagttgctttccaccttattacctctaagctagttacaattttttttcaacacacagctcatgtgtgtttgagaaggttgacctccctccctcctctgtgtatttattcataatgaggctccttggtaccccgtgtgtacctctttcagagatttgtggcacttaaccacgttctgggctagtattgttctctcttcccctttatactataagtttctcaaagattgagtttatagctgatttttgccttctcttatgcctaacgtatttttatatattgtatatatttgtactttaaaatttttattttggtggaaatctttgttgaaaaatctattatatactttaatgccacctaaggatgggagaaaatttgaatgttttcttttggacacaagataatcattgtgctctccagttgttatttttgactcttgaggtatttgggattatatctccttctactaaacacctcagagcatgcgacttctaaaacatgatttcagtattccctttgttgctgttgttgttgttttgagacagtgtcttgctccgtcgcctaggctggaatgcagtggcaccatcatagctcactgtagcctcaaactcctggagccaagcagtcctgcctcagcctcctgagcagctgagactataggtgcatgccacaatgcctggctaatttttgttgttgttattgagacggggtctagctatgttgcccaggctggtgtcaaatttctggcctcaagcaatcctcctgccttggcctcccaaag

SEQ ID NO: 123281 - DNA, 1424 bp, Homo sapiens
ccatttggcaacagcgttaaaattgcacctgggaaaatcttcattactcttatcttgcagcagtcactgaaggagtttggttgtttttataggtgcaggggtgaaagtttagctccacttcaaggaacaaaggtgctaaagagaaactattctgagaatcatagatttgcatgaaaaacctcacaaaagaaaaatagtaattgcctcagcatgagagatggaacatattttaagataattggagactgttttatatgtgccctcattggtttatttttgatttcatgtatgtactttgtttctatcgcttcatttttttttcttaatgtattctaaataatgtaaaacccttctgaggatcttattgctacttgtgaaattacctttctctgtatcattggatgtaatttttttgtcagtcagtcttacaagaaaaaagtatcttagcaaaggctattatattttatcaatctgacatcagtgaaaatcctaaaagtacattttgtgtaaattcaaatacactgtaacaatttcccttaagtgaatattttaaagctgtttctttttttgtatacttaacgtttacagaaattatcttttttcctttgtatttttcttcattcatatctataaaatttacattttggcttctaacttagctgaaatgcttgctattagtcattttcttgctaagtgtggtcagaagtggtatagttgaagatgtcccataatttggtgaacacgtgaggttacaaactcaacttttgcttctcttttgaaaggccctgagacgggagttaaaggagaaagaatattctgtcctgaatgctgtcgaccaggcccgagttttcttggctgatcagccaattgaggcccctgaagagccaagaagaaacctacaatcaaaaacaggtgagactggtttctccactacatcataaaaacacatgctaggagaacaaaaaacccaaaatcaagtaggaaatttccttacagcattttaggatctaatatttaaatcttttcttctaagtgttactttattcaaatatgtcattaattcacagatatctagattcttaaattaagaaaataaaatttttgtatacctcaatatcaattttaaaggaaattaactgcagaaaaaatagattgtctaaaaagtgtactgtaactataaaagtaatttctataagaaataaaaatttatattatatttaaacaagttacatgataaataattgcaagtagtagaaagttattaaaatataataaatatacaaaatatttcaaggtctataagtaagattacttttgataatgacacaccaaagtcctttcttttacaagcagacaacatttctttaatttaaaaataataccctgtgtgtttatttactttggcttaaaatttaaataataac

SEQ ID NO: 123282 - DNA, 1048 bp, Homo sapiens
atattaacaggtgaatctgctctgagtagcctcttgttattgtcatccttataatttattaaatggacataattagaagcactaatcagccgtggcacttgatgatgtacttgtaatctggctcataatgagtggttgtcatcagttattgtacagagtaggaaatggtcagggccctctcaaacactgattgaacatttcagagttattaaatggatcttaatcactttatcagaaaattaggaaataatgtatttcccaatattttaatcagaaacatcttttggtcatgaggaaagagagagagaaataggaggggggtaaagagagagagatattgagagagagcaagtcaagtcttttcctttgagttcttattggctaatcaacctggtttgcttatgtgaaaatctctacagatatctaagcctcccagagctagttataaaatagtaaaaaggaatgaaagagtaaccttcctcaagaacctactgtgtgccacacatgtgccagtagctttctatgtattaactgaggttgaaagagataaggaatatatctaggattatgtaactagttagtattggaactggcatgcaatctcctaatcttttcttctaccaaattgtccaacagtaaaaatgccagttgtgaatttttttctttacttgattgttttaatatttccttttcgtcttttggtagaataaaacaataagattatagatacatgcaaaaaagcaaatagtataaataaggtatttggaattaccatacctgaaatgactttgtaaggttgatccttctatttcacaatagtttttttgtaagtgctttacacagatgtgagaaggaggaagaaaaatgaagtgaaaatatgtccacttaaaagtgtaaagttgaatgttctcaataaagaggagcactaaaaattcaattccgtccaactcaattaagtaattatatactgaggacataccaatctctagactggctactataaaatcaatatggaaggaaagaaaacattcttgacattgggctttaa

SEQ ID NO: 123283 - DNA, 1614 bp, Homo sapiens
ttagccctttgggagactgaggtgggaggatcacatgaggccagaagtttgagaccagcctgggtaacatagtgagacctcatccctaaaaaaaaaaaaaaaaaattagctggccactgtggcacataactgtgatcccagctactcagaaagctgaggtgggaggatcacttgagcccaggagtttgatgctgtgagccaggcttatgctactgcacttcagctggggcaacagagcaagaccctgactaaaaaaaaaatggtgtatacatatatatatatatatgtgtgtgtgtgtgtgtgtgtgtgtgtgtgtgtataaaatttttaaatatatagatatataaaaattatgtataatatatacataattttacttatgtataatatatacataattttacttatgtataatatatacataattttacttatgtatattatacataaatatatatattttcttctgagtagttgagtgtatatgtacgtaatataattctaccctcaaattttggccagttcaatgggaagacccgaagggaggagaatggagagtgacagggcatacacacacacacacacacacacacatacacacacacacacacacacactttagagaataggaaagtgacataggaaaaaaaagtcttctgatctcagaattgctagcaaatttatttggttttctcctgctgtttcctctgtctctagcattagcctctattactgcctttcccaatgcaaattagattaccctcttatcactgagcttcatttgctctctggcctccagtatttagtgactgtgctctgtgttgacacaagaacccagtggagtggaaatgtcccgtaagcttcagctacatggtccagagaaatcaatttatatgccaataggctagccacattccatcctgacaacctgttagaaccacctggggagctttggcatctatctatccatgccagaccttacgctgaccagggaaatcactaccttttgggggagggttcctggattatcagccttaaaaactcactcagtccctcactgtgagggtcgtttctaacatgacaccggggttcttcactggtgaagcagattctctgcttctacttgtaggtggtccttagcatttaccacaaatacctattcagaaaatctcaagtaacatttgtcctttgattttcaaatgagagtacttttttttttaagaatgcaataatttccctttttttcatttttttctgccttttagatgtttgaatttatttattatttattttaccccaaatagtcataccttcatatttcacatgtcgcttcttcttatgtatttcacagacttctagaaagtttttgttttgttttttactttgctctgtgcttggcttaaagtatgcattcagctgagattgttgctgcactgggaaactcttattttgactcaaaagtgattcgttgatatgtttcctttctggcagacagatggtgaattgaacacagagcttttcttttcttctgagtagcttcttgagtggggattatgtaataaatactgcacaaggactgctcaatcaataaatttttacattaaggaaagataa

SEQ ID NO: 123284 - DNA, 2044 bp, Homo sapiens
acttgtagttctgcggttgctaaatatcaatgtctagaatttttttgaaatttagagagacaaacatatgtgttctgtcacctttgacttggcttttatataatatttaaataaagcaggcagaccaatttacactgaggatgaaagttacagtttaggagagcttgcttctgtgcattttatggtgaagttcatcttatgatgatcattttccaagtgatttggaacattttgaggtgaagtggaaattgctaatgtgatgtgtactgaaagatgagatgttatcacaaagaagaatgtgttttctgtctcaaattaatgtacagtttatgtcaattgcactgcctctttatttgcagtggacagttggataccaccatcaaaccagctagataggaaaggaggtattttaaggtgtagaagatagtgaggccccaggagtgtggagccatgctggagacctttctaagctgtcttgagaatttctcctcagtgttgactgcattcctctgcccttgctttaccagctccccatctcttatatttctgacccttggctttgaacttgactttgatttctgtctgtatcctttgcttctcctctggactgttccagcccacatcctgtggcctgtccatgtgttatgcttgctatttttatctgaaactctaagtttatttcaggcattgtggaagcccccttgctctattacaaacttaggatggtccttgaaatcttgctatcttcctgctaaaatgtctgtgggctgcagatgatgccctttattaaaactaaactgctaaacagccttagagagatgatcactatctaaggtatgttatttgtcttcagtatttatttttaggaacacaatacattaatcttattttctgagagtttttgcttataatttatagtcattcttcattaattatacttaccatttctcttgagaatactgaaatgaaaaagtgtctttggattttgtgtaactgaatttatgataaagaaaaattggtttatttcttgtgttatcttcttacatttcagtggctttagaaatatattaaagttcaaaaaccgggtcaatttattaatctcagtaactgttttattatccttttgagtgtgtgattaaatgtagcagagaattcatggatgaagtatggagaaattctttcttaccctggacaatttttaccctggagtaattttttcttactttttctccgtatttctcagtaacgatggtaacactcacacttggctattaagaatatataatcagacatccaaattattctttttcttttttttaatcacagaattaactcctgaggagagagcccaaaagattgccaaagccatgcgcaaacagtcttctgaagtcaaagaaaaatgggaaagtctaaatgctgtaactagcaattggcaaaagcaagtggacaaggcattggagaaactcagagacctgcagggagctatggatgacctggacgctgacatgaaggaggcagagtccgtgcggaatggctggaagcccgtgggagacttactcattgactcgctgcaggatcacattgaaaaaatcatggtcagcatcattgtctttgaaggatttttaagaaatgttttcttgttaaatataacacaaataaagagagccacgtatataaattgttataagggattgttacaaagccaacgccgctgcaaccccacccatcaggagtcaggacaggtgctttccatatgaccctcattggggttcattggaaccccctgcccccaaataacaactaatgcaacttttatgataatttacatttatttttattttttatccaactgtgcatctctagacaatgtagattaggtttacctatttttaaaaaatatttttaatccccagatttcccctctcttcctttttccttttcagtttatttgttaaagacactgaattgtttgttttgtattgattcccagagcctggattttgcagaattgtgtccatatggtatagtctccaggttcctctct

SEQ ID NO: 123285 - DNA, 1017 bp, Homo sapiens
tttataccagtggtgtttacctttagttcttagattttagctaatgcagttggtttaatgactctagaccttatttaaatatgcaattttgatgtagcacataaaaacatttgagagatatattttatctataataggtttgctgaattaattcaaatatcaaagcactcaatggttcatattttcttaatgaaattgaagaagtaagaaattagtgtacaatattttacaatcttagtctttgcaaagagtgttaataacctaggattagtaaagcaaaatctgttaaatttatgtgtttttctagtggatggaacatagaaatatttgttctttattctttttttttcttctgctctgtttctctaattcattatcttcatgtgatgattcttatggtccatcttgatttacttcccattctatttctgttatcaccatttccgaagattagaagtcggggaatatgttatacttgaaagaagatatgtattctgtcatccttatctatgatcctggtaacctctagagctcagatgttagttgctggttggaaaagaagagaaaaatctatgctggtgggcaacactgttgaattgcaggagtaatattttctttactcataaagtgtggcatttgaaggcttttaggccttaatgaacaaagtgcatactaatgcaatttaaatagctagccaggaggaactagtgctgtccagggaatcagacatacacagtttcatttaaggacagctgcaaatgagattgtccctctaagtggaacagtaactagcattacatgaccaaggctagaaaaaggaaatggaaatgtcagtaggctgtgtgcagttgttattgatttgcatttagtttctcagtttagtaaccctttacattttcataatgcagagaactaactatagaatgtgtatttttaaaaggctaggcatgggggctcttgcctgtaatcccaacattttgtgaggctgaggtgagagggttgcttgaggtcagaagt

SEQ ID NO: 123286 - DNA, 1159 bp, Homo sapiens
gatccttgtaaggaggtactaacatcaaagaaaatattgcttaatggttattatttgtaataacgtaatgacaactgagaagtcttcaaggtggaacagaaatgaactcatctttagctatggtttctcattggaatgtctgataactaacatagtatcatatcatcattgctttgtcataggcaaagattatgaactttttcataataaagaaatcagttttatcttttaaggttttaaattaatttttctgcttaaaatgtgcttatttaaaacacaccttcaactttcaaagtaaaaaaaatcactccccataaatctttaagtgggaagattttgatttattaggctcgctgcgattatatttagtttttctgctattcgagtattgcgtatgtagccaaaccacctatgcagaattttatgtaatatttttcaactggaattgataaatttatggactattcttgagatcttcaataaacaatttgagcttctactttatcattcactagtgaagatactaaagaatgtcggatttatagtcaaccagattgagtttaaacattcattctgtcgcttaccagacctgtgaatttctgaaggttgatttctttgtcttaaaataccgtattacctatttcctctgattgttttgagaactcaatgacaaggcatatcgaattacacaaagcacctagcacagttcttgacacaaatgctttcaataaatattaattcctttcctttcatttcctttagcaaatatatgtaagaaagcaatttgtttcatttaattcaatttaagtaaactttaaaacttagggcaaagcttatttctcaattatgacagtttttttgcaactataaccatagaaacagctaaaaagtactatatcttctaactaaattgattacatttatatttcctcttaatgtttttgtcactcttgataaactgccttacctcagttaaaggttgggcttttcttttacaatttcaagaatcttaatcagtcattttctgccccttcctgccctacacctctctacctctcaccctcctcactgcccccacccctacctcaactccatacagtttttctgtttcacaaaccttagaccttaggtagttaatctttggtatacgccttcctgg

SEQ ID NO: 123287 - DNA, 1036 bp, Homo sapiens
ctgagctcgaccgtttatttactggctgtcactctttgggcaagttattttatctctacacatttagttcctcatctatcaaatggaactttaacgtgtatcttgctggcttccttaccgaaaacatatatttgaaaatgcttggcaaagtttagaatgctgaatagttgtaagatattaatgtgacatgaaattgagaaaaaaagtattggtgacaactggctacgtgaggatctgatgatatttgcaaagtatgaaaattccaagtattatttgaatttttatatttgttcatttagcaaaattcttttatggcactaaattcacatgtactattcttcttaaataagtcttaaaataattggttaatgtaggaataatatattttttataagtaagaagtaactagaattgtaaaaaaaaaaaaaaaaaaagtacctcaatttaaaaaccccataaaatctcagtcatagtaaggtctagtgcaaaagtaggagactgggctctctgtatgtttcagatgaaagtaagaaattgggatttttctgcctagacgattgccttggttcttcacaactttttgcctatttttaaattccttctttttaaatgttatagaattgaatttacttaaatgccatctgtactcaatagctactcctgtgactacgatgcaaagtaaacaatgttattagtcatctggaaaattcggtcttgaaaaatctaatttttaatctggatataccaggtaaaattaattttggttttagctttatcaaaaatatatatggagtacagtttccagatggcactaaggtttaaactgtagtatttataagcaacaccatttgaaagtttaaaagtatttttatcaacaggttagattagttggcattagaccttgaacctgtattgtttcttgttttacttcaaatgaatccttaaagccattttttgtttggcccagtggatctcataattataggaatccagctcagaaaccagagcagttcattgaatttgctataaaatgttc

SEQ ID NO: 123288 - DNA, 1459 bp, Homo sapiens
tggacaacaaagcaagatccagtctctaaaaagtaaaaaaaaaaaaaattggagaaaaatgacagaatttcaaaatactcttgacataatgatatttgtcaaattgtacaaattctaaaccatttttcttcctctaagaaaatccatataaaaatgtcttatactcttgtcattttattccaccaataagaaataatgatttatcatgaaaaagtgaaatattgtcaagtttttctttgtcttatagaagttatctgcattattagcataggctcatcattctttgattctgttgtccagttagtttctccttcttgcatactgtttcttcttcttatatgacattttataagttttgtataatttacacaggctcttagtaggcgttgatccttggcttagggctatatattgtcatggaacagaatgataaaattctacttctatagtcccttggagtgtaacttagtaaagatattaatttacaacgtgctctagtgatgagtcatagttgaccctattttatgtgtcagacgaacagcatcataatcatgacaacacttacttattgtcaggagacagctctgtctcaggttagctgtgtgacctcaggtaagtcagatgaagatctctgggccaagtttcctttttatcatttctaacatggggtgtggtatctccaaaatctatacaaatgctaataatctgctcttccagtatacttcctgaaaacgttgtgtgaagtccatgttggtgaaatagtcttttcttataattttttattacagtctgagatgtaagctcagggtaaaaaacaggtttgcataatatataataaatataataagcaatatacgttacattagcttatgggagtttaatatttttatcagtgtataacctacaatgcactgagttgtgaactgagttgagaacaaggtattaaagcaattgattggtgtcaaatttgcccaagtaagaatggaaagaggtcagacgctggttaagttggcatgtctctagtgaaagaagatgtgattatctaactgaaaatgtttaaaactgtttacatttttattgtacactataacaataataatagtaatagtattagagaactttaatttgcttggttgaatattgacttgaatttaatcttacaaatttagatataaatctgatgtactgtggtaggcaaaataataactgctcccaacccctgaaagatgctcacatcataatccctggaacctgtgaaaatgttaggttacaaagcaagggagaattaaggtcgtaaatggaattaaggttgcaaatcaactgacctttaattagggagattattctggattatcctgatgggcttaatgtaatcccaggggcctttaaaagtggcaggggaggcagagatttgagaatgctagctactagcttggaaggtaaaggaagcagacatgat

SEQ ID NO: 123289 - DNA, 1101 bp, Homo sapiens
ccagcttaaatgcattttatagtcaaatcctacggaattattcattatttacaatgttgtcttcctgcctcctgtcttcattatcatgagatactaatggcattttttaaggaagactctaaacttttgcagtacctattatcaaataggatcatatatcttatttgaattttggacagaattttttttttcttgaaattctgacctccacgcttcttttctcttaagttaatttttgtttctaaaagtatatctttggatttcctgcctttaaaagcttagaggacagtagacagtgtttgcgagtggatgaggaagttgaatataacctgaggaatatataagttattcctgcagctttctcacccactacctccatcctctccccaggggcttttccacacagacacacacacacccacacccacacccacacacacacaagcacgtgcacagagtgagaatcaatgttactgatgggggtactccacattcttcctatattctagtcttgggtgaaacaaggactgaaaagattataaattccaaagtaagtacaccacctctcagatctttaagaaggtgttactcaaataaatgttgtcatatcagattgccaacatttgttttcactcttcatactttaggcagttgaatgcaaaatcgattagttgggagctcgtgcttgattgctatatatatgtaacttctataagtgtacataaagtaaatgttaacagaacctgtattttgcctgtgtcaacttccttttctggagacttctggttttctcatagtacctcccaccttctaatacactgtataacttacttacagtgtttgtcgtctcttatttttccccatcctgaggcatggccactccacttggcaccatggagttcattgctaataattataggaccagtttgagtgcaggagaaaagttggaagccaaacagaagtggctggagtggtgaatgggacacgaggaagtagatatggtacagtactcattggtgaattttgcctgtgaaggagagaaaaaaggtgataactagcagaaaatgtagatttgaggtaggggtgtgtgtgtgtgtgtgt

SEQ ID NO: 123290 - DNA, 1006 bp, Homo sapiens
gctttgaaaattatgctttgaaaaatgatatgttaaggttgaaaaatctgctccttgaaagtcaatagaagttagcaataaattttaagctggctgcacgaagaattgaggaaagagaggtataatgtcattgagaaaaaatagcaatgcaaagcttgaaaataggaaaagcttaagctatgtatggaagagaagtctacagggctgaaagacacctccagatgaggcaatgcaaggaagaatgagatgaccttgacttttgcataatccacagagcctcaaagataattagcaggtggtagtagttgcagcaagtgttgcagaattacccggacaaagaaaagaaagccaccacgctctggctactgatcagtatgttgagcgaaaagagaataggaagtaaattacgaacacacaaaagggatgtttggtctgcgcaggagtccatggtgacagcagttttgaaagaggctcagctgcacatccaggatccagttgatgggtctggaagttcttctcaggcctgatgagctataaaatgaggacaaatgactcagccacaaaatttccattgacagaagactgctttttgtcattatgaacatggtcccagttttcgacaacacttatgggtggataagcatattaacacatttggtgttttcttctcttggttctttggattcctgaagaaaaaaaccccctcctcagctcttcccctcaaacctgagaggaacagaagggacgcttctccaacttctaaactaaacgagattggtaatgacaattaaacaactaaatgacagttagaaaagggctagattgtattggatttcaagtatatgaggtgcttttttcagagccaactgaccttcacttttcctacagccttctcccactgccctccagccaaggcctctgggccactcctggagctcatcagtttattattaatctgcttcttcctctcccttcctttcagtttactagaaataccctgaccctt

SEQ ID NO: 123291 - DNA, 1038 bp, Homo sapiens
gtcatggctgtctctcattatgtgcaaatctccacccagcataaggcagagggcagtgtcattgttcattcatttgttgggctccaagattgtgcaggagataaaacactataaagagacttgattctcacactgaaggaactcatatttcgagaacgttgcacatggacccaatgccctgcttacaaaagattcctgctgccctcagaatggaatggtctttgcctggctcacctctctgtccacctccttccctctgctccaccggggcatcaccatttcatcatccacttagtgatagaaatggcaaactctgtattccattcctcctgcctaaaaagcacttgtcttagctctttgtataggttgatgcaaaaataattgcagtttttgccgttaaaagtaagttagggtatttcattaaaagtaatggcaaaaacctcaattacttttgcaccaacttaatccttctgttcttcccttggctgggacactcattcctgtaggtctcaatgttgtcgatcacctctcttttaatgaggttttctatggctcctcatagaactgttcttttccttacatgacacttctggtgcttggtttaggcactaaggcagagtgtcaatggtaatttttaatattctgtttattagttattgtttgcttctccatcatgggatggatgagtctgtgttcgtctctacttaggacctcatacaatttctggcacagagcaggggttgcttaggacacactgagtgaatgatttgagtttgaaggttatatagcagtactccagaagatgtgtccaaggagatttatagcagtacttttcatagtaaaactcattcagttttggcatatttataaatataatacagcaacaaaaatcaatgagctagtaatcagcatcaacatgatttaatcttagaactataaaattaaatgaaaaaattaaatggcagaaaaaaaatgtgtaccactctgttccatttatatgtagttcaaacccatgcaaaactaatgctatatacactt

SEQ ID NO: 123292 - DNA, 1180 bp, Homo sapiens
cagtaaattttgtatgtaatgatgtacatgataaaagactgtttaagaacaattagtttggctgtgatacaaagaatgaagagagcagtgcacaggctgcttgcaggagttaagatgaggagagcagtgtaatatttgagatgcgctgccatttggagtagattgagagatttatgccttgctacatttaaaagcaaaaagagcctggcaaagggaaagccagaaaaagaaagtaggaataattaatattccaaagagcaaaaaatgagataagattgggaagcaacagagttcagattcaaaagtatgaaagtgtggtaaaatgtaagaatagaaatgtgtttgtttctttaaaagctgaaatttagctaaaaaggatagattcttaaattgaagaatcaagctaaatacttgagactagaaatgcctttgttgtgatgttgttatgtaatgtaatgtaatgtaatgactgtaaacattccttcttctctcctggttagtggatctcttagagttgagtacaacaaatgaaattttcaaacagcacaagttgaaccaaaatgaccagctcctcagtgttccagatgtcatcaactgtctgacaacaacttatgatggacttgagcaaatgcataaggacctggtcaacgttccactctgtgttgatatgtgtctcaattggttgctcaatgtctatgacacgtaagtttatattttttctcattaaaatacgatcactgaatgaaatatgttaatagaaaatgtctgatttttaagtgaattttttaataagtgctttcaaattactttcccagtggaaatatttatgtttgttgttgaaactgaatgattttacaaatcattgagcttcttaacaaacaatagaacagaaaagaatgtacatctttcattttaaaatgttgcttcaatttacaaagactgtcaaatttatagtattctttgccaaaatgctaggggaaacaatatagctaagtcctactttcttcttgtttcataatgtctcacagtatttcttttttcaaaataaaaaatcttctgtttattgttatgaattacagtaatttattagctcataataatctgctctacaatctttgtaatccaactgaagagtgatttgaatggccatgaacgaggtagtcttttaatatttgcttta

SEQ ID NO: 123293 - DNA, 1125 bp, Homo sapiens
agccactgtgtgcttgagggctcttaagaaacctgctgaagcatgagtctcagttaccataatgaatacgggatttgcgatatctctgtctgatattttttaatacatttcattttaatgcacattttaagttctcctagggtaaaatattaccattagccttaatccaccattaagttgctcttcaataatttgaatcctcagaagatgctttttcatagtaaattcaccaaaatagttggtcaaaggtgttttaactacaaaacctgtaacttaacttttacatcccaggaaaattgctaaattcatagaatacttaggaactccattcagtcctatagaatatggtagaggtatacatcttgaactacattttaaggaagaactggagaagaggttcagttgccttatattgtccatggctctgacacactgttttggttttctggggctgccataacaaagaatgatagactgaatggcttcaacaagagaaatttatttcctaacagttctagacactgagagtgtgagatgaaggtgtcggctgggttgagtctttatggaagccactctttctggtctgcagatgatcgtcttctccctgtgtcttcacatggtttttccttgtctgatgtgtgctcatctcctcttcctctaaggacaccagtcatatcagattatgacccactctaatgacctcattttaacttaattacatctttaaagaccctatctccaaatacagtcccattctgaggtactaggagttaggaccttaacctgtaaattttaggggacacagttcagtgcataatgcacacatatgctcttttcactggacagcccaaagggaatagtgccacttggttgggaggaagcagtgtgtgaaatgccgtgattcatattctagggagttaaatgttggcacagttccacttgcctccatcaaatgggaatatgtgggaaatgctacaatttgccactgtttctcatttagaaagacagtatcttgaaatttctcatttttcattttaaaggaaaaaaatctttcaggactaacctcccttctatgaaaaagaaagatggcaaagaccatgctggatcagaatggtgcccatgcag

SEQ ID NO: 123294 - DNA, 1281 bp, Homo sapiens
gatatatcactagacttttcttcctgtatgaagtcatatatatatatagtgtgcgtagctctagctgttttgaatcttgcatctacaattattaacgtataggtttaattcatagtatttttttttttttttttgagatggagtctcgctctgtcacccaggctggagtgcaatggcacgatctcggctcactgcaatctccgcctcgcaagttcaagtgattctcctgcctcagcctcccgagtagctaggattataggcatgcgccacccgcctggctaattttgtatttttagtagagatgtggtttctccatgttcgtcaggctggtctcgaactcctgacctcaggtgatccgcctgccttggcctcccaaagtgctgggattacaggcatgagccactgtgcccagccaattcataatatttttaaaggtgaaatcttttcagctttataatcatcattttcattttgctttagttcgttcttcttagtttatgtgttgtgtgcaaagtggcttcaagctgtgtgttcttctagccttggccaaacaccctgttaatatatgtcatgaaattacagtattggtttaatattaattgttaaaagttaatagaaaagttgcatctttaagatacaattatttttgatggtttacccccaagaaaatagatattcagaaacaatgaacatgctgtatatggttttaaatgcatctaacacattaacattcttataattttaggggtcgaactggaaaaattagagtgcagagtctgaagattggattaatgtctctctccaaaggtctcttggaagaaaaatacagatgtatgtaagacctttcttataccaacagtgtttttagtaataataatgattataacaatttattggaaacttaaattatataatttgttagtagtaatagttctctctctttttttaacccttactgtgcctataccaagttagacagagggtggcagtgcaaagacttggggctttgtgtgaaatggaaagctgattataactaagaggtgaggtgccaggatggagtgagacccaactacaaattatacttcatttaattcttagaataatccctccataatgtaggcatttgagattttcattttctagctgagaaaattaatgctgagataggttaagaatctagtctaagactgcagagctgataagggatggggctagaattagatactaggtttttctgactccaaagcctaaacttttttttatttctttatacttccaatg

SEQ ID NO: 123295 - DNA, 1038 bp, Homo sapiens
caagatttttaaaatatatatacattaaagatgttattaaagtatcagttttttttctttgagactatgcatacaaaagaaagatgtacgaagttttatactgatctaagttactaatttgaaactgagaaagcactttcatttctttttaatgtttactgcatataaagacattttagaaatgttactactgatgttatacatatgcataaagtacaagtctacagatattttggcaaagcatatccagtgatttatcattgctagggaaaaaaaaggctcacaccgtgtctttgaggagaattgatgtcatgggttattacattttataatggccctttttcttattttagaaatacaaaaaatatcaaatgcaaattctaaatatgatttatagtcatacatgtaggttcacagaatgacctcaacagcaacaggaggataaaattggtagatatttagctttgcacataggaaaattacttagtattgggaattgaagagggattggggagttttatgtaatttatcctgataaattctgcaaagtacatccatagcaatatgctttctgtgtgatgatataatgggactagagcaggacacacaaaaatgacagcttttatttagcatttataatggccttcaagtttgtaaaattatcggtgagtctttcacaagtttttactgtcttagatgaaatttttttttttttttttgagatatattcttgctctgttgcccaggctggagtgcagtggcgtgatctcggctcactgcaacctccgcctcccaggttcaagcgattctcctgcctcagcctcccgagtagctgggactacaggtgcacgccacaaggcccagctaattttgtgtgtgtgtgttttagtagagacggggtttcaccgtgttgcctaggctggtctcaaactcctgagctcaggcaatccgcttgcctcggcctcccaaagtgctaggattacaggcttgagccaccacacccggccaaatgagttttacagaattatttatgtaaaa

SEQ ID NO: 123296 - DNA, 1023 bp, Homo sapiens
agagaatggctatctgccaagggagtattcagcagaaaacaaaatttcatttagaaagaagatgtcagtcatacctgtcaagccatgctgataagccaagagatgtcgttagtgtatgtgattgtttcaaaccaatagcctccttggcaaaagtaagctggctgtagtatatgcagaatgatttccttaagattgatttgcaagtgatttttcaggtcattttagaagctactcagtacttagtagtttacagccacacaacttttaaattttgcttccattttcattctgttggttctatcatttaattttttttctgtagatgtgggtataatttatgttcttagttctaccagcaattctgacagaacagatttcggagaagatgttttccactcagacccatagaaacttatcgtctaaggttttgcttttgtaaataagattctgcaagtacaagtcaatgtgcagtgtcattcttacgccagagattttaaaacaccatttccattcaaggatgcattgtgatcaaggctttatttagtttttcctttgttacacagtatttcttgatttcttttttttctagtgactaatttaaaccaaatataaaagtgctcattgttgaaaactgtatctttgtgagggaattttaaaattcatttcttattggtggtataattgatattttaaaatttgatgtttcaacttaatagatataattcttttcttgcctatcattttccattcgtattcaaacattaaaagaaatcttctgacatgcatatttgtctccctctcatgtataaacagatagaagcatgtttcagagacttgaactccaaaattttatattttattttttggtaattcggatgaatgaaatttcttaccacaaatttagactaaatgatagtaatgcaagccaataaattttcttttgttttctctaggtatagaagccttaagcattttaactatgatgtctgccagagttgtttcttttcgggtcgaacagcaaaa

SEQ ID NO: 123297 - DNA, 1045 bp, Homo sapiens
ttgttttatagttaaaaaaaaaaaacctgttaagaatatctttaaaataagtcttgtgataatgaaatgtaccgcttagcagtatgcatgtaccagttgggactactggtttctatatttaagaagtaactcttgctaatgagggtgctgttcaacaatgattttagcacttgtgcatgatccaaatgataatgtttaattattctgtttgcgtgccaagtgactttttttatataaccttgatttgcctctttgtaagcctttgttttcctctgtatgtaacttattcatatttgtaattaacaatttaaatccactgtttggagcattaaggaattagttaatactgatatctcaagttaagaagtgactccccaaaaaaaagttgtggggagaattaaaacaaatattttctgttttgttttgtttctttatttgtggttctttatcttgttttgtttaaattgtttggtaattagaagttatttacgggatttaggttatttggtagcattgtaaatagcttcctttcatgtgttgctttgccggtctttggggataataataagagtcctttgagctgacctagtaaagccgtttattcaaggatcacttgattatgaatactgggggaagggggttagcttttctacattctagattcttctataccttatccttgctgcttcttgtgatacatattagtgaaaagggaactttcagccatgtattaatgcttttgaagttcagtagtgcatagatttcagcataaagtaagattatacagtttgcaatatgaacagggacatatagaaggatacacatgcattcatatagagatatacaaactcaagcaaaagatagagtaactctaaattatgttccatgtgatgtatctatatttgttctctgtcaaggataaaatggaagaaaattgaaaatttcctaactgtattttggttggtaaaatacaatctcaaaagtaaaaaattatttgatttcgccttaaaagtgattttgtttagggtttttctttagggttttg

SEQ ID NO: 123298 - DNA, 1581 bp, Homo sapiens
taccagtttatctcttttatttgtggaatggctaagaaatagaagaaagaacacagccaaagcataggagatacctttttccctctataggtaatgtcgtgtgtgtgtaaacagaaagaaatacaatgcaaatgcatatttagataggtccatgtataacacatacacatacaaaaggtaagaaaaaatttcaactgtgtgattactgtgcttgatatcaaactgtgtacacttaagatatattctttccacttgatatcaaactgtgtacaattaagatctgtgtctttctaaacattcttttgcatagtacaatttagaaaaagttttaataaagcaatttcaattgaaagagagctgttcgaatacattcaggaacagtagacttttggtcctctttttgatttgtgggtatgcttttgtcctttccttcaaaaggttgtgtgataatagattcttatttgtcttagtatctaatatatgtttaactgtgctgatgccttaggataaagacaaaattgtactttttttgtatcccatccagttaacctttggaatggataattctgaggcacagaattattacttggtgctttaatttacgggataatttgataggtttgaactaagcgatgtgccttttaatcttttgctaaaccattggcattttgcatcacaaatatctacacgctttacaggaatcatgcagatagatgcatattttatactcctttaaaacatttttaatttgcctttcaatgtcaaaataatcattggtgtcagtcatcctattctgagtgactctattaggtaaaaattaacagaaaagcatgccaaataattttgtgctgtgattttggggtgtaattctgaaaatgcctcgcctcaattcattcaattgaaaatgaatttatgagcattttttgtgagaggaaaacaagagaaaaaaaggaagaagtgtaagcttgcatcagatgcaccaagatcctttttggacagatttatgaactactagatatagtgggcaggttttctttttttaatcctagaccaagctctcgggatttgatatagttcacttttcggctgagccctttctagtacagggccgcttaatcttctggtgtaacaatttatgtgagtgggtaataaaaaagtttgattttgtttattctcctatttgtgggaggagaacattggagaaaaaccagcgaagtggcaaatgtgttgaagttatttatgaagctaattagaattttcttttgcttctttctttttcatccttgcaaaatgtagcattttgtcctctgcccagtagttacacatgcatgcatggaggaggggatttatggggaaaatgagttattactaaaagggagtaaacaaatccatgctaaggtttattcgattaattttataactatgcaaaattttccagaaaataaatcaataaatgagtagagtttgattaaagaatactccattgaaaataaatctgaggaacaagctaaaatagtagcaaaagtaattcaagggttgtgagaattattattggctaaagagataggttggtttccctaa

SEQ ID NO: 123299 - DNA, 1016 bp, Homo sapiens
tatattcattccatttgtcttatatttcttattaatttaacaaaggtaatttgacagaatatgtgccctttctgtgaaatcctctttcttccactagctaacattttttccataatatctgcatttagcacctctgacccacacatacttagatatatactcctacccttcattgaaaactgttaactcctctgccaatattttattttattagcaactaagaaaagcctcattgactttagaatactaaaaagatattatatactaaaaagctttctagccaattagtttatttctgatttccccatatgtgtatattccacttggttgtggaactttctcagcaaatattttatcactgattatcccactattgtgtgtactcttacttttggaactttttattcttttttttgtgccctggaattcacatttttaatcctgaataatatctaaaagactaatactgtcaagcttatgtgactaacaaagctctattgtggtttggatctgatgggaatctgtaaagtagacagaaaagttgtcaaacatagtagttgggtgttttcactaaaaaaaaaaaaaaactatggagagtgctaggttaaaatacttaaagtgctcaaatatagaatattctctttccatattttctaaaacttgttttatttattatggttataaataaaagttatcaggaggtttttcaatttcaaatttcaaagattgcatcttaatacttgacagtaatgtagtagagatttatacattatcattcatgtactatgagtgtgaaacaattcccaaatcaaaataaaggtgtattcataatgtttgtttcatatttaacctactggtgtgcatttcatgtaaagtagttaagtatcttgaatctttcctaaatcaacaaatttcctcaaggctgaccatagccaaagcgttaaaggaaataaaagataataattcagaacaaaatcttacttctttaaaatgttttgtcatgccctgtgaacaca

SEQ ID NO: 123300 - DNA, 1004 bp, Homo sapiens
cacatagtagttaggaataggagtgatgtctcagaagtagtgatggagagacctttgcagcaggtgcagagagcgtagagtcccagcacaggggccaagagctcctctctcttgaagaatccctgacatcaacatgcatgtcatctttagtctttttctctagcctgtgctgtgtggagctcctatgtgatataataggagtgcctttctccagaaatgatttattgactcaaagcaggaacaactttctctccagtgattctctcaaattttagaaaactgccttttcacagttgctctcagtctttttaacttaccagaataattcaaaacagtgtcatttctgccttacctacacagaaatttgtgtaggcaattcataatttgaccatacacttttctctatgtctctcagtgtttcagaatttgggtgaggctgttcaatggaaggcttacttcagggcctctcaatcccacaatttggaaagtaagagtttcccaagagtgacccaagacgtgggtttcttgaagcccttcggaatgtttgagtcttacttagtgccagccacatacattgaaaacgttacatttttcattccgcgaacttgaagtttccaaatggtgctgtgtaagggatggattttctcttgcaatctcttgtttagaatatgaagtgttagtgttaacaacttagtgcataggtggaattgctacagaaggaagctgtgctcaaaacctttatttgccatggctggttgatgcccacaggagagcaaaaggcttttctgttcacccttgccttcccctactccctccatcccattagacagtgctgcctgatggctcatgtgccttgagaatcacatagcaatgcttttagagatagctaatatccaaatggcttctatatccaagactgcagagctcttatctcttctaaacaatttaggatgatgaatgctagaagtagatggaaaattcaactctaatagtaaaaactagca

SEQ ID NO: 123301 - DNA, 1025 bp, Homo sapiens
cctgatttctcccccaaataccgggcctcacactttccctccagacgttataggaagggtactcttcatgcctgctctttttttctcacatagctcccagcacacagcacatggtcactgatgtcctttctcccactcagcatagaacagtgagagatggaaggagtgcagcatgctagatgactagggacaacttttatttgaccaagaacagattgttgccattactgggggacagatctcctcttttccccccagcattgagaacgagatgatcatgtagcaaaagaggggacgaaaagcagatgccttagagaagagatggcagtggctgcccttgcaaagcccgccagatcgtcttcactgttatgggctctggaaccaaaaaggaattgagctatctgtgtggaaaggagaattagatgccatattctaacttctccgttgttcctaactgggcccatccaagggactattattatcccaagtgtccagaaggacactgaggattaggccagcactttccttgatgcaagtacttggccaccattttcctgggcgttagggtccagggtgtgtcaagggtgggtcaagagaggcagaaaccaaagacttatgccttcagtggtcccttggtcagaattagtactcagcaaagtaagtagaacatgctctgttctgatacataaaccaaatacacagtatgatttaaataggaaatgagattttttgcaagactaagtgctcagtgaatgctttagtgtatgcactaaatcttaaatcacatgggatatgagaaactaaccaggaaaactagccctcattgaagcattaagccaggaaaaaaaaaatgtgtttcttgtttttcctattagcatccatttaacaactgggctattattaccctatgtagagtgatactttccacgcatttgcatgcctgagagttggaaccaacaaagtaacaggactgccattaagtgatttcttttgttttctctttcagcaaatgttcccagcaggcc

SEQ ID NO: 123302 - DNA, 1706 bp, Homo sapiens
tttccgtgatttggccacattaataaattcataaatttcaatcaaatatcttatatatacacacatatggtttaagctacagccctgtgtatgccgtttaactttatttgacgttgcccacttacttctttgctgaccacttggataaccgtaataaaaatcctataagcctaaatggcatttcttttgggatatttttcctgcattttattccctttttatataagtaggaattaattatttattttatgtcttaatctatttgataaagaagactacattataataatctcaaagatcatattaccaaaggttgcccacttgagcatattttcattttgacacagaaacaaaatttagtacaacctttcctagttcccatgtcttgattttcatcattacatgcacagcagacctttacctattgtgataccagaacacatcattgtctttggttcccttcaaagagaattttattgttgttttgtattttcaagtccttaatagttcttgaaactcctagttgttttcttgttgaaagcagacacacatttagtgcacggcttattttacctttcgggtgaaagatcagatgtttttatacccttcacttgatcaatatatttggaaagaatgtttatcaaaagtctatgtcactgcttctacagaagaatgaaattaatgcttaggtgatggtacctccacctacatctttttgagtgcattcaattatgtattttggtttagcttctgatttaacatttaattgattcagtttaaacatgttacttaattagcaaatgtagaggaaccaaaaaaaggtgaaaataatatgttttgattcaaacctaaagacataaaaacataaagacattttaactttgggttctctttagctgggatctggccagaaggaggcttaaagttagaaattgctattattttagaataggttgggtgggttggggggcaagggtgtctatttgcagcagagatattttgaaaagaagaaaattgttttatataaaaaggaaagccatgaccacctttctacctcagatccatcttcatccattgcattggaaactgctttatgctgctgcagtctgcaaagtctagagcttttatcaggccatgtcatacccaagaaagcacctatttaaagaaaaaacaattccctgagctctcaactccaagttgtagatttggtgtcttccttgttcttactttaaaaagtcatgtgttaattttttttctgcctgtatttgtatgcaaaatgtcctctatctgctattaaagaaaagctacgtaaaacactacattgtaaccttctaagtaataataaataaaaagaaatatattgcagtaacaatgggaagtaagtatgtagttcttttgaaatatgtggtaaagaactaatcacagactatcatctaatctggttacatattgtatttttcatcctgaataaaagtaattttaacacaagatgactttgatattcttcagctggattcactgatagaatgtgagttttgaatgcacatttatgaaaacaagatatagagatagcctgtgtcctgatacatctacattttttcctgcagtttctctcatacacactaatacagtctcctgttgctctcattctctctctctccccatctcttacacatacatataattatatgattctcaatttattt

SEQ ID NO: 123303 - DNA, 1006 bp, Homo sapiens
tatgtgggaattataggagctacagttcaagatgagattttggtggggacacagccaaactatatcaattcatatatgaaatgctacttgacaataaaaaatgaatgaagtactgatacatgtctcaacttggataaaccttaaaaacatcgggctatgtgaaagaagccagacacaaaaaaggccatatattgtgttattccacttatgtaaaatgtccagaataggcaaatctgtagagaaaattgattagtaattgataagggctgaagtataagggtatgtggagtgattgcttatgggtatggggtttcttcttggggtggtaaaatactgtgtgagtgtataaaaactggtgaattgtatacgttttaaaagatgaatgttatagtataacttaacaatttaaaatatccagtatgtaaagtttacagattttaatgtcattaacctaaacagggttttggaattttcacctgtgctttgttttgcctgctcttaatttgatcaatactgtgtgttatgaacagaagtgcttagagcattaatctcatttgtgtacttcagagaagatccaccactgataatttattcatttatatttgctttcttctgaattaaacatttattcatctttaaaatttaaaaatgaaacaaaattgattacaacattacaactcataagcactctcagtcattcacaatcctgcaacagtaaaaggagcagcagtgatagtccaccattaatgagtgtggcacagaaaatagacttctggttatttattaatctattcttgttgactttagcatccattcctttatctcccactccactaaacatttctggaaagccaaatgagtggaaatgatgtttgtaaagggatgaacttgaaatagtggattgatgtcaaactttgaatctttgacactattagcaaattaattataagaaacactggagctgagatcttgaagacagtgcagcctcaggttactgaaatattta

SEQ ID NO: 123304 - DNA, 1146 bp, Homo sapiens
taaattgctttgcagataacagtgcctctcatatagttgggggtatatatgtgaattaaagggtttgtatgcttcaagttgaacaacagtaagtataattaaatgaacttaacagaatgaggttgataaggtaataaacatagacaagtagcagtacagtagctttactgacacattgcaagagtccaaaatcaaagaaaatgagaaggtaatagttgtgataattcacacactaacacatttgttatgattttttaccgtattcatttcttcttaatattttgatacttctacaacagttaggacttctcaccaaataggttatttgacctgaatttccttaatcatccaccttctcttattccatcactttgcactctacatttctgctgcattgtattactcactatttcccaaacacttcatatccttcaatgtctgtgagcctttacatatgctatttcttttgcctagaatgttctcccctaacttctttgttcattggtgaagatccaattctgatctcatctgctttttacctagaccatctccaacagataatcatcttttatctatattcccagtttggatttcatttattttaaagtcatatcattttacagtataatcacactgcactgccattatctatttgctggtatctatatactataattatgaggtcatctaggtagaaaccatatcttatgtggctttgcatctctattcctagctgagggccttacaaacagaaggtgatatggtttggctgtgttcccaccaaatctcatcttgaattttaattctacagttcctacgtgtgagagggacctgctgggaagtaattgaatcatgggggcaggtctttcccatgctattctcatgatagtgaataagtctcatgagatctgatggttttaaaaacgggtttccctgcatgggatcctctctttgcctgctgccatccatgtgagatgtgacttgcttctccttgctttccaccatgattgtgaggcttccccagcaacatggaactgtaactccatcaaacctatttttcttcccagtctcatatatctttatcagtagcaagaaaatggactaatacagtaaattggtaccagtagagtgagatgctgctgaaaa

SEQ ID NO: 123305 - DNA, 1944 bp, Homo sapiens
taatataaatttttagaaattttgtttctcagatgtgaggcaaataggttgatctatttgtttattctttgacagagagactgactagagttagacagctttttaataccccttccagtcaaaaagtaacattgttatattagtatttagtagttttaaagtctgatgacataagaacagtaacaatttgttaatattcaaaagattgaaattgaaaaaaaggggtcctgcattctgctgtcctagaatttttttttgtgttgaaatcttcttttccatattgtcattattgcttctttatcccatgacattaattttctggtgaggtgaccctgaatttagtcattttcgtcagtaattttagatttaagtaacttatcatgcttgttttaaagtctctctcagctcacccgtgaagaaacaaattttttttcatttttttcttcaaaaatcagcaagtattgctgaatctaacaagtatcagcattcaggtttaaccgtgttatttgattgaaataaatcaaaccatggaaataatgggcactgtgtctgctcaagagtaaaattacccaatgaatgattatgtcaactggatgtcttttatatcaattgatgactttttaaaaaatctgtattttaaataaaatatggagagaacagtattggtccctacaacattccaatagctttgtcatgacagccatgtcatatgaaataacttactctgaatggctaataattcagtggagatgaattctaaagatttttatttgcacttaaaatgttaaagtagtattgttcatttgatcaatgtttgaatactactcagtattgaaaactttaactgcattctgaaaggtcattgcgccgattggcttacctaagatgtcatttagcttccttttctcatgatttacataaatgttgttaccttaaatgcagaaagatgtgatattctttggaggataaaaaacctaagtgaatgaagctagacacaaaaggctacatattatatgatttcatttatatgaaatatgcagaataggtaaattcatagagataaatcagattcatggttgctgggggaatgggagtgactgcttcatgggtatggggttttcttttggattgatgaaaatattgtagaacaagatagtggggatagttgcacattgtgaatgtgccaaaatgccagtgaattgtatactttaaaatggtgtatttgatgtgtattttattacaattaaaaagaaaagaatttgatatttgcaatcattaccaaagccaaaaactagtgttctcaacgtttgtgaaatgcccaaaccgtggtttagaattaatttatagcattagtaacatgacaaatctattcagcttaaagttctagtaaaatttgtgaatcccatcatagaagtactcctgacagcagcagaaataaagctgtaattcatcaaaatttccttatatttaaaacttctgtgactgagtgattgacttctgtgtcaatgtttattttttatcttttgaaatttattatgattccttgtggcacatcccaatcacgctttttaaagatgtgtttttaaaaccatgctttgaaaaaaatttgtataattttcaaggtttttttttatagttttatactttgtttcttttaaagaacaaatgcaacttgttgtattagagtaagactaaataaattgtactgatgtgtacatttttatgcttttgtattgtcttgtggggaaaaaactatctgaatcttaagatcggtaggaactctaatgatcatttagcttctcattttatatttggagaaattgaagctgacgttatcaatgtgtcattcattcaacaagcatttactgaatactcatgccaggtaatgtgtaggcttgattctggaaggttatttcatgcttgaaagtttcacaggtaatttct

SEQ ID NO: 123306 - DNA, 1524 bp, Homo sapiens
gatttgactagttttaggtgtttggaagcaaaacagatttcttcatgttttgcatcccaacctgaaaagacatggggtttattaattttaaaatttcctaaggaaaagttattcaaatattttaaaatgtgtttgtttcatgcatgacatgccacattggtgatgtgattggagcttgcagagttggttgtttagaagtgcagtagagagaaagcaattggccctcattctctggacagacttttgatggaaagaatttctctgataggtgtttgactggttatctaaacgttgctgttaagtagtcttacttaagatgctcataaggtctaggaagcagagaatattagttatacctttatcaactcatcagtgacttgtttgatggtgtttaagataatttaataatggggtttgacaggatttgtctgatttccaaaaaagcaaagttcgaattcagaaaagatcaactctaatgaagtcctttctaaataagggaaaaggaaagatggtttgcttttgaagtcatcttttacataattatttccctttatttaaaagattaaagtgagatcaagagataaaacctttcaaatttgaattttatggatgagaaaataggtactcaaaatttaggcagtgattagtgtactgggatatttgagagagaattatgtccttacatagatcactttttcactttacgaatgcaggaagaaaagagatgtttagatgtaaggaaatttggaaaatgttgcctaggatatttgattcctactgctttggaaagcattttggagcaataccaaaaggaaactaactaaccaagtgtgatatgttgctctgaaaatctttgcgaaatgagggcctcttgctgaattttacaagtaggttattgcatctatgattaaacttttttaaataaattgcttatacatgtttatttgacatatataatcttcataattggccagtacaccttgagatgtattaatggcgatacatcttgaggtgctttgttaccttagcacatttcaaaactggcattttgtattcagattgttttatatttcaatgtattatgtggagagtgacttttcattaataaactacaaagaaatgggttataaggaatattcatgaacatgctctatagaaatataataaaaattcattgatgcaaagtccttttttaaaaataattttcaatctttttgataagctggacggaagcatctgtcttttactatgaagaaaacatttttgaagtgaactgacaacataaggcaaatactgggtaaaaatttaagcatctccaaaatcattttattaacccatttgcatgcaaatactagggaatggttcttcaatatgtagctagttcttgtggtggttaatagttcttcgtgtatttgaaagtaacaaaactgcatttgtgttgaactcttaagaccaattaatcaggtcaaattgctcttaagaccaataaattaggtcagttgctcctaacaaaggcaaattcat

SEQ ID NO: 123307 - DNA, 2822 bp, Homo sapiens
taagaaagttgacgaatttgtgttggactgcattcagagccgtcctgggccacatgctgcctacgggccccaggttagacaagcttgttctaaagcatctgcagttcaacgtgtgtaaattgttccctaattagacatttgcctgttgataaacttagcaggcatggctaggcctgtcctaccccattcatgcttgttatctaggtctgtcctgctctgcattcatgcttgttacttatgttcaggtagctttatgtttcatttgtaaagatgaggggcttggggcacagtcttttgctggactaataatttgacagtgcttcagggcttagagcagttgggtggacaaaaagggaagtagctaatatttttacctacagacatgaatagggatggcaggtaagtattttgcctagaaacatgttttacaatgatatggactaaaataggatccactttacaaatattatttttatataaaatttcagagccattttgaacaaattgaagtacttgaatatcactaagtacctttagtacttgtgaacagcggaaaaagaaacttaccttggcacacaatattctagggtattttttagtactgatattataaataggaatgggagagaaaaacttggagaaaaaaaataacacttgcattgtcagtatctccagagtgtaattagttctagatagccaattggagagtatgaaagaatagtgtgtagtatataatattttaggaaatggctctgaatttgtgcagttttgattttttaaaaatcatttagtaagccagattgggtgtgatttttaatactgagttttgtcttttattgtttttagatttattgaagtcataatgtcatagaagtgatttaccttgtaaatatttgacatacatttatgtccaaaaggatttaccaatttttaattttatagctatttgaaactttatattggatgcttctataatagcagaaatgtatgcagtaggagcaaaaagtgtgttttgattctctacacattgacttgtttaaatctaaagtagaattttcttgtaggtatggcgatttagtactgcattttgttctgttaatgaatggaaatttgctgacatcctaagcatggcagaccacttgaagaaatgcagttacaatgttgtcgagaaacgggaggaagcaatccctttgccatgtatgtgtgtgacacgagaactcactaaagaaggacgttcactacgctcagttttaaaacctgtactttaaaagttgtaatattactagcacatatatgcaagcacctagtataatttctttgtaatatgtgaaactttattaatgtattaaatattacaactagctaaatttattgtcactgtgtatataatgttttgaagtgacatctatttttataaagtactgtttagttggaaaaagttgccttaatgtttgaaatgtgtgaaatttttggaacttgctggacagggtgatttaatttttagctacataattttaagaattagtattttcagtggtgtgcatattttggttcttaaatttttgcttcttaaactaaaaaaatcctgaccaatttatttgttgttttctgtgggttgcgacccatgcaatcaaaaagcaaaattttgattgagattttttacagcataggtttttcatataaaaatattctgaatttgttaagcactgccataatatcattataatgtttttgtcttttagtgcttccctatacaattgttaatgcacaaatgatctctaatatatacttacatacgtaaaatcataaagtttggtaatgcagtttatcgttttaaaaataatccacaaagatgtttttatctcacatacttacaactcaacacacagagtgaccatgtgcagctttcttttttgttagatgccacatccgaagactcatcgcagtgtgttatatgacaggacaaagcaaaaacaaacaaaaagcaagcctgtgaatataatttaatttgaaactgctcctggtattatatatttgctagttatctaatgttttaaaagaaaatatacctcatttaggtttgaattgggcgtattgtgtaaatttcaaatattcagaatgcaaagggcttgactattaaatgtttgcctttgatgtttataaacattacaactatgttgttttaagacatttaaaaacgtgaaatttgttatctttgtaaaatgacaatcatgtagaaacctgtcttggttgacaatctctttgaaacatttccgagttaatttcccataggcttcaccaccaagaaagtaagaattgcatctttacataatgatcaaggtataatggaaaaatatacctattcttgaagtagtttattatagttttcaaattgatttataccattattaacctgatgtggtctgcttaaaaaatgaatatatcagtatttagaaataaattgcaaaggtgggaatatatacttaaataatttgtcttaagtaaattagcatttggtagtctgaaatggtgacagattacttgttaaaattgtgaaaactctgttgtgtcctctcttcctacatttgtccctgagagtactccacgattactaggttcttgattcccttatatggcaatcaggcagaggcgttccttaagcattagagagttctgaagcttaagatttgttttggttggatgaagtccttagtacagttgaaaaacagagcattaaagactaatcaattgttttgcctcaccagtcattttaaatagtagaatacttatttctcagtgcttaaaatttctttttcaactgt

SEQ ID NO: 123308 - DNA, 2145 bp, Homo sapiens
tttaaatatattcatgaaattcatattgttcttttagtaatacaagatctctgaaatgtggggtacaatcaaaatcagtttagttgaaattagaaaggtaaaagtgaaaaacactctgaaatctaaaatacacattaacttgtttttaacattaaataatacacagtattagaatttaaatagtatattttgaaacttttgcccttttaggcatattgttatatagtatataaaaatgaaccgttatgacattctacagtattgaattgttactagaatgtaagtgcttacatcctttcaagacattgattatatgtaaaattaactggttaagtatgtttattttatatatgtcatcctaaaataaaccaagatattagataaattagtgatttaattattaaacaattttgaaaaatcaaccattttttggctaatttcttatctttttccatttcatcaaccagagctggactggccattatggaggaggagctgcagcattcccattgtgtgaattgtgtcagtagacggtgcatgaccaggccagagccagggatttcctgtgatttgattggttgtccattggtttgtggtgcagttttccattcttgtaaagctgatgagcatcgacttttatgtccatttgaacgagtgccttgcttaaatagtgactttggatgtccatttaccatggcccgaaataaagttgctgaacatctagaaatgtgtcctgcaagtgtggtgtgctgtactatggaatggaatcgatggccagttagttatgcagaccggaaatcatatgaaaatctaagcagagatgtcgatgaagtggcacaattggatatggccttggctcttcaagaccaaaggatgctcttagaatccctcaaagtagccaccatgatgtcaaaagcaactgataaagtatccaaacctagagaacaaatctcagttaaatcaagtgtcccagaaataccacatgctaatggtttagtgtctgttgatgaagaatcttatggtgcactttatcaagctactgtagaaacaaccagaagtttggctgctgctttggatatcctgaatactgctacaagagacattggcatgttaaatacaagtgtcccaaatgacatggatgaacagcaaaatgcgagagaaagcttagaggatcaaaacttgaaagaccaagatcatctttatgaggaggaaataggagcagtaggtggaattgactacaatgacacaaatcagaatgcccagtctgaacaaaatggttcaagtgatttattatgtgacttgaatacaagttcttatgacacttctgctctttgtaatggctttcctttggaaaatatatgtacccaggtcatagaccagaatcagaatttacatggtgattcaaaacaaagtaacttaacaaatggagactgtgtggcatcatcagatggcacttcaaaaccttccagctcacttgcggtggcagcacaacttagggaaataataccatccagtgctttgcctaatggcacagttcagcatatcctcatgccagatgatgaaggtgaaggtgaattgtgttggaaaaaagtagacttaggggacgtgaagaatgtggatgtcttatctttcagtcatgctccttcattcaattttctttctaattcatgttggtctaaaccaaaggaagataaagcagtagatacatcagatttggaagttgcagaagatcctatgggcctccaaggaatagatctgatcacagcagcattgcttttttgtctaggagattctccaggagggaggggtatatctgatagccgcatggctgatatttatcacattgacgttgggactcagactttttcacttccatctgcaatattagctacaagtacaatggttggggagatagcttcagcttcagcttgtgatcatgccaatccacagctttcaaatccaagtccgtttcagacacttgggctggatttagtattggaatgtgtcgctaggtaccaacccaagcagcgttcaatgtttacctttgtgtgtggacagttatttagaaggaaagaattttcttcccactttaagaatgtgcatggtgacattcatgctggactcaatggctggatggaacagagg

SEQ ID NO: 123309 - DNA, 1069 bp, Homo sapiens
aactacaagcaaagttgtgtaatctccattcttcacataacatcttaacattggatcaccagttacagaagtgctgcctaagttttttaaacttttataagtaaacatacctgttattgtccatggatgttgatcagacgtggagctagaacatacagtcctagctctgccacttactaggtagatgaccttgggcagatcacttgctctttctgaacctcagtttcctccaggttgttataaagatgtgtaaagaaggataaaataggtacataattactgttctctcttccttctaagtctacttcagaaaataataaatgttatgaacttgttgctatggatgcttttttgaaaccttattcaaagggggatgggtagtgtaaaagagactatttgtttgaagcttgactactttccttctacctttgaaaattattgctgtttttgcttttaactcagaccctgttgcaagcagttgctattttaagcacttttgaattaagtgatgtttttaagatatgttttgcctggtgatgtcatgtgatggtgtgtacagtaacataaagtgtccctaaaacttctgagagcactggttacttctggtgaaactgcttgtatttttaggtttctcccttagtaacagtcaagcttgtaaccttcagcatgtgagatcaactcagtctagttcctgcaaaataagaaagctacagctgttttcacagtctaatcactcagtaagatttgtcataattcttaataaagtttttctttaaatgtctggttaatttacaaatgtttgttattagtcttttatttctatatgactattttagtatgtctatttatatatttctatacttatgtctaaaattcatgaagataaacatttaaaagtattcaactcataatttgtagtttttaacacaattaaaaaatataggtttggcgttgaatatataccttgtcttttctttgacatcattgaacaccataatatcaactcggaacttttctactgaatcaagaaaagctctgttgatgatgattcaggtacacttttgttatt

SEQ ID NO: 123310 - DNA, 1021 bp, Homo sapiens
tattgggaagggacgaaggaggagttaaacttagggaaccctaagcttctcgttccgtctggtttttagaaacttgggttatttggggacaaatggcttaaagtaagactggggaggcatcatccactgtctgcacgggatgagcaaagttggtaactttgccattcatggaagtgagaggatcttagccttagcctcggtccttattaaaggggaacttccttattttgcagacctgaggttatttgtgttgttccaagacctgcgccttggaactcctttgcttggaaggggtttatagagcgcgtgctgaattcaaagtaatctgccagtatgtttttaacgggtatatttgggagtatagaggcaaagaggcaaaacagtatgtgtttaccaatgtcctagtactccatttccctctccctttctcttgtttttcttattgagccctgttgtaagtcccagataaaagatgcttgggaacgaattgaccttttattccatgattacttcgttgactctgatccaagatgaagttatttatgggcattctgatatcggtgtagattaatttaaaatcttttaatacaaaatcccaaactttttaaattttaatttccatttgctaaatttcaatactgtttgttctttagagacctatggaaattatattaacaggttttgcatttgctcatactaaggttttccaaagcagtccaattgttgacatggcaaaaggaaaagagtagcataaaataaacctttaggatttttcagagggttagatttcaatatgcggtttccgctgaatcactcttcttcatgcttagtcactgtttctcatcacaaaagtttaattggggataacatggtgttttgctgactttttaaattgccaatttgtttttacctagcactttaatgccgtgacgtaacttttttttttttttttaattctggaaatggtggagtttcgtgaatgctgtaagagaactgaagtttcgaatataggcaaacttta

SEQ ID NO: 123311 - DNA, 1011 bp, Homo sapiens
acaacaacaaaaaactagcaaataagttagatcttacagattattaattctttgattttatttgataaatgcagacagcaaatgcctgtctgaagccagggtgttattcattggcagtgtcagaatagctgggacttagcagacttactgtttggcacccataccactgtgatgtagcaccttgcattaaaaacagcaaaatgccctacagtcccgatgcttccattttcagaacatttagatggctatccttctggagttgtgcagtccacaacttgcaaatccaaataaagtggccatgtatggcttatttctgtattgttgctacacatcacatataggctgattaaagatcaaatttccttgcttgtaagtaaaattatggcatctcaaggtggaaaaaaaattgtttaaactaatgagactgtgcgtgcatgaagagaagaagaacggggataggtaattaaaggagactttggtggtgacgagattaggaactaggtcctgaacttaccctacagacatctggggtttgtgagccaaggacaagagtttagtgaaatgggagagacatctatggtaactatggggacaagtagagcctagaaggggaaacaaagcaaaatactttcttcacatgtttatagtggtgttcatattgaggtggattagaaagatagtttctaatcttagattgaaaggcacctcaagaagccatctctgttttgtttttttaatgtatttttaatttagggaacaatggctttgtctcattttatacataaatccatttaagtaatcaaccacgctataatagggttctactataaatcatatgagaaccaaacattacttactattttttaacacaggaaaaaagtctttaagatcatgtttggaaatatgacatttaaggttttaaaaaaattttataaaaattccaagaaaaatattccatttacaagagctgcaagaaaagtaagatacttagtgacatggtttggatctgtg

SEQ ID NO: 123312 - DNA, 1037 bp, Homo sapiens
actgcataggtatacttcagccaggaagcacatatgtctgatgacttttgggaacattagcagccattaaagattatggctatttatatatttttgtcaagcaacaacagctgtaatcaaattctgtttcttcttgagaattttattcatctcttactataatttgacaaaaaagtgctataacatcttatagtgtaagaaatactcttcatatagtattttgattggccctaccaacaacttatttaatagactttactcttatctcagtttttcccatgaagttactgcagttctgagacaataaataacttttctgaaatcacatgcagccagaagaaagggaattttatgaacctggatcccatgttctttacatcagaaaatattatctccttatcaattatatgtcattgaatcatttgaaaattttcattgagcacctgttatctattaaaacactaaaagtcaaagtggttagtaaaactgacattgtccctacctgcatagtgtttacagtgtagttagagagatgggcattaaataaataataacatacataaatacccaattatcacctcctgtgataaatgctctcatatgtttgttttatagatattttagaacagctattttatgagatatttttaaattgttatttagcctgattcttcatctccctatcaccatttcagaaggcttacactattactgaaatgaatgttttcctgccctttgaactggaaggaaaataccttccccaacacacatatgacctctattcaacactgagaaagtagtagaatctcatgaaatatatatttattggttaaccagttatttaactagtcttatatatatgttagtacttcatttctacagaacttaattgtctttaaaatttgcctaatcaggaaagcagccaataccccagaagccaaaaaggactaaaatagatatacaaagaacaatcaaaatatgtaaaaatactctgaaacaaaatgcatacttttttttcatagagggattccatttaa

SEQ ID NO: 123313 - DNA, 1072 bp, Homo sapiens
ctagaaattttcttccattgatggtttctgggaaggaaagaggcttccacaagggcctttttacctaaaacatgaaggctttttaaagttcttgttttccttgtgtatcagacttcagtgatttttatttaggttgttttaataaaatagcagttatgagttgtttgaaattctcttgaaacaaattaacttcaggtggtaagaaggtaatttgtaaggtgagagccttagtagcagtagtcaagagttttattctttgttctattaattgcacagagaaaaaacactttgacaaacactaaaagtaatatatagaaatcttcactttgacaaggtataacaaagattttatcacttgctttcctctgggagtttcttatatcccaattacaaaaacttaagaaaaaatatgtgtctagttcgtattactacaaatataatcgctgatggcttggggtttctttctgactgtgctcatttgggaaaccttgcagtcacacgaactcatcagcaaagcattcagaggcctctgtcttgactgtggctgacctggcagacctatttaccaaagaaactgaagagcttgaatgaactacacttgattcattccatggactttagtgtattaataaactttcatagctgtagagcaaagttacaagttttaaaaacccagtagataacagtaacactgttcctagttgaatgaatttgtttattgttctggttatacagtggcttagtacttattgagtccttttcaatatactgtttccaaaagatctataaagattcttaattttacactcctaataaaacatttattttttgtcccaaatagtatctatatctgatgatgcaagggaattaagagaggtaatgtgtacttttcttatgataagatcactcataaaacagttggaataagaaagtaaactagtctagttttatatgacctggtatattgaacaaacatagatctcagttttggaagggccttcagtatctttagcacatgattcaccaatatcttgttagtaatattttaagtagatggtgaattatattaacc

SEQ ID NO: 123314 - DNA, 4163 bp, Homo sapiens
gtaactatattccagtatgcactccattatgtattttctactgtttgtttatcttaattacattttcaaaaccagcatttgatgcaaaaaaaaaaaaacaaacaaaattactatttcagatagagctaaataatatggatggtactacatttgagggttttggttttggttttattttcttaactccagtataaaagtcattttgatttatttccttttcagatacccttagataaaggctacgtgtaaatattggttttcttattgttttatgtgttctagtggcaagatgtattagatattatttcaaaagctcttactgacaacaacatggaatttgcacaaatcagtcgtgttaagacatttcaggtatgttaagattttactccggtttttgtagtggatacagttgcaaatttaaactgctgttaactagcttacttacatttattgtctcatgccatataagccacataaacagggtctgagttcttgattaattataaagtgaacatttaaaagcagagactgcaggtattttcagtatataacaagaccattggttttttaaagatctcccaacttgaggttcttttttttttttagtacaggaaaagattgcctatgatataccttttgaatggacaggggcctcacaccccaaggattagtttctaaagtcactgtcaggcagaactgcatgtggtcacagttatccttacatcatgctcagcacagtgacaggcgtatgacctcaggcacacacagagaccaaatgaaaatttagcagattcatgtctcttatctcacattcactctagcacattctttttctctttttcctctaacctcatgtagtttaatttgcatgcattacatgcatctgtcttgtgattcctctagatattacgaagaacaagagagcttatatgatacttttcttcataattaaaatcaagcgacaagtttacattttctaaagttggtaattttgcatttaagtttcttagctgttacctttcacaatagtaatagatagcattagacatctttaaagtgagctattacatactgctcttattttaactgatcgagctaaaattaaaatgtacctttcttttttaggagaacctttcagcatttaaacgtgatccccaaatcaatattttgctgctgcccctgcacacaggttctaatggattaactatcattgaagcaactcatgttctcttggtggagcccatattgaaccctgcccatgagcttcaggccatagggagggtgcaccgaattggacagacaaagtaaggactaaaattagaatcagtcacatttgcttcagttttctgagaaaccaaatcagtatttaaactcttcatttatgttcatcatagcgtacttgtttttaattacttccttagatactacattttttaattatttattttataacttatttatttataactttttaattatttaattgaaaggcatgagatttccaaccctcccttctctccaagaagcaaacccccaaattgtcccaatttttttcttccctcccacaaaaaccttatcactttatccaaaaaaaagcttgttagaaatacttaagacagctacaaagttgaaggcatccatcatgcctttgaggagaatggagttttgattgtctaaagtagtcccgtgtttaaaagaagacataccttgtacatgactgaaaataaatggctccttttaaaattcttaacattaggaaaagacaccccctaggtcagctccaagagatcattagattcagtttaaggcccaaagcaaacctaataatgaatattattatatggcatgtattacctttattcatatatcagaatagacagttatctttgataaggcctgctaaatgtattaccttctggatgttagaagtctttgatgtttaaaaaaggaaaaaaaaacacatccataataagcacttactaaatcagtatttattgagcacctactgtatgtcaggcattattctaaatactgaagattcaaattgaatgatacataatttatttccccaaggaggtcactgtgtagtacaggaagcatgacttaaagtgttggggtagaatgtgcaaaagtataataataaaaggactgtgttaacaaaagaagataatgatcactcgggccctacagagtcaggaaagactttatggtgttaagtcttgaaggaataattatttcaaagttggctggaaaagggtattcacacagccaaagagagttatatatgcaaaaatacaatggtgggaaatgacatgacatttctagggactgtaaggagtttggaattgttgcagtataaagtatgagaaagagatcatcggcaggagatgaagtcttctgtgtcatactcagaaatgtagactgccccgtaagaagtagcggggagagaaaataaagggcttacttgaaaacaggaaagagacatgtttattaaacctcttaacaaatagggcaaagtaactgtaataaatgcgggcttgttctaacataccaccaagtggcatttaaaatgcagtcatgtcttacttgttttttgttggttttcttctgtgtttttaaatattgattttttgtcctaccaatgttcttttaaagcataggctggactagtctcatatttaaaaccacgagtccaaaaggccattcagcattacccaacaatcttactatgcctcgcaagtcaatatgtttttttctactttctgaggagtctgtcttaagtgtgtcttcttcctccccatggcgatcttgcctcatacaggggaaacatatacaatcagattagaagtacctcatctttccatcatcaacttgaacagtctgcctgcatcagtactcacatactttttggtagatttttattgagtatcttctgtgtgccaggcactgttttaggaacatgagatgtcctcatggagtgcgattctagctgtaatggggttggtagacagaaaggtggtaaacaataaactaagtacaatctggactatgttaggagctggaaaagtagagcagggtgaggaagtaaaagtgcaatgtttgggcaggaaggcatgcaaggccttattgagaaagtctgagcaaggacttgaaagaaatgggaaaatgggaaagttagtcatgcagctatcttgtgaaagaatgttcaagtaaacagtgctttcggtgcaaaggccctaaatcaggagtgtggtatgttagaagaatagcaaggagctacagttgctaaaagggagagaagcaggagttgaagtgaatgggctcagtggggagagggattacattgggcccaggaagccactgtgaggatggtgcttttgccctgtgtgaaatcgggagccattggaaggctttgaacagaggcttggcatatctcacttaagttttaaaagaatcattctgagtgctgtgatagggtgggagtgaaggggagcaaggaagagtagaagcagggagagtcttggaggctattgcagtcatcctggtgagagctgaaggtgacctgaccatggcagtagcagtgcacatgatgaggagtggtcaggttctggatatattttgaagatagaactgatagtacttttggacagactagacatggggtatgagagggtcaaggataacaccatgggttttggcttggacaactagaaggatgaagtaaccttcaactgagctggagaagtctacagggtagagcagatttggtaagggaagaacagacatccaaatggagatttctattctgtaactagatgtacaagtccattaagtcacgagactgaatgagattacctaggagtgagtttagatagagacagagtttagatagaggaccatggactgaactccagggcaccaaagttcagctgttctaggagaggagaaggaagcagcaaaggtaacaaataaagatcaaacagtgagttaggaagaaaaccagaagacaggagtgtcctaggaaccaagtgaaaaatgtacctcaaagaagaggttatggtcacctgtttcaagtgctatgaaaaatgtcaaggaagataaggattgagaattgatcattagatttagcaacatggagatcaaaaccaggttaagtggtagag

SEQ ID NO: 123315 - DNA, 1022 bp, Homo sapiens
agttctgacaactgccaggcattttggatggtgaagtaggcctcctggcagaacatatggcccacatgtcttgttccctgtgtcttacatttggctaggttttatacaaagcattttgccagtggaaaccctgaccctatatactggtcaagagtcttagataataagaaatttctgtccgggagaaaatagatacagccactacatagatatagtgacagcaatacagtacccttcccacccaccacatgctacacaattgctttttttgtcaaacttttaagtatgtgaccatcaactggcctgctttttaaaataaatatttttgttcaggctctgtctccataaactttgactcattagacctgggatgtggtccagaaatctgcatttttagcaagcatatctcttgataatagagatatcttatacagcctttttgtagagaaaaaaactctgtatctctacattccaactcacagagaagcctagccatactatgtgtagaattctacatgtggaattctattctgttttttttttatttgaatttttgttcatttaatttaaagatcatttgtgacatctgtctcacacttttaaaatataattaaaataaacatctgagtgaaaaaaactgattatgaaattctgagtttaaaataggaataaaataatttggtaaatataatccagaagtgattatatttaaatatatttatctaaatattcttatataagttttatataacatgaacattaactggtaaatttggaatgcagttgtatattttttgttaaaatatgtcatgactaaatataattgcaaaaaaaataccatttctatttctgttcaccggccaagttaatacttgtaattctgaactgttagcctcatgttaaagttagccatagcttgcagtaaattgaacacacagtagagacttctaagatataaactaaaacttatctttatgaaaaaatcatttgttgagtgtaaactccattaaaaggtagaggac

SEQ ID NO: 123316 - DNA, 1116 bp, Homo sapiens
cagatggcctttgtggctaagaagaggtggctcacccttaggtgacagcatgcatcacagtacaaggaactggcataagaaagaactgctgtgtcaggttttgcgcagagaggttaaggaagtgattgctctagctactggtaaacagcacagcctctacgaaactgagtcattgagcccatcaaatccaaacacctgttcattttatggcagctttcctagacacccaggatagagattggcacagttacatgtgctgtgctgttggagcagggatatcggtatataaatactgtttattgtgctctcacttctcgctgtctttcatgagtattgattaacacgtgaattaactgaagcatcttttaaaaaaaattaagtttatagaatttactaaagataatttccctttttatcatagatgcacatgtaattacatttccttttcttaaacataagactattgtaccattgtgcgggcaaattttatccctcctcgacgttgtcacactgcttcacgccatgtttaggttggctcttcactgctttttctgttaccatttgtgtctgccacatttgccttgtgcttcctgtctcttcttctgacttctgtcacatttctggcctgctgtctgtcacttcctccttgaaacatcagcttattgtattctgagacttcacccctctcttgtgactctttgaaacttccacataaatgatcatattgcctattttggattagtatgtaaataaagatggctttgtgtaaataattaaggcattattttcaaattttagaaactactagttccaattatttctaaacctagtttttttctttatattactgttgattatcaaatcgttgttctttaacaagcaatactgacaagtaattttttatttaattgaaatgtttatattatctgaaatataaaatttatttctgaaatgattatttcactgtatttatgtcaagattctcagacatagcaaaccatatatcgtacagaatgcttaatcatatagcttttttgtggataaaagatatttggaaagcataaaactattatttattagtagtagacatttttaagtagtatttcttggaaataa

SEQ ID NO: 123317 - DNA, 1044 bp, Homo sapiens
aatactatgcatccataaaaaggaatgagatcatgtcctttgcagggacatggatgaagctggaagccatcatcctcagcaaactaacacaggaacaaaaaaccaccacatgttctcactcgtaagtgggagttgaacactgagaacacatggacacaaagaagggaacaacacacacaccagggcttgttggggcaggggagtaaggagagggaactaagagggcagataaataggtgcagcaaactaccatggcacatggatacctgtgtaacaagcctgcatattctgtacatgtatcctgtttttttgttttgttttgttttgttttgttttttaaggagaaaaaggaaaaaaagtctctgagggaatgacagttaagcaggtatctaaaggatgaatgatgaattagtcagcctgaggagagaataggttggctcccagacagagaaaaagaaaaccagaagagagccagtgcatggaaaagcctaagacaaggactcaaatggatctgagtggctgaagtgtagaaagcaaggagaaagcagttgaataagcctggagacctaactaggggaccagatgttgaagggccacctgaacatttgagaattttatttttatttaaggagaaagccattaaatattataagcagggatgtatcatgatcaaatttggatttcaaaaagatctctcttgtgtggaaaacagatgatgaggaacagaatagagcagaagaaatttggagagagcagcttaggaggctacagcaggagtaatggtggctttgatttggctgatggcggtagaaatggagagaagtgggtatattctagacatgtttagaataaagttagagaatgttggcagcattagtgaaggaaatttcatagatcacccctggtttctgatgtgaataagcaggtgggtaatggtatagctaatgatacaagatatttggaagaggaatacatttagacatatcatatttaaggtgcctaagacatccaagtagaactatccagaaaagtgttgatatgtgg

SEQ ID NO: 123318 - DNA, 1050 bp, Homo sapiens
tgccccatggttgggtactgaaggaggaatatgtgaggaaagagtgatacagttgagaaagaacacacagagcctttccaaggaattcatattattctttcttcaattaaatgatgagtacttgattgtatattttagtattcttgttgccatttatacatagttgaatatgtgaaatatgttataataaaactatttttaaaaaataaaacaagagattctgtcagcctaaaactggactttataaagatttttggtcttagcaagaaatctttatattctgttactgagaatctaaagaggcagtgtcctatagagatttttttcattcacatttcatcctaaaaatgaccccaggaactacttgtacgttagacacatagcgaaaaagtgtaagatctcattgaagacttttgcttaaggcacatcttggtggttttaaccagttttaattacatgctttaccactgtgtttgtcttttctattccttcagttgcttcatgaatattggatggctctgaggaatcgtgtgtctgctgttgatgaacttgcaatggctacagaacgactaagagtgcgtgatcctagggagccaaagcctaatccgcctgttcttcatatcattgaaccacatgaggtaattggcaagtaaatcacagaaaagggaacagcaagcagatgtcacagatatctaagacccatagaaaaggcagaatcagggcactgagctctactgtaagtgtgtatttaatctccatttttaatttgacccatagaaaattgtctttatagaccaaaaatggtcaaagatgagcaatttcatatctattacatgcttagtgttcactattttggggcatcttgtttctctccaggttgcgcattcatctgtttttgagtttaaaaccttgtatgtgcttaagaccaatagatattctcagtcactttttagacatttttgtcacctcagttttatcagaactagaaaaatcttccttaaaaacaactgaaaccttttcttttgcagtgtttcttttgctaatgatgaa

SEQ ID NO: 123319 - DNA, 1229 bp, Homo sapiens
acatttcttcatgtttctgtccaaattctgtttatttatctccaacagatataacttctctaaaatagaaattttcctcacatatttccttgccaaacgttcacttctgcatgtcaaggaagaaaacaagatttttgtgttgttatggcaaatgaatcagtagctttctgtttattacagtggatataatagaatttaaaaaaaaaaaaactggccaaatttatgatgttttcagctttttcaaggttgctttggtttttccaaagacttgcaaacatgttcttttagaactcacattgaaggttgcttttcactcactgataccagttactgttgttttgttctggtatgttttcagagtcaaaggccagactgcaatatttgaggagatgatagaagatgaagaaggactggtggatgatcgagcacctaccaccacccggggtctctgggcaataagtgagacagagcgatctatgaaagcaatactatcatttgcaaaatcacataggtttgatgttgaatttgttgatgaaggaagcacttcaatggatctctttgaagcatggaagaaggaatataaggtatagtattttaaaacttccttccaaaattaaaaattcttcttttttacatcaattttaactgctacttttttctctctccagttttttaaaatcttcttttgagattgaggtggcataatttctctttgcctgaaatgtaactgttgtaataaaggatagcaaataccataatactcaaagacattctatttattaaattactaaaagaaaatcattattaaactggaacttatatgaaactttttgtttagccgtgaaagtgtgttcattctattattagcttgatcttccactgctattatatgaaattagagttttgtttttgttctgtgaataacaagcaagcatcagctaccttaaagattggggaacatagtaaatacttcttatcctataagtttggaaaccattccaataaataaagcccgatatgccctttcatatttgtactttaatgattccatcatattatacctctgtacttgagatttcacaattcattaattttcaattattgttttatttggattagttatccattgtactgctttacaggtgacataggtagaggaaggaaagaagtgtttttttataatgacatttttattcaatttcttttttaaaaagtcttgctttttaaag

SEQ ID NO: 123320 - DNA, 1620 bp, Homo sapiens
tctaatttctcattattaccggctttttttctccattcataaacctatacagacacattcatacttcttttttgcagccttttttattcacagtttatcaaaatggttataggtactataattgggtttaactcctaactgcgacctacctttgttactttagttactttaatattttacacttcataatgtgagcacattagtaactattgaaattatacaggaaaagtgcttggcaaagtgcctcgtatatagtgcataattacagatttaattaagtatatatacatatatatatatattcaaccaaggaatataactcttagccatttttcttctttcttcccaatattctgcttttatgtttcatcctgcaggcacctcctcatatagagcaaggatgtcaggaaggctatctgtagtcaggcttaaaacggaagaatgtggcagtcgtacactttcaaagatatctgagacagacatacatttttcatgctctttttcagttcctgagcacaggactatcaaatttttttggtatcttttacggtagacagcccaatattatactttgaatacattctgaaggaaaactcactcaaatgttgctgttaaaaaaaaaaaaaacagcaaacagtttctttaacactttgtttggcaaccattctctgaatttgaggaaattgacctattattcttttctttgtattgtgtgtggtgctggtgtgggaatcaggttccgtgattgcagaggtcttcagttcttacttacaacacaaatggaagagctaaataaatgccagaagctagtaagagaggctgtaaaaaacctggagggacctccatctcgtaatgttattgagtctgcaacagtctgtcacctccgaccagccagacttcctctcaactggtaggtaatagaagaaatcatacaatgaaatggtaccatttctttaagctagatttcttagagaagaaacaattgactcatatagtaaaggttttttcattttaattgagacagaagtagaaagagatgtattaatctaatttaaagaaaaataaagtctcaaggacaaggtatgaaaaaccatgtgatttgttttttctaaaatggcatatctagtggaaagaaaaatgaagtcaaaatattaagcttctccttaaaattaccagattgctggttatgtttgtgaatatttctgttaatctcttttttttcagctgtgtcttttgtaaagctgatgaattgttcacagagtatgaatcaaagctattttccaacacgtaagttctctatttgattattacccatcaagaaaatgaaacattttgcaagactcagttatgtgatataagactatgttttcccccacagtaacctttattatattgtttctttaattaaattgattagtacacctttggtatttgattgtttaatatgcccagttttacctatccagaagttatcccctaaatgttcatagtgtagtaatatataattaattgagatgcagttttgtggagtggtaaaatcccagactctagaatccagtggatttgaattatacagattttgctagcattttactgctattcaaggtagaactcataatg

SEQ ID NO: 123321 - DNA, 1030 bp, Homo sapiens
atgggatgtaaataaatgagttttaaaaaagaaactttgatctcatggcagatctacaaaagaggtagcttagtaaatatacaaacttttgcactttctccacatttctgtgtattttttaagggggtaaataaagtcaaatttttggtggtagttctcccaaagaagtttcctctacaaaaagtgtcgcctctttttgaaaagaatgacatcgaaaagagtgatattataaattattttactataaattgttaatagcttattatgcagattcttccagggatttttgctgttgttaaacattaaagagctaaaatcaaaagagtaggtatgtttgaaatgtattgaacctgtaagtggaggctttatttgagtcaacaggataaaaaatgagattatataaataagcacagcctttttgcactggttgttttgggggcggaggtgccctggtaaactattttaattaacaaaaattttatctattcatgagtagagactgatgttttgatgtatgtagacactagaatagctaaatcaaactaaatcaattacctctttatttttattgcatgcatgtgtgtgtgtgtgtgtgtgtgtgtgtgtagtgagaacatttaaaatctactttcttagggcttcagcatatgaattttggggaaacaaaattcagttcctaacacctgtgttactgtgtattctcaaggattatttttaaactgcagtaactaaggaattttaataactaaattagccaaattttagaaaggtgtctttgctttgcctatcatttgaaatattactgttctttttttcccctctttgcttattctaactaaaaaaaaaaattaaataagaaattggcaaacaaatattcggtgtttctgaaattttgttacttggacaagtaaattttgttaacttccatatataaggaatttttagcgtgacttttatgttctctacagtatacttggacttttatgtttaaatgcagttaagtagctttaaatgtataaaatgacccatt

SEQ ID NO: 123322 - DNA, 2028 bp, Homo sapiens
taaatttcaaaggattcatgcttacagagtgtgttctatgcccacagtggtagataccaataacagaaggaaaactggaaagtccgcaaatgctgtgaattaaataacacacttctaaacctttgggttaaaaaataaaagggaaagtaggagatactttgaagtgaataaaaatgaaatatcaaaatttgtgggatgcagcaaatcagttattaaaaagaaattcatagcattaaacatgtactagaaaagaaaaaagtttcatatcggagacttcagctgctaccttaagaaatttaaaaaaaaagagcaaatgaagtacaaagaaatcagttgcccaaagaaatgtgtgctttttgtagaatataaatcttcttacattaagcctctttgagtagcccgtctgtagttgttagctctttagcataatagaaccagaaatggaaagtgtctcttattgtgctagatacttgggtagagttataaggattctcagaagctgagcagaaatagctctagacaagaactgaatagggtgggcctacttacatgctgcagttggaaccctgtgaaatggtatatattgttcaagatttccgaacttcagtgtctttgtcaataaaatattacaggtgctttacttacctcaactattgttcttaatacaaaatgtagaagcacattgaaaacgttataaaaacagagatgaagaatgatgttattggttatggtaatatgaaggttacctcagattcttaccactttcaacctgctcacaatgtaaattctgttatcaatatctaatagaaaagggcctattattatatattcgtgttaaattgttcacatatagtacacgtaactttgtgtgcaaatcttccctctagggcattccctagaaagtcctcaatttagctagcagtgtattgttgattattaagagaaatccgccaccagaaagtccattaatagaggatatgttccttctgaattgtaattttcaacttaattgtaatagatttgctgcttttagtttttattaacttcatagtaatgtgttaaacaatattcattttttaaagtaacattacatatataacttacataaattagattcttctaatgtgaagatcagacagtgaaggtctgacttttaaaagaaatctaaaattaatttcaaactctaaaaagatttgcttatattatatgtaaataaatacgtatgatacattaatacatattctgagattctccttgactggtattaaacacattttattattccaattttgaacattgtgttttctgcagatgattttcggagaaaattagcttgacaatatcaaatccaccagttttcttagaaatgttagcgccatcaagtggctgagaatgggtatttccaaatttgacttaaacctttataacattgaatatgggtttttttttaatcttcctcagaaagcatgtctttttaaaaataaacatgcaaaaccaggtattataacgaatagataaaattcagctgctttacattatagtttaatcactataccttctttaaaaggtatggtaattatgaagagaaaattgttaattgaattattctctacaaatggtagtataaatactgatagaattcataatgtcctttgaaaagctttaatcaagactcttaactaaaaaaagagaactcactgtgaagataattgaatgttaatgcctacgttataaagtaactttattattgtgaaaataatcttctcccttatttaaagggaatagaaattggctgactacagttctttgataatgtgtgttttagaaagctttgtattagctaactaatagaactagatataaagcaatggtataagagctattgttgcaaaatttattttaaattaggtgttttgcacaacactgaatatacataatgccactgaactacacacttaaaaagggctgagatggtaaattttatgtatattttaccaaaatcaagatatgtatgtaaacttatatatg

SEQ ID NO: 123323 - DNA, 1005 bp, Homo sapiens
aaattgactgtgcccagtaaagagataaacaagaagtcccatgctctaaagctaacaaatacaaggcatgctgaatcagaaaagaaaaatagttctattttgtgggattactataatttatttatttgagtcatttttctacatattgttgctatgaatatcactgtgtaagtaaatcttatctatatttttattactctcttaggcttcttttctaggagaattattagataaagggtatgagaaatattgcatcagagaatattcttcatgtcatctgtgtgcttagaaattcttttttccaatccagcaaatcttgcatctattggtttcagagcatggtatttcttatatatgtcttaccaagtacattcagttgagtggttttttggtttaacttctgataacagtttcagatttttgaattaagtataagctgtatgtaatgaatggttgcataaatctaacattattttagcacctagcccaaaacctagggcagaatagatgctcaataagtataaatggaattggaattgaatttcagatttaagagcctatacagcctgtattttaattcatggaaagttctatgtgctgtgtaatgtctgtagaaaagcttctgcaaactagtaatgaagtaatagagttatcctcaatgtattttattttttcttttcagatctttttgggttagtggtctttcttggtattgaaccttactgtgtcaaacactggtgggttcgacttctctatcggccttactgcaagaagaatcctcagcatctctacagctttattgccaagatactgtggaggtctgcaaagaaagatgtgattgaccaagtcagtacaataagtttttattgataaaggtactataagagaaaagaaacaattgggatggaaagataaatttttagatgatatctttttttttttttctgctccttttcacagatccaaataccaccacaaaccgaagaaatacactggctccacttt

SEQ ID NO: 123324 - DNA, 1494 bp, Homo sapiens
tttaccttctccgctacagaattggtctttccactgtgatgctgtcatgttcacatttattacagtttgttgcacatcagttatgtaattcatcttccacactaaaacatgtctttctccaaacaggtatgggatctgtctcatagcatgaatgctcctaagaaaatagagaggacttagtaagggtataaatgagtgaatatttcattgcctttagtgagcctttttgcaataactgcctgtattgattatttcctaggtatatcaaggagtgaagaaagatggctttttacaacctcattttttggcagaacaggatatagttatcattacctatgatgtactgcgttcagaattaaattatgtcgatatcccacatagcaatagtgaggatgggcgtcgcctacggaaccagaagcgctatatggctatcccgagccccctggtagctgtggagtggtggaggatctgccttgatgaagctcagatggttgagtgtcccacagtaaaagtgagagtttctgcaaaatcttttgagggctggggaagaagggtgaaaaggaattaggggaccttgagtagtttaatagtttaagcatagttaacctgtagtactgatattggtcaaaagtttgttattaaacactacttgtgcttttctcttgtgctttgaactacataaccctttgaaattagttctgtactctgtgactcattgctctatatgaaatatatatttttcagtaagatgtctgtttatatatgatgcagatcaaagtaaactgtgtttaggaacttctgtaagcatttctgctaactgggagctcatcgtgtagcctctgatagctttgaaccaaagttgactttgacagtcttttaaatcagaggccaaatggtaacagaaaatactactttagaggacagaattttgattcagcctttgaatgtcatatgtctttattctgttgtctttggccagtctgtaacctgaactgaatgtatgaatcatgtctgttagtatatctggaggatagagtgatgcagggcatggatcagttattcagggggctttttcattttgtacgtatttgaactacccctctgttttaggggactgcgtggcagcctcccactaatgagaaccactgtactggaagatggtccattgaatatgacattcaacattgagtgtgataactgttaaataaaagtaggtacatctcaccagaagtgtagcttttaatgggctgtttttcatgagtatgcctgacttctgtgttctttctgtggttttctggatttcatttttatttcatttttccctctcatcaggctgcagaaatggcccagcgtttgagtgggattaatcgatggtgtatcagtggcactccagtacagagaggattagagggtaatgtatggtttcctcacatattgcatgcatttgaaaagcttcattttttagagagaaaagtattgttatgcttaaccttt

SEQ ID NO: 123325 - DNA, 1286 bp, Homo sapiens
tttctgcattttgttagaaaactgcttctgttgggccagtaatttcaatttgcttttaggaaaatagttataatatttgcaatcataaataaagattaatgacaacaagtcaaaatgtggagctaccagctcggccaccaagaaaaagacaaaaaatttattttctggagtagggagtctatattatccttgggtagcactgaagacagcagtgaactgtgcttttggtaatcctgctaccaccaaaactagaagatttccctcagttaatgccattgattacatgttgtgtcttaactcccctgttcgacctcagccctgatatgccttggaggaagctgtccctattaactacctgcctatcatactcccactatgttgtacaaccctcttaggtattcccatagcatcattttactttttactgttctcacttttccagtagacccctttgaaaccgggggccaaatattgttcatatttgtgtccctagcatctaacacaactactggcacagaattggcatttaataagtaattgtaagagaggacatatgtagaaaagggaaggaaagaaggaatcaatttgctaattgcagtaaccagtggattatcttttactttctttggatgctatattttagtacttggtgtttttgtagttgccctgatttgtatatttatgtactcgaaaagtactagtcttgtattgatttaggtagactaaatcatagtaggtaaataacaaaatatcagtagcttcctttatctttctaatttttcatctctccaaatctgacacttgtagagccttccttttgttttgagatgaagtgagggtccttacagagggcagattggaagccacttatcaggagtgattctcctcagggaaaagggtagcaaagactggctgctacataattatatgaagtacttacataaagtcaggagtttaatttcagaaatgcaactagttgcaatcaattaattaaatatttttttcataggcagtagggagtccaaggaaaattcagaaagaaactagaaaatcagggaacaaggacacagattctgaatacttgccatcagacacctctgatgatgatgatgatccttactattattattataagtccaggagaaatcgcagtaaattgaggaaaaagcttgttccatccacaaaaaaaggaaaaagtcaaccatttatcaatcccgattcacaaggtcactgtccagctactagcgactctggaataactgatgttgctatgtctaaaagtacat

SEQ ID NO: 123326 - DNA, 1826 bp, Homo sapiens
atgttatctttcagtagggtcaagtttgcagaattagcctttcagatttgagtagaaaatttaaaaaaaaaatgttttttttgtagacaaatgacttggaatatattgacttaactatcagtaacttctttctgagatttcctactcattactattttaattccaagttattttcatattattataaattcaatgggttaattttatatttaaatatacctttaaaagttaatttcagaggttccacacataacatttaggtaatttaagataatatgcacaattttttaagtgatagctagctgtaaactcagaaataaaactgtgtatgtatctacagctatttggccctttctcttgcaatttttttagaactgttttgcatttccataaagaaggaaagttaatttcaataagcaattcagaatactgaaagcaaaacactgtgtaactactgactgttgtttgtatcagggaaaagtggtgaattattttattccgtcacattattttggaggaaaactgaaaaagacagaaatccagaatatcgaatttgaaccaaaagaaaaagttcaatgccctcgtaagtaagacatctcttaaaggaaataccttcttatagtgatctttgctagagttcttgcaatccttagagatatcttgtaattgttataaacaattgtttttacagttatatatgcttttgataaatgaattcaattacaagtcataatatcttaacaaaagtaaagatgtattattttgtttgacttggcccaggtagttcttgctcagtctgttatatttaaatctctttagcttacagtttaaaccaggctttatttatcttttaggaaatgaatgtttcgcatactaatggtagcgtatacttaaataattgtgagagttttcttttataattttgaatgattgttttatagtattaacaattcaatatgagtaattcttcctttgattatttttattacagtaatttgtttcttaatatgctgagatacatttttattacatattttttcaaaatggcactctgctgtaataaatctttgatttatttctttcttaactcagtcctcatgcagattaagattaaccaagttttactttcttttcattttaattattttgactgatttagcatatccttttacatttagctacacgtgtgatgatactgacagctgtgaaagaaatgaatggaaaaaaaggagtgtccatcctttccatctataagtatgtcagttctatatatagatacgatgttcaacggaacaggagtcttttgaaacggatgctgaaatgtttaatttttgaaggtctcgtgaaacagatcaaaggccatggtttttctgggacttttacattgggaaagaattacaaggaagaggatatatgtgataaaacaaaaaagcaggtaacagagcttaagttcagctctatattaagtacacgtatgtgataccttactgagtacattgacagatcccaccttgaaactgaaactcttacgatctgaagataaaaaaataggaaaagtacttatatctgtaacttctactttctactttgtggatataaactccgtgagagtaactttactttggctatcattaaacctagagaataatgcttggcacgtaacaaatactcagatatttattgagtgaattaaaaaactagttggctaagcgtattatagagtataaagcatcttctgtattatttatttttattatttttttaagacacagggcatctattgccctggctagaatgcagtggtcatagctagctgcagccttgaa

SEQ ID NO: 123327 - DNA, 1020 bp, Homo sapiens
ttggaataatagacataaggtgcttagttatcaagactaaaagagattattatttaaagtaaaaatgttatcttgtttattatggggtcagttttattttttcttagtaatcattaaacatcatgaatgaatagtagttattgccctttgtatttttttttattcatagattcataaaggtcatagaaagaaggcagacgtgttctcttttaactaccactcatttctgcagagttacttgtcagctcaggcagtttttttggttatcacagttctaatgtttgtaatctaaggtttgaattgttttgccctaaaatatagtttcaataaacttagactttatgcattgcttccagttctctttaggaaaagtaattaggaacattgtaatttgtattcacattcctatgatgtgatttatcttgtttttttcctcagcatcattcgtgagtacccaaattctgggccgcagttgcttggtggaattttagcagatgagatgggtcttggaaagacagtggaggttttggctctgattctgacacatactcgacaagatgtcaagcaagatgctctcactcttcccgaggtaggagggtatagtagggcttgcaaaagcaggggacatatgttctcgaaaagcatcgtatgttgaacatttgcttggcacttaagtcaacactttctgttcactctgtgggtaatgatttatattagtggttagttaacttcaagtgggcagagagaatggggtgtttgtgacccagaaggtttatttttgaagtaatgttggccaactaggaagagaatttgtgatcacttactgaactttcttctagttggcagagaaactcctttacaaaagtactgttgactcctcaaatgttttgtcactaataaagtctccatattactactaaatatttttaagagctatttaaaaatgttatacaaatctcatatatataaatcttagaaccaaataattagaactttgttaaagaacaagtagcttagtaa

SEQ ID NO: 123328 - DNA, 1031 bp, Homo sapiens
tgttcctatataaacttcaaacagtattcacattgagttcctcaaatgtttataaaacatccacaatagacaatacacgtgtcagctacgtgtcagcttctctgaggggctacaaaaatgaaaaactttgcctttgttaccctggggaaaggaccagtggacataaatgtttgcagtaccagatagattacaatgtaataatactgtatccacagaggagaacataattccagccagggaaaacaaaagaaaatgccatggaaaaagtatcagttaaactttcttgaagaatggatgagtagatttttgattaatgaagaattaaagatagggcctttcagtgacaaaacacactgagcaaggccccagagttgggcaagttcattgtatgctcttagaataagaattgcttatagttagaaaaaacctatcagtttttgagtacatttgctgtgtgatgtacagatgtgttggaagaggatgaagatgatccggagagtgagccagagggacaagacattgacgagctgtatcactttgtgaaacaaacacatcagcaagaaacgcagtccatccaagtggatgtccagcatcctgcattgatccctgtgttgagaccctaccaaagagaggctgtcaattggatgctacaacaagagtgtttcagaagcagtcctgctactggtaagaataagatgtttaaagaaagtccaattgattagagagattacatcagagacaattagggcagggtgaaattgatcattaaaataaacatcctgaaaatataagatagaatgggtgccataaaattattttctaagaaattctttaaaattgaaatctagaaaaatgaatttgtgagtttcttcattcataaaagtttgtactggtttttcttgccaaaaggaaatcaatcctgcctcaattggaatttttaaaaaccaagaaattttttttacattcctttcaaacaaagaattgctctttagaatctggtccagtgggaatcttactgaccatctgcaaga

SEQ ID NO: 123329 - DNA, 1017 bp, Homo sapiens
attgatgagttcagagtcaagcaatcagttcctgatttatgttcattcaaaaggtgaagatgtagagaaacaaaaaaaagaaccgatgagtatttgtgacaagggtattctggtggagtcatccttcagtggtgaaatgttagaagatttggggtggctacaaaagaagagaagaataaaactctatcagaaaccagaaggaaatcacattatcaaggtactcagttttttgtggtgtcttttttgaggctcttctacattggcagtccaattttaaattaacttgtgagagaagtctgaaaagccagcaataagcctttcattgttaagtttcaaagtacactttaagcttttaataactattcaaagtatgttacaactaatcattttcaggctacactttttcaagatcttccatctctactttcagtgacttgttttggtcctcatcatcagttcctcttactgcagcagtcatttaaccatttatctgtttgctattttgccttttcaaatgcttcgattttgtctctggaattgtatgattgaatgcaaatgaaattctacccattactgcctacagaattaagtataatctttctaatctggcacacaagttcctcccttgacaagcccttgagccttaccctttattactctgctttttattttgtcccagaaactccaaattgatttattttctccatataccacactgactttctgcgtctttgcttttgttcttatagttccttctgcttgagttgttcccttccccttccctggtaattcctggttattctttaatatttagtatagcatttaattcacccagggagatcgtttcttaaatctattggtagtattatgtgccctctcctcagaatctctggtagatttttttttttggccttggcggcttgtcacatacttaacattttagatcattcccctctgctaaactatgaagcctttcatctttacagcctagtaaagtacctggtacctaaattttca

SEQ ID NO: 123330 - DNA, 1003 bp, Homo sapiens
ctttgactttgaataaattggcatagtattcttaccaagcaaattaactaatcacaatcaagttaatcattgtgcaaaagaatcatttcttcttgtctctatgaaagctttatttaagatgcttctcagaattatgctcactataataataattgtaataatgattgtgatgctgatgatgtacctgcgtctgataatacctgtttaggacttactatatataagcactgttctaagaactttgcacataactcatttaattgtcacaacaatgtgataagataggtactaatattattcccctttcaatgtacggagtacagtaacttgtcaaaaagtgctgcagtgccagtgctgggatttgaagttagggactgcaacatcagaatctgtgctgttaattagtaagtttgtggggtaatggaaaaacaaaacaaaacatgagataagagttctagatttaccatgattgttttgtttaagagatattggcattaatcttagtttccttttaacttgctctctctttcagagatttatttcacggtttagagtcaccttctttgggaaaatcagctaaagtatctcccatgagaaaattattttacatttctagttattctttatttctttgcattcttttatttcatgcttagttttaaatatttcctatgataattcattaacggataactcatttaacctcttttccagctcatttctttatcttaacatgggactttacaatgtcattctctttgcacaccaggctttatctatagaactatatttatgtagaagtcaacttggaatgagtgctatttctctaaaattctaagttataattattaaaattctaatagttaactgatggatctgttctaattcttaaatttttttttatctgaagaaagtaaaactgagaataatttatgtgtatgagcacaaaaaatagctaccatttattgagggtttggtaggtactaggctattaatatatgtt

SEQ ID NO: 123331 - DNA, 1048 bp, Homo sapiens
attatttatttgtcattgcacaaattatctaagttagctgtgtctcagtttccgcatcattaaaacacgtataaataattataaactcatgaaatggttgaaagataagaaaataaacaattagaacagggcatagaatattgtaggtgctcaataaatgttagctatcattattgtatcactggttcagggttcagatcacataggatcttggaggccataggacaatggtgtcaattttatttaaattaaaccataaagccattgaagtgttttatgcaggcagtgatctaatatgatttagaattttacagaatagttttctttttcctgctatgtatagattagagtatagggaagtgggtaaagagtagatgcaggatagttagtaggattttacagtaaactaggtcaggggggtttgactagggtgaaagcactggggagggccaacagaacttaacagcttacacttgagcttgtggtttagggaaataaggaattctgaatgtttgacatgaagaactggaaaaatcatgatgccctttatagagatagggaagggccccataggattcataaagctgccaaaggggtctacggaacaaaaatgttaagagccctgctttaaaatcctttgtccatgaatccactcttccacatttctttagagtttttcttttatccttcctgtcttcttgataactcactttctcccaatgtacacacttgatctgatgatacataaaacaatctgtgaagatgatttaggtcaagctggtttaccatacagccgaagtgagaacacaatgaatttagcactagcttgttgaatatgtcccagagctttcaaagcccagctgttcaagttcagtaaatgactctcatgaaaagtgattggtagttatgttcatttttatttctcctaccctttccttccagctgctaaagcctaatttttactgtaggtcaaaataattttaatttctttcattctcaaagtcaagttaaaagcagatagaatagccatctcggtttagcctgattg

SEQ ID NO: 123332 - DNA, 1031 bp, Homo sapiens
aattagttttttttttccttactataaaaatgaaggtgcagtattaaatgatttcttcaaggaagaattttatgatttcaagtagctatgtattctagaggagtaatacaaaagaaatgaaaatgtgatccttccttcaaaaagtttccagttctaaccaaaggactggaactaaataagcagttgaaatttgagaattatttggggctctactgacattacacaaagtcaggttacatgtaaatttgttgcatttgatgaacatttctatacattggtagataagtattcagaatgacagggaggaaggagtgggaaaattattctaggcaaggaaaacagtatgggcaaaagcatggaaaagggaattatgcgagtttggaggaatactaatgaggctagttggaataattgagttagcaggagaaataaggaggctgttgagggtctgcaattttaacctgaggtatctgcatgatattcagttaggaatcatagttatgtaataggagatgctgacaggaagaaagcatgattttttagcatgattagtggagtagtggtataggtgaaaagaatggaccaagtgaacttcacagaaaattattaatccatataggtagtaaagtgaatccaaaacaggggtggcagaatgggaattggagaagggcttgacttgtttgtataaaatcttagggagtaactaaagatgataaggttttgcaagtaaagtaatgaggcaattacaagcgaagtgaaaaacttggcaaagaagtggcagagaaatgttgagtttgaaattatgttatctttaacttttattgtattatcattttgggagagtagcctagacttcttattttagtgtgagaatttgatatactttcactgttttgttttggttttttttggctggtccttggtgatttccagaattttgttactgaatttatatttaaggtcattagtagctgtttggcattgtccatttattttctgtcagtgtttctcaaagtggtagctttttgggc

SEQ ID NO: 123333 - DNA, 1150 bp, Homo sapiens
ttttcatttgaaataattaaaagtaaaataattagtttagaatttagccagtgtgttttgtttgtttgtttattttgagtcggggtcttactctgttaccctggcatgcagtggcaggattatagctcacttcagcctccaccttctaggctcaagcaatcctcctaccttggcctaccaagtatttgcgaccacaagtgtgtgccaccactattttgttttatttttggcggagacagagtttcaccatattgtccaggctggtcttgaactcctgagttcaacctcccaaaacgctgagattacaggcatgagccaccacgccagattttatccattcttctccctccccatcatttttgttcatagctactttcctcctcctccatccttttttgttcatggaagagttccggtcatttggaattgtagttgtgcaggagaaacaaggagcttgaaatactcagctcatatctcaactgttagctcctttagctcctcattcaagaggacattgcataaaaggaagaataagtgctgtatcagctgtaagttgtgattcttagcatggactaccgcagcaggaggaataggcacatttatttcagaacaaccagaaatggaatctgcttggaaacagtttatttcgcagtggatttcttgtggaaggaaacaaatgtgatagaaaccatggaattgaaaagaatatgttaactattggagattcaagtccgtgctttgtaagcctttctgctttaagtaagatgagtttttatctctgttggatattctttgttttctgtttggttttcagtatgattcatttgaaattacaacctaactttgccatcctaaaggaaaaagtaaaggcattttggaagaattgccttattattaggagattcttgttccaataatcttcagacttaccttgtataagtcaactaaaatctctgtgcttcagtttcctttcttgtaaaatgaggaaattgggatgtgttatttccaagaatccttccaacttttggaccttagaatttctttttctgtggggggatttaggaattctttggactgtgttcctgtagagggatcttctggttgattgctctgagttcctgttaaagagaatgaagtgttagactccata

SEQ ID NO: 123334 - DNA, 1027 bp, Homo sapiens
atagggaactacttgctctgaaatttgtgtcctttctatgttagtatctcaagattatatgtaggcattatcaattctttaaaacttaattttaaattttttgttatggagtaataacttacgagtttttcttctactgcatagggcagttttggtggtaggaccccttggggctagctgcagctgtataataatactgccttatttacaggaaaagggaatgaaataagtaactttgagaaaaaatcatttctctgagccttagatatatcgcctgtaaaacatgaataataactacctttcagaattactgtgatgattaggtgcaattatgtatttaaggcacagtgcctaaccatttagtagctactcagtaagtggttcttattgtttattaagaaattatttttatcatgttagctagaagttaaggaactatgttatatcaatttaaaagtacatttttttgtttagagtagtgtcatacatagcccaagagtaaaacgtctcttgacctctgtgtaactgactccctgaatttatagacatttttcattctctttggagaaaacattgattgacgcccatggcaatttgaagtttcaacaccagtaaactacttcttagaaggctcaaattagtagacctgttgcttattctttacttaccaagaatcagtttttctgtattcccaatctgtttatgtctattgtattagatattcttatcaggtagatcaccttaatattctataaaatgatgaagtacaaatgccaaaagagacatttttaaacaaacatctaagatgaatgcgtttgaaagacttcatgaaggtcagtcacttaaaatttccctcctgatttggtgtgcatacctataaatgactggaaaagaaatagactgtatatgaatgctgcactcgtattggttgacattatctttaaagttccttttaagaagttaaactggaaatcttatacctggatagtcatagctatgttttactcaagaaaaacaactctgattt

SEQ ID NO: 123335 - DNA, 1443 bp, Homo sapiens
aaaaactgattcagaagcttcaaaggatatacaataaaagcaagattccttcttttttagatccatcttactttcttcagcaaccacataaatttcttttgtgtccttctggaaggatttacagtgtatgtataaaagaaaaaatctctgtatagctcccctgcttttttttgcataaaagggaagctattacatattcttcctgtaacttgtatttacttaacatatcccatagattgtctcatatcagcacatttaaatcttcctgaatcattttcataactacataatattctgttctatataagtgccataatttattcagccattcctcatcagtggacacataatcattttcagtctgctgttcattttactctgttgtgatgttatgttacatatgtctttgtctacatatacaagtatatccataagataaatttgtagaagtaggttagcttggtcatagaaatctcttctaatatgacttgtgaatttggggctttgattggaaaaactttttcaccccaatttgattaatcatcatcccctatatgtttttgtggtactcttttttttttttttctgagacctggtcttgctctgtcgcccaggctggagtgcagtggcatgatctgggctcactgcaacctctgccccccaggttcaagtgattctcatgcctcagcctcctgagtatctgggactatagcatgcaccacaacacctggctaatttttgtatttttagtagagacggggtttcgccatgttggccaggctggtctcgaactcctgacctcaagtgatctgcccgcctcagcctcccaaagagctgggattacaggcatgagccaccaagcctggcctttgtagtactcttaaagttttattttttatacttaatctttgatttatatggaacttattttggcacgaaatatgagtaaggatatagtcccttccctcaatagttttgagagacatatattgtttatcttgtatacatgtgtagttgtatatatgtatgtatataatatttatgtagttagcattaaaagcacaatcttttttaatatatattttgaggaaatttttaaaattttgaatcttataggaataccaaaatggaagtacttgattcttttattttaatttctaaggaaaagttgatttgttttctcaagtggctacttttttccagtcaagttttagtttttaatgtctaaaattttggttaaaacctgttgacaataaaggtggaagaagagaatgtgagaacagtatagttataacaactgtaataacagtagaggtaagaagtgtgaacttaaagtagaggaaggaaacctgtgagctctagggttttatcttagattgtcttacttgattctcatgacatttcatggaattagtgagaaacgtggtttgggagaaacgaaac

SEQ ID NO: 123336 - DNA, 1158 bp, Homo sapiens
actcagctcagggatttgtctgctgtataatttttatcacagggacaaatttgccgatagtagtagctacagcatctcaatcttctgtagcctgaaaggaattggtagcaacagtatgtcatagtagaatactaggggtgtgtactttacttacctgtcctctgttacagattgaattgttttcccagaaaagataatcttaaagtcctaacccctggtacctatgaatgtgaccttagttagaaatggagtcttggcagatgtagtcaagttaatatgagattattaaggtggagactaatctggtgtccacataagaagagttgaagatacacagacacagaaactcagacaataccatgtgatgaaggaggtagaaactgagtgatgcagctataagccaaggaatgcaaaggatagctgccgataccagcaactaggggagaggcatgcaacagattctcccctagagccatcagagagggcagcgccctgctgacaccttcatctcagacttctggcctccagaactgtgagagaatcaattcctgttgttttaagccacccatgctgtggtgatttgttttggcagctctaggaaacacatatcacctttgttcctcttccttgatattggtgagccttgttaatatgtgccattaggtttatacatgcaaaagagatgttctttgctcccatagaaactgagaatttgataagtaagacagataagttgcagtatcagaatatgttccatttagcttaataccttgttttttcctttaaagaagtttaaataggagcaagtcgtgggttgatcagcagctacaactctcttctagtcttttttcatcaccatgagttagtatagtatgaccagtattctcaatcatgttaagtttttgcataagtttataactaatgatatgtgaagctttttaagactgaaaactgaattatatgtggacttttttaggacctaatgttattgtttaatatttttacctcttgatttatataatgctttattgtttgtaaaaccttttcacataaataattattctcaggggttaagaaaatttcccttaatgaaattttatagaatattttcccctgtaagtacattaaacaccagaaaagctgaatcttgatattaaa

SEQ ID NO: 123337 - DNA, 1082 bp, Homo sapiens
ttttttgagtatatttttctcttgcagggttacattttgccatctgcctttccagagtaagtggctctatgtgggcactgaacgaggtaatatacatattgtcaatgtggagtccttcacactctcaggctacgtcattatgtggaataaagccattgaactgtgagtttgaacaaatattttgtatctgaaagcatcagttctatatataataataccgttacatcatagccaatcagtaaatctgtatggaattaaatatgtgacagatgttcttaatattaagtacagatttattagttttttatgagtagtattttgacatggcaatttgtaaatttaaattatgcatatgtatatagagatatatgcacattacatatgtatatatttacatttgtgtacactgtaacactagtttaaggaaacagtcattcctactaatgaaaatcatctaattttttctgttctcttatcttctaattatttttctttcaaatgatggtcatgacccacaaatgagttgccaccaatgtttggaaaacactgatttaaactactacttgatatgttttaataatcatcaaatataatgtttgctaaagttaatatattatcaaattaattttgtttgattttacttaattttgataaatttttactttttgataaattttataaataatgattgttttcatttactaatattagtaacaaaaactaggttaaactatagggccctaaggatctttagtgctaactcttcactctgtcttaaattttttgtatcttatctctttctacaagttttttcttacatttctgggacataaaaatcaaagtttaaggatatcagcaagacccttttgaatgtttctttttgattttaagcaaatagtgttgtattgttgcattccatggtatttacctctttttgagataaggataattctgtgacgtatctcttaagtcatgtgttagtatagctgtaatagtgtattaatcctggtttttcttcttgtagcaagaatattatcatatatcagtcctttggtagggtgggttttcatggtctgttcttt

SEQ ID NO: 123338 - DNA, 1035 bp, Homo sapiens
aaattagaaatttcccttactttacaaattataaagcagagacttggtgacattatgtgttccatagatacagagctagactttggcggatctgagatttgaagaccaatttctttaatttcaacccaggagtactctctgttatgctaagctttctttctagatacagactggttatatacgttgtagagaaatgtattcatattccacatacacactaatgctttttcaaagagaaaaattagacgggaattagtcattagtatgtaagctaattaacatctctatgggttataaaagattctagtaggaataagcattgaagaatttccaattttaattaagtactctatctttagttttctatttttaaatatttattattctcttgcttttgtaaagaaaggaattgaaaagctggaagattatgggcataaaactctaacctgttgtcacatatttctaatatccttagaatactagagctggctagagaggttaaagtttaaccctcttaagttattaaggtctggatagataaaattatttccttaaagttatatggctattaagtggcagatttaatactagaactcaggttacttaggtcctaagcagtgcagtgctgtttacagtgtatatcaacccttacattttattctttttcttctctttccttattctcaaatgctgtatcacatgtccaagatatttgaaaagactgggaaaagagagaggaaacaaataccatttttttccaaaaggtgtatgtatctcagattgcctaggaaagaagagataaggttagaaaaattgactgtattctgtactaaagtaggaaaacttattttgttagttttgatagttagtccctccagctgcccctgtactctgaaatcttctaaatttgtcctattaaaattactggttctgcccaaattttgtttatatccccagattacccaaacagatatagactaatcatttttctaattattaaacaaatatttattgtgtgtctactatgtattagga

SEQ ID NO: 123339 - DNA, 1895 bp, Homo sapiens
aatgtaaataaataattttaaatctcttacccaaaccactcttctcctataatttgattagcctggaattattccatttaatattatttatctgttaacaaaagtaagtccaaaattgtagtattaaaattaccactgatagtaaaacactagatgaatagtaaaatataacatgacagctgtcctttagacctttgagcatatgacaagtgattcataaggcaattacattgttttgagttactttaataatttttcttctgttttggttttttgtagactaacctcatgtataataaaactttataacaactaacctcatgtataataaaactttataaattcattttatcttgagacttaatattttaagggacagttctttttggaagtagcgtttggtgtcagatagaggtaaactgccctgtcagtatgttttataaaatggatggaactttgaagcagttcagactttaaagacacacataggagattcagccagagtcctgtcacctgtaattgcttactagaatctacgaaggagcccagtaattatacttctctttacctatctggattcttttttttttttttttttttttttttttaaagagacagggtctcgctctgttgcccatgctggagtacagtggtgtgatcacagctcactgcagccacgacctcctgggctcaatcagtcctcccaactcagcctcccatgtagctgggactacaagcgcacaccaccttgcccagctaattttgtagttttttatagagatgggttttcggcatgttacccagggtggtctcaaacttggaggcaatctgcctgcctcggcctcccaaagtgctgggattacagatgttagccactgtgtctggcccccatctgtattcttaacacattaagaaataaaataatttcagatggtgactaaaaatatcaccttaattattgttaaaggtaaagatgccaactagcacaagagccaggtaggtttcctggtactgactgacctgtatacagagatagccttatcctcccagtcgtggcagtattaagaacactgcctttgcagcagcagaaaagaaaatgcatcccctgggcagacttgctcccaaatgaacacaggttgaggggaaaatgagagggctacattaattatttccatatttaccggctacatagggactctaccattcctgggatagagttagaaagagggtagagagaagcccaggagttccactgacactcaagaaaatacaacagatgtggagaagcagtcctgctaatttgagtgtgtgtgtgtgtgtgtgtgtgtgtgtgtgtgtgtgtgtgtacacatgcttgatttttgtttttggcagccatggggggtggtttggctggtcacataaatgcaaattcttactaactttaatagataatgttatatattgttacatcaagttatacatttaaattacaacattacttaaaattttaagtattgatttttaaaactagaaatataaacaaatcatagtaaaaaatatcataaagtaatggctctattgatacagttatggttattttgatcctttttctggattttagagaaaacccaagaacaagaatgcatgggaagattgtaaacatagggattgcatgataactatttccttttcttcagccattatcttaaaattaatttgttagtaataataattctctagtattaccttactaaaggaccaatttttggagacagagtcatgagagagataactagtcttttagtagaatattgtacaagctagtgaaagacataaagtacaagttttggacatttttgtctaaaatctatatattagtgatttttttaaaaatcacaaacaacttatacctc

SEQ ID NO: 123340 - DNA, 1032 bp, Homo sapiens
aggcgtgagccactgcacccagccatttttaaacctgcttttctaacttacatttttttctaacttgatttgtttttctcttcttaatccttggactgccgcttctcctcagctttctccccagccctccctgccttctttcctttctccctcttcttcctcctcacctcttattttctccttttccttcacccctgctgtcctcccccactttatatgtagagtttgcatatgagttatttttgttaattacatacttagtccctccaactaggttaaatgcttctagaaaacaggattctgatttttatatatttaagtatctagtatcgtttcatataaaaagttatttataatcatataggccaatagttgaaaatggtttaaagataccatgttttcttttattttagagttaaaaactcaccacttaaacagtctccaggttatcaaacagaactagttattcagttggtttgggtgggtggagaaccaccacaacaaataaccagcctggcagtcaattcttcctatggactgtaagtataagttacgtttttttctaagtctcttcatagtattccatatgtcattttgtttttaaaaatagaaaggatggtctttgttatatcgtcacctaaaatggcattctacaattttgatttcagacgaaattgactgtttatttggaacataatttcattctgaataacttactttgggtatgcatgcagtatttcctgatgtaaagttaaatgcctcatggaccaataaattatttgtgatgaagttttaaagtcagtatatcctctcctaaatatactcccagaaataattttcttattaataattactataatggaaatctaacaatatgaacccagaaaactgttataaaactgatttttgtaaatgttgaagtgtagttgtgtaatttttctttctacttccaattaacttgtataaattgtaaaagcatgacaataattaatattcatttatactgtagtatactgttttatcaattcatgc

SEQ ID NO: 123341 - DNA, 1070 bp, Homo sapiens
acattggttacatgcaaattttatgccattttgtattgaggacttgaacatccgcagattttagtatctgtgggggtcctggaaccaagcttctgaagaaaccaagggacaactgtacatcaaactaacactggctacagtctgagatagtcttctttcatatcttttatttgctgccacacaatgtaagagcacaaactttcttcttttaaatatttattttccacgaccataaagaaaacataggaaataagaaaaagaaccaataggaagtttcaaaggaatctattacagacctcactaggcttacagttgtattttgtttggccctttctgtgtatttttagaattttaattagttaccaagactatataaatccatacttagagctccaacttaaaaatctgattatgtggccgtgtccgtgtttctccatggcagcttcatctggaactgagttgaagcttttcctcattagatgtgccatacaatcttaagtaaccatgatgcttacatgtcctcttttacttagttatatagctctctatacatgtcagttctccattcctggcttaaaagatcttaaaagaataaatttcctttattcatagttgattggtttatagttcctgactcataattgagaaggtatttagaacaccccaaagggcctccaagatgtatgctttctactttttattcttgacttgaatgattaccaaaacttaccccaaagtataatctcctactttcctaatagaagggaatgtctcccacccatgaagagctcaaaatgcccccaaggtagaaaaatagatgttgcgttgtgagatgtgagagatttatatctctgatcaagtttcaactcctatgccaaatatttttataaataatgcagttgattgatttagtgatattaaataatgtctgcagaagatctaaacagttccgtgagtaggcatatgtaacctgtatttcagttcctatagttgtcttttgtttcaaagaattttctgaaagacccaccatgcttctttcttcagccttatagactgtagtacattttttt

SEQ ID NO: 123342 - DNA, 1048 bp, Homo sapiens
tatataaacaaatattttatcaaagattaaatgcatacctataattacatctatcatcttagatctgtaaaaaccaggttttcttccaggaccattagtttgatgaagattttttttaaaactactaattctcaggctgggcatggtggctcacacctgtaatcccagcactttgggaggcctaggtgggtggatcactggaagtcaggagttccagaccaacctggccaacatggtgaaaccccatccctactaaaaatacaaaaaaactagccaggcatggtggggcgcacctgtagtcccagctacttgggaggccgaggcaggagaatcgcttgaacccaggatgcgcaggttgcggtgagccaaaattgcaccactgcactccagcctgggcgacagagggaaactccgtcataaaaaacaaacaaaaaatatgactaattctcattcaagaacttcctatctaatgaaaaaaactaatatgtgcctcaaaatgggaaacttttcttagaagctgaattcagtactcatgttcttaggaaatgttactttgaaagctttctcagtgactgttggaaatgtgacatcatgtcttttaccaaagtaatagaaaagcagatactggtgatacatacacatcctgttcatccatcgatgtgacacctgacttctgaggcttggacatgtaactccttgcccagctagtccaaactcttgatgtgtttttgtttatttataatgtttagacaatttgcaggggtttttataacgtcaatcaccaggcaaatttataacatattgtttactttgtattttatcatagattatatttttatttgttttaactgatgagtgctgtattagtttgaggtattttaatataaaatgtttctatctcaaacccaatgtgcatggtatcagtaccacagtctgttaatttattgggttcttttaaatggacagtagttaaatgtgtactataaataaaagacaaaactgcacttacataaatgtatgggttgatttgttttttgtttttgttttg

SEQ ID NO: 123343 - DNA, 1005 bp, Homo sapiens
acatcagaaacaattgtaagaatgggaaatattgagaagggtattttgttttactccctcacattttagtgtaatattttattatatctaagactgcaaaagcttttatgtttgccttttacaattgcattttcctgatactaactagtcgattatttcttaaagttaaaatgtacctatgcattttctgactttcttgttctttaaacttcatatttaaatttattcattaaactaataaaacatatggaggaattggtcacataattaatacctaataaggtttaacattggtagaattaagtttgaatgaataatatgaagcaggagctgttttctgtctcctaggactgtttatttctgaatttggaatttagaattgtaatatcttttagttcttactttccttctaactacataaaataatgttctgactttctcatcttccccaaaatcggtaaatgcatttgtcaatatgttaaggatataagccagggtgaacaatttggacatggaacatgtgatatattacacttaaatatattaaataccatgggagatgggttttaataagattcagcccaaataaattagtattcctttttatcctgggccagactttcaaaaagtggatacatctagccctttgaaataaacgtgatatttgtagataagtatatatttaaatctaagtatatgaatataaaaagtagccgggcgaggtagcaggcgcctgtagtcccagctactcgggaggctgaggcaggagaatggcgtgaaccccagggggcggagcctgcagtgagccgagatcgcgccactgcactccagcctgggcgacagcgagactacgtctcaaaaaaaaaagaaaaaaagaaaaagtaaataaaggttaaaaaccctgtaaattctcaaaacagagaaactcaaacatggttcagcattttcaaatatattttgctctttggtccatgtgaaaaggaaagtaatagagaagttcatatg

SEQ ID NO: 123344 - DNA, 1202 bp, Homo sapiens
agatcacatttataataaaagatatgttataaattaaagaaatactatgagaaattagaagtttttaaggaaaaaattacccaaaaaatcttaaagaaatgttaggtaagattatatgataatattgggagtcacagccaaaataaaattaaatatttcttacctccataaatttaggtagacatttgaacatatctacaaatataagtattatcttcactattttaaagatcccttattgtacattttaaagatttctatgatatgtagtagaatgaatatatagttttaaactgtcagtctaactctaaaataacaagttttaccagcaaatttatagtacaagatcttggttctgctagagaaaccttattcagttaatactatcaagaattccagattttttcgaagaaacagttaaacactatttatagttttttttaatatattttctaacatctaatataccaagattttgccaaattgttgtagagttaatatttatatataccagggtctaccatgaaagatattgcactacttattactatactgtaatagtataagaactgttatttacttatacatggcctcttcttgtggtcactaacatgataacttgttttgaaagttaccagattttttatttgtacatttttcttgttacagctcagtatttatgactgaccatctacctattccttccgttgtcttcatttgtgtaggttcttcatcaccacacaattcagatgatgaacaaaaaatgaataattttatagaaaagggtatagtatcttgattttaaagtattttcttttatgtttaatttatttagtttactttgactagattttgacattttatatcaaaatattgttttcagtgaagaccaaaagcagaaagttttccaagatggtagccaatgatataggtaggaaatagaaatttctattttgtttctaatccttgctatatgcagtgctaacccaacaccagaattatccagtgcattgcatttttgtgtaaatttgttgttcctatgctaaaaaaataatctcttgggctgtgtctcttctaaactcattggggcaataattattaaaaatcagttcaattgggttgcagttctttctctgacttacagtgtgaatttctctgttaattttatttttgctttactttaaaataaagcagggttcaat

SEQ ID NO: 123345 - DNA, 1050 bp, Homo sapiens
taaatgtactgactaccttcccattttttcttgttttaaatagaatatgtaacatgtaatacttgagcttgactatttgaaagactacattagaaaatttatcagtgttgataatgttattggaaggatagttctttgatgacattcttgctttatttttatcttattggtgagttttactttttgtcactccagtttctgtagttatatattttggggaaagcatgttatgttaacttcattcagcttttcaaaattttggtagtacagttatgcataattatttttaaacctcaggaagcattgttatatcctttggctttgtttgaacctttcagtgtgtttttttaaatcacaagatttgggtatacagaaggaaagttagtgtcacgttttttttcttctttcaaagggagactgccccattttagactgtaaagtttttttgcatttgaaaaactaacacattagtttatctccctacattagtatttagttttgttataagaattagcataaaatatgctattgaaaaacataaaatgtcaatgaaacattggaaaaaaactcatagatcttctgaggacctccctgtcaagactggtattttgtgcatgaagctgtggtgtcaaaagtattaggacttcttgagcattctgaactcaccgtatcatccgatctggtacctgctatgaagtatcctgaacctcatgaacttaccacctcttcttcctcaatatacaagcatttatagcttcaacttataggtagttatacagtggctgggaaaacataagaattagtacctccagggttgcactagtaaaagagccaccttgtgtggaaggtgagtaaatagcttggccctgaaagtttgcccctgagttttacctgttcttcgagagtaactgctgctggtgtcagtttgtgtgtgtgggtgtgtgtgggtgtgttgtgggtgggtggtacaggatggcagtcacaatttaatggttaacccaagcatgggaaatcaaccaccctaccttttttttttaactgcctgacagt

SEQ ID NO: 123346 - DNA, 1003 bp, Homo sapiens
attgtatagatactacttatcagtctaggtatattgcacctatgatatgtgatgaaaatctctggatttttcaatgtgtaatgttgccttttggaggactgttttagagatacaatattttctaattttaagggtattggatttcaagcacaagaacaaccatgtatgtgacatcaactaactgcagatgttatttggccatttcagttttgtattgcattttcttttttaactgaaattttttacgttggtgaaaatggggtgacttttataaatttaacccattcttgtttgctaaaggatactaattaagttaatgaagctgagaagtgaaaatttgatgtcccttccaacccccattccttcccagtctgcctaatgcctctttcctaacactggatttgtcatttttttagatgtggaagtcatgtatgactggatttctctttgtttacatggcgcccttatggactagcagggtctgtgctttaaatatctcctaacagtccaaaatttaacctaatatattcattcctgtattaacaaatgctttttgaaaatttcacataggaagcacttttcttttacgcatgcactaccactaacataatagatatagttgaacaacgcctaactttaaatcactttctagattaagacaataactgattttgaggatggaaagtggattccagtaagtttatacattcattctttttccaagattacagaaaaatgactgtggtttgcatcttatgtaaataccgtagttttagattatgcatgatcttattttgtttttcactaaaatgtaaatagaagagttaacttatatcaaggagtggttgagtcagatattgtataatgtaatcaaatacttaaatttgattagatataagtttggcctataagctagaaattaaaaagtaatgaacccagccaggcacggtgggtcactcctgtaatcccagcacttcgggaggccgaagcgagtggatcactt

SEQ ID NO: 123347 - DNA, 1048 bp, Homo sapiens
ccttaccagtaacataaacagtagattaacacatattttgtatgttagatgtgttatatactgtattcatgtaataaagtaggctagagaaaagaatgttattaagaaaatcataaggaagagaaaacgtatttactattccttaagtggaagtggatcatcccaaaggtggtttttccatagagtagactgaagagaaagagaaagagggaggggttggtcttgctgtctcaggggtagcagaggtggaggaaaatccatgtgtaagtggacttgtgtagttcaaacccatgttgttcaaggatcaactaaaatgaagtgaatattaaatatgacgtaggttttgtcttcttgcagattaactatttgaccaaatttatattaaaaaacaacacaaataacttcttttataacttgagcaatctcacaacatttttaaccatttcagatgtaaaggataactcctttagccgatcacggagttcaagtgtaacaagcattgacaaagaatcccgagaagcgatctccgctcttcatttctgtgaaacgtttactcgaaagacggactcgtccccttccccttgtctatgggttggaacaacgctaggaacagtgcttgtcattgcactgaaccttcccccagggggagagcaaagacttcttcagccagtaattgtgtctccaagtggtatgtattgctgctgcacttagagttacattacaggtgtgatttactatgatagaagcctttgtttttcattcttgaattgatctaagaattccaaaatgtaaagtaaatggggacagtgatggccttatttatttatttttttaattattatactttaagttttagggtacatgtgcacaatgtgcaggttagttacatatgtatacatatgacatgctgatgctctgcacccactaactcgtcatctagcattaggtatatctcccaatgctatccctcccccctccccccaccccacaacagttcctagagtgtgatgttccccttcccgtgtccatgtgttctcattgttcagtt

SEQ ID NO: 123348 - DNA, 1052 bp, Homo sapiens
ttggtatgtattctttatttagcaaagttgtaatgcacagatttgacaaatttaaagattttttcccctagaatataatgtaactttataataagactagagatgtacctactgcatttgatacccaaaatgtatcattttttaataccttcacttttatatgaaaatttactttaagtaatagtcatgtaataatacacagtaattattattgtcctcattccttctttagttttaaagcatttaataattaaacacaggaataccttttaaagtattaaaatttagtaaaaatatttcatctgcaaaacagaatttgcatttaccaaactcaagcattataccttgcagtttgtattgtttcactgttttaatttttcaacacaaataaaaacttcaagtggtcacataagaataaaagaactaaagtatctcaaattttgtttgctcatttttatatatcatggtgttattgtttatttcaaattgactgtttaactcaagaatatgtagtctcatggggaagatggggcagctttacaaacttactcttgaaaaggactctttagtcaagtatgtgggttgggggcctctgaattaacttccatgtagaatacaatgcttattaaaggacacgtaagatgctaatttgaagcttatacaaaccatgaaaacttaacatgcagcaattagcatcgaggccaacaaaagactttttcaaggtgaagtgtttaacactgacattgtttaaaattgtcagcaggacattttcataataaaaagttttgtttttaaggactcccttattcttacaactgaagtgacccttccctctgcctggtccttgaaacgtgatcactttaagagaagtttatttcttctgtacagtggtgccaatgactgtctcacagagctgtagtatcaattaaatgagataatacttatgaagttgctttgtaaaattctaagagaactttatagtttttttttttttttttggagatagagtctcgctctgttgcccaggctggagtgcagaggcaccatcttgg

SEQ ID NO: 123349 - DNA, 1035 bp, Homo sapiens
aggcacctgtaatctcagctactcaggaggctgaggcaggagaattgcttgaacctgggaggtggaggttgcagtgagctaagatcatgccattgcaccccagcctgagtgacaagagcaaaactccacctcagaaaaagaaaatcataaagaatagaaaatacatttattactcattaagtaaaaatagatcatcataaggttctttattctgtcatcttcatgttgagtggctgaagggaggaagaaacatttaaaacatagaacaggccagaaatggtgactgaatagatgcaggggatgatcaagatgaggttaagttttctggtttaattaattgtgcagttggtgaaaccattcaccaagatttggagcttgaaagaggggggtttgaagggggtggctgatgaagcaatcaggtttggatgggttgagtccgagtttcaggtgccagtgggacattcaagtggaaatttccagaagtcatttggagaggtttgatgctctagggagcaacttaggctggatagatgattataagtggtagatagtgagggaaaatatggaagaggatgagttggccacagtagggtgtgtattaagaagcagcacaaacactttgagagtattagttccagacattgtgagttgctaaaagcagccttcattagggcttcttgatgccctggcaagatgtcactctgaacagatagaatatcagcacccttcagaattcaccttccaagaggaaatttaggcaacttgagaggcatcgctcactgaataactcacaccctcttctgaaaatgtagcctttgagcttatctcagtaaaagataatgcctctacaatttaggtaacagagtgttgatgttcactcaaacccgttcttctgttggaccactacaagagattaagtaaattgatcaaggttacgtgacagaatttgaacccaggtctgtaggtcttgacttcaacccatgatcagttaggttgatcctgttagtggggagacttccctctaaggccagctgt

SEQ ID NO: 123350 - DNA, 1028 bp, Homo sapiens
ccacatatgtctactcatgatatgtgatgcctcctaatcataaggtcctctgtgctaagtatcattgtctgtgccctacagctggtagtgtatagtaaataaacacacacttccagtttaaaacattctggagccaaaaagttggaaataggcttcacctatgtaagtgaaacctgcaagatttgcaagattctgcaaaaattcttccagagcctttactatgctaatatgtatcaaaaacctccattagggaagtaaaatatattgcttcccaaacttatttcacctaacttatttcttttcttctgggcatctgttgaggccagtgttccatgaatcatattctttcttactttagagtgaactgatgagaatcagtggcaggtatgtcaagacttattcacacagagtgttgggtttcaccatatatgatagacacagactgtgatgtgtgtgtgtgtgtatgtgtgtaggtacatgtaggtatataagtgtgtgtatatgtatgtacatgtaggtatataagtgtgtgtgtgtgtgtgtgtgtgtgtgtgtgtgtgtgtgtgtgtgtcatagaaagagggagagagatagagagggcaaagaaaaggggaaaaaaaggaaagatgaattggccccggatcaggccacctgattgtttgaacctaggatttatataacagctgcatagatgtaacacatttgcaggctttgcctctttattccaatagtaatttagcagctttgcaattctaagtattgacatgtaatacattttgtgtgaattaatgaatgcatgaatgaatgcctcaaaggtccccgttgttgtgatgctttcctgacattttctgaaatggctttgaataagggtttttcttggggagccatggatgccaactgaggacgattattatgaatatttgcaaagctgagccttcaatgtccacttcaggggtattttaaggcaaaaggaaaaagaaaactctctttcattttgttttgctgacacctaatatgttttgagtaaa

SEQ ID NO: 123351 - DNA, 1095 bp, Homo sapiens
ccacctcaacatctgcatatatgattaaaacaatattattgccatatcaatggaaatataaaacatgaaataaattctcctataatcttaccaccctgacataaatgctaccttcacagcctctgttcatatgtactctgtaacattatattaacttttagaaaactttttctgatcaacagcaatttatcccatagggagatatcttcaaaattgaggaggaggacattcttagttgaatatgaaaaaagaagagcactctaaaatctatggcacatcatggggaggaaataaattagattgcaacagcttctgaaagggacacacattttccttatcgctagtgtggctcttggaaggtctttcatttgccagccaactctatatggattaggtcctctgatctttacatcctcaccctcaaaggaaagaagcaggtgatgatataagcatatagggcatcagtgatattttatatttttctttaaatgccacctcttcccaggtccgtagcagggagagatatcatttaaagttgacaccgcagttcctctggccactgaatcatgaccttctgacctgggagctagcctgaatctataggatttatcaagaagaccttaatattgcagaatggcagtcctcaccaatcatttgttcaccatctctcttttcttgttctatcctcattattagaagagtcattattttaagccattcagttgcctcaggaactgtaaagtaaccctagtgataattctccatggcacttagaaccacatagtgttcccctgatcatttggcctaacttactcagaaaatgaaatttacaaatttttttgattcccaaggttttgcgctacaaaggctgttgccatctgttttcttgtctaagaattgtaatcaaactggaaaaccaccaggatgtattttatttattgacaggctaacctcctgcatatttataagatgtaggttacgaatgtgtgcaaactgaccaaaaatgtgatataaactgttttatatggtgggaagtgctcacattttttttagaattctaaaactggagagactcttagttattctattgcccaa

SEQ ID NO: 123352 - DNA, 1049 bp, Homo sapiens
aaaactccgtctcaaaaataaataaataaataaataaacaaactaattttaaagtacagaggtgcctggaatcaaacacattctcatctcctttaccttacccattgttgaactgggagaagaatagttgccatcatctctttctttctctctgtgtgtgtgtgtgtatatatatatatatatatatatactcctgaggtcaggagttcgaatatatacacacacacatatatatatacacacacacagtatataaatacatacacacagaaatacataaacacagaaattatatatatatatacacagtgtgtatatatatatttctccgtgtgtgtgtgtgtgtgtatatatatacacacacatctaatgtaccctatatatatatgatttctgcgtgtgtgtgtgtgtgtgtatgtgtgcataatttctgcagcatggagatattttatatacgtttgagaataaagcagcatgaagtaacaaaaacagcagagatttaaaatttccagctctaactctttaacacaagtatcatggcaaatcctagaaaatcagaagagtggttttggattccaaagatcccttctaatgttaaaatggtaggcaattacttaccttctctacctctcacttagtctctattaaccaaggtcataatattactagttttttttttttttttttttttttttttttgagacggagtcttgctctgtcgcccaggctggagtgcagtggcgggatctcggctcactccaagctccacctcccaggttcacgccattctcctgctgcctcccgagtagctgggactacaggcgcccgccaccacgcccggctaattttttgtatttttagtagagacggggtttcaccatgttagccaggatggtctcgatctcctgatctcatgatctgcctgcctcggcctcccaaagtgctgggattacaggcgtgagccgccacgcccggcctattactagcttcttaagggtcttgtaaatgatgaaatttttgattaaataagaaataacatgaaaattatt

SEQ ID NO: 123353 - DNA, 1906 bp, Homo sapiens
ttttaacctgctcagggttgaataccttggggaagtaatagatttgctttggtggagctgtagttaggcaggtagactggaatcagatgggcgaggtttattacagtcagacatcttaatccatacataaaagacaactttagtttaaagacttggaatggccagatgtgcagattatcagaaaagtctctagatttgctttgagatcttatattttttgagtgggaggagatggagtgaaagttcttctttgggaatgataaaccgtgtacagtttttagcacagtgattaaactcttgggcttcaaagtaagttatactaggtcaaatgccagctctccaattgactgtttacatgatcttggccaagtcattcaacctctctgatcctcagtttcatcacctgaaaattgaagaaaagaagacttgcttcttggggtttctgagatttagctgggttgatgtgtgtatcaagtactcagcagactgtatagcatatagtagaggctcaataagtgtagctgtctttcaggttttatttgtttcctgcaaagtctcctgtctcttccttctggacatcctaaaagcccagttactccattttcaggtgaccattggtatttatgattcttactatacagagaaccagcgagcgttggttaaagatttctatctgctcttgtcactctccagtattgaaaaatgtatataaatatgcatgcaatgtatatttacatactatatatagcacatgtatataatatacctaaatctaatatatattttagatttaaaaggttttgtttttgcattttctgaagtatacagatgaatatgatccttcactgaagttccagaaaacctaatggacattttaaagttgtgataaactttttcttttcttttttttttttttttttgagacgaagtcttgctccgtcgcccaggctggggtgcagtggcacgagctcagctcactgcaacctccgcctcctgagttcaagcaattttcctgcctcagcctcctgagtagctgggattacaggcgcgcaacaccacacccggctgatttttgtatttttagtagagacggggtttcaccatgttagccaggctggtctcgaactcctgaccttgtgatctgcccacctcggcctcccaaagtgctgggattacaggcgtgagccaccgcgcccgatagactgtttttaagttatcctgttatttcttgtctagatccagttctaagttttcagtcactgaggaaattggtttgataatatcccattgtatcccttactctagggcgttgggctgggggcggggaggattgggggcctgtttaaatgaaacttgggctgagggttcttttggggaagagggttggccagtggcattttctgcagatttgctttcccttccctgacagattccagcactgttgggtcagttgtagtggagtgttctttggctgagttaaaagatggggtggggcttcagaagctcaaacctgctattgaaagggcagatgcaggagcaaagaaaatatgtacttcagctaatcattcaggatcaggctgggaagaacgtaaagcctgtcccagacaggttgtgtttgctcatgttttcctcttgtttatctggggtaaacaggcatggagattgttccttagtaaaattcagaggaagacatggcttactgctcctttgtagatgtcttgcagggagacaccaggctaaaagggagggaaagctgtcatccaagtgtttatacaaactgagtcttcggggaaatacatcaagacacaaaattaacagttgactttattctcactgaaacaagagacaccatttccttccttttttatttaaaatataagattttgcaatcatctatcaatctaga

SEQ ID NO: 123354 - DNA, 1026 bp, Homo sapiens
cacagagataacctatcttgtatctttcctgccatgtcaagtcatgtaatacagacatctccatcctggagactgggtatccaggcattatggtaactctgagactcagaagacaaacgcttgagaaagggctagtatttcctttctgcgatagtagtttttttttttttttttttttttctgaaaggctcttctatggctttcaagatgattggtgaaaatggaaatatatttgtatttatgtttgtttttcaagatgattggtgaaaacggaaatatatttgtatttatgtttgctcttcagactaatgttctctgtgttcacagagatacattgcagttctccttgggtgtctgatgcaagttccattcatggttgattttgatgtttcattcactatttgctagattccttttgcagcaagtagtgagtgaggaagtttccatgtgtccacccatcactctgcctggttgtggcttccttctttctcctagcatgaggtagtaagaaagaaaataaaagcattataagaatcacatgatttttaagtaaagagccattgaggagcagaataaaaaatcttgggatatgccctgagccctagttactcaccgctttttttttttttttttttaactgcccttaatctagtaggacctagtttcctttaaaatgtatcctaagcacccttgactttgttgactttaataataattttgtattggtcttgctgtcagccaacaattgtttttaacctagagctaaaacatgtttatgtgtgtgtgtgctttaaaaatttagtgtttcaacattaaattatttgtagaggaaaggaatactctagttcaagaatatgtatctttgctataggagtttgtctttgtctgttttcataggattttaaggacctcctttgtgaaataaaccattaacaactttgtagcattccttgtttggaaatgcccagtcttttaaaaaaaaagttttgaaagagaagagtaacaaccttaatctgtgagttaaaa

SEQ ID NO: 123355 - DNA, 1886 bp, Homo sapiens
ttttcttgctgatttgtttgagttccttgtagattctggatattagttctttgttgggtgtatagtttgcgaaaattttctcccactctgtgggttgtctgtttactctgctgattatttcttttgctgtgcacatatgctgattggatttatgccctcagagctactagaaacttcctgttgttggcatcctttggccatgtaaataatgtagggttcctggtttccttttaaacacacccacattttattcaataaccataattcaacaattgctggctgactttggcttctgcagattttagacttccaaactcatctgttttacctgtaaaacaggtaaaatactgagcttatatatctttgcacactgccccacagggtggaccagacccagatggatttggcctctgctctttgagcagagtttgatggtaaagccagaaagtctcccacagtctgggttttcccagtttccacccaggctccctggatcctggtgtcttggatgccagtgtgggtcagtgtggcaaacacctaaggctttgcatttgcaggtccatcaattccaaggtggtggagagaagcacagactcctactcctcattgtaaccagcttgagacaggctccagaacagcacccatgactgtccactttgttctttattgtagaaaatagaaaggcctacttccacgacatcgggaaagtcagcctcctgttgtcacctaaaagattttcggccaggcacagtggctcacacctgtgatcccagcattttgggagactgaggtagatggatcacctgaggtcaggcgttcgagaccaacctgaccaatatgatgaaaccccgtctctactaaaaatacaaaaattagcccggtgtggtggcatgtgcctgtaatcccagctactcgggagggtgcgacaggagaatcgcttgaacctgggaggcggaggttgcagtgagctgagattgcaccgcagcactccagactgggcaacaagagcaaaactccgtctcaaaaaaaaaaaaaaaaaaaaaaaaattcaagctgcagagcagttaggttttatcttaggtttggctttaaaaaaaaaatcaagatttgaagacacataaacctgttatttgtacacctgcagacagacttgcagacaagtttgagtatgttctatttcaagtcttgatgtataaagaagataatccagggcgagagttgctcaaggactgtaggtcaccgatggctcccaaggatcagccagagaccaatgagcaagtgaaagcagattggtttgaatcttgcatttgctggttggctcaagagaagtaagcactgaattatgcaatgcagttggcagggaggattgaagcggctcggagtgttgttttggcagaaaaactacttagcaaaatgaatgaggggagggaatagtgacacactaccttctggggtcccaggagggtctgtttcaaaataatttttatggaggcagagagaagcacactgatattgtaccagtgccttggttgtgacagatagtcactgttgtacaactagggatatggccagactcttaactatcttttaaaactagaagtgattacctttattgttttgcgttaaatttaagtcacccctccttagatgcttggttggttctttggtttcctgtttcctaatgccatgtttttgttttttttttttttttttttgagacggagtctcccttcatcaccgaggctggagtgcagtggcgtgatctcggctcactgcaagctccgcctcccgggttcacgccattctcctgcctcagcctcccgagtagctgggactacaagcacccatcaccacacccggctaattttttgtatttttagtagaga

SEQ ID NO: 123356 - DNA, 1046 bp, Homo sapiens
gtgaggtgagggtgagggtgtggtcgtatgaggaaacggaggcttaggaatgctttccatctttgttttaaaatagtggaattgagcctgggtaacatagtgagaccccttctctacaaaaaataaaaaattagtcaggtgtggtggcgtgtgactgtagtcccagctacttggaaggatgaagcaggaggatcaccttagcccaggaggttgaggctgcagtgagccatgattgtgccactgcactccagcccgggaaacagagcaagaccttgcctcaaaaatacatacatacatacaagtagtggaattgagttaaagtttcctaaagaagataatacctctttgttttcctctttgaatctcaactgctacctatcccaactgccacccaggacagagctgggagagagggtgtggagagaaagttgtagtgcagcatagaagtcttattggtgcagggattcctgaagtggcttcttaggtctgggcagatatgctgatgtggggcagggaccctggccaagggttttgggcatgggctgcatggctgcaaaggaaccttggtggtgatatccataaacacagggctgccctgcctcaccccttggcctcaccctttgaattccctgtcctcaatcctttgaatgcaacatcagatgaatcacggtgttctggaggacgtggcggtggatagtgttagggacggagtgattgaggctcttctttattttttttatttatttatttttttgtagagacagggtttcaccatgttgcccagactggcctcaaactcctgggctccaatgatgcgcctgcctgggcctcccaacacttcttttttttttgagatggagtcttggtctgttgccaaggctggagtgcagtggcacgatcttcgctcactgcaacctgcacctcccagattcaagcaattctctgcctcagcctcctgagtagctgggattacaggcgcccgccaccacacccggctaattttctgtatttttagtagggacggggtttcaccatcttggccatgc

SEQ ID NO: 123357 - DNA, 1017 bp, Homo sapiens
ccaccacgcccggccgattgaggctcttcttaacctctgcttcagacccctcctggtaccacctcactccctggtctttgaggctgtgtaagatgtgcaggcatcttacaagatttggagagtcagaaatcactccttgctggattgctgagggttagcaatgaaagtaaaagaggatatggagaaaatggaaaccacttataggatattttattccctgtggattctataatggacattttaattaaactctaatgggacatacattctaaaaagttctgatccctgaataaattaatattaatgcccaccattcattcagagtaaatgcattgagagaaatgtcctcaccaagtaatataaaaatggagagttagaaaaataaaatttcccagctcatcggcagcccatcctgttggtaaaggactgctccctctggtccattactgcccattacttcctccagctccacgtcaatgactcatgccaaaacctccatcacttccctttggagattattacacagcccagcagacatcctattaagaaacttcttattagcagaggaaaaggaaagttttcacgttgagatcgagaaggaagatgattcatggtcacgaagggaaaggtcccctgaagtcttgagagatggctcaccactgctccactttcctttggggacacacacactcaccattagctgtgggaagtcgatggggtgtgtggagaggaccatactcaattaaaagaatgacagtggaatcagtaattttgaatcaagctcagcgatggattacaaaagcaagagtgtagactcctaactaatgtagggtggaagttgaaacgtgaaagttgcctgtcctgagcacgtttagagttcacaattcaatattcaagaagaacgtaaggctagcagttgctatagttgggacaggaaatgactcaagtccaaaaggaaggtttctgtagatacaaggtcaagatgagaataggttctgccacgggaaatgggaagaa

SEQ ID NO: 123358 - DNA, 2466 bp, Homo sapiens
aaaaatacaaaaattagccaggcatggtggtatgtgcctgtaatcccagctacttgagaggctgaggcaggagaatcacttgaacctgagaggcggaggttgcagtgagctgagatcgtgccactgcactccagcctgggcaccaaagtgagactctgtcacaaaaaaaaaaaagaaaggagaggaaaaagaaaattttcccttcaagtatttcactgtgtcaggtactttgtgatcaagctagctcccagctgtcatgcctcattatcatatgatttacaacccatgattgcttttttaaatcgtatggtctgttgacattgcaaaatcagtatttctcttctttgcacattctttagcacctactatttgtatcagtcatttgacatttacagtatttaggaagcctgatggccattttttgttttattggatcaaattcttttactatcttttttttttttttaactgagacatcttgcagggcacagagttctctgcaaagatattgttggttctcctggtagaggtgatgaggagggggtcatactgaagtacatctcattcttgcccacctcatgaccatatttccctttaagaattcaaatgatgcatcctccatgatcgatccttaagcacctttgatgtcttgctctcccttgctgaaatggctcacataatgggagctttaactgaaggagagatggagctaggaatataaagatcatttttgcctgggtgtagtggctcatccctataatcccagccctttgggaggctgaggtgggtggatcgttgagctcaggagttcgagaccagcttgcacaacatgatgaaaccccatgtctacaaaaaaaaaatacaaaaattagccgggcagggtagctcgtgcctgtaatcccagcactttgggaggccaaggcaggcagatcacctgaggtcaggagtttgagaccagcctggccaaagtggtgaaacctcatctctactaaaaacacaaaaattagccaggcgtggtggcgtgcgcctgtaatcccagctactcaggaggctgagacaggagaattgcttgaacctgggaggtggaggttgcggtgagccgaggtggcaccactgcactccagcctgggggatagagtgaaactctgtctcaaaaaagaaaagaaaaaaaaaaattagccaggcatggtagcgctgcctgtatttccaactacttggagggctgaggtgggaagattgcttgagcctgggacattgtggctgcagtgagctgtgttcgcgccactgcagtccagcctgggcaaaagagggagagcctgtctcaaaaacacaaaccaaaaaaaacccatagagatcatttttgagaagaagtttaagaaaggtagacactgtgctgaggaacttagttgctaagatatagacacaagaaaatattggatacttggaaggagacgagcagacaacagaacaagaagaacttcatttaaagtcttgtccggacttggtggggcgatggtgcatttctggtgtctgacttgcaatgtctggatcctgagtataagctcggcaagcatttaggtttgggcctgaattttgtcatttgtaaaactaaaagaaaatagggattccatttgttttgtttgtttgtttgtttgagatggagtattgttcttgttgcccaggctggagtgcaatggtgcgatctcagctcactgcaacctctgcctcccaggttcaagcgattctcctgcctcagcctcctgagtagctgggattacaggtacgggccaccaagcccgcgtaatttttgtatttttggcagagacggggtttcaccgtattggtcaggctggtctcaaactcctgacctcctgatcctgcccgtctgcctcccaaagtgctgggattacaggcataagccaaggattccatttggatacgcttctgcaagtaatttcccttccttctcatcatctttgggttctgatggattctgtaactagtgggtagcttttttttttttttttttaagactgagtcttgctctgttgcccaggctggagtgcaatggcgtgatctctgctcactgcaacctctgcctcccaggcgcctgccaccatacctggctaatttttgtatttttagtggaggcagggtttcaccacattggccaggctggtctcgaactcctgacctcaggtgatccaccttcctcggcctcccaaagtgcggggattacaggcgtgagccaccgcacctggccacagtgtatctttttgttattgtattaggttggtgcaaaagtaatcgcggtttataattatgcttccttaagctaaaaacttaggtgagaacacacctcagtccttttagcaatcctcagttgagtctgaccatgcacattcttacttacaagttttagttgtctgagccaccgcttagcttggtttttagttgcatggctgc

SEQ ID NO: 123359 - DNA, 1025 bp, Homo sapiens
aaaaaaaaaaaaaaaggaaagaaaaacccaacccaaaccagcaaaaacaaaaatccaaccacctcctcaaaaaaaattctcaaaatagataatttgttaataacaaatagcatttttctcttttgtaagtggaaggcagaggtgaggaaggatagaaggatagatcaagtgaaagtgacctttcgaatgtccctgtctacacaaagtattctgtggccttttaagtctatctgtacatcttttattaaaaaacaaattgtgatatatagacaaaacccaagacaactctaaaaaacaagtaggtaattaactatcactggagatttaaagatggttggcaagatttggaatcaggaggaaatttacacagaactggtgtgtggaaagttttgaaatactggtcccagcatctagtccttgagtcatccctatgttaacacactaggttgaaatatctcaatttcaggtttttccttttcttgtctcttaacagtgccatcttggttttctcctattaaattctctctttgctttggagtctcatgctttttcaaaaatatattctgacctggccaggtgcggtggctcacgcctgtaatcccagcactttgggaagccaaggtgggcagatcacgaggtcaggagatcgagaccatcctggctaacacagtgaaaccctgtgtctactaaaaatacaaaaaactagctgggcgtggtgacgggcgcctgtagtcccagctactcgggaggctgaggcaggagaatgaagtgaacccgggaggcggagcttgcagtgagccgagatcacaccactgtacttcagcctgggcaactgagtgagactctgtctcaaaaaaacaaaagacaaaacaaaaaaaccctacaaaaatatattctgacctaataagggtctcattttttcaaaaatatgtactgactttataaggtattctcaaatgaggactaatacatgttttttatgtaagaagtgaaacgctgtcatgaaaacacaattggtgaaggat

SEQ ID NO: 123360 - DNA, 1029 bp, Homo sapiens
tagttgagcatgatggtgtgcacctgtaatcgcagctgcctgggtggctgaggcaggagaattgcttgaacctgggagacggaggttgcactaagctgagatggtgctgttgtactctgcactccagcctgggtgacagagtgagactccgtctcaaaaacaacaacaaggacaacaacaaaaaacagttgaactgctgtgctctgagaatggaaacacacggtccatcctgacagaatcaactaggcgtcttgacagtacattgaattttttgcaggctttcttcccataatgtgtcaaacaattaaaataaaaatacttgtatccacatcccagagaagaaagtgaaattacccctttttatagggcaatcgagaagcataaacaagtttgggtaggtgataggcatgccttaactagttcatttccttttaagggattgtttcattgtaaatccaggaatatgaatgggaaggaggggagtaggaatgtccaagcaaacattgaccagtaaaactgttagccaagatgaactgataaaaatgttaattcttcaatgaaatgaattgctctttcaaaaaattatgtattagatgtcagtgaaaaagccagtggtgatgttaataaattctcaccttgtaagcaaactgagaaaatgggtattttcattctcacagtaactgggttaggagaatgatgtgaattcgttgcagcttttttagttctcttaggcagaaatgactgtcaagtttacattgtaaccctgtgtagaatgtgacacaaagcaaataatctccactctcactcttaacttccaagatattgttcttttcaaacttaaattttattgtgtgtatttgaggtttacagcattttttttgggggggggggagatggagtctcactcttgtcacccaggctggagtgcagtggtgcgatctcagctcactgcaacctccgtcttctgggttcaagcgatctcctgcctcagcctcctgagtacctgggattacaggtgcttgccaccat

SEQ ID NO: 123361 - DNA, 1033 bp, Homo sapiens
atctacattatttaaatttcctgcagactcatgttgcaagtatttttagtaaaattaaatatttttatggagtaggtctgtagctatctcaaggaataagctgaataaaaataatgcaaacactgtcagtcctgaaagagcatggctttttaaaaactgctttattgaggtatgcttgataagtgaaaagctgtgcattttgaatgtatacaattcgatgagtttgggaataagtatatgccataccatcaacatcataaacatatccatcattcccagagtttcctcccacccccatataacatagaaatgatgattattcttattatttcattttttaaagcctgaattttgagtgggtaaagataatcatcaggtagttggttggtttcattgattggaatgtaaaagattctttttgtgggatggcagacaagacccactcttaaaaacacacatatacattcttctattctgttgcctttcttggcatttaaatcatcaggactgatgaaagtggtaattatggggacttactgcacatctggaaagtaatttgggaagatgtaaaagcagctgtgccacccttttctaattattatctggagtgaggagtggctattatggcatgttgtagggtgtgaaatgctggctttctttggcctgagttgatttgaacagctgctcttttcctcaggagcaacaaatatatttttcaggtccccaagttattgggggagttttgagtgattgggaatgggatagagaatttcactcgtaggaaaaacagaactgaagtgaagagttggcttgttgttggttttatgatattgtgaaatacatatttggtcttaatcttgttttccggcaaactcctaaaacccttggaacctccaaagtgataagtgtatttttttgtatgttaatgagttgactgatggctggccactctaggtagcttcagaatggaagctggtcacaggaaagacccgggctggattagagggttgggacatttagccccacctcccaa

SEQ ID NO: 123362 - DNA, 1048 bp, Homo sapiens
attgggcattaggagcctcttcctcacacagtgcctttgctgaaggtgcttccctggtgtttcctctcttagccctgctaggcaggcagagagatggggattgaagactttggtgttggcaccagaccgtccgaggttggagagctggcctctgtgcttcttagtcctgggatttgtgggcagtcgctcaacttctttgagctcctgtttacccatcaatataagtgggaaaaaacaggcccctgtcagagggctgtcctgagggttaggagatcctgcatgtaaaacaacctggcacttgatgtttcccacttaaataccaacctttattactattaactctgcgtagagggaggtccgatggctgtgggcttttccagggtggactgacctgaccgcctttgtttgtccaccccttcaggacggttcactgggaaacatcgatgacctggcgcagcagtatgcagattattacaacacctgtttctccgacgtgtgcgagaggatggaggagctgcggaaacggcgggtttcccaggacctggaagtggtgagtgggggtcctgggaatatgcttctgtgagcagagctgctccaatttgggcttttccttggtctttatcccagtgctagctcttcctggggtatcaatctgtaggctgctgcactagtgtggggtagaatgttcaggtccctaaaagactggcccagttctgccgcagatatcaaactgagtgagtgttggctggagcaataggatcgaacctttgcactcattaaaagaacagatttggccgggcgctgtggctcacgcctgtaatcccagcactttgagaggcccaggcgggcggatcacgaggtcaggagatcaagaccatcctcgctaacacggtgaaaccccgtctctactaaaaatagaaaaaaaattagccgggcgtggtgatgggtgcctgtagtcccagctactcgggaggctgaggcaggagactggcgtgaacctgggtggcagagcttgcagtgagccaagatcacgccactgcactccagc

SEQ ID NO: 123363 - DNA, 1032 bp, Homo sapiens
tgttgaccgctgggccaaggtgaacttgttcttgctttgcctgtggcttcacgcagacatgcgcacatagtccagtctgtgtgggtttttgtttggtttcactgactgctcttttgttatttgctacagacagcaaagcatatgggaaacaggtttcctgttgtacatttgagcttcctgaatattcaagaaaatgatcaggaaagtgagactctgcccagctcagtctacaaggtcaccattgtttttaaggaacacaggtctgcccccagagcatagaaacacagaagacttatgtcgtccctgaattcttattcttatccccataggataagaatgagaactgtgccgcacactatcctgagttatcctgctgaagccccgttgtttctctaaatggcattagtttttgttctgtttccttttgtcttcacttacattatttgctagctttgggctacagctgatttgaagatggtgatcagtatctgtgggcattagatggtgagtctgaactccattctgctgtgggattcacacacttgatgtcaaatacactgaagcattatatcttaagccagatggtaatacagttctgtgctctggcctctctcagacaaagtcacatttgtaatcaaatgccctgttccaatttagtcagcattttttgcacatggcactatgggaacgtggacatcaacagatctcttggtgccagatttgatcttggcattctgtacctttggtaattaagaaggcttttcttttttattaaccctgcagtcagttcaggtgtttccaaccttacacttaggcactagacacctttgcagactgtttgtgcacttgcggaaaccaccgggttggctgtgttgtgcatgacagtctaagagtagagagagcttcagatttttcaaatgtgcatcaacaatttcagcttcttttttttttttttttttttttttttgagtttcactcttgtctgccaggctggggttcagtggcgtgatctcggctcactggaacctccac

SEQ ID NO: 123364 - DNA, 1006 bp, Homo sapiens
gatgaggtttcaccatgttggctaggctggtcttgaattcctgacctcaggtgagccacccgcgtcagccccccaaaatgctaggattacagaatttcagcttctttttctcttgctcctgaacatttagaaatggtttttgtttgcttgctttaataaaaagtagtacacctgagggcttaaacaccaaactagcatactacttcaatactagtacttgccaaaaaggaaaaagtctgagctttgttgtttccatttgcatacaacagacagcattcctaaatgttgaggaaattgacactaactggggagaagagttaggaactcaggtaaaagtggccactttgatggcggaacctagcaggtatccagggtttggccagggcttggccagggcttgggagggaaaggagcatccctgtttttggagtcaggaccattcagggggtgaacgaggcccaggccaggtgcctttttggagcctggaatattaaaaccaggatgccaaaattgtagtgtgatctcagtctttacatttaacaattatatacatttttaacatggaagattacagtataatttatttaggctaatcagaagctaattataggctatttaaaaatgttaatttgtagcacactagaggcagtatgatctgaagtgagacaaaatgtaaaggagtgcagtgaatgtttgcttatttccaggccctcagagtgggtttctgtagctggatctatgtcatttagcggtgatgtcaacagtctacatttgagactgtaggagatgactgagtggtccaagccaagtggcccacctattctgcagaaccctgtgtggggcctgaggcagtttggcatctggaatggaattaggcagacacctgcagggcccagcctggtagtcagctgaggcagggccctgagcctatgctggtgttgtcacacactacacctgacattgtcctcctgacgcacgcagtccatattttagactgatctctcac

SEQ ID NO: 123365 - DNA, 2051 bp, Homo sapiens
gagagaactgagctctgggctgggcctggtggctcatgcctgtaatcccagcactttgggaggcagaggcaggtggatcctttgagcctaggagtttgagaccagcctgggtaacatggcaaaaccctgtctctacaaaaaaatacaaaaataaacagggcgtggtggcacacacctattgtcccagccactgggaagcctgaagtgggaggatcacttaaacccgggaagttgaggctgcagtgagccatgatagcgccactacactgcagcctgggcgacagagtgagactttgtctgggggaaaaagaaagagaattaagctctgagctgtggatcaccatgtgtatcagtgggaggtttctctcgctccctctcattagaagaccattgcccccattccagcagtatgtttgcatttgggattgtcttttctttcggtttggaagttttaagaattttaagttgaagaaaacaagatggtaaaatgttgagcaaatttgtttggtgttggccaggtgtggtggctcatgactgtaatcccagcactttgggaggccaaggctggtggatcgcttgagtttaggagtttgagactggcctgggcaacatggtgaaatcccacctctaccaaaaacacccagaaaacaaaaacgagctgggaatggtggcgcatgcctgtagtcacagctacttcggaggttaaggtgggaggatggcttgagcttaggaggcagaggttgcagtgagccgagattgcaccactgcaattcagcctgggcaacagaatgagaccctatctcaaaaaaaaaaaaaaaaattgatgcggtcacatcagttatcctgacttttcaactattcaatatcaggaaggacacacactagctcatggggtaactttggaaaatacatctcaatacaccccagagcacagctcatacctttcccttagtgtttcactgcacttctcaaaaaagaaaattaagttgttgcttttttttctcccttgacaggtcaatctgtgtattagaaatggagacttaatttaccaactctagaatggtattaagaatctaagttcaggagtaagccactgctcctgtctctggccattctgagacctgtgcataagtaatttatgtataaggcatagtttgagagactggagcaattatttagaatatgaagacgttctaaatttgtgctacagcaatgtcatccatctcatgggccccagcagaagctgatgaaacttaatcaaaaataaatcaagagcaagtccaaaccaaattggaagcacatcatgaatattcgtgaacatctggatgtgtgtgtgggggggtgtatgtttttttttagtgtgtgcaacagcagagacatgatttcttaacaaagatgccaaaaggaagacagattttcatctgtgatttcaaagggtgtctttgtttgtatgtgtgtgtcctttctccttagggtgtgggtttcttttctccgagatattcctttgatctctttcatctttcgggatctgtttgggtattttatctgaattcttcattggagtcagtcattttgattcatgaagattaaacatttccttctaaaggagaatttcaacttaaggaaagttttactatttaatatttttgatgaatcttttcaatgctagcgatgtgataattatcaattaagctattctgcatcattgatcatcagtttcacttcacatgtctaaacctcagggtacggtactttatctgccttgctacctaaagtactgccaaaaactaaagaggaaaaaacaaagtatgggaaggcggtaataacaaccatgctgataattatcacaaaaatgactttttgtttgtttgtttttttgtttaagagtcttgctctgtcacccaggctggagtgaagtggtgcgatctcagctcactgcaacctctgcctcccgggttaagtgattctcctgcctcagcctcccaagtagctaggattacaggcgtgtaccaccatgccggactttttttgtatttttagtagagacaggg

SEQ ID NO: 123366 - DNA, 1037 bp, Homo sapiens
aaaaagtccggcatggtggtacacgcctgtaatcctagctacttgggaggctgaggcaggagaatcacttaacccgggaggcagaggttgcagtgagctgagatcgcaccacttcactccagcctgggtgacagagcaagactcttaaacaaaaaaacaaacaaacaaaaagtcatttttgtgataattatcagcatggttgttattaccgccttcccatactttgttttttcctctttagtttttggcagtactttaggtagcaaggcagataaagtaccgtaccctgaggtttagacatgtgaagtgaaactgatgatcaatgatgcagaatagcttaattgataattatcacatcgctagcattgaaaagattcatcaaaaatattaaatagtaaaactttccttaagttgaaattctcctttagaaggaaatgtttaatcttcatgaatcaaaatgactgactccaatgaagaattcagataaaatacccaaacagatcccgaaagatgaaagagatcaaaggaatatctcggagaaaagaaacccacaccctaaggagaaaggacacacacatacaaacaaagacaccctttgaaatcacagatgaaaatctgtcttccttttggcatctttgttaagaaatcatgtctctgctgttgcacacactaaaaaaaaacatacacccccccacacacacatccagatgttcacgaatattcatgatgtgcttccaatttggtttggacttgctcttgatttatttttgattaagtttcatcagcttctgctggggcccatgagatggatgacattgctgtagcacaaatttagaacgtcttcatattctaaataattgctccagtctctcaaactatgccttatacataaattacttatgcacaggtctcagaatggccagagacaggagcagtggcttactcctgaacttagattcttaataccattctagagttggtaaattaagtctccatttctaatacacagattgacctgtcaagggagaaaaaaaagc

SEQ ID NO: 123367 - DNA, 1068 bp, Homo sapiens
tagactgtgatgagctagcttggttccactccgcttccaacactgcattattattttttcctctctgctattctgcagctccttgcgactacacaatacactcagctgtgttaaacaaaaacacaaaaagttgctgctgtcttggacagttccctatcagatgaacagaaaggccagcaaccatagcctgggctggggctgggggtggggtgttggagggggactggggactgggatgagggcgaggctggggtggggcacgggctgggagaggggaacggtggggctggggcaggaggctgggcttggggggcaggtggtgggggtggggctggggttgggatgagggtacgatagggctgggatggaactgggacaggagtgagggtgtgggaggccggtggtgctgggctgggggtggggcaggtggtgggggttggggcggagcagggatgggctgggctgggggtgggtagtaagtcagtttagaaaggactgaagtgccaagcacatttttttttctattgtaccggtttttatgtagtttatcctcagtggatcctggacgtttatatttgtatacccattttaagacaacagcctatcccttagaaccatatttaaaaaataggtttacataagcaaactttacagcatgaaagacttttgtcttatcaaatacactttcattgggagcctttcttcctctaattagaagtctgaacttgttaacatattttatgtttttattagccagcaggttcattctgtaataaaggcatttcttttccagaattatactttcaaaactttcttgcttaaaagatttttctcattaaatatttatgcttatttttaaaacccaagagtgtaataagaaagcctcactttatgagtctaggaatgcaaatatctccagaatgcacagctattgtcattcattcaccccacaaaaatttatttgtcacctactatattcaggggattgctctggccatagagatacagtaatggacaacatactcactatagaaaggtgaaacagcattcaaagtactatggaatttt

SEQ ID NO: 123368 - DNA, 2303 bp, Homo sapiens
tctaaactgacttactacccacccccagcccagcccatccctgctccgccccaacccccaccacctgccccacccccagcccagcaccaccggcctcccacaccctcactcctgtcccagttccatcccagccctatcgtaccctcatcccaaccccagccccacccccaccacctgccccccaagcccagcctcctgccccagccccaccgttcccctctcccagcccgtgccccaccccagcctcgccctcatcccagtccccagtccccctccaacaccccacccccagccccagcccaggctatggttgctggcctttctgttcatctgatagggaactgtccaagacagcagcaactttttgtgtttttgtttaacacagctgagtgtattgtgtagtcgcaaggagctgcagaatagcagagaggaaaaaataataatgcagtgttggaagcggagtggaaccaagctagctcatcacagtctaggaagagatagttgattctgctcacagggcggcttgactgaaagcttgcagaacttactgctcaaaccggggatactcctgccttctgcctcttgcctctgcttccctcttccttttcctcttcctactccacaccctggacatggggtgattctgtgcctttcttaggcctgtctcctagctgtgcccacctaagcatccccttctgcttgtgatcacctctgtgtgcatgtatgtatgtgccagtgagaatattagcaagtaatggttgccaggagaagtggaaaagagagagaaggaggagcaggaagaaaggagaatagaaagctcccctccaactcttgtcccttcttccttcccgccttgactagggggttttggttgaaaggcacagaggaaaacagaaagttctgccctgttcccactgcattctactccaggctcaggttagcagggctgagaatgaagataccaaggaactaccctggcagtctgctccttctccctttccatctgttcctctgcacagccccacctcactcctgtgagccttcttccttgctacctctggcctttgttccctcctcatattgcttggctctccatccacctagagcccatcctcacttctgggtcctcactgcctctaccgcccagatgaaaatggccactagtaatgactctaggctgaggccgtatgcactcactctttccctctgtggagtggattcatcttagaaaccccagctggacccctgactccattttcccatagaaacttgttatgcctggtggataagttctgtacttctgtatcccagcacatcatgagaaaagctgcacttactggtttgacctgggaatgtgtcttcttttgctaactttaaagtgcaacttgttacttaggaaaaaaaatcagaaatcgacagtgtaatctttggactccagttcttgtgctggaagtggcctccatggtaaaagaaaacttagagacattttctgcaggcagagatgtgccctgtgcctatgccacaccgatttcagaatggggcagggtagggcagggctgtagaacaggtcagatgggcattcttctcattgctgggtgccagtcacctgccctgaccccaggagatgacaattttgaacacaagccagcattttagtgagatttgaatttattcagcaatctgcttgtttttgtttgtgcttgtttgttctggctggtcataggaatctcaaagaatacctctgaaggacttcatttgggggcccagtgtgaacattgctgatacgagtaaaatctatttctgagctgcaagagataaaaaaaaaagaagtcgtagataaaagcagttggaatatgtttaatgttattttaatctgttgcattatgtgaaatagtgttacagtttgcatacagattcctacttgccagtattcaaacttagaacagtgtcctctccatcagcacacagcagaaaaggcagccaacatatgcctatcaccttctacaacagcttgtgggggatcatggagcatagatgcagaatgctgggcttggggatccaggtaagcaagacagggtctggccccaagagacaggtgaagcaaggtgccaagtccagggatgacagtgaaggcagggaggagcagagagaatcaggctttccaagggaggagcagagagaatcaggtgctccaagggaggagcagagagaatcaagctctccaagggaggagcagagagaatcaggctctccaagggaggagcagagagaatcaggctctccaagggaggaacagagaggat

SEQ ID NO: 123369 - DNA, 1495 bp, Homo sapiens
tcagatatgatttgcaaatattttcttcacttctgtgggttgcctttcactcttgatcgtgtcctttgatgcacaaacgttttcataattctgatggagttcagtttattcttttgttgcctgtgcttttggtgtcatatccactgaaatcattgccaaatccagtgttgtgagcctttctcactatgttgtcttgtaagagttttacacttttacgtcttacgtttaggcctctgatccactttgagttaatatttgcatatggtgtaaggtgtccccttattttcattatcttgcagtttacacatagtcgcataaattgaagtgatttgctttggagaaaaaggcagcccctgcctccctcccaccaccttttttgcccgctacacttgtcactcggctacattcacctgctatgcttgtcactccaccctgctctaatgccgctttctctgcaggctcttcttggttccccaagctaagtggctcttgcccttgtgtacctgcattgcagttttatgatacttctcatgtcgtgtctgtgctttcctaccatgcattattattcacgtgcttgtctcatctcttctgccaaattctaagcatctggatggctgggtttaagttgcatctctgtgtccttcagaccatatgccatagtgccttgtgcctcacggtgacttgtattttgcagaagcttaacagatattaactggatatccaattataaagagtcataaatagatggtattttatgattaacaatattaaatgtagaagtttattcagttcctgcgtaaatcaactctcaaattcagttttgttttcttgaaagtgtctgaaatactctgaaagctgccatccatattgctaaggcaagagaggagaggctgtcttctaccagtaccacctcagggctatgtaagaaatttcttaccttagtgacttcaagattgtcattaaaaactgcaatccatattttaagtcagacaacagaaagagattttcttgtgtttttaataaatgtgaacggctggaagcagccacaaagtatgtatcaagtgaccaattctgggcgtggtggctcacgcctgtaatcccagcattctgggaggcctaggtgggcggatcatgaggtcaggagttcgagaccagtctggccaacatggtgaaaccccatctgtactaaaaatacaaatattagctgagcgtggtggcacgtgtctgtaatcccagctactcggaaggctgagtcaggcaaatcgcttgaactggggaggcagaggcgaggctgcagtgagccgagattgcaccactgcactccagcctgggcaacagagcaagactccatctcaaacaaacaaacaacaaaaaaggagaataactttcaccccagactataagggaacatgctcttatcttgacacaaatttgatttcttcttaaaatagaaggtgtgagggtacctgtgcaagagggacattgaactaggtag

SEQ ID NO: 123370 - DNA, 3692 bp, Homo sapiens
ccagaacaaggccttgcaaagaagaaatgaaaacacacttgggtacaggctagagagtaggggaggagggcagagactcaggaagctaaaggaagcctgttatcagccctggagcactgactgggagggccagtagatcttagggtagcagttaagagtgtgtatccctggtcgggcgcggtggctcatgcctgtattcccagcgctttgggagggtgaagcgggcggatcacaaggtcaagagattgagaccatcctggccaacatggtgaaaccccgtggctactaaaaatacaaaaaatagctgggtgtggtggcatgcacctgtagtcccagctactcgagaggctgagacaggagaatcgcttgaacctaggaggcagaggttgcagtgagccaagattgtgccactgcactccagcctggcaatagagcgggactctgtcaaaataaataaataaataaataaataaaagagcatgtatcccatagtcaaatcagatagactccacagagcctgccaccttcagacatggtcttgggcaagatgacttaatctctccatgcctcagtttcctcattggttttttttaaaaaaaactggaaataggcaaagttcctaccttataagtttttttcagattacacgtaacgaaaaagtgcttagaatggtgtatggcacccagttagcattagataaatgttggcaatgatgggaatgaagcaaagaagaagatgaagatggtgataatcacgttgatgataactttgatgatgatgatggttatgatgaaccagaaagcgctacagaagcacctgaagctccaggattggccctggcacatgtactcaatttataggtggagatgttgtgattgacaaaaggtggggaagtgggatgcaatctgaaaacaaacccagtggtcctagtgggcacttggtgaatacttggggcttatgaggtatatagatgtttggtagctccaaaggtgtttgacattgttctttctatagttaattttgacaacatctaggtgtaaataaccaaatcagccatcatttcaattttttgtttaccacttgcatatagttatttaagagggaattttcaagaaaatagttaatttacttttatgtatttccttaccacgccactcagcttttccctggctgcctactcgggataaacaaggacaaatggcagtctacgtgatccctgacaaaacccttgacacatgtggtagaagttatatatagcacttaacatggtttgtgtccttccgtgaacatgtttctgtcattgttttgcttcactgttgaacatactgtctttctcctgctttgtcagtcaaattatacaatgttagtaaccagcaactaaaaacacagtaggactttaaatgacttccatagtaaggcactgggctttatgtgtgatggtgtctccgcttccagtcttctctactctttcctttttgaattcacgatacagatatttattagatacttactctgaaccaggcacttcgctaggtcttgagatgttaatggtgagcaaccgatagcctgtgcccagggtacactgaagtctgagtacagatagcgtggtgcagtattccgatggaagcacctgatccagtcttaggggatcagggaaggcccaggaggaggcagcatctttaatttctctaaagttctgtgaatacaccttaatctccagaccccaaatcataacccttcttccaccctcagatcataactttgaaagccctctgcagtttccatgcagccagtcctttccccaagattgaatcttccttgaaacttactcccctcccatctcctgtccattctggcattgtcacgtggcatattgctcccaactttataatatttttggtgaaatttgagaggttttcttgttgctctgtgaataatttatggcaaaaacagacaaatcctctccatttccaaagatcattttctgtttcaggtaataagcatttacatgtgaaggccatttgtctggtgattaaaatttggaatattcaaagagagtcttcatagcaactttcaaaacgtataggtagaatatttaaaatctgtactgggatgggatgctaatggtttctcattctagcttggagttttggggcaaaggtgagcaccctttttggattctctttatgttttatagaatgaatgaaaaattcaagtgttagtgctttgaatttgcatacgttgttttagggcatgacagagaaaatgtggatgactttgaggttgatgccgtatccctatagggattatggctctttaaaaaacagatctgatggtactcatgtaagactcttgattgtctctattctttaaataacaatcatatctctaggttcacgtcatcctttttagatgaccatgtagtattggggatgccgtccgccctcctgtcctgtttctcagccacatcaatcattgtgttcagactcgctgcttttatctgctctgctacagaccatccgttttctgcccttggagagcaggtcctaataggtttcctgtttgtactcttctgagtttttgcttgttggcttttcctgagaaaaagacatgctatgtgctagggggaaattggcttagtttgtgtacatggagattttctatgtagtaatatgcataaccttatatgaaataactgttttgtaattaacaccctggtggtatttagctgattgaggccagttaagagacaacaagaaaatactttaattcttccttttcatgctacaggaaaggagagttcaacaaggtgttttaagaaaaagggaaagtaaagcaaaatttctgtgagaaaaattctgcattattgatgtttcaaaaatccttattaatataatacagtaaaaaagaagtgtgtgcgtattgaataatgtacctttaaatgacaagtgccctgcaaagatctatgtgtagaaaagaagtttgttatatatgattttaaaaagttaacatagatcttctatgtcatggaccttctatatcccagttgtggtatagaatcttgatagtgtgcgtgtgtgtatgtaaattttagatcaaatctgactctgggtctgtagaaggaataacattaagaaaaaccgattttaagcagaaacatttttgttctgctttcgactgtaaaatttgtatatatacattgtagaaaattcagaaggcttaaaaaaaataaggatgatacttaagtcctctattcacacttgcaactcagatataaccacatgcttttgtctgacatacatatctgttctgtaagtattgagtatctattaagtgccaggcactctgctgggtcctgaagatacaccagtgaagaaaacacacaaaatttccttccccagggagtttacatgccactgtttatatatgtataccatataccaaaatatacaatgacttcaagctgtatgctgaagtcatatggtgggcttgttcatactccttagccttcactaaggaatacctttcccttatgaattattgttccctatttttttaatcgttatgtaccctttgtctttgtctttgagtataccataatttgtgtcccccagtttgaactatttaggcaatttccaattttttgttatgatagaaataagtggctgggcacagtggctcacacctgtaat

SEQ ID NO: 123371 - DNA, 1036 bp, Homo sapiens
cctgttcttatcttatacttcccagtatttagggagaaaaagttaccagtttggaaagtaatcttattgtgcttttaaactatattgctctcgttatttataagagcacacatatttttctatccttatttgtctgacccatctcttaaagtcatttgctcatttttctatttaaagtaatgtctttcttgtttatttatcagcactttttatatagtgagccatttagtccattatcataatgtggcacattttcttccagatggagaatatgcatttttgtccaacttctctaccaggtaaatgacgaggagggaaaggagaaggccctcctcttggtatagaggaagggttggcttttcaaccagaatctctctacctaggcacagcagcaatgactcagtcactgtgatggcagtgcccacaagcaccaatgcccaagaatcccatttgttttgcagacagggctgcttttatagtgccaatctatgctttctgcctgagctgccagaaccatgcggggtccaagcaggcatgtgagcatggagatgaactctgttctggataaacagtactccaccttgtcccctcctcccatattagtagtcagtgatccgtgtgaatttaattggtttccagaaagtgagtgttacgtgtatacgtcagtgtgccactttagagttgtagaaagaaaaagttgggccttgtggctgtggatgaatgaacatgaccctgacaaacagctgctgttctgaacagcgagataaatttatgtttaaaccacagtaaactatgcaaccaggtaataattttgagcaatgaagtatgtttgctgtagtaaccattacagacacagataaatcacagtaatttcaacgtggcacttttgccattcaataaatgggtattttaaatttcatttgcttttgaactaagtttcataatttatagagtaagtcattcaaagattaatgctcagaagggaggaaaatcactatacaagaacagaaacatgtcatttatgtatattacattg

SEQ ID NO: 123372 - DNA, 1358 bp, Homo sapiens
ccccagaagtggaaagaaagtaagtctttctccctctgcccaggaccaccttccaagaaggtgtcttttaggtccatgctgacggaaatcaaacaggcgatcatgtgcgtatgtactatggagttatgcgatgtcattttccttaacatgttgcatgcatgtgtgtgtatctaggtggctaagagtgtgttttgtaatgcagttggtgatgtctgaggattttgtgaagagttactgattttacacttattgtgaataaaccctaaataaatctccggaaatagaaagggaaaggataggtgcattaaccaagatggattttcatcttttacattaatttttaatgtaggataaaagttatcaagaagcaagatacaaatataaaatatactatattccagaataaaccaatgattaaaaacccgtcttctgcacctcattttggtaggtgaccttaaaacaacagtgaatgtgtgtgttaaaaaatggcaaatgatccctagcgtttcctgttaaaggtaatatttttgcttccttgacccaacttggaccctgtaatttctgctctcatggaagctaattttatgtttcttgttatattttcagtatttcttttaggcaacataaataagacaaaaacaagagaatcttttttctaaaaccttttctttttctgctttattgcatcatcattgtactagaatgttctatttgtgatcttccatggtaaaaaattttaaagaaagtccacatctctaaacagacgcttcctttggcacggagccacttgtacgttcatgccaagggaggcacagaagtggtttaggcatcaagtatttctggaatgcaaagcacacgttggggagagcgtgtgtgtgctttagagcacagctttgcctaatccatccacgtgtgtgtgctgctggcacaggcggttctgggaggagggctgctttgccagaaagctataattctaaacttaagaggctttgtgggttttgttctggtctgaggaacgttgtgggtgatgtaccatagcaaaccaaggccactgcccactcaggttgagaagataactgtgcacaccccatcagctttttttgttttgcttgccttgcctcctcccaggaacctagtaatatggaggctgaaatagacaaaaaaggctcaagttgacattgactttgaacttggaggtattgtggtggggtagaagcatcgagtgaacgggctgtagcttttcctgccctagtttattatgtgccatgattcaggctgagagctcaggtgttccctcagaatctctgaatccttcaggaaacgagaaatgtttgctcttcctcctaagaggaagtgac

SEQ ID NO: 123373 - DNA, 1043 bp, Homo sapiens
ttgcctctgtaattttaagtggttcaaacttaatgtgtttctaaacaatttgaaagtttaaaaacattttgtcctttatttctctgttaatggcttttgaaaactatgctatcctttgcttttaacttaaaaacactttcttttgaaaacttttatggctgggtgcagtggctcaggcctgtaattccagcactttgggaggctgaggtgggaggatcacttgaggcaaggagtttgagatcagcctgggcaacatagtaagaccctgtctgatccagcaccagccccccgcccccagcccccccaaaattagccaggtgtggtggtgcccacctgtagtcccagctactcgtgaggctgaggcaggtgggtcccctgagcccaggaagttaaggctgcagtgagttgtgatcatgcttgggtgaaagaacaagaccccatctcaaaagaaaaaaatattaaaataaatttaaagttacagtaaagtttcaaggattgagaattgtgcagtgaatgttcatgtaatcttcacgtgggccaccagttgttgacatttgcacactcctgagctttctctctctctctctcacacaccccctgccccccacatacaccaccattaattattattactgctggcctgtttgagaataaatggtagacatcatgattgtcacccctaaatgcttaagcaaatatttcctaaggacaatgacattctgttacagaataatatagtataatgaccaaatacaggaaacttaataactttttctaatacatagtttctattcaagtttttctttttcttttcttttcttttttatttatttatttatttttgagagggagtatcgctctgtcgcccaggctggagtgcagtggcgtcatctcggctcactgcaacctccacctcttgggttcaagctattctcctgccttagcctcttgagtagctgagattacaggcacccgccaccatacccggctactattttttgtattttagtagggacagggtttcaccatgttgggcagactgt

SEQ ID NO: 123374 - DNA, 1058 bp, Homo sapiens
gtgacctggcgaaccagttggctgtgtctggttggtgtctgcaaaagtctctgccaaccaaaatatcattctgcgtcagagtggtgttctgtgggcagaagttttctctgctttttattccaaaaacaagagaacttagaaaacacatgtgggcaagacctgcaggggcccacccttagaagcagaaatgcaaagaaggaggcagcgtggaagctgagcactgctcctgcgactcctgcctcgcagatccagtctcccagcttgtctcagggaccccctgtgtgcacgcctctgtcctccttgcccagctgaaacctattctaagggaggtatctggccttaattatgtttcaaatgtctgtttctaaaaaataacatcacttctgtcagtagtatttagcatttaacagggtttaaagtctcaagtcacaggaagttagctctgaccagaagagggggagggagagagacaagcagtgagatttccgacatacctggcatctcagcatctattgtggatgcccctgccaagtggggctgctgacctctagatgtgcttgacctgcatatacaagaggtgggttgataggtaggtgataggtaagtaggtgtgtggaaagaaagaacagaccctccctaccccattatgagtttggtggggtccccattcatccttattttcttacactatctggtctctccatatgctttcactggaagtttaataaagaaggccaagggagatttcatttgagcctcttctctttatatctatctacatcgcttattgatgagactatctgttactggaagggggtcctgatctagaccccaagagagggttcttggacctcatgcaagaaagaattcagggcaagtccatagagtaaactgaaagcaagtttatcagagaagtaaagaaaccaaagaatagctactccataggcagagcagtggcatgggctgctcgactgaatagacttacagttgatttttgattatatgctaaacaaggggtgaattatttatgagttttctggggaaagggcaggcagttc

SEQ ID NO: 123375 - DNA, 1083 bp, Homo sapiens
tgcaagctccgcctcccaggtccacgccattctcctgcctcagcctccccagtagctgggactacaggtgcccgccatcatgcccagctaattttttgtatttttagtagagacggggtttcaccgtgttagccaggatggtcttgatctcctgacctcatgatccgcccgccttggcctcctaaagtgctgggatgacaggcgtgagccaccgtgcctggccagggttcttttcttaaggaaagagggtgaatagacattgcgtaggagactagcagtattttctatgaaaagtttaacttttatttgtatgcatgtaaacaaaggaatctgaaaattacctagatgtctgacaagctgtgtgtcaagattctttagtgtcattacattcaaggaagccaactgtagggagggccacctggctattttgtaatatgtttatggaggaaatcttcatggggtggtttatatagactaaaaattgaaaaggcatagacaggtaataataggtgatgcttattgagttcttattatgtgccaggaactgagctaagcacttaacattgactcacttaatacaaaaatcctacgagatgacaaatggtatgattcccatctacaaatgcaaaactaaaggacagaggtaagttgcccagggccacacacttactaagaagcagtacacagatttgatcccagttaagaacccataaccctaaccacagagctgtaattccaaagtccttagaatgcattgcttatgcaaatacagaggctagtggcaaatcgtgttcgttagcatcaaataaacagcagcaggtaaaacctacacttcagggctcccttgaaaataggagcaaattctaccctcatccagatataagctaggtcccagttatttatctgtagaggcaggaaggtccaaaataaatctcaaaacttcacctaagccaatatttataacttcttttctactaagtctttcactggagttgaacattcactgatttagtttcactttttttcattatctgtggctacacttgaactattttatggtgaaaaagtccaaaaatatatagc

SEQ ID NO: 123376 - DNA, 1348 bp, Homo sapiens
gtctccccagactgacggtgtgaataaaaagtgctttcggcttgtaaatatcaacattataaagacacctctaaataaacatttgacatagtagcttccataaattgccaaatctttttctaagggttgccccccttttcttaccggattctatttcatagtctggttcaagtctccctagattttcctcttctaaaatagaaacaactgctgagcacggtgagatgcgcctgtagtcctagctactcgggaggctgaggcaggaagattgcttgagctcaggagtttgggactagcctgggcaacacagcaagacccagtctcttaaaagaaagaaaggaagaaagaaacaacagacgacataataccttcagatgaaggtacaataccaagaaactcatacgtaatattgtgatttagaaaatcatgctgtggaattatcagtccgcctttggaagtagaccagattcagtgaaaagggctgatgaggtctgtgagtttgctaggaaatccaggtcaagccacgtcccctggtgctgacatgaatgcatcctgtctccacatcctgtttgtggcggggctgtggtgtagggtggagacacccatgttttcccccagggagcatgtgtgtgtgccctgcgcctggggcctgtgtgtatgggagtgaggatgtcacacagaggcatgcccttcagagtgggtcacagggcgcttctgccccacggaggtggatgtgtccttctgtgcccagcatcttctcggtccccatgagctgttagagcatccctaagataaccaaaggcaactggagccatcattatttgttttttcaggcacactagggtgggaagcataggcaaaatggcaaacttaattttcagaaaataaatggactggcccaagagccaggtgttgttatgatattaggtactcttctgccttaatcagtagaggctgagggcatgagggccaggtcactggccaggaggctcgtccatctgtgacttgtcctctttgccacttcatcttctgggcttcagctccctcgtgggcatggtgaggagtgtgagtcaggtggtctccagggtccttctagctcaggccatcttttgttttctgctccagtctaaagcatgccctgcaccgatcaatttagcttggactctgcatatcccactatgttgtagctggcctaggctctggagctggacagaatctgagcgtgagtttacgctccgctagttgtgggactgggaacaagttattcgaattctttacgcctcaggtttctattcaataaagcatgcacaaaaacagctcttttcaagggtggtgctgtgaaatgccc

SEQ ID NO: 123377 - DNA, 1062 bp, Homo sapiens
gcataagaagaaacagaatattaggccaaggatggggtgatggtgggaggctatcagtaaataaatatcattcctatacttgcaggaagatgtggagactcaacacctacagcttagtgcgtgctccctgcatgtcttattaattctcctaccaaatctataatgcagatggtattctacagttaaggaaaccaaggtttagaaaggtcagtgacttagcaagatcacagaccttgggtaaggcagagctggattctgaatccagctctgtttatctgcaaggggcagactgcttctcatccacccaactacaggtacaatcaaagactggggtgctcggagagaccagtgatgggccaggcagctcaggaagtttaatttgataagcatttatccagcagtaagccctggaaagatgagtaagataggtagggtagctgtcctcttacaatctgaagacatggaaagatgcttataatgcaatgcgaaaaccatcaggacaggggaactgcagaaggaggtatggtgaaccccgcttgggggataggcatggtgctgagggccctgtattttggcatcagtcagggttctatttgagaagtagaatgttaagatagaataaggacttggttatatgcttttgacctcatgcatcacagcccgtgctggctgcacaggccaggtgaggctgttccttctgtgtcaggtggtacagcctgaagtcagcagggcaggcagttcagcaaaaacaatgcctgcaaagtgaagagagcaaggacaaagtccaccctgccagggtgggctgacacccatgccatcagtcaccgtctccaagcgaggcttcagcttcgcgggtgcagagggcctgcaggagttgttgacgtccttcctcaggagctccacacatcacaggcccaggactgaggagctgaggaggagacccagcaggaatgtgagcgctgtgggcccagctgctgccccatgccagcccctgacccagaggaccaacaataacagctatagcagggccccatgcccacactgacggtgaagcacggaaaa

SEQ ID NO: 123378 - DNA, 1055 bp, Homo sapiens
catgcctgtaatccaaggactttgggaggcagaggctggtggattgcttgagcccaggagttcgagaccagcctgggcaacatggcgaaatcctgtctctacaaaaacaaacaaaaattagctggacatggtggtgcgcgcctgtagtcccagctatttgggggctgaggaggtgggaggatcacctgagcctggggaggttgtggctgcagtgagctataatcacatcacttcattccagcctggccaacagagtgagacccagagtgtctcataacaataataataataataataataataatataatgtaaacaaaggtactttctttttagtaggctgcttaagctcataagaaatttttgctcatttttataataactagtttttgtggtgaaaacaatgtgctacagccctgttttattttattttgcttttgataataatttagtaattccttaagacaaaaaaaaaaaaaacctaagtaaaatttaaaattcacagtgaggccataaaatgaaggcatttgtttttactggttagatcaaaaccagaataaaaagcagaatttcaaggccccctcccccgccccttttttttacaccttaatttttatgcctactgaagaatcatcaaaagtcagaatttgacctgaagccgcagactccaggggcagcattacaaacttaaattgcactttcagtaccggtaattagagacaatgtggttttggctttcggctcacagtattgcaccaggtactgtgaatactgtgatcagtaagactagtgaaccccttgactccatgaagctcaagttttagtgggaaaaacattggtttgggtgtcggaagagctgagtttaatctccagctctgtgacttacagtgactaattgcgtgaccttggacaagtcacttatataaagactctaggccagaatctcttcatacatacagcaaggctagtttttttgagtgtttttgtgagactgaaatacgatgagatttatgaatctactttggtaagccagaccaatgctttgtggaagttagt

SEQ ID NO: 123379 - DNA, 1019 bp, Homo sapiens
ggctgaggcatgggggctcacacctgtaatcccagcacttagggaggccaaggtgggagaattgcttgaggccaggacaagaccagcctgggctacataatgagatgtctgtacaaaaaacaaaaaatcaaaagattagtcgggcatgatggcatgcgactcgagtcccagctacgtggaaggccaaagcaggaagattgctcgactccaagaggtagaggctgcagtgagccatgattgtgccactgtattctagcctgggtgatagagcaagaacctgtctcaaaaaaaaaaaaagtatacacacacacacacacacacacacacacacacacacacaccctctagcatatgtcacggggatattctgaacattagttattaactttgaaggaattgagaaggcatttataacttcacagtgctggaataggtgctgttactgtcaatagtgttgttagtatcaaagctggcattcatggagcaattttatctcaacttcttatgcagttcagacccatgaagccacaaatgaagaaaaatatggcccagatggaaaagagaagacccactgaggggtttttggaaacctcagaggatgactgaatcccatcccagatctgattctccctccttcaagcccacatcgctcctgcacttggatagtcctggccttagtgaggccgtggcccagacacaaccagaccatgggcctcccctgtggagagatggcatttggctgcttttcagatgtgaaactctttaagtttctgccagtgacccacatcattaactttcggtacaagtcaccagttggtgaatgaaaggacacaaatctctttcactgcacctttgtagggatttttagagtcaacaggagtgggatctgtccttggcctggaaagccttttggccattcccgaggtgccagagaaccagccccttacaagttaagaaatggaagtatatttgaagaaggactgaggatgacttggttcataggtagggtggttgaaaaa

SEQ ID NO: 123380 - DNA, 1149 bp, Homo sapiens
tttgcaaaaatattttcttctcatttgtattgctaatggaaggacacaaagaacccacagctgaaggagccttggaatgcttgtatgatccagttgggtgtgtaaattagatctttactccacctatagcgaggatctctctctcactttcctccaaaacccatccactgggtactctatctcaaaggctctgatcatcttgaaggatttgtttctatggtgacacccacgtgttctgcaagcctgtttctcaatcagaggtgcttattggcttcttaaaaagcagcatatttttgccaccctttgcttcatcagtaacgttcaacatacatagtgtcctgagcaacattcttctctagcccgagacagcagatgttccgcattgacgttctgtttcgccattcttgttttcactcctgttgttctttgtcctcaatctccaggagaagacgttggttatgttgccagtgaaataacgatgagcgatgaggagcggattcagctaatgatgatggtcaaagaaaagatgatcacaattgaggaagcacttgctagggtaagcatgcagatacctggtttatatttgtgaggacttgactttctgaagtgtaaaaatgtttgcggccaacaaggggtataggaatcaggtacccatgttgtcagataaaatatttattctgtttacttgatacaaacattctactttgtgaggtgaaacttctatggtcaatgaaaacgtgaatgaatgaatggcaaatatttttgatctgtggaccacattaatgaggaaaatggccttctgaatgcagctgcaaaattcacaagccttttgaaaagaatgtaatcagtagtaaaagatcaattattaaataaaaatcaaatgtactaaaaacattgtaaacatcaggattttttgtttttttgagatagggtctcactatgttgcccagactgtagtgcagtggtgcaatcacaactcacagcagcctcaacctcctgggtccaagtaatcctcccatgtcagcctcctgagtagctgggaccacaggtgtgtgacaccacacctacctagtttttaaattttttacagagacagggtctcttcatgttgcccaggctggtctcaaacccgtgggctcaagtgatcct

SEQ ID NO: 123381 - DNA, 1027 bp, Homo sapiens
tatgagaagtatggacctgtatgtagtttttctgtggtgagcaagacatttactcctggagagagatgagactgcactactttttttttttttttttttttgagacggagttttgccctttcagccaggctggagtgaagtagcatgatcttggctcactgcagcctccacctcctgggttcaagcgattctcctgcctcagcctcccaagtagctgggattataggcgcctgccaccacgcccggctaatttttgtatttttagtagagatggggttttaccatgttggccagtgtggtctcaaactcctgacctcatgtgatccacctgccttggtctcccaaagtgctaggattataggcctgagccactgcgtccagccgactgcaccactttttaatagtaaaaccaaagatgcagaagatgtctacagtcatctcaggacacctgcgtttgggaagggagttgaatgtgacatgcctaatccagcgttcttggggcaagagaaaatgttaaaaagtagccttaaagtagcccactttagacagcaagtttctataactgaaaaagaaaggaatactttcaagctggggagaaagcagagaaaaaaattgtgtgaagctctttctgagctcataatttgatagctagccatggtttacatggaaaggaaatcagaagtcaactcagtaagaggtggcacagctgtgcgcagatgtgagtggcggcttcaagcctttggcctggctgcggccacgttggctgcctctgcgtggttgcagaagcagctacaaagctcattgagagcacaactattgtctgtaaggcaacccagaaacacagaaaccagaagaaaaaatccaaggcattctccaaactttactggatactacagacaagggtgagcacctgttggcagatgaggaagtcacagggctgcttattagactgttctcagggcagcatacatcctcaactactggtgcctaaatgagctgctttgtagccagagatgaaacacttcat

SEQ ID NO: 123382 - DNA, 1222 bp, Homo sapiens
ataagggacagtcttcaccattttagtctttgtatttcttttcgaaacttccgactcgcacctgggtctgcaaagaggtgtctgttcatatagattgcttattttctctacctgacagagactcatctacagtcaaaatagtgttatcatgctggggttttgttttttttttttttaattgcagtaaagtatacataagatgacatttaccatatcagctattttaaagtgttcagtgatactggtactgttaatgatattgatcattaagtacattcacattgctgtgcaaccagcatcataatttacttccagaagttcttcatcatttcaaaccgaaactctgttccaattaaacaataactctccctacgcccccgcctcacccacctccacacacaccctgcccctggcagccaccgttctactttctgcccctgtgaatttgacacctctcaatagctcatgtaagtggaattatacaatatttgtctttgtgtgtctggtttatttcactagcataattctttcagggttcatccacgctgcagcatgtatcagaacttcatccctttttatggataaataatattccactctatgtgtataccacattttgtttatccattcatctgttaatggacacttaggttgcttccagcttttagccattatgaacaatgctgctctgaacactggtgtacaagtatctctgagtctctgctttcagttcttttgcacatacctagcacatacctaggggtagaatttctggatcatgtagtaattctgtatttacctttttgaggaaccgccatatgttttctcacagtagctgtatcgttttaccttcctgccaacaatgtacaaaagttccaaattcttgcctttctcatcaacacttgttgttttacttttttgataataattatcctaatggtgtgaaatggtatctcgtgattttgatttgcatttccctcaagcatctttcacatgttcattggccatttgtgtatcatctttgtagaaatgtctgagtcttttgcctggtcttcagttatgttgttttgctgctgttgttagcttgcaggggttctttctattttctggatattaatcccttatcagatatgtgatttgtaaatatttcctcccactctgtgggatgccttttacctctcttgatagtgtccttgatgcacacacttttaaattttgaaat

SEQ ID NO: 123383 - DNA, 1037 bp, Homo sapiens
ctatctctgtcattttgctagtacaatgctgttttgattaccatagctttatagtaagttttgaaattaggaagtatgacacctccgattttgttctagttttttaaggttgttttggctatttaaaggttccttgagattccacattaatcttagtttgagtttttctatttttgaaaaatatatcgttgggatattgatagggattgcattgaatctttagattgacttgggtaatatcattttaactatacgaaatcttccagtcaatgaacatagggtatctttccatttatttatgtcttcattaatttctttcagcagtgttttgcagttttcagtatataagtcttgcttccttaattaagtttatttctaagtattttattctttttgatgttattgtaagtgacaatgctttttaaatttttttcaaattgttcattgctagtgtataaaaatgcagtggattttcatgcattgatattctatcctgtcactttgctgaatttattagctatataggctgtgtgtgtgtgtgtgtgtgtgtgtgtgtgtgtgtgtatagtgttagggttttctatatataagatcatgtcttcaggaggctgaggtgggaggattgcttgagcccagaaggccaaggctgcagtaagctgtgattgtaccactgcactccatcctgtctttaaaaaaaaaaaaaaaaaaaacaagaaaacaagatcatgtcttctgcaaaaaataataataataataataataatttaactttttcctttccatcttacgtaccttgtattattcacactgtttcaatatgaccaaaacagtgcttcttattctacaagttccatagggatgataggaatgaaggctccagaatttcatataggcttttttttttgataagagtattgctctgtcacccaggctggagtacagtggcgcgatctcagctcactgcaacctccacctcccaggttccagtgattctcctgcctcagcctcccgagtagttaggactcaaggtgtgcact

SEQ ID NO: 123384 - DNA, 1025 bp, Homo sapiens
ctgcatttttatgaagagttggccagaaaccccatccaaaatattcattctcattattttagattttcctctgtggcagagcagttaatttcagaattcagccaccacgggttataggcgctttgaatattttttgtgcaagagccggagcttttctgttttctatcgattcctttctagaatacagagatgtgaatagcccactggctcgaatcaggaatgcccaggccatgaaagttttagggatcacaaggcctttgtcaccagacctcaatgcctatattgatgcctgtcatgccttaggatttcatttgcattgatttcataggcttccccaccccaatcgctgaaattagataatcgcgtgttgcctcacaataaatccatatgcacattcctagtttccaagagtgtaaagtactaaagatagttaccaggggaagtgaaaaatagatttccctttgccagagaagaatctgttttgtgctgttttccattaataataaacttctgttgggagtgctaaaagttttaaaagagatttttggttgagagcttagctcgatttcttattaaatgtctgcacatttatttattatttttcattttaatttagtttggtaagtttattttttcctttgcctcctgcagggaggggtgattgtaagagttctcaagctttgtgccctaagattcagtttattttctagttaagaagacatttaaagaaattatgatctctgttttaccgggttttctagttttttgctaatgtaagttgtaaatcatggtttttctgtttttagaaagctggtgggtaagagttagtgatctatacctggtacttgaatattaacaaaaatgtttgctgtgaaagatctttccaaatgaaaggtcatttgatggcaatcttatttaaaattttttaagaatatatataatgtatgaagaaaaatgaaagcaacaaccatgacaacaaagcacaagatgggctagagtcatctttaccgttcagtagatttttc

SEQ ID NO: 123385 - DNA, 1058 bp, Homo sapiens
taaagcaagtcatcgtttcataactgatcacttttgcttttggggagttttagagttgggaaatatttgtgcaaagaatgttatacaggaggctgaggcaggagagtcgcttgaacccgggaggtagaggttgcagtgagccgagatcacgccactgctctccagcctggcgacagaacaagactccgtctcaaaaaaacaaaaaacaaaaacaaaaacaaaaaaagaatgttataactgtgggcttgtggccttataacaccaccttacctccatgtgtgcactcttcatagccttccattcaaccatatgtacatttttgtcactaatttggtttgaggtagagagagccatgtggttgaactgtgtccaaaactttgggccacagacacagaatgccgtggagctattttcaatgtttccttgattgaggacttccaaggtctcaactaaaatatccccagattataagatcttttagttggcaccttttaaatctttttgggactttctaaaattgtaaaccataaacatgtgcctctccagtggccaggttttacttagagttttcaatgtcctttcaccagcctcaataacagacattgtcttcaagccagaggatttagtttcgaagttttggaaggaaaggtagtcacagccctagtcgaaatagaacattctgaaagataatttgctaataacaattctggtatgtgccgaaagccagggcaccggcagaagttccttttaagtggttcttgtggcaaatggcttaatttccattatgacacaagaaaaggttaacagtgtaatccctttttatagaatatggcggaagaacagtgcacacactcataaggtggcctgagcagttgtgatttcactgctttttggagcagagtggcagcatccttctacttgtataaccactgtcgtcttttatagaatctgctattgtgagctcaactcaaaattttaaaggttgactattcttgctgtgtttattttgaattttattttattttattttttactagagtaacttttagacactaggt

SEQ ID NO: 123386 - DNA, 1032 bp, Homo sapiens
ttcattttatttcgctgggtaggagattataggaggaagtattactctgtattttaataaaaccatgattctgaaactaaaatgatagtaaaataagaatatattaaagttcttactaaaagagtaaaagtaataattcctttaatctacagcttagggtgagactaaaggaaaaatcagtccattggaaaaatatacatagtgagaggttttgagaaatgcccgttttgttccgtctggttataagctgcccaggagccattgcttaggtggcttcttgtcacttcttctcttctgccctcccattcccagtcttttctctgggacaggggccaaagttttcaggcatgtatttgttgagtccctaagatcaccatgtttccacaaagttacacaagaaggaagctgttgcctctactaggccctggaaaccaggccttcaccctgcgtgggcaagagaggagactggttaagctcagacttgagtcagacctggggctcagatccaaatctcccacctattagctctgtatctgtggccaggcacttcatctctttgttatttgatgtgaagatcttctgcccttcccgtcaactgtcattcttaaaatacttgagttcccataaaagtgctatttttgtacatgccattaacatggtagtaatggcttatattcatgtatcagcagataggctagaattgtcagaacaaacttaatgtaaaagtgcatacttggttacacttttaccaaacacataatcaatttattttctatttcagaaggcattattgtgtaagtgggtttaagggtgggtctggtatgattttagtaagcatgtttggacttagtactgtctgtgaagtgtaagtagttattgtactgaaataatctagggccctacagtgctgatgacgtcgtctcatggagtgtgtgggtgtgtgttccatacctgttatgtcggaaggcactctcatggcaggcccatttggctctttgactttgggaactaaccaggcacatctttatcatt

SEQ ID NO: 123387 - DNA, 2037 bp, Homo sapiens
gtaaatcggaaaacttgggtaatatgagaaaattaggtcaagtaatatgaagcatttctctctctcagtattttgacttctagggtatagattctattctttacttatttttatttataaattggttctgtaataggttgtttccttatttctgcaaactttaaatttatataatttatgttttttatcttgtctttgaggtctcatttaattgaattcacgttcttattaaattattttatagagagaagcaactattaggaatttcttcctgttccttgagttgagatgatgaagtgatgagagcaaagattggctttttgtttttatctatgcttcttcttttccccctctctttgccgtagtttgtttgtatagttgtcatgtccttggtcctgtttgggtggctctgatcacgttctccatttgtgctgatattgagggttatgttttgacctgtttgccatgctatctgacaatagattttttttttttttctcctttcaagatacagttgagggcttcattttgtggtccatttatgtttgttgttgctacaacctggccatgatatatggtgaaatgtggtcttcattgggatagctggactctgccttttctctcctgaaactgtgttgaatgtgccgtatcgtaattgatgccacctggttcatagctggggtaattggtagaacatagccattctgcctttcattcattttttgaattttagagactgtatttcaatcaagaacaacctcacttgactttccatcgtttcactcattgctcttctgtagccatttccactgctgttaggtcagaaaaagataaagaggtcacacagtttccttccagatttggagtcacatgaaaggattctgtggattcctgccagcctggcttttgtagaagttgtgggccttttccagtgggcctcagaaatttgtttcttaccttagtcatggagtttagtacattagattatgtagctttctctctttggttgctcttggcgcaatatttttgctagtttttagtgttttattgtttgtttgtttgtttgttttttcttcttggggggcttttgctcattttgttagtcgttgtgagaagaatattctgtggttcagtgttcagcagagttcatgacctgattgttttgccaattggatgaccacaaagaacctttctagctctaaataattcctctctgaaggtatttagtctagatttcttcaatttggaacttgaagtaaatttgcttatttattctgcaaacagaaggagattaacgttaaggttgtagatcgtcagtctaggaggtaacattggaccctcctgcctccagcttcgacagatgaccactgacctggtggcataagtttggcttggaggaatggtcttggtggtcccaccttccctccattgccatttggctccatcagttctctgtatttctacattgccatttgcctagacaaggttgtttggcagccctgtcggagaagtcatcgtgcctgatacatgagtcattcagcctaagatgccataaaagtaatgtgactttgcaaacaccacccaatcccttaggagacttacggcttctgggatgaacactttcatcagctccagaaactagcgccttaaatgcgtatgtaattgccctacttggcagtcctgttctgaatcatcctttttccatggcatgtgagaattggatgcccttgggaatgagtgggtttggtgttttgctttagtcttcagtgtgtctgatcccatagatttgctctggataacactaccccactctgaacagagggacctgtagagctgtagattaccttcccaacactttgtttcctaactcacctatttaatatgaaacaatacgtttctctgacctatggtcagggtgacaaagccccaggcagaaatgtcttccaaagatttacagagtgaaggagaagccagtcctctcgcctctacttaccactctctccccccacccattcaggaggaaaggcattctctgct

SEQ ID NO: 123388 - DNA, 1120 bp, Homo sapiens
tctaggctgacttctaggttaattttctattacacacacacacacacacacacacacacacacacacacacacacacacaccttggatgacctggattttatattgcatttttcttcgtataaattgtgccgcatctatcttgtctagcgtccaaaaaatgatcatggaaaagaaggacttggttgccatggtttgtgatttgtcagtgacaaacacctccaaatcttgatttttctagaaaaataaaaatagcattaattcaaaggtacaaagaagtataattcaaaggtataattcaaaggtgtgtttctcaaaaataaatggaacatgtgaaaacaattaaataagtacctggaatatgttactttttgccacagtgaatctgggcagaggaaagtaggattttatgaggaaggcattgcctttaaatctactgtccttgtttaactattttgatttctccttggaaagttcactctagtacatataatgatttgtgtctttgtggactaaaatttttgtattagttttttctataccccatttctcttactgcccactgtcccatgcatacacacacccacaccaccaccaccaaccagcaaactaggtatgaggtatacacatcagtaattttcatcctgtaacacagcttcttgtattttgattacaaacaatctgtacctatttcattttcatttgatttcaacatttatttatttatttatttatttatttttttgagacagagtctcgctctgtcgcccaggctggagtgcagtggcacgatcccggctccctgcaagctccgcctcctgggttcacgccattcttctgcctcagcctcctgagtagctgggactacaggcacccgccaccacgcccagctaattttttgtatttttagtagagacggggtttcaccgtgttagccgggatggtctcaatcacctgacctcgtgatcctcccacctcggcctcccaaagtgctgatttcaacatttttaaatgtgaggattagagacatattctaggtttgtcccgttgatagttatagagactttctataacataatgttgattcttcttctattagaattgcttggcttttgagctaca

SEQ ID NO: 123389 - DNA, 1009 bp, Homo sapiens
cttgcccttgagggcaaggatgtgtgtttccgtgcctaggacctaattctacgccgatttagatcttaagatggtatgtggcactttgtaaacctcttgggcaaatttttgttggttcccaagttcagcaacagagctgccgaggttcagactggcagcaaggccggctacatccagccacacgggcaaagctcggagcaattacctgattaactttttcctttgtttctttgccagtcaagagaacaatcggatgatgagactgaggagtcggtgaagtttaagaggttacacaagctggtaaactccactcgcagagtcagaaagaaactaattagggtggaagaaatgaaaaaacccagcactgaaggtaaaaaaaaaaaaaaaaaaaaaaaaaaaaggcagactccaccctggttattccaaaagaaatcatttggggtcagtttctcagcagaaaagggatacgatttcaagtggaaaatgcattgagctctggctgaatctggcaggactatgcctgccagcagagtgatgctcagatgcgatgatgtgatggaatgaagggtcctggtgtcaggcgtttggggtgcttagtcatttcaatttaaaagatgggaaatggaaattttctcgaggtgtagtatagctttatgtatgagcttataccattttatataaactttctaactttttcacatgagcctccaatcccagaaaggactatggttcttgctcagtgaatttagttcaaatttcatgtacatacattttgaagaaatgcctaacaatcaaggcacctaatatccctttaaatttctcagggttgatttgttcttcctgtagagagtctcaagtctcaattcaaatgggggctttaaggacctaggattctaagagaatcttttaagagttgtattgctggggttagccaggtgaaacagtaatgtcaaaagacatcagcttggatttattgaaatggatagttagcctttgacatataattatg

SEQ ID NO: 123390 - DNA, 1066 bp, Homo sapiens
aattttaacatgtaggttttaaaattatttttgtagaggcatttttgttatatagaaataaaatcaagccatgtaaagaaatgaatttccccttatttgcaaagataagggtttttcgtttttattgctgcttttaatttgtgtttggtattattcgtgggtttaaatcccttagaataataccgaagctaagtgggtaactgtgagagaatggggattcgaatggaaaacaaaaacatggggagagaaatcagctttgtggccaatttcttgggttgttttcagttccggggtttcattagggtatctttttgcgtggtaattctgtttacatttggatgcaatgctgattttacatttgggtgttttaatacctgcccgccagtcgtgaattccacagtattgaatgtaccctgtggcggcccttaccgaaatcacagacagggtcagttggtactgttgggggaaccatatggaattgccaacattcaactttaagggcacatttggtaacaaatctcatgaacactcggccaaaatcaagcctcagatataacaaatagatgggtggggttcatccataactgagataacatgggcaaagtatctagtcctgggcctgttccccagtgggcccttcacacatgatagtggtgtgttaaagcagcctttccactagaataacatgactaaaaatacagacattgtaatttgcacatttatttcagaataaatcaatccaactatctttgagaggcatcaatggaaaaggaaaaatatagcaaaagggataactctaacgtaaaaagtaataaccatatggaattctggctctgaactttaatttatctgggcacaaatcaggcttcacagatggaagatggatttagtgaactcaaatcctaaggtacactctggcatctgatgagtcagggtgctgagttgccgttggccaatctcacccatcttctcaggagaggccccaggtgtgtgtgtgtagctcaaggcgcctgctttgggctgccctccaattccctgctaaactggaacttcctccaacccctgc

SEQ ID NO: 123391 - DNA, 1049 bp, Homo sapiens
cttgggagaggctatcttggcccctgtccatcttgcagagcaggaaggattcatacgccagtaggcgccccctcccccctcccccctcccccgcccttggacttacaaagggttgatcctttgacttcctgcgtgcctgtgctaataccaagttgtctgcatgataatcatcatgtattgagggcacaccgtgtgccaggcactttccttaacactttagattttatattctctttaatgtcatcctcagaatagctaccagaagtaagcacttacaccatcctcatttcgaaaatgaggaacctgagactcaaagaggctaaaagtaattgactcctggccactcagccagccagcagaaggcccagcacgatgtccaggcagcctgctccctgacagcagcctgttctcactccgctgccacctgtctcccccaccagctctggagtcctcggaaagccaggagagagatcagttcttcattcattctcacccttgcaccctgggtttcaagtccttatcctgtcagggacaaccctggccaatctttaacctaggctacattggtgccctttatctgcccatttctgtgtctttgccacagaatgcacacctttccttccctcattgctcccactcagttctctccagtaatgaatcgccagttttgtagaaagcctttcagttcatacagcactttcacgtaactcttttatgaggataatgtttactgttatcatcacaacagccttgccaggggtattatggaaagataggtaggcattattacagatgaggaaacagaggctcagagccaggaagtaattgcccaaggtcatggagctgtgagtggcagagccgggctggatgcagagcatacccctgagttcctggcattaagtcagcccacagcctacctctctcctcctgccaaaatcaccttgcctttggtaagccggtctcagctgaataagatagatgatggaggccttcacgtgaagcaaatcacagcaaatgtgatggagtgagctcatcttgatggtcactct

SEQ ID NO: 123392 - DNA, 1040 bp, Homo sapiens
attttcaaggcatgacttactttgaacttcagaatatagatatttttccttctgaaattcccacctaacttttagtttgcacagtggcacatataaaatggtgcaaagtgaggaagtagatttcttggccctctgtcacctggcaccttgcttgatctgctcaggacagttggctgtgggcccttttaaagacctgaaagaatagagtgtccttcaatagtggttttcccagggggccttcccgttcatgaacaggatgttcttccccagacgatcagtgtaatttaaattcattcagtcgggttctgcttttgtgaaagtgaagacggattggtcaatgccattcttaaaacgaccttctctgttgtaaaagaatccttaggtccttcctagcccctgggttttccacatatttccacatgttgactttccttattttctgtcctttcatattcatgtaattcttgcagcacttttaatactactagtatgtagcaggaacttttcttctggctctttctgtatcatggcaacagtttttcaatggttgagtttttgttttaaaataacaattctctttctcactcattcagcctctggtttgctctgactcacagatattttgaaaaataaccagtcttagttttatgtatttattttttactttcagaagtgttctacccaattcatctgctcttgtatgttttgacatgaccttgatagaacagacgcacttcttctgttaattgatgactcacctctgtgagtttacatcatgtaatactgagaaatttcccaatctgagcaccttgaattgttgatgtgcctctcatgttatttactgtcagattaatactataactccatgagggccttgtctctagaagttatatttctgggatttgtgctagttagtgttgtaggccagtgattaattcttcattgacattgagtatggacatttgggcaagctcatctccaggcaccgcccccacctaacgtgctcctgtgtaatccctatcccaagtatcagtctgagg

SEQ ID NO: 123393 - DNA, 1110 bp, Homo sapiens
attctccttgtcatatttctttcattttatctaaaagtttcctttattcttcaacctcaagctctttgtctttcgaaaatgccatatttgcttgatgaagcctcagggaaatgataatgctttgtatccactggaagtggtcacttgtctcgtattttatttggtcattcaatttttgtttgagagaacagacatgcatgacattttgcaattttgtccatttttgaattcaaccccaaaacatgtgtttccaactgcatggccattccattgactagccctcctcatcccaagcatctatctaaagtgtttttataattttcagtacaggaagtgtgtgaactaaaaaaacttcatttaggcttcatttatttaggtcatcaacgtcaagggctggttcatgtattgatttattttttatgagtctctttacagtccattttctcttttgaaggaatgctgtttaaagaactacttgatcttatagaaaaagttagaaattaattcaagcaatctttattgttatattctttgtcactcctccactgtaaaaaagaatcaattccagatatcttagcctatcactgaaagaggttttagttggtagttaagaaaactggtccattctttcagtttttcattttagaaataaatgcatacaataggcatgtgaaaacttaaatgagattctaatttattgcagtcataatttccacataaattctttgtcacttatttcatatgtatcagaaataacttgggctccaacattgcagtagatgctgtggtttaaagcagggacgtgcaaaagccatacaatgatgaggcatctgggtgccataccatgtctgtgaagccctgagtcacgggaaaggaactagaataaaatcactgcttttgcaagaaggaggaaatgtacatggcattataagctggaaagagaaggttaatgttaaaaattagccttgagaggtggtcataacattgcttacccagttaggtgatttggtgaatatatttgtgtagaaaggtttttctctttctatagaatagatataggtccagttaagctgacgataagagaaatcagattgcccattgatatttaat

SEQ ID NO: 123394 - DNA, 1172 bp, Homo sapiens
cagcgtttttggctaggatggggaagcggtgagtgagtaattctcttggcctgattggacaactgtaaacataaccttctccccccctcttctcagcgatttaaagctaaacaaaatgaaagtctgtttgaaaagcttgctgttggtgtcagagccgtgggatttcaaacctgggttttcaggatgcctgagtacatggatcctctaacacatatcccttcattatctctactgaatgtagctgatgttaggggaagttctgtgctggagacagggaatctcacagcactggactcatggagggtttttcttttgttttttaggctttttaaaaaaaatggttggtttttgcatgttaaggggattctagacctctggggtaggcagagttccagtggcctgtgaaagggaaaaatgagtgaagtttccttacgacatgactcatgtgtttttttctcatcatttctcgttttctactttcatcctgtccacgtatttgtgattcagagatgtcctgcaaacggggactgctgggttggtgcactgccggctggcttaagcataactgaagtttttctgccctaccctcttttccacagagaacctgcagttttggaggatttgacttgacgaatcgctctctgcacgttggcagtaataattctgacccaatggtgagtaacatcagaggaaagcaaaaaatatggattcaggcgatgaggttgacaatagttcaccattgagtatctttgagaattgatactgggtaccgttttccttggtaatcctgagtcacgtttggaaaaaagctctatttcacttgccttacagactccactgttccacgtggaatgaatgatgaccactctcactgccatctccttccttgagtagcacagttcctttaatgcctttgcttccagttttcttcaagtaacaaatccagataagtctggcctctgtggtctgagtcattttgcacacggccttttcttcttgctagttgcaagcatgtaactactacacacacatagtgccatgaagtggagccctgtgatttggtccccaagagtatgtgctggcattttggaacaccagtcttattatgggcccagtacctggccccacatggcctatactaagcctaggattttgtggtctggggtgtcctg

SEQ ID NO: 123395 - DNA, 1023 bp, Homo sapiens
tgtacaaatagaaatataagaatctagccaattttttttttccaggaatacacttttttaaaagtgcatgtttcctatccaagtagattaaatatcctctgactacacttccaggtattctagtaatcatggattgtacttgatctacatttgaagtccagccttgctactgggcttttgcgtatgctgagtctctaaacctttaagtattttgtctgtgtggtagacagattttttttttcttggagattccaagaatatctattcgagaatgagaaatagtatttgagtgcttaataaatagtgacattggccacgactttaaaagtaagcgaggatgtaagtttaagaggaggagaatattggttatagaatcaaatataggtatagattgatttgattgatttcgttgaaggccaagtcgctgagaattacaaaacaacacctgtccactctgatgaacttcttcattttgttgaaacccatggcaggactcgggccttgatggaatgcctggctcccctccgccttcacagcccgaccccgaacacttggacaagcccaagctcaaggccgggggttctgtagaaagtcttcgcagttctctcagtgggcagagctccatgagtaagtcgagtttgtcattgtagattattttctttggagttaatatctgacatatactgagcactaggttcaggcaatttcaaggtgaataagaccaagtcctgcccttcaggtgctattagagaatcagaccaataaactctctggactcagagtcgtgtttgtttattagtagacatgcagcagcagcagcccaaaacaggaggtgatgaattttgatcggagacaatagggaaagcatctcagaggaaggatctagagagcagggggaataagccagggagacaagcacatgaagatgaccagcaaaataaagggagtggggaagggaggggaattttatatgtgactgataaattcgggccaatggtagttggagttggctgaatggtatga

SEQ ID NO: 123396 - DNA, 2226 bp, Homo sapiens
agtatcttggctacctcgatcactggtctcctctgtagtgaaaaacagaacaagaaccagccagccctcgaggcagagggagggtctcgtgttaatccctgggttagcatcacttcacccctctgacctcagcttccctctagaattcctgttgcacaccctccctctccccacctggctcctgctccacacacctggtttctgtgttttctccatctgaagaaagatttctgccttctgtgtgctcagaggtacctttatgggacagatggggttccacaaagtgtgtgcagccatgacagggccgggattgccactggttaggacaggtgggaagtgcctcctctaagaagtgggagccctctgaggagggaaggcgttcagagtgccgggcgggcagcctggctgagagcaccaggggtaccccaggcacccctggttctgcagggcaggagggtggaggggctgtgaccgggggcctgcgtggaattccgtacagtcagagacacctgtctggcctctgcggagctcacagtcacatcctatgcaggtcactcagaggggtgacttgtgggaccccgattctggcctttgtggcatcttcacttctgcatgacctgtgtatctgacagattcttgatttgtacgttcatggaatgtacctaatggaaagatctttgctccctgggccacagaaaggagatatcatcgatataatcagcaagccacccatggggacctggatgggcctgctgaacaacaaagtcggcacgttcaagttcatctacgtggacgtgctcagtgaagacgaggagaaacccaaacgccccaccaggaggcgtcggaaaggacgaccaccccagcccaagtctgtggaggatctcctggatcggattaacctaaaagtcagtcgcttctgattcttgtcacacgctactacctcactgcctttttctctcctacactaagcaagtgagggcatttttagggtagggttggggctgatctgtgtggtccaataagggcagctcgttactatgatgagcattcattattctacagaaagagttagttagttaccagttttccaacactgcccttgacctcagctgtgggtgatagcgtaagccccgggtcaaaccttgctgctggaagagctgtaggcagaaactcctggcaccttgatcgcagctagctccacaggggccacaaggaaactctgcgcccacctctctcccaccatcactccaggcatctactagcatgagtctgcaatgagagattatgtttcctctttgcaaaactcttgatcctgaggacttaaaagctggattttaatagctctgtaagtggaggaggagtctcctctgttgtgggctctgtggaggtaaaggaattagctcttatcaagagtacaattatagtgcaagccagcagaatccatcacagcctgcaatgtacatcttcctaacccatgattaataaaacaccctgcttgcctactaagccagagggctgggatgtacaggatccattgcaaatgatacttactaatcttttgattagcctgaaggtgactatgggaacagtgtgtgggttgcaggctagttgttggcggtgttatcatgtgtctgggctggctgacacccttctgtcttccttctccctctcacaggagcacatgcccactttcctgttcaatggatatgaagatttggacacctttaagctgctggaggaggaagacttggatgagttaaatatcagggacccggaacacagagctgttctcttgacagcagtggagctgttacaagagtatgacagtaagtccctgtatgcacagaggtgttccctgtgaggtctgccacagcaggccccacgtatgctgccagtatgtgcttaggtccctggagtcacttattctgtcctgttctttctgttacaagagtatgacagtaagtccctgtacgcacagaggtgttccctgtgaggtctgccacagcaggccccacctacgctgccagtatgtgcttaggtccctggagtcacttattctgtcctgttctttcccatgccaaggtcaaacagcacaaaatcataaattcccagtgcagacatgggaacaaaagaaaacctcctgtgccgccgccacctttccgggcatgtttctaggtgatagttgaagaggattctgcaccaagtgtctgcaagaatggaattaca

SEQ ID NO: 123397 - DNA, 1048 bp, Homo sapiens
ttgattctgcactacagaggagaggcacctcacctctttttctcttctccctaatgaagacagcgattctagcccccttccttacgccaactgtggttttcaggtgacacaatggatcccctccttctccaaaataatttcaggtattctgctgtgtctgctgaggctggggtccccaaagatgcaggcacagcacatacttccatgctgcagtaggagcaggtcttctgtgttactcccacccagcactctggagtctgttttggccactgtggtgcactgaaccatgtcaccagggacagagtacaccgactcctctccctgggttgtaatggatagcacaaagccctcattttataagtatcatttttctaaataacatgctaggccagaacaaaggccactgcaaagccacaggctcttccacacagtgaggacaccgctctagaatgttccacttttaggtggtcagggggacagtatttgctcttgtgcttccaattagttaatttttcattagtcactttaaaagtagcactcttaatttgggattctaattgagggacttacgctgccacgatctctgctgtagttggggctgtaaaatgctttccccgtgagaaatgcaagcaggaagtggtggacagccggagagctgccagagccttctgcctccccgcatttttattttgatgacctgagaaaaggcatcacatttctggcttattgatttctttttttctttgtgtatgtggttggagtggggaagttggtgggggatgaaaagaaaggaaaataaagccattcatcattgcaactagctattttgtgtagaaaatgttttcttggtttctgttttatgtgaccaagcacttacttactctgcataataatgcaaagatgttctgcgtgtaacctcagtgtcccatgtaaggctccatgtgccctttctacaacatgccgggtgatgctgctagggtgttgaaggccctcgtggctttccacgtgatttacttggggcagattcactcaacagaagcgtccgatg

SEQ ID NO: 123398 - DNA, 1260 bp, Homo sapiens
ctttgtatgcctttatgtgcttatagcttagctcctacttacaagtgagaccgtgtggattttggttttctactcctgtgttacttcacttagaataatggcctccaggtccatccaaattgctgcaaagacattatttctttccttttcatggccaagtagtactccatggtgtataggtactgcattttctttatccactcagaatgaggacattcagttttcagtcatccatttatctataccagcaagcatgtatctgttactcagcttccaagttcgagggtttcctaagctttccccagcttttacttatatgcaggagacaaaaatgtgctggcacaagacaaaaggagaagcagaaaagaaaaaacaacctctaactcatcccaaacaacaaaaacaaaagaagatttgccactggcctgtcctgagttttggggtttgtgcctcgtcttgccagccttactcttgctgagctaatacaagagccctcagcacgtgttgctgagggctaagaatgctcctaaatgctaataaaatttatttcatttgacactttaatattagctcccaaatttggaaagttggcaacataactgtcttcaagcacaagtcttacagatctccgaaaaacatatgacctaatctcaccttgtgaatggggcgtttattctttctttgcttctccttgatggtgccatcactcagaagggtctgggagccccactgccaaaacaacactctacctttctcctttcctcatagccccaaggccagagtcagcttctgttcgcataactaacttaaaaggtgtcaacatattccaactgtgtgctctctccaaacttatcttcgtgcgatgaataccttattggaagaaaagttgtgatcacactagttcattttgatctcatctattttaagataaattgttctcttccaaaagctcagggcagtaactgaggataaagtcgagatctgttgactctgaaacctctgcttttcactcaccttgttgatttcatgccgtgttctctcctctaggtaacagcgaccagtcaggatcccaggagaagctgctcgttgacagccagggcctgagtggatgctcaccccgagactcaggatgctacgaaagcagtgagaacctggaaaacggtaatgtcagcatgagtcgctgggaacctgctttgacaagtactgatttcaaagcacagttttctgcaaaaggacgattctattcctgtcatgaactca

SEQ ID NO: 123399 - DNA, 1498 bp, Homo sapiens
ttagtatcaactaccagtcgtcagataagtagattatgtctggttgatagttcagttatcagtctggcagttgtaactaggactgttgctttgctgggacctaaaactttatcagtattttgtagattttctttggcaaagtactcacaaaagtttacctgtctgtgtccaggttggttgattgcttctaggataaacttactagaaggaggggcttcagggaaggtgggatttgagtattcacagatcactctgtaggggataccatttatagaacctgttgtgaaattcagtccagctctccttttccatcatgaccttgagaaattgtactcacccaacaaatctcatcaatatgcggtatgatgatcagcctctttccacgtcgattgcagtggggcacagacttaagccaagatttattttactgcttgacacagcgtatttctttcccatgtaacccaattaatttcagtcttcatgattcctttaataagactaagaattctttctaaaaataaaaatggaaccataataaccctctatcacccgatgtcataaatggtgattttatgtttttagtgtaattgaacaataggatgtgggtgttggagatttcaattatgttagcacaactttatgcatccgtttgattgatttgcttttaaaatgtgattgtaaaatattcccttgtctcacaggcaagactcggaaagctagcctcctatctgccaagtcatccaccgagcccagcttgaagtcttttagcagaaaccagttgggcaattacccaacattgcctttaatgaaatcaggggatgcactgaagcagggacaggaggagggcaggctgggtggtggccttgccccagacacgtccaagagctgtgacccacctggtgtgactggtttgaataaaaaccgaagaagcctcccagtttccatctgccggagctgtgagaccctggagggcccccagactgtggacacttggccccgatcccattccctggatgaccttcaagtggagcctggtgctgagcaagacgtgcctaccgaggtgacagaaccgccccctcagattgtacctgaagtgccacagaagacgaccgcctcttccacgaaggcccagcccctggagcaagactctgctgtcgacaatgcattgctactgacccaaagcaagagattttctgaacctcagaaattgacaactaagaaactggagggctcaatcgcagcctctggtcgcggcctgtcaccccctcagtgtttgcccagaaactatgatgctcagcctcctggagctaaacacggtttagcaaggacgcctctggagggccacagaaaaggacacgagtttgaaggaacacaccatcccctgggcaccaaagaaggggtagatgctgagcagagaatgcagcccaaaattccatcacagcctccacctgttcctgccaaaaagagcagagaacgccttgctaacggactccaccct

SEQ ID NO: 123400 - DNA, 1089 bp, Homo sapiens
aatccacgtgtccacaccttacttgacatgcatgtgttcagatattgacaccaccccatttcatctctccgtaggtaaaccgaggttaaaaataacctgcatgaagacctcttagagggattactaggagcaaataaaataaatgtggacaaaagaaccctattcagatgtgataattgtattatacagttatctgtatgggtaatgggaaaaagataatataaaatcccccattgtaccaaaaacatttagctgtataatgaaaaattatttctcattcaaaaaaaatgagatctaccaataccaagtgactccaaagacaaagcaatgctaacagatacagcagtactttactcctggaaatacaggtcctattaggatgcattcctgagagtcctttattataaaattctcatgacaatgaatgccttagaatcagatcctcctccacctctctgaccctccttgatatttcctgagtgaatgtctttaaatgaaaggtagtgagaaagaccatacagtaaatgctggcctagtgagctggtggtatcacttgtagcagataaagtgcaaacagttgaatatctgtaaagcagaagttagcccttctctcctgcagtttagaagactctcttcagtaacattagaggagttgtattttgcaaaatgatctgattgaggcgaaggcattgtcctgaaaaatgtggaataattgtgttctgccttaactatgcttcagaacattttcctagagctcatcagtactttaagataaagatgtaaaagtattccctctaaagcattcatcctgaccaataaagaaaatatattcatttcaaattcaaacttttgggttgggtgtggtggcttacgcctggaatcccaacactttgggaggccaaggcgagaagatcgcttgagcccaggagtttgaggctgcagtgagccatgatcacaccactgcactccagtctaagtgacagtgagaccctacgttatatgtggtgtatcttagggaaagaaaaacaaaatccttatgactcttgatgtcatattcctgttctccctggcagcatggccgctgtggga

SEQ ID NO: 123401 - DNA, 2060 bp, Homo sapiens
atactattattatccttctttttttatttagataattcttttaatttaaacaaaggttcactatggaaccagacaaatctcattagccatgtgttaagtatttgctactttaaattgttttacaactgatttcagcacattctatccttttttttttttgaaatggagtttcgctcttgtcacccaggctggagtgcaatggcacgatcttggctcactgcaacctcagtctcccaggttcaagtgattctcctgccttagcctcccgagtagctgggattataggcacccaccaccacgcccagctaatttttgtattattagtagagacagggtttcaccatgttggccaggctggtctcaaactcaactcctgacctcaggtggtccacccgcctcagcctcccaaagtgctgggattacaggtgtgagccaccgcacctggcctctgtcctcttttagtctagtgtctggttttctagcaaacagtaaatttaaacaagtaaactattatggtttccattgcttacaaaatgattttcctttacattcttatcatgaacactattttaagcatcaaatgcaatcatctaaaatataaaggtcaatcatttataatagaaacaccttgaccacaagcccttgattgaacattttataatatttcatctacttattaaaacaaataatttcccttgggttggaggggaagtgatttcataaattaattagaaagccatctttagcatattgcttatgtctggatccatgtttctgaggaaaaagacattctcaggtgatgtatttttttcatgcattagtatgcatttttaaaaaataatgcatgtttctttaataattaattttcatcttctataagatgccatgtgaagaagttgtggaaatgtagaataaaaagctaaagctgccaaatttctgttgaactcttaaaaacagctcatgtttgtttgtcctctcgggttgtggcctagcctatttgcaatgtaatgaagctgcagggttcttgtatagctaaagcgttcaatgcatttcacgtgctgtggtggatgtgggtgctgtagacaggcttcttctcttcctgctctcaaaatacctcggcttgacatttggacagatcctgtcattgtttaagctgagcaaaaaaccacacaaaagttgtgtaagagatgagataacaaaggagcgagagaaatctcatgtgaatttccaagttttaattcgttctccatgaaggattttcatttcagtgaaagtcgcagcagaagagggaactttctggagtttttgagaatgccaaaccacatttttatcacacttctttggaaatcaatgcctttgcatagaaaatcaaattcagggaccacaaagaattttcagtgggaatgtctagtctgaggggtctgaggttgtttttactttattgtgttgtttaaatattttaaaaatatctttagcgtttggtcttttttttttctgtaaacatttaatttggtctgagaaaagctgaatgtttgggtgtgacgtttgactgaggtggattggggctgcctgtggacattagtgaacaggtggtaggcttcaggaatatccagttttaatcagttgcatttggtacagaattttgagtaatggtgaaaattgttgtctttggaaagcacaaaagaaacctggaaaggcagttcggctcaggtagctacacataacattgtgtatgattttcacttcaaagctgtctggaaggaaatgcagtcagctccagctagtactatttatgtacccagataactaagatattgtttcatggccttgccttagtcagaggcccttttctctgtcctgaacccccaggtatgggtgaaattggaaattactaatctattggaaatcagttcctgacatagtaaagtttgctttcataactgcagcaaaaaaggtcaacttgccaagtcactgctgccatgtgtgtactgtattattttcagaaaaaaatataatagtctgagtccaagttatcttgatttaaaattgatagagaaaag

SEQ ID NO: 123402 - DNA, 1136 bp, Homo sapiens
tcatccagagaggcatctaaaggtgcctctgctccagaacagtatttgatgcatataaaggacatagaaatggctgacacttgggtttaggtagtttccctggtgcgaacctcaaaaataccggcctgatatgtggtgaaatcttggtcaacctcaatgctaatgctggaactgcctcttgcacagagatgcttaactcaggggtccacaaacgtgaatagaagaattttatcatttttttccttccaactaacttctgactgcaatttagcattttcttcaattctgaatgtaagcaacaattgccagtattagcactgtctgtgacatcacccataaaaaccacagatattttttctttctttcttttctttctttctttctctttcttttcttttctttctttccttctttcttcctttccttctttctctctctctctttctttaattcttctttctttcctttctttttctttctttctttcaattcaaacaatcctacagcatttattgtcatcttgtaatgacataagggtaatccaaacaatgtgaataaatgttcatattggacaaaggacatctaaaaaacaaagtgtatccttctcaacaatttctcacttaattgatcatttctagttggagacactttgtagcagagtaatagtacctccttttagcatgatctgacccagctgtcttcttgactttgttttagaatgaatctcttctgcatcatctaatacaaggttcttacactcatcaaaaccaatgataaagcttcctgtccagattcacttgctcatagacccacacctgaatccagggtctattttgtaagtatctgaagatgaggttgatgggctgcaccataaccttctgcactttctggccctggctgtggtacaccatggtggaatcccacagaaagcacactgacccacacgctacctcagccagcaacttctggaataaaaaaccgaaaatgggctgggcatggtggctcacacctgtaatctcagcactatgggaggccgaggcaggcagatggcttgaggccaggagttcgagaccagcctggccaacatggcgaaaccccctctctactaaaatacaaaaaaatagctggttgtgatg

SEQ ID NO: 123403 - DNA, 1051 bp, Homo sapiens
gcagagctccgggtgtgaagcactgtgttaccatttattagctgggacagcttgaataattttattaacttctctgaacctctgatgttttgatgtatacaataggattaataattgctgttttacaggatacttctctaacccaaggcctgacatttaagttcaacaattgccaattttctcagcttgttctttgcttccctttaactccctcttcatttagcacacatacacatatgagtgtacacacacactcatatcagaacacagctgggggagtatacagattcactgataacctgacttccaattgaaagaagcaatcaaacctagaaatacacaattacttcactagtatttggcaagggctcttcaacacctgacaagttccggtaattcatccatcccactaattacatatatgtaccccttcctgcttcttctcttctgcttcctggagatagtctttaaatgacacattttttgcacagcctgatttcctctgttttgaatttatccacactactttttttgttcctgcattcacaaaataaaaatagctgtgtggagggagtatgctggcgcttactctctgggatagccagctgttctaggattgcactagtgatccataagatacatcctttcagaaataatcacaatgccaggcatacactgtgcctgctcccagaacttcccccattcatgacgaaactaccacgtccagtagtacgcccactttcttttctcagttcccacttccctctcattgacagtcagagcaagagcagtgaaccgcagaagcagatcttgtgtcttcacttgcttgtttcccaagctcagcctctctgtgttgccttgctctgttagcctccagtaggtgttgcggcaagtgagagccataccatctggcatggccaatcacccagttccttgagcagttgaaggcaaatgctgattttacattatttcgtagaaagttgtattttgtttggggaccttaaaaaccctgaccttgtcatccagcacagagcttcctgctttaacacaa

SEQ ID NO: 123404 - DNA, 1043 bp, Homo sapiens
tatttaaactatttagatatgagtcactttgaggaaaggttattatatgaaaatatcactgaaataatcagaaatttctttaaaaaatgctgttatgctataattcatttcataaagttctgcttacattcataaacttgagccgtttgtacagatcacttattatcctcatataataattttctgacacatccaatctgcgtggctgtgataaaaaatgatccaaaatgttgacctataacgtgtcttaagagctcttaaaaaaaagataaaatccttgaatgatgccaggcatctagaataaaattgtcaagagaaactcaactaattttgagatcaaattttaagatcaaatcttactcctttattacaaatgttcagtaacgatctcatcaacatgatgtctgtagcaaattatttttacttaagggctcagctctgacatttgaagtgaatggttgtgagtgccagtttagttcaggaaaatgctgtggttaagggctggcccattttcacatggaataatattattcaggtcttgttttgtggtatttatgttgtaaataatacatccagagtccatgtagctacctatgcctgcccgtgaatgatacctacttagcgttgtcttagatccagtggcaataacgtttaaatgctgaaggaaatatcttttggtttgctgagagttttaattagggttcactttgctgctaagacagcagcatttaagctactaggttcttggcacaatattgtttccatatttctttttctttccagaaggcttaattatttcttcacctgaattttaacaaccattttagctgaatgatctagaaactgtcctcctcaatgtgtgttctgagtcagcagcatcagcatcacctgtgaactgttagaaatgcagaatctcaggcccaccccaaccccactgaatttcttagaagctgcatccaatggaagcatctatatgaaccacacttttgagtagcaaggatctagagttcttgtgcagatctctctctctctctctctctctc

SEQ ID NO: 123405 - DNA, 1038 bp, Homo sapiens
gctgactactgaatctggactggaacctttttcaattcagtgcttttctgactccaccactctgactccctcaagtgcagtggttctcaacagaggtgactttgttctccaggtgacatttggcattgcctggggacttgagattattactggcatctagtgggtagaggccagcgttgttgctaaatgtcctgcaatgcacaggacagttcccgcaggaacaattatctggccccaaatgtcaggagtgctgaggttgagaaactctgctgaatgtatggatgagcattggtcaccaagatagaggagaagaattcaatattgctcttccattatattttcctaggatgtggactctatgttttagacaatcttccgtattaaaactatcatgtgaataaatgtatttttgttacatatgttttctggagtttacatgtattggtggacaacacataagaagtgcgtagggtcagagaaatgccactcgaggtcattatttccactcaattgctcactggggaaaaaacaaacatgagttctattctgtaatcagtactgctggcaacagtactgatcactaagcactgtgagaagcacatttcagtacaatactcttgttgtcctaagttctgtgaccacttttcctagattttctgtttttcttgggatggaaataataaatacttcctcttgcctcctctcagtctagagtaacaataagggggacatgtaaatccaggaatttcacaccaggatcctggaggttagctttcctgttttcttcttgccagtcttatgcattacatgggaactcatatctatcagcacaaaactcagtaaacgattgttgagcgagtaagtcaggaccaacgcgtcaatcacatgatgcaggatgctgtatctaagcttgcacacttactttaggaaactcaaatggaaaccccactctcaaatagtctaatctaattacctttggttctggaaagcagcatccaagaggaaagagattgtaaaatcctcagaggaagcggggaa

SEQ ID NO: 123406 - DNA, 1034 bp, Homo sapiens
acattgctaaggctcatagctgctgcttctctggagaactgcatccaaatccctatcccagactctgcttctagggaagctaacctaaggcatcatcacaatgcttccccccaaccccaaggaatcgtagttcttacaaagatgaattactttgaaagtttagatagaatataataaatcagcaaatcaagaataaaccatctgccatatttttgaaattatctttttgtcattttaatttttcacttgtgagaacacaatgtatatgtaagtttatttaaggctcaatggagcaagactttgatggatctgggcataaaagtatgggtaggaaagattatctgcagcaactcaattcaaaattaagggctaagggcttcagagatcactttaagtcacacattgatttcattttctctctctctcatgctgtttccctctatatggagaattttatatacactctcttggctcttaactacagccagatttgtaagtgacgagaattgagggccagggtgggaggaaatgctaatatattgtcccaggttttatgcttgggaagcatgaagaaattcaaagagaccaaggtgttctcaggagtaaacatatcccttcacccaaataggcaagaacaattttagaactgaaatcgtgaaaggggtcttagagctttgagcagaacggtagacccagaaggaggctattttggtccccttgctagcacagattttgattcaatatctctgagcttcattgttttgtaaggattaaacatgcctgttagattgtcttctacaaggctctgaataaatggtaattattttatattattgatgatggtgatggtatgaacatttttattattatcatcatttttattatcgttagagagtgtgtcttcctaataaatcctgtggcaggggctggagttctgattttagagtctgtggaataagatgatactgttgcaattgctgacttttcagattatagtattttctgccaaagaagcctggtactttgtagatcca

SEQ ID NO: 123407 - DNA, 1050 bp, Homo sapiens
ttgcctctgaggtatcattgtttatagcagtcctacgttttcagattatctcaacctgctggaagcttctctgtcttttgaatacctttgccattcatgtacatacccatcagtgagtctcagggttggaagacaccataaatgccacttcatccaaagccacagtttagtctccagttcacatgtactgccttgtggcatcattccagtggttgtcttaatcttttttttaaatattatattgttcagcccagtgtgtatacatatccatcctcaccccaattctgctgctggatataaattggcagctgcaacagtatcatgtacagaaagttggtatcaatttgagagggaaggagtgttctctgctggaggacagggaggagacagagccatcttatctgtttttcccacattttaaaatgcattgccaaagtcaattttaggatgcagttgggttaaattagtagctagaagataaaacccagtagccagaagcaagctgaacattaaaactttgggactctgaccacagtattgaacattatggctgaccatcatggggttaaaaggttaggaagagagtggaccagtagccatatatttttagcctgcttagaattatagttgcctttggaaatttttggtaaactcccatagatcaggattagaataaaggccataaatatggttcaaaaactgtactttcaacacttcattatatggtttgctattggctttagtggtagtgcattatctgaattgatgtaaatagtatttaagtttgtcttttcctatgagtaataagtattgtatgtagatatttccgtttctattacttaaatagatccccacagtagtttggtacatagttgccatgcacataattactgcatggctattattaggaaaattgtgtgggtaaaatccatcctgctatttggctctgtttgaaccttgatgcccatctgctaagcaatgtggggtcaaaataagtaccagggtagttctggccttggcctttttggatgtgggctcaactctcttttc

SEQ ID NO: 123408 - DNA, 1036 bp, Homo sapiens
tgaagaggaagttcattcagacagatgggggaccttaggattttatttgtaatttacagtatagtctgtggctgctgtcacactacaatgacagagttgagtgattgcaaaagagaccgcaaaacctaaaatatttactatctgaccctttacagaaagtttgccaaccacctgctaaaggatgaacatttacctgatgtgttacatttactccccttagaacaaataagaccttcaccaggagactttgatactttgctagtctgtcggaagtctgtctccaatagccacatatgataaaatgagctagaatggagcacgttcaaaacacaagattgaagtgaagtggcatacatcttgcagtcgacgatgtgtcttaggccactgaaataaatgatttcattttatttgccaaagtgtgacttggggtgaaggagacacctggcctggcctcgtgctagattggaccctcgatgtgtacacacgacttgttctaatatcacttttcattggaagtagacaggtgcaattaagtaacctagagaagggggtaaaacacaggtcttcattttcccattgagagagaactctgtccctaattcagttggtgggaaatggatttcttggctttgataattaagctggcaaagcaaatttggttccaacattttaatgagccagtgtgggtggccaacaaattgcaggttcagacgtaaatgtttcaaacctgggtggctggcttttaaccctggggcaaattctatgatggtaaggaaattttaggctggtagccaagttcaaagagtctttgccaaatattaagaaaaatgcctatttgaggcaattttaagttatttgaggacaggattatgttgttcattggatgtgattgagatgataaattaacatcatttgagtccactcaaattgtatacttgtgaacattcatacctgtgtttttgtgtctgaacttcatacacagaggattatcttgaaagagagggagacatgagaaaggagaaagtggtcttgctcc

SEQ ID NO: 123409 - DNA, 1056 bp, Homo sapiens
tttattttgatgctcaagttttcccagatttggccagtgggaatctcatcaacttgtgtcttgtgttctttctacatgtccccgtcatcctttgagcggttcccttactttataataaaacaagatgtttcagactcaccttttatgttccctgcactataatcagctatttctttaaggctgtctggttttttttagtagagaatagtgtttattaaccaagatctgggtgctgtgtttgcacattgctactggaaggttgctgcttctagggaacagagatagaaaaatatttgagtgtatacacgtgcacacacacgtctatatcaatttctagatgtctgtctatacttgaaaaatcttatgcttacattggtattccaatcctaatctaacactctaggtttgttctactctttcctctttccatatttataactccctctttgagaagaaactgacctatgttgttgtcaatatacttacatttttgctcaagcctctgtgtacacccaattctcacacttatgggctgcctcctttgctctgatccactggccctgaccccaaaaagacgtgataattcttaattggcaagatagatgaaactgaagtaaggagagaaagagactgaatgtatagaaagagaaatgagagagagagaatatagtattctgcatagtctgtaaaaccaagccccatgcattgtctcaaggcaggtttttgacttctacagcctcagtagccatgaggtatgaaatatctctgtcggggaatatgagtaatttgccatttcttcaatgatacaaacaaacctgatttcccttattttgggagggggtttgtgatctcaaatgtgaagcatagttaataaggataaaacgttacttttgcattgaaagcaaaaatcttagtggaagaacttgaaaaggcaaactatatatattatggatagtgcaaacatttctgtgtgtgtgtaaagaataaataagattttaattgtttttattaataaattaaataacctaaccagtaaaaagtgctaatagagctgat

SEQ ID NO: 123410 - DNA, 1056 bp, Homo sapiens
acattttcttaagtacagaatctggtcaatagagtttcctgggtcacttgaatcatggttacctgtggcatggtatgggggtgagaggtggggtgacacatcccctttctagacttgagagacaggcagtggacaccaaaagtgggagggatgtgggttggcagtctgactaatatgtcccctgatgataggccagcacattctgttatttcggttggaggctgaagttattttgctgggcaggctgtatttaaattgcttgtttggcttcagtagtggcaaagataggaacacaggtcctttgtgcatcccctttggaggagcacattgttaattaaacagtgggtgcctacttacccaaaaaagcattgaagttagatacaaaacatttttaagcctaggacttgagccatgtaggcacttaaagagaagtctaatccttggcatagctggcaaatactttatggcttattgtctgtactttcctgagtctcaagcacctcctggagttcacaagctatctgaaattgcccaggaagaagttctggtaatgcattatgggaccatccatctttccacggatctgctggtatacaaatctcaagagagcaagatattggcgtaacattgccatgagctcaacagaagctgactcagctgcctttatgcccaaaggaagagttctcagcctaatagatgcagaagagagtgaccagcttctccatgttttcccatggtggggggaggagaaggctctagaataatgtggcatctgggaaaagaggaaatacagggaaggttggcctcagtgtgaatttctacaagggggaaatacctccctcatttgaattatgagaagcagagttgtaggtaggggtgttgcaggaatagggttgaggagggggcagatagagctattaagaggtgtcacaaagagacactgagagctgctagtcctgcaagatatcatggaatgagtcaagattgggacctggaaatcagagacaagagcatgaatttgacagtggatagataaatgagttctgtctaagagca

SEQ ID NO: 123411 - DNA, 1023 bp, Homo sapiens
actctgggagctgtagactggaaccgttcctattcatccatcttggaacttccaacactttgcatctttcaatccaatcaagttgacgctcaatattaaccctcaccggaatgttatgtgttgaggcaataattaatagttatccttggttgtttcagaaaatgtcatgattaatagttatagtaaagggaggaattgtaacttgacaaaatagtttggtctagtgtccagtttacagggcattgagatggttttctggtttcccttgttttgccctcagtacacaatgctcagtattcagaaaggctgatgtctattttctccacaagtgctaataaaaatttttaaaatgtggtgtgcattatttatatagttgttttattcataaaagatttaaaatctaggtaagctaactcaaaatgcgactttgtactctgcgatttttaggcctagaagtggtcatgactgtgaacattatgttggcttggaacctttaaaagttcatttggtctgtactgcaggtggcatttggatgaaagcacaggtggtacatacagtacttcgatgactccatctgtttggtgtggcatgtttaagaatgacttctgttaaagggatttgactcgaaatgcaagccctctttcctggcgtgttggtcatttttgtgacattagtggtggaaaagaagctcaaaatggtctctggagtggagtaacagcagggcttacttttgaaattgtctttcaaatgcccttttgggcatggggtcaccgtgtttaaagcttttgaaagactccccacagaaatgaatcaagtgttgcattttcagtgtggtgtccaattttgtgatcagaggtactgtagaggaaagtcgggtgttttcttaaattcctttttctttttggaaaagtcatttacttattacgtttaatataaagaatgttttaaaaagagagagagagagagagaaaacacctggttgttagacaagctggctccatgccaaagtgaaatgaaacatac

SEQ ID NO: 123412 - DNA, 1060 bp, Homo sapiens
aagcttacatatgcatggcagaaggcgaagggagagcaggggtctcacaggactagacaggaatgggagcaagagagagagtgggggaagtgccacacacttttaaacaatcagatcccacaagaactcactaccacaaggacagcaccaagccaggagggatccacccccatgacgcaaacacctcccaccaggccccacctccaacaccgaggattatatctcaacatgagacttggaggggacatccaaactatatcaatatatttaattatcttaactctgtgacttactgtcctcaagttgtaaatggggccattaaacatcaagaaaattaagtgatatttccaaagtcactcggctagtagagggcaggtctgagatttgaacccaggtcatttgattctggagcctgcaggattgactctacaacccctgggccatgttctttgtcactactcagttctactgaatccattaagtgattcccctgaggctccttttcaccatccctcttgcataagcgtgattgtgtctgattgtggctatttaaaatacacagcaccctgatcattcatttcatagtcctttctcttgtcagcaattctaccaatttcttctttattcgttttgttgtttttgttgttgttgttctctattggattcacgtgggcatggcattgggctcctctgtgctgaccacgtttccttatctcctctccatcccagtcgtacagcctggaaagagggggtgcgtttcagggatgagaccagagggtatctttgcttcagattttccagagccttcttacttgcggatcctgtgggcccatgaagtgtgtgggggatcatgtatgagtgtggggggtcatatatgagttggggggggtcatgtatgagtgcggggatcatgtatgagtgtggggtttgtgtatgagtggggggttatgtattattgtgggggtcgtgtatgagtaggggggtcatgtttgagtggggggttgtgtatgagtgcggggattgtgtataagtgggggcatcatgtatgagtgtgggggtc

SEQ ID NO: 123413 - DNA, 1036 bp, Homo sapiens
aatctcatcttgaattgtagctcccataattcccaagtgttgtgggaggtagccagtgggagataatcatgggggtggtttcctccatactgttcttgtggtagtgaatccatctcacaagatctgatggttttatgaggggaaactgctttcactgattctcactctcttctcttgtctgctgccatgtgagatgtgcctttcaccttcagccatgatcgtgaggcctccttagccatgtggaactgtgactccgtcaaacctctttcttttgtaaattacccagtcttgggtatgtctttatcagcagtgtgaaaatggactaatacacaaaactaccacaagttcctaagaaagattacatttttttccccttttaataacttctttagatttagagacacattgacagaaagaggttccatgttctatagtaaagaaaccatgatgtccattccttgctttgagcttaaagatgaaaacccaaatatattataatgatagtaggtaaattacttatagaaggtattgggagtacaatgaccttcagttggcttggttaagcattggtgaccttggagaagatttctggatccaaaagtccccatttcccggagggcaggattgctggattttgtgtgtatacacagtctcctttggttagcatcacttttacttgcaagagtagatttcagagaaaaatgaatttcttgtttctgtctcccaaaacctcaaagcctatttttcaggatatagacatgcccatccacctggttttcctcttctctgtgaggacctgcaagaagcaaataaatctctggcacaaaattgtgttgtgtgcagggccgccctgcctagcatgcttccatgtggccacagctcctgaagccattgctgctgctaagagggtgcccctggttccacgctcctattcattgttctgtaaagaacatgcgatgtggtaaaaacccacattgtctgattttctttgaaaaacaaagaactggcgttctcaagaagtttataatactttctt

SEQ ID NO: 123414 - DNA, 1041 bp, Homo sapiens
aaaaagaacaaaatatttttacagcataacaaaaggctgttgatgataaacctgaatcatccatttattggaggtctgagaacttaaattagtctatcagttcatgtgaatctctttcttaaaccttagcaaaaaacatttcaatagtttactcttaatcatctaattatttactgttgattttgtggttgtatgaccattgaatgcttgaattatagctcaaagctatcattcattcaaaattaaggattacaaggatgtgttttcatatattgttttgtattatgctacatttcactttttattggaaataatatttatcttgtaattttctctttgagaataagtatattttggtaaaattcctcttcagttcactttgtgagaaattcaaatttaataggcagtaattgaacttttttaaaagagcactgatctttaatggtaatcattgtgatggctgctaaaggatgtaataggtagtttcatttgcctttggtcctgagcaatctgaacaacagaattccaaaagtcccattcatatagagagatgcccgtgcgcttcctaccgctcagatacggtcatggtttccttttaatggtggtaatggcaccaaaagtagatgtttgattttttaatattcttccacatatatgtataaaattaaaatttcccatcttactctaaaaagactctacttgtattccaattgcaggcacccaaaggtgctttgtgcaggcagtttttgtttagtttttgttttggcagtagagcctgtaggtcctcagggatgcagcggctctcaggatctacattattcatgcatcgttgtttaacgtccttctagcagcaaggatgtgtgctggcagaccacctccactttcacttagaaaattgccagctagtgctcctgccttctaagtgattactttgctttgctcgaagtatctatatgaagataaatcttttgctaggtagcaattcctcaagcactgtcccccccgccacagcaaaaatgatggcagatatggtgtgttcaa

SEQ ID NO: 123415 - DNA, 1004 bp, Homo sapiens
caatcgaattgattaatactaaaaatggaacaactgcaaactagaactaatttgagaaccctcctactttcatcctcagagtttgtctaataaggacttttggacgactgaatacatagcatgtaagaaagtgttagaaatggctacaagtctgatgtgactgcaacaatattactcataatgtttttgagcacaacaaaaacatacagggtacatccacatgcataacagatgttcacgggaagatgaggttaaacaggacttccacatccacgtgggtttctccacttaattttgatcataaaagccatagagaagttgaaaggcctcttagaagagtggacagaagccgccaagcacaagtgcagtagggctaccttgtgtatgcaaaaggaagacaagtcccacttggaaatatgccttcaggaaggtttagcctcgcaaacttgcactctcccattgtgcttacatttcatgtgtgtggcatgtggatttcatttctctttctgtcaaacatacaagtattccatggattcctatggacccaactgcagtttgaattttagaaactgtaacatttttggccgagcgcggtgcctcatgcctgtaatcccagcgctttcagaagccgaggcaggtgaatcacttgaggccaggagttcgagaccagcctggccaacagggtgaaatcctgtctgtaataaaaatacaaaaattagccaggcatgatgctgtgtgcctgtaatcctagctgttcaggaggctgaggaatgagaatcactggaggctgagaagcagaggtagcaatgaaccaagattgtgctcctgcactccagcctgggcaacagagcaagacctcgtctcaaaaaaaaggaaactgtaacattctgtggtaatgagatacccagtttatggctgctttttgcctattatttgtgtactgaccacagaagcttaaagggtactgtggcattaaaagtgaatctctttgttcctcatatgta

SEQ ID NO: 123416 - DNA, 1031 bp, Homo sapiens
gctgagactgtcctttgagcaaaagaaacctcaggcattgcctctatttctaaggcattgtttttcttaaataaataaaatgaagaagggctttggattgtctgctttttaagtgtttcagtaaatatctatgttttccaaatacgtgacggtaagaaagttacgctcttggtcttcaactagttcaaatttagcttccaattgtaggctgagccaggggcccaagataaggtgtatttatattcccttctcagctgccttagctgggtgacttggatttagcctctgtgaaccttgcttgtctcatctgtacaatgggaccatattacctactttgcctgcattacagggttgttgggagagtctattgagcattctacacagaagtgctttggaagctaaaactctccaaaacacatttcagtattgatgctcccacccccttggctccgttactggctccacatgacctaaaggggccatttttcctccagacctggagctcctctgctcagggagtccatagaggctgctgttttcctggggctcaggacatactgggtcctgaaccctcaggtctgcttctgctgtggtctcaaattgcctcactagattccttcccccgggaacctgtttctaaggaaactacttctctttgtgttcccaacagctggagatgtgttttgatcccagcccgctggcatacatttgtcttgtgtttatttacttggaaacctaagctcctgtaggccctgggttggaaagtcatatacacgcgcactctccctctccgaggagtaacgagaaaggcacgccagagccgaatgctccgccaggctgatgcaagccatccaggagcatggaggaccaggaagccccagcttcagagatacgctgcgaaatacatttgtcctgggtgtatctaaagcaggagtcacaggtgattttaggaccaaaggccacttctgggggttagcaagacctgagggtatccctgggagtttcaggcaaacagaaaacaagatgggtga

SEQ ID NO: 123417 - DNA, 1094 bp, Homo sapiens
ctccagcacatttccaattcatactctgctgtcaagggtacatcagaatggacatgtccatgtatttctggtatcaggattccgggagcgtggtccatcttgtgcatcattcaattcctccgcccttcacctgcacaccatgtcatcatacgtttttatctttgccaggctgagagatgagaaattatgtgtcagtaggataagttgcatttctctcgttatgagtgaagttgagcatcttctcacatgtttaagaggcatttgtattttcctttctcatcttatcattgcccattttgctaacattctgatctctagaaacttttcagaaaattacagaaatttgcccactatttttgatataaattgcaagtattgttttcctagttagtaatctcttttaactttctttgtgatgttttttacatgcagaattttatttctttgtggtcaaatttatcaacctttttctttttatggcttctgagttttgtgttatactcagaaggatcttattaactctgaaactataaaaaatattctccatggtgtcttctagagttttgttgttattcatgttaaattaaaatctttaatacttctgaaatttattctggtgtcaggtataacatatcaatgtagtttcttttttttccagatggctaacaaactatcccatttatacaataatttgtgttttcctcattaaagtatcacctttattatatgagaaattcttggttttagagggatctgttttttcttttggcttttattttgttccattaatgtgtatctttatatacagaacactattctatatatttatatatatacacactgttgtaacctattgtataattacataatacatagttttattatgtaatatgcaatagtataattatataatatagagtgactatttatatatacattttattatctggcagggtccagtctttcctctttactcagctttttccccaattgtcctaggtctttgtctttgttcatttttccttaggaactttaaaatcagcttgttcagggtcgggcgtggtggctcacgcctgtaatcccggcactttggg

SEQ ID NO: 123418 - DNA, 1024 bp, Homo sapiens
gaagctggctgagttccaaaagaaatccaagtcctgaatttctattacttctaacaaactgcattagcatgttaccaacacttataaactgacttaaaagaagactagggcattaaattaaaaagtaagccatgagactattaccaaaataaaaggaaagcaagagggatttgcctttgtccttgttcagagaaactgaaaacaaacttggattgcattaacagaagtatctgttctaccaactgcaaaagtgccaaaggagatcatataggtccccaactctgtcatgagtccttccaggtgaacagagaccttgttaaattaaggcaatcacattcagcctcccaagaagggagcctataaaactgagaagccaaagctaatccagtcctttcccattctaattaaagaggctgaagggcttgtctcacctaacactgtctcatcttcatgccacttcctcaaataaaggagtcagtgagaagttaccaattcacatggtaaataacaaactctcctgagttttttggataatcaaatgagttttcctttgttcattccatccctccccatttggaatttagatggaagaatgtctaagtcgatgaaaatccaactaaagaaacattggcctctttgtggaggaatctcacatttaagtacaaaaaaaattaagcgtttaggggaagaaagttcaaagacttttgcttcctttgttcttttaaatattttatttggagttcggcattacagtcaggacaacctacagtaagaaaaccaggctttcgtataaaagttactgaaaggtgctatacaccaacatacttttatatctaccatatttttatattctttatatctttcattttaaaatatttatttggtgtggcaggtttatggtagctttttatcgtcctctttttgcttggccatattttatataataaacaggaactggttttataatagaagtatttgaagacaaagaataagatttgatgccatgagatctttctttctttta

SEQ ID NO: 123419 - DNA, 1030 bp, Homo sapiens
tgcagagtaagatgagctataagaagtccaaagttccacagtggtatattttgcataataccgtttgtgtttccattaaattgtattgttgttttgactgacatagcacattacatgtttctgtatttttcttcctctctgttttctctgtgagttagccagagtcactatttaaaaaaaaaaaaaaaaaaactatcagaatcaccaggaatggtgtttttgaatataagattaagtaaaaaggaatgaaatgctgaaggtataataaagatggcataatcttaacaggtgagtggcaggtaaagtaactggtataaatgatttctaatcttagcaaagggtctatgaggcaagtattattgtcctcattttaccagatgaagaagttgagcttttgagaagtgaacatttgccaaagactccacaactcacaagaggtacagccaagatttgaactgaggtttgtctgataccaaccttggtggttttctctctctgccgttcatgaaaggtgaaaaagtttaaatgataaatgcagagtaaaagccttgtattaactcgtaagttttggtatctaagaaattacagccttttctagatcttgagattataaaactattcttaaaagttggttattgtcaggcgcagtggctcacgcctgtaatcccagcactttgggaggtcaaggaaggtggatcacctgaggtcaggagttcgagtttgccgctactaaaaatacaaaaaattagccgggcatggtggtggctgcctgtaatcccaactactcgggaggctgaggcagaaaaatcatttgaacccaggaggcagaggctgcagtgagccaaaattgcgtcattgcactccagcctgggcaacaagagcgaaactctgtctcaaaaaaaaaagagaaaaaaaaagttggtaccaggtacgtccatctgcagtttcatcgactgagattatgtagctgagagaaactgaggctcagagatggcacgatttagctgaggacacccagctaattaatctt

SEQ ID NO: 123420 - DNA, 1104 bp, Homo sapiens
acctccaaaaatatagtcaaaatgcagttcataaaactaggggaagtcaagtacagacatgtcccaggaaagcagaaccagaggagaagcagaccccgggcactcgcaggactatttgactcactggagaattcccttctgccagggcaggcttggctcactgctccaagcactgcagattcccaaggaacacccaggcccacagatgttcatgggtcacagaattgtgaactgaccacttgtgcattttggatttcaacttgtaaacatggggattccctttttacaaaaagaaaaaggagaggatgaaaaatcaccatgcaaaggaaagttgagagctaagtttttccttttggaatcttggcatgcgcatttagctatcttcaatctggctttcaccagacgctgtgtgctttgagcaggggtggagcagtctgccctgtgccgctctgccagaacattcagacttgacctgtcacaggcctcttattccagtcaggagcagacacggcccaggagatgggccctgccagacacagcaggctgcctttgaggtgcaaccagagaggcagtaaaaacctgggaggagagcatttgactgactaggctgggggctgcccaccagtcaagtccccgagttcaagtcccagctgttctgtttcactgggcatcagtgtaaatcatttgacctccatcggtctgaaatcgactcagctggaaaacattagaaagaaaataaaacatctactgaaaaccaagagctgcttctgggatgaaccatttcccacccttgacccctaaatgctaaaagactgagccacaacacttcctaagctgatgaaaggtttgttctcaccacagaacactgtatccccagcaagagggcatagaattacatatagtcattccaggttgcctgaagcccccgttccttcatgtctgcaagtggcattgcccagtatgctgtgagtcgatggacagcagcatttctgaaatgtgaattgagctcccaggagtaggcacatcctcctgggcatgagatagagcaaatgcagcaaggacctgtcctgaagaagcatcggtcccttcctcctggcctggttt

SEQ ID NO: 123421 - DNA, 3703 bp, Homo sapiens
ggcggcggcgctggcggcggccgtggtggcggaggcgacggtggagacggctgccctagtgggagaggcggcggcggcggcggccgaggaggaggagggggaagcggcggcggcaaagggtaagcggacagcgctgccgggcctcggcgggatccccaacctggctctcccctcatcgccccgcacccccctccgtctggaaggggctctgccgcctcgcgaggcccgtgcggggcgttcgcttctaacttgcactcttcctccctccgcctctttccttcccccagtggcgtggcggagagggaggccccccgagtcccccagtccggtgggggtggggagcatcgggccgggcctgggctccggggcgtccgtgcggggggggagggggagcttcattggaatcgagcgcctaggagagccccgggtgggggagggcgcaaggggctcgggagggcccctccctgcgtcggcgcccctgacccgcccccaggcatgtgtgaggtgggggcgggggaggaaaaatctccttttggggagccgaggtctagttaaagatgactcaggggcgggggttttggggacagacacggggcagttatgtgggggtcgggcgggagggagaacatcgttcctttgcggatcttggttttctgcagccgtctttgaagtggggggcaagccctactatgaatatgtggccccttaaatttcactggatgtttctggttttcggtcccatcaacctcaaaccctacgattgtggttgagtcagggaggctgcaagggtctcttggcggtgctgaacaggtgacaggtggatctttctgttgctgatgctgtgagatgttcaggcacagtcgtacaccaaagtgtcagagaccgtgtgagtttgtatttatgtgtttggccatgtttcattccatatatagtatatttgagatgttaggtttccattcttcaagtcagcttaattgttgtggataaattcttcaaatgtttctgataagagggttttccaggagagcggagggaatttgcagcctcacaggggtttctccgtagttcacgaaatttaggcccccagtgcaggctgttgagtacccttattcattggaaagttcttgaacgctaagatcgtattcagagcaactgtacggcaatataattttgcatccattttgtctgttttaggtaagtttgtaaagtgtctaattttggggtcagattgattcacattttagaaaaggaatttcgtttccgctttagcatactctaaaggttatgatgatcattatgcaattccagatttggccgggaattttagtgggcatggaatagaatatttgctttcagttttttcacttctgcttactacactgttcatacagtagcagagtattgacaccttttaaaaaatatctttacattctttgtaacaatgaaatcacgattttaaacttttgacggtttgaaactgtaaattttgaaaccatggcagtttgtaataaaggaagacttgcttttcttttgttgtaggctttggctgagcattttaattagaaacaatgggaagaattgttagatacatgagctataggctaaattagggtacagttagtttaaggattctgctgctttaaaaaaacatgtatggaacgaatatgatgtactatcaatgtgttaacaggaaatagaacaaaaattccagtgattcagaacttctgtttgggtttttcccccataggtctaatcagtttctaatagagggtgcttaagttttaaatctttcaagaatcaaactgaaagttgaatacgtcaattatagatgaataagttatcccctgaatatactccattatttcttttttcttttgtgtgcatcgagttacttttcctgagtttaaaagtattctcttaaggacactgatgaaatgctactattgaaccccctttagttaactatttcatagtagaacgtgtgctttagtgactcattaagaagtggataaaatggtcagaacctcatcaaatacatgttttttgaaaaataaattttaacttaatcccgtttgattgaaatcacacctatgcttggtcctctagtggaaaaaagcgcttgccttcagctaagggtattgctaagactgggaaacaatttttttttaattttgtttttgttttctttgttttttgttttgagacagtctcgctctgtcacccaggctggagtgcagtagtgcgatcttgactcattgcaacctctgcctcccgggttcaagggattctcccgcctcagccttcccagtagctgggattacaggcgcttgccaccacgcccggctaatttttgtacttttagtagagatggagtttcaccatgatggcctggctggtctcgaactcctgaccttaggtgatccacccgcctcagcctcccaaatgcctaatgaaatgaggtttttaaactccgcagttatgtaggcagatccccacttaggtcagtattgagaattgcttctttagtattaacaacttacacttggttaaatgtcttattacatttgtgtcttggcagaaatagaagtttattctacatccgtaattttcccagtaaggaaaatttcttttcccaaaatactgtttagagtgaaatgtacatatgtgtatctgtgaacctactgcattttgaaaaataagtataatgtaggctgttttactctatgagttacttgcaaaaaaagtccttgaggaatgtgtattttctaaaacagcatttttttttgagttatataaacagatcaagactaaaagtttattttttatcatacttcagaatttttgccttgttatagatattttgggggaaagttcctgataatctttataatatataaagttcataaattaaactgtaattgaaaaatccaaattataattccattatatctctctctggccaggttcccatgacccagagaacactagtagcacttttcctttgtttcacttatgtcatctttatttgatctaacattgggtctctctagaatggaaggattatgaggtaataacagaggcacatgtgaagattgggcaaaacagtaataaggaggaggagagacagaggataagatgctagcagagaattagatgaaaagttttaggcagctaggaatgtggagatgtgggtagtggtggctgccaagcacaggaaaatgatcatgctgaactgtacaaaggagattgtctctgaaccttttcataggttctgacactctatatatgtcatcttatttaaaaccctctgtattaaaatgataaggatttggagacattgaaattatatagaatttaaatgtatgcatgttcatatgtttttgcctctggctcatatttccagaatacttaacagtattttaacattttgtttcttatgattctggtcctaaaaaatcaaggacgctgcttactcagaaagctaaaaaacctgagtaagtactcttaggagttatactttttatgttttctttagttaatcactaaacttgactgatcttgataaaactaaggaattagagattgctaagagggtactatctttttctaagtattccatctctcaaaacagcctatttactagtaagtggtacttaacctacattcattcagcctcctaggaaaagaaaaagatgccagaata

SEQ ID NO: 123422 - DNA, 1569 bp, Homo sapiens
tttcacttggatttttattgactcattttacagaatatgtttactttatttcctattccttagaaaaggagtgagcagagtgagaagtgtcagctgacaagtgatgtttcaggacatccaagtcagaattatcacaaagtaaaattgtgtatgttatatgaataaaagatgtctatgaaaattgattaaagttttggcacttaaaagtacatttgttcaaaatttaatttacatacacccccttacctttatgcttcataaatgaggctttgctgaatgtgactttttgatttgccttactcatgtgtaatgtaaaactttaataagaaattttatttcatttctaatcatgtattccagttcagaatatggtacccagggagtgatatcctgcataataaagagaaaggaactaatatttattgaatgcctactgtgtgccaagcttttcttcatttcagaaatatttattgagcacttattatgtgctagggactcttccagatgctggaggtgccgtattgaagaacagacaaaaatagctgttttcatatagtttacatttagtggtaaaagacttaataaatgagtacagtgtaatatgcctgggacaaaacagtactgtgcagaaaaataaaacggaaaagggagttagggaatgaacattgcttattgagcttttttaaaaactgtgtaatgggtattatccttgatttcaaaaagcaaaacctatcccatacataaaatttttcctttaagaatacacttcaaatttcagaacacaattgtatttatacttcaaagttacagagtttcaacagcgatttcctattgttagtatttcagaaagctgttttatggctggatagaaaatcggagtttttaatcctggttttgccacttagtagctttgccactagatttgggatcagttaaaattcgttagcttctctgagcttgttttcttctgtgtaaaatggatacgatatctttctttttctggtgaaggaacattgtgtcgtatgttgttgaataggttgatgagctggatctcagcattttaacaaggaaataacagtgtataaaattccaattcatgtaaatacttttaaaatatttagtacagtacctggcacatagtaactatagagtaaatgtttgctttttgtcatcattttgcttgttaattcaaagaatcttttatacaaattattaaggaaagtttttgcaaagataaaataactcaaattgtgaatgggatttttgagggaagagtggaataaccatgcaagttgcaatacttattttcatttttagactggaagatcacgaaacagcacctcaagtgcagaacatgtcttcctttcagtctttacttcacattattttcagtggttggcctgtagttaagagctcaagaaatactgtgtgttaaatgttgaatagttcttaatgatcatttttctgtaaattacagctctttttgtagtaaactcctgagtctgaaaggtgactgcactggaatctctacttttaattttaagcactgaataagatatcattatgcaa

SEQ ID NO: 123423 - DNA, 2712 bp, Homo sapiens
agctgggattacaggcgcccaccaccctgcctggctaatttttgtatttttagtaaagacagggtttcaccatgttggccaggctggtctcgaactcctgacctcaggtgatccacccatcctcagccttgcttttttaagcggtttttagcttttgctgttggaaaagtcaacatgtagagtgaagtattatgcacagaaatttgatttttgttttgatcaaatgccattatttagaaaacctaacattttcacatccttttggataggtcacttaatatcagtaataattaggtcagcaaattaattttgcttttttgtagtttgcaagagtttatcttatgttcagcaaagctaataattgcataaaaatttaagtgggagaaactggcctttaaatattaatattcagatctgtggtacaaagcctattatacagatatttgcttccacattcttgatatcctatggactattttgtcttttacacttttcttttatactagcatttcctgattgtaggtttctattagggttgtcatcattataaaatataggcaagatggtcgttttttaaaaatttaagacagattaaatgttccatttaattactgagcacaaattatgtcatagttgcctggttaattttattgatttattatttatttgtttagaaatgggggtttcgttatgttgcctaggctggtctcgatttctaggcccaagccatcctcttgcctcagcttcccaagtagctaggactacgtatggcatgccactgagcctggcaacttggttaatttttaaaaggcaattagtgacctgataaacatgagcgtctgctgttcagaagttaagcagctgtatgttgcagatgtatgtaggtgtcacagttaagtagttactagaattgtgagaaaatgtgctcaaggaaccatccaagggatccgtgtcaaataaaagttgctagaaatacagatattttataatttgcattgagagtgacttactgtttaccccatgattagcatgtacctgaattgtacttgactaaagtactgcttgccaactcttaggatgattttataggaaatggaaaaataagcacatggaaatggggatttcagaagaaaattcccacttccacatatggcgattctgcttttttgcatataaaagtgcattgacacgtgttgaatgccctttgagattgtctagctaaggtaattgtttggcctgcatgagacatactcattctcttcatgagatttttcccctcatgaacattgccatacatttaaaggatgacagagccattgctgtaattttgcaagtggaacaagaagtaagtgctcttgttgaaggtaattagttcattacctaattgaagttagttcattacctagttgaagtaattaggtagaagattgaagtggtcatcttaaccaaaccaagctatctatcagtatatcaacttttatagaatatcacatgatcgaaagaacagaaactccatagagcgtatttcatatgtcttctatgacatgcttgtgcagaatagctggctaacccaagaaatcttgccttactcattcttctattgtgtctcatctctacattctgtttgttttgtttgagagggagtctgctctgtccctcaggctggagtgcagtggtgcagtctcagctcagtgcaacctccacctcccaggttcaagcaattctcctgcctcagcctcccaagtagctgggactgttggtgcgtgccaccacgcctggctaattttttgtgtgtttagtagagacagggtttcaccgtgttagccaggatggtctcaatctcctgaccttgtgattggcccgccttgacctaccaaagtgctgggattacaggcacgagccaccgcacccggcctctacattctttattattcaaactaccttacttatccaatagttttgagttcctgctgtgtgcctgtactttgctaggtcaaaggggtggacagatatgtaagatacagttcttgtccttaagagacatatatacaaacacatgtgatatactgtgacaaatgctgtgacggggttaaacataaaatactttaggaatccataggaggtagtgtctcctatggataaggattaggcagtatctcctattcagtaagggatgaaaggatatgacagggaaatcttcctaggaaaggtgacacttaatctgagtgtatatcagataggcaaggaagagagttacaggctgcagataggtctttttagatagagagaaacaccatgcatgaaagatggaggtaggaaagtccacatgtacacagtaactgtgtgtagttctacagtgcattaggtaccagtggtgggttagctggaagtgaggtggaaaattagaaaaaagacagagcatcgagatacctgtatactccataaaggagatttaacttcatccttcaaatggatggaagacaagttcttaaattaacattctagaaagattctcttgttgtagtgcacaaaataccttagaaaagagccagacttgggaggaagaggcaggcatataagtatctatttgagagttgattaggacccaaattaaggcactgataatggggtaattaagaagaataggtaatgtgtttgagaaggaaataattgaatgtgacataaagcagtgaagatcacacatgccctggg

SEQ ID NO: 123424 - DNA, 1234 bp, Homo sapiens
ttctgatgtgcctgtgcatagagacagttatttacatttttttcttcccaatctgtatgctttttatttccttttcttcctctgctacttgcaatgctgtttcataatagtggtgggagctgacaagcttgtttctgatcttagtggaaaagcattcagtctttcaccagtaagtatatgttagctgtaggttttttgtagatgctgtttatcaagttgaggaagttccctttttatttgtagtttgttaagtgtttttatcatgagtaggtcttcaattttgtcaaatgcttttttctacatcaattgatatggtcatatggcttttattctttaagctggtagctagtggttacttacctttttaaatattcactctgctgtgtgtggagtagactttggagatagagcaaagatttaaacagggaaaatatattagaaattattgtcatacttagatgatggtggctgggaccaggacagtaataggaaagggtgagaacagatcagattttggatatgtttcaaactctgtgtgggaaggaattgctgatgaattggatctgaggcataaaagagaattcaaggatgacaagagatttttggcgcaagcaattggaagtatggagttgccattgactcagtttgggagcatggtaaagtagcaagtttagactgagcaatcaggagccttttttttggatgtgttaactttgaaatgccttttagacatataaccagtgatatcaactgggcaattcattcggtataatggaattcaagcaagagattcagactagaaatatgaatttgggagtatcagtggagttgatgtgaaagaagttatagtggtatttgtttaaaactatacctgtgactgctttctagttactgtaatttcagatttattagcaaaaagccagactcttctaacatgtgaaagagctttgtgaaaatttggattagttctgctgtgtatgtgacatgaaatgcaacagaaattttgtaattgggaggtgatttggggatggatatttaatatgtacttagtcatacttatttgataggtaaatggctgttaacagtggtcatctaatagtgtcttactaatttttagagctttgccctaaatctttataaaatgaagtaactacatgttgtggaaagggtttgacacttattaagtgcccgaatgactttctgtggcaacatttatcttacagataaaaacagc

SEQ ID NO: 123425 - DNA, 1051 bp, Homo sapiens
taaaaaactaactcggcaggtaaagtgcacctgtagtcctgcctactcaagaggctgagttgagaggatcacttgagcccaggagttcgaggctgcatatctatgattacatgacagcactccagcctggaaaatagagcaagaccttgtctcttaaaaaaaaaaaaaagaaaaccttaagagtagaacaagcagtcaaacaagaggtcatggtgttaggtgattgcccagataacacatacttgaacaaggacattgtggtggaaaagagaaatttttgtgaaagtaatcagtgaaactttgccattgattatatgtggagaggaaaagaattgagaactctgaggtttctagcttcagaagcatgtcatttataattaacagagaaatacattagtgagtaggaggcagtgagttgagttttggacaaggtgactttaggttgccagcatggtattgtcaggctattagtttacttgttccagtcccacccctcccttccgcctccctccttccctcactcgctcactgaattccattgctattagtctaagaacttccctttaggaaaagtaattttttttagtcacagtcagcagtagagcttgaaatttgtggagaccaattccccatttcctacccacattctcattatcctcttttggtccgtttccccagggaaaaaggtgaagattatttagaataatatctactaccatcattactaccaccccaccccacctcacctccaggaaattggtagaaaagtttatatatagatatgtatgtatgtatgtattatatatataaaaaatatatgtgtgtatatataacatatatataatatttacatacatatatttgagacagggtattactctgtcacccaggctggagggcagtggtacaatcatagctcactgcagccttaacttcctgggctcagccttaacctcccaccttagcctcccaagtacctgggactacagacaccagccaccatgcctggctaatactttttttctaactttttgtagaggcagggttttgc

SEQ ID NO: 123426 - DNA, 2658 bp, Homo sapiens
gtaacgtcaagctagtacaataaagaaggaaccttggacatgaggttagacagctacagatacatttctggttttaactctgctgcttattggagtttcgatgagtaaatattacttaatatgtttttttaaaagagtaaaagcaagttcattataatttgtaaataacgttgtatacctggaaaagccaagagaatcaactgaaatattactataagtaatgagatttcagtatgatgactagttaaaaaatttaaaaaagtggtttatctgaagtggtttttttatttgatggtctttaaactgaaagcctattcatatgagttactgaatggaaatcctcaaacttaaataccctttccccttctttctgaggaatgcagtaattcagtcttatcatctaagttttagtatattttgaataagacacttccatgttaactttttaaaacttttaaaatgaagttgtggcagagaatacacttaaaacaactataaggaaatcattttttaaaattccttgtggcttgtgatacttgctctattacttggtaattttagagagggtgtaatctgatctttgagccatatttggtaaataataattttgtgtggaacccactgttctatcagtaagaggaaaattattgcccatatataaggcttttctttgcccttaaaacatttcctaacttaaggaccaaattatatcatgcattgattgcttttatgtttttttaaaaaggattataccggatctatatataactttttaacaagagatgtgttgacagaagtattttatactttacttggaaagagaattacatgtcttcttgtttactactaattctttttatatcctaaatataaattgttatatttttatttatcatcagctctcaaaattgacctctctcatatactcaatttgtggctattctggaagataatcagttacatgtcttagaatgtgattatagttgaattatttaaaccgaaagcctgctacctagttgttgctttagcatttgtgaaaatgaaaacttaagtatacccacatgtttagaacaagaaaatgtgttacattctttaataatgcagaaaaatatattgaatgcctatatgtgccacactgttaagtgctttacatacactttagctaaatctcatggacagtacagcagggtgggtagtgatattccatttaataaaagagatttctgcagtttaatttcaaagccatactgaaatcagatctgaacttagacttctctctcacagaattccttgtcctgcaatgtgccatcacaatagatggaaaatttacatttttcacaaaaactacttttactctgttttgctgtttatattgctagttactggaaatgcagggaattcagtttttggatcttcgtcttcactacttttttttgtcctattacagttttcacaacatctatgataatttgagagcagcagaaaattctatttattttgactcctgtgggattagtttcttagggaaatgcctaagggtaccagcctaccaagcataaggacatcatttccaggttttaataatcaaaatagtacaacattctactattcataatatcctattatttctgtaaccttcgtagttgcaagtttgtttttggtttttgttttatatggccctaacaaaaattaaaaaaaaaaaaatcattgaatctattttggtaatggaaaaaaagattttccagtgtggttaagaaccacatcttatgagctgttctttgcctccctctttaagaattaccaagtatttttaaaaattggaacttaacattcaattcattgcttggatatatctaaagcatttcttaagaaacccctgggaatggatcataggaaattaggggagcgtttagaagatgattggaaatacgatagtgaaagggaagagaaaaatgacctgaaaatgaggactttacatttccaattttggattttgttgttgtttttctctttctgttagagttactctgtggtctcctgttggacagtctgttgctaaaagccattagagatttcataaaaactactgttttgagttgctggaactgagattccagaatagtgttgggtaggttaaaagaatggcttaaccaaagtaaacagcatcctttggttacttgcaatttaagagacccattttcccttcagaatattttatgtgagagactttggggactaccttactgctattacatctcataatgttatctggtcacatttcttgttctgcctacctctagtttactctagtttctcttctgctttcaaggctccagacccagttcctggacctgccctggaaaagaagtatcccgtagagatgagctcactgcagttacttaattaacaatttgtaagctgcaaaaatggcaatgggccaaccaagaacagctacaatttgaatttttctatttccaggtatgctaaagtccatggcaccagtcaagcttagcctgtgtaactgccttattattaaatctatagtaactaaaacttgactttcaaaacttatagtcatcttgctttaaagtatagtaacactaacatctaggtaacatgcagctagtattgagtttaacataccttttgcctgaatat

SEQ ID NO: 123427 - DNA, 1036 bp, Homo sapiens
tattatcttacttggattactcatttaattctcctaacactcctatgaagtagctactctatcatcaccattttatagatgaggaaactgaggcacagaaaaattaaatgatttgcccaagaagttactgcaagtaaatagcatattaaacttcataaacgaacccatggaatcctagaatttatacttagccagctatcactgtgtatcaaatactgttttatataccttatatcataattgtctcatctagttagataagacagtgtgcacttatggaactgaggttgaaatatttagcaacattaggttatctctgttttaaactattaacatgttctttcaccagaaaattttagaagcgtgcatggctaaggtagaatactggttcttttagttctactcttttcttctcttcaggaaagtttatgcctgtctcagagtaacattttatttattcattggttccttttctttcttaagattttaatagtaaaggccaatactttgtcaagtttaaattatgtaaattgagtagtttatgtgagatacattactagttattccttttatttttaaaagttagatctctgggaatttagctttgctccaccatttactttgtatggcaccttcttgatagtaaaagatttttcagaaatttacctgcccaaaaacagcttttattttataataagcttcatttttagctgacctatggtgatccatatgtgtttattgtacatctacattttcctacactcttaaatatatagtagctgcagaatctgtttgtgtatacttaatagaggtaattttttcttcccctagttatttctttcccattgaatcaagttacatacaagtttctaaccattcctgttacaggcttgttggtgattgacttcattttaataatctttttatttcattgcctttcacccagttttttaaactcatgaaattccacacccctttccatctctattttccttccttaaatcaatactttactataagcacctcttatatgtga

SEQ ID NO: 123428 - DNA, 2602 bp, Homo sapiens
aatttcttcaaattttttttctacctcattctttctcccctttccttctgaatctccaattacaagtatgttatgataccttgccacaggtccctaaggttctgtttctctcctccccctcgcccacagtcacttttttattcatccttcagattggataatttctattgctttgtcttcaagttcactgactgtcatttcccatccatggttaagtctacccagtgaatttttttcagttattttattttttagttcttaaatttttatttgctttatatatgtataatttccatttctttgctgagagttccaggcatatttgcacttaaatccttcagcatagttaaaatagatgctttaaaatacttatgtgctaattctagcagctggctcatcttgggctttgtgtccattggttgccttttctcttgagtatgggtcagtttttttctgtttatgtgtaacaattttggattttatttagaacattatgaatgccatgtagagactctggattctgtattcctccagtgagtattgatgtttggtttgttatctgtttcaagccagataacttgactacacttaaagtataagctctgaaatcgcagttcagttattttaaccttagccttgctgcttgaatggaatctgtcgcacatatgtatagtttggagatcaaagataaatacagagtttatacacagaatttagggcctcctctctgtggttctctccttcctgtgatttactcactaagctttcagctgttatgatcatgccattgtctgtcctttggttcatcaagcaagtaagactgcaggttttttatctgagtgttagctacccaaactaactgggacctgctctctgagtaaaagccattaaaaaatggaaagttacccttgctgtttccttcttccaagtgctgacccctttttcttccctccaccaatttgtttcttcctccttcaggtagttttttatgcatttctactgtttatagttgttattcatgaaagatttggtctggtaggcgttactcagccatcacaggaagtagaacccataaaataaaattgtacaattgaagaatgttatcatttgtgtaggtgatagtctttattagaaaagcaggcaagtatggtgagagatttcagtgtatgttttaataatgaaatacgttgaaatttgttttcatggttcatcctcctttaaataataaaaatgtctcaatcagactatttgcctctccctcaaattgtgtataaatttttttttttcaaatctagatcatttgaaatatgttttggaagccttatagaaggaaactataaagaaaccttataataaaatattcattttattcaacaaatatgttgcatcttctgtgagccaggaatgatccagatcctggagatagaacagtgaacttcagagtccttgatcccatggggctaatgttttggggatggagagataataaaatatatctcaggtattgatacatgttatgaaataaaagcagtatgagggtgcaatggtgggagatggggaagagttatggcattatttagatagagggattggtcagggaaactgtctctgaagaagtgacatttgatcaacattcttaatgacataagagaagggagttgcaggtggatctaagggaaaactgttccagtagtaaaggagcagcaaatccgatagccctaagggaagaacaagagtgacttctttgagaaatcaccagactgccattttgaattgagggaacaaggagagggtagaagatgaagttagaggggtggtagatagccaggggctttgttacattgcattttgaacagggaaagtgatgactctgatttacttttcacaaagatcacgccgctcagtaaagaaaatactggggacgggaagaagtggtatgttggcaaaaagaaggaaggtggggagacctattgaggcctttgcagtagtagtctagatgaattatgatggtggcttggacaagagcagtaacaagtgggaaaaattggttagattaagaatactttttgtatataagccaagaagtcttgatggtagattagatgtgggatgagagaccaactggatgaatggtggtaccatttactgacatggaaaagactgggaaaggattgatttggatgggggaggaattaagagtttgattttggacatactgagcttgaaataagttgatacacaaaaggagatgtcagttagccagttggatatgttagtctcaaggaagagattggagttggagataataatttgccaagcaccagtatatagatattatttaaagcaatatatttgaatgaaattaccttgaagatgaatgtagatatagttgaaaggaaaccatagatctgaactctaccagccaccaacattcagatgtccagaaaaggaaaaggatccagcaaagtaaactgagaagaatctgccagtaagtagaaggaaagccagaagagtataaacctcagaagccacatgaagaaattgtttaaagaatgagggagtagtggttgaatgggtcctgagctacagagagatctagtaa

SEQ ID NO: 123429 - DNA, 2206 bp, Homo sapiens
tcagagagagcttttccattacattagtagtgaggatttttaattcaatcatttgcataaaaaaacttctcaaatttaaatatccaaatatatgttataattgtattagccagtcacttggtaatcatgtatttgtagagatgcaaatataagcattcgcttctgattgttaacatcaatcaatttattttgttttcatagaataataataacctggatgcctgctgtgctgttctctctcaggagagtacaagatatctttatggtgaaggagacttgaatttttcagatgattctggaatttctggtctacgcaatcacatgacttctctcaacttggacttgcaatcacagaacatttaccaccatggaagagaaggaagtaggatgaatggaagtaggactctaacgcacagcattagtgatggacaacttcaaggtggccagtccaatagtgaactatttcagcaggagccacagacagcaccagctcaagttcctcaaggctttaatgtttttggaatgtccagttcctctggtgcttcaaattcagcaccacatcttggatttcacttaggcagcaaaggaacatctagcctttctcaacaaactcccagatttaatcccattatggtaactttagccccaaatatccagactggtcgtaatactcctacatctttgcacatacatggtgtacctccacctgtacttaacagtccacagggaaattctatctatattaggccttacattacaactcctggtggtacaactcgacagacacaacagcattctggctgggtatctcagtttaatcccatgaaccctcagcaagtttatcagccttcacagcctggtccctggactacttgtcctgcatctaatcctctgtcacatacctcatctcaacagccaaatcagcaaggccaccagacctctcatgtctacatgccaatcagttcacctactacttcacaaccaccaaccattcattcatctggtagctcacagtcttctgcccatagccaatataacattcagaatatttcaacaggacctcgaaaaaaccagattgaaatcaaacttgaacccccacaaagaaataattcttcaaaactgcgttcttctggacctcgaacctccagcacttcctcttcagtcaatagccagaccttaaacagaaatcagcccactgtttacatagctgccagccccccaaatacggatgagctgatgtcccgtagtcaacctaaggtctatatttcagcgaatgctgccacaggagatgaacaggtcatgcggaatcagcccacactcttcatatccacaaactctggagcatctgctgcctccaggaacatgtctgggcaagtgagcatgggtcctgcctttattcatcaccatcctcccaaaagtcgagcaataggcaataactctgcaacctctcctcgagtggtagtcactcagcccaatacgaaatacactttcaaaattacagtctctcccaataagccccctgcagtttcaccaggggtggtgtcccctacctttgaacttacaaatcttcttaatcatcctgatcattatgtagaaaccgagaatattcagcacctcacggaccctacattagcacatgtggatagaataagtgaaacacggaaactgagtatgggatctgatgatgctgcctacacacaaggtaatatgaatactaaaggtgggatggttttccatgctgggcttgttggtgtgcatttgatttcacaacagaaatggatgttagcattgttatttcattgtttaaatattgccccaaatgatgttattgtaacatttgagagtattatatgtatatacattttaattttaattttattttattattataaaactggaagtttgagtaattgggttatcagctcttcagagtaaccaaatctggttagttggtttgttaatgtttataacactttcttttcagttaatcttatacctgtggtgatgctgactttctctttaaattttctgtaaataaaaattcctagaaataacgttttaataagcaactagttgactctcttgactaatatggtaaatttgccttctttgaccagatatttgaagaataagtaattcttggctgggcatggtggctcacgcctgtaattccagtgctttgggaggccaagatgggaggatcatt

SEQ ID NO: 123430 - DNA, 1088 bp, Homo sapiens
tagatgaactgagccttttagagtaagggcatatcttagtcatatatgtatctgcagtgaatcatttcatgtatcagctgtaggttggaaaatactataacatcaccctcaggcagcatgcagcccctactgtcactaatatcctcatccttttttacatttctgatacagtgattttactgctgagtctcttagggggtcctaattgctttgccttattttatgttttaaacagctacactagtgattcttagtccaagctgggttgtggtcctttcgaattccagtatcattcatggagctttaaaaaatcagctgggcacagtggcacccgcctgtagtcccagcttctcagaagctaaagtgggaggactgcttgagcccagaagtttgaggttgcagggcaccactgcactccagcgtgggcaacatatcgagatccctatctcaaaaataaagtacgcagggctctgcccaaacttaagtaaagtgaatcctaggtatgcgtgtgcatgtatttgtgtgtgtgcattttaggggtacatgagtgatttcaattgccctagaaattgtgttaaaacttttattttccatatatctgtgattaactacaaccatttttgtttagtttcagcagtttataaatgttatatgctattattttttccacttacaacttaattctcctcttctcccaaagtcaccttctcttcctgtccttccatcaaaacatcaggtttcctatggttggatagttgctgattcttaagtagcaaattttttatgaagataatttgataagggaaattttcaagtaaagtaggcattcatatttagtgatattaaaaagatattcatgtttaactagaatgtgaaaataaagtgtttcttaaacttgctatcttcaattcccctcctattcttttttttttttttttttttttgggacagggtctcgctctttcgtccaaattggagtgcagtggcatgttcacagctcacttcagcctcaacctcctgggctcaagtgatcctcccactttagcctccctagtagctggactacaggtacacaccaccacatccag

SEQ ID NO: 123431 - DNA, 1071 bp, Homo sapiens
ttaattatgttttgagtgttttttataagcagcatatagctgaggttttacaattcagtctactgatctcatctcaacagatatgtttaattaggttgcattcattgtgatttctagtatatttggaattatccctgtctggtttttgttttgtatttctttcctttatcccctcctttcctgctatctaggtttaattaaatttccctcatttctccttaggttctgtctttgaatttagaaactgcacattctgttttaacttcctttagcacagatccctaaatactgaacatgtatatttggcttagcaacatttaactgtattcttcttaaataccttcaagaccttagaatacttcacctctgatttttgcacttccagtgtattgttattcttttccaatgttttattttcactttgttttagacaatgtctgctgctcccctgccctgccatagtcttttcctttgttttattgtcagagctttttttttttagatttactcatcttattccattcttttgtgtttaatttccttcttatcagaacatatattgagtagttatttcagcagctatctgtgattgttgaatttccccagactttgttggaaatacctttattcatttgtattcttgtataatttaattaggtgaacaaattattttatcttctaaaatttgttacttccttttttcccttcaattttgaaacattttcagccaatatctcttcacatcttgcctcttgtctattctctctgttgtctccttctggaattcttttctctctctgtctccccctacccgcccccgagttggagtctcactctgtcatccaggctggagtgcagtggtgtgatctcggcttactgcaacctctgcctcccgggttcaagcaattctcctgcctcagcctcccaagtagctgggattacaggcatccaccaccacgcccggcaactttttgtatttttagtagaaacgaggtttcaccatgttggccagtctggtctcgaactcctgacctcagatgatccacccttctcggcctccccaaagtgctg

SEQ ID NO: 123432 - DNA, 2006 bp, Homo sapiens
aacaagagtaaaactctgtgtcaaaaaaaaaaaaaaattgaaattttaaatgcctaaacttacaatattttgttttaatgtagctttgggatttctgacaaattcttgtttgcttttccaagtctgcttaaaggttaattgattaaagtgggtgggtcctcatgtttactaatgtgtgttgcagctcttttggtacaccagaaggccagaatggaacgacttcaaagagaacttgagattcaaaagaaaaagctggataaattaaaatctgaggttaatgaaatggaaaataatctaactcgaaggcgcctgaaaagatcaaattctatatcccagataccttccgtaagtctttatgtaactgttgtgatctctgcttgaacatgagagtaggccatctaacataagtgtaatatctctatctagttttcttcagatgttcttaactcttgtttttctgtccttactttcttgtgccaaactccattctttattaactaatgactaagaattcagtgcaaatcttacttacatagaattatttttcagcttgaagaaatgcagcagctgagaagttgtaatagacaactccagattgacattgactgcttaaccaaagaaattgatctttttcaagcccgaggtaaagttcagtgtatttgtagctgaaattcatcgtatttaattcaccagcagtttttctgtggctaaaaacagacttatcaatcataatcttactgtctcagaacatgtggctttggagccagacagacttttaagaatatatttaaaaagtcacccccatctcaatggcactatcttaactgataaaatatagaagatagtaaaaataaggtttatacattctttagacaatgatagtttcttatacttgagctattaatgacaagcaatgttttcttatagtaaataatgtttacaatttaattcagttccatagagaactaaaaggaaatgttatcacttaaacctaattctgaagttggataaataataaaaagatataaaatggaaaagacaggaaggggaaggaatctaaccaaaagagaagtctttaatcacacttgggactgtgttctagaatctgttcaactggaagatgattatttttatttttattctttttaaatgttgattaagctatttatctttaaacattcatagaaaaataccataatttaactctaaaaagttggtgctgttctagaaactacaatccttgaacttactctttttgtgtaaaattttaaccattctattacatagtgcaaggtttttatatttacttgaggtaaagctgtttagttacttaagtccatgtttgatcgtttaaaattacattttaaattgtgaaattttaagttattttaacttgccacatagaacagggatctacttctacttctattaatgtcttaccagcattaatttgacttctttcacagtttaccacttacccgtgtttatgagtactacattatacctaagataatatatttgaaatatgttttgaaatcttacatataattcgaggttagaggggcaaaataaatgaaaagcatttcttatagcgtgtttatttttagaaagaaatacttgttttaaaaagtaaagttgtttttgagctataagcattgatatatttactttttatatatttcaggaccacattttaaccccagcgctattcataacttttatgacaatattggatttgtaggtcctgtgccaccaaaacccaaaggttagtgtatccattaaatgtgaaaactgttacttttgaaaagcaaaattttagaaaatttttcctgttcagcaaccttcctctctagaattgcttcaaactttggcattcttaaatgaattcattaagaagatgtttgcttattttcatttacatgcttggggttgggaaggatgcaaagatgtaatattcttagctttttaaaagtaatatgcacgagcttaggaaacactatgtactc

SEQ ID NO: 123433 - DNA, 2268 bp, Homo sapiens
attttttacttataaaataatttttttctttcttacagatcaaaggtccatcatcaaaacaccaaagactcaagacacagaagatgatgagggagctcagtggaattgtaccgcctgtacttttttgaaccatccagccttaattcgctgtgaacagtgtgagatgccaaggcatttctgagccaaatggccctgtatcttctctaaaaccacatctaaagttcaagaaactagtctgtcatcgggaaaaagtttcactgctacataggattttgtcaaattgaaggtgtgacaagatggtgttctgctaatgttaaatgtcagcccacagagctaataatacctcagtataatgtcatgagcagttgaaattcatcacatgaaaagtaatctgctgaaagacttggttgcccactgcctaactgtgtacagtgttaccagtgtcccattatggataattctcaatatgttaacacctaggtgttcccaatacctttttcccctcatgtcactactgaattttgacaggaggaaggaatagaatgatagcttgttttatttgtaaagctttcagtgaaacactacatacacgaagaaaaggaacaaggtttaactatttaagaaccatttgctgccgcatagtgccattggatagggaagaacttcagaaatctgtggtactcttggccttgtctttgtcttccctgaacgtgtctccactctgtgaagccagcatctaggggctaaagatgcaaaggaaagcagcatgcattgtctgtacaaatgtgcagcgaaataccccaaagcttttcctactgtacagatctctcgagtctgctttaagtgatttcttttcttcttgattattttcttatatttctatatgtatagtgtaatagccttttgttaactaattttcttttttccttttagtaattaagcacgatcatgtccctttttaagccttacctgagaggaacaatgccttaaaataaaaaagcattaatgagatgaaagtatgcacagaataactttcctctacttattctgtactttgccctcatgagttccaatgttgtgtgaagacaggcagatgctgcacagtgaattgcagatgatattacagaagtgatgtctgtaggtcacattaaatactgacttgagcagtgggtgacacaacacagtgtttgtcttccacagggaagcttaaaacaaaagatatttttaacccactgacagaacaacaaggttaagcttcatctgcttggtgtcccacagaacttgcacaagcagttgttattgggaaagtacagtctcaaaaccagcaacagcagcagtacctacagccctttttttggagagaagtttaaatgctttactgttggggcagtccatttctaatcctgacttggtgacagtatcatgtgtatttataaaacaaggctagccatatttaggacaactgaagaaaagctggaaaaaaaaacaagcaaacttgaacactgaagcaacctcaagcatctctttattttgatgatatatttttgtaaggaaaatattcagatgatcaggaatgtatataactgaaatcaagaaaaagaacagtatgcatttaaaaagacagaattatgaaattatatgagtgcttagaatggggctaagggaagtgctgaaatagagcaaaggatggaagataatatagactaccacccactgtaaatgtttgcaagtggctgtgttttaaatgggattattacagttgatctctatgaatgtcagagccctaactttcaggctttgcattttgtatatgggaagaaatatgacaatcctaggtaattaaaccatagacccaaagcccttacgtttgatgcaatttatttttaaaataggccttgtttttcagcttcatctgcagttctatgtgaagattgataaatcagtttttacttgttttattaataaaacgtaatttggatatcttgagttgatggttttgtgatttagctgggtaaactatctttgtaacagataagttatttataaaaattaaaaaacttatattctaatgtggattttgtgacttgttttcagtttgtgggacaggagataatttatacatcagcagatcatttaagcattaatggaaatcagggaaaacttcttctctagagtctccttgtgacattgtgatactcagctgcatttcttggactgtttttatcaatttccctagacttcttttttcatagtttatgatagttttcc

SEQ ID NO: 123434 - DNA, 1007 bp, Homo sapiens
gaggttgcagtgagccaagattgcgccgtcacattccagcctgggggaaaagagcaagacttcgtcttaaaaaaaaaaaaaaaagacacccatcattggttcattggatttagggctcactctcatccagtatgaacacttcttaacttagttgtatctgcaaagactctatttccgaataaagtcacattcacagatattggaggttaggacttgaacgtatctttttgggggcacgatttaacccactatagggtgtaaggtgtttgcagagctcaggaaaagctacccagcactttggctagaggttagcaaagatgttgaacagatactgagctgagccttagaggccacatttctaaacatagaatgttgcaggcattcaaatgtgaccacttacaatcccacatcattagcccaggagtaggtgcttcattttaacatgcgatcgtcactcattctttgccttcaacccaaggttcctctacctgtgtcccatagtgctcatgtcttttcattcagtctctcttcctagcaatgggtagcatgttagtacaggccatctcatagttccctgggggctttttgtaagagaactatagcttccagaaaaatgggtctctatacaccaggcactcttctaagtactttatagacactaattcctgtaattctcacagtatccttatgaggtagataagattatttattcccattttacatattaggaaactgaagtacagaggttagataatttgctcaaagttacacagttaataagtagcagagcactctggcttcaagttcatgacaccaaactgcctgccattataagcttagattctttccctaccaagatatgcaagaaaagaaaaaagaaacaataaaaaagagcttagattatttctcataccatttatcaaaataaattccaggtcatgattaaagacctgaatgtaaaaaataaaacttggggtgggcattgtggctcatgcctgtaatcccag

SEQ ID NO: 123435 - DNA, 1031 bp, Homo sapiens
tcagcactctgggaggctgaggcactgatccacctcaagtggatcacttgaggtcagaggtttgagatgagcctggccaacatggtgaaaccctgtctctactacaaaaattagccaggtgtggtgatgcacacctgcaatcccagctgtttgggaggctgaggcaggagaatcacttgaacccaggaggcggaggctgcagggagctgagatcacgtcattgcactccagcctgggcaacagagcgagactcagtctcaaaaaaaaaaaaaagttgtattgctgttatttacttaaatgagtagagtactaggaagctggacacacataaaggttgcaaatacagtatcattctagcaagagagtttgtgtagaaagagaagttaggtaatgcttctttgttgctatgaatctacaacaagaccagtgacctctggctcctgaaaaagagaaaagttttgtttgcttggtttggtggagagagctggggaaacctgagtcaggaacaaaggcatatgaaggtggtaacgagccaggtgcagagggagagcagggcggtgtctgactactgccgaggctgggaaggcaatgagtgtcaggagggaagaggaaattgggaaagggagagtcccaaatgcaaaactgagaagcttggatttgcttcgccaggccccagaaaataaggaagaaagtggcactgggatagctgagaaaagttactctgggcgttgcatgtaggacctttaccatgggttggcaccacagtcctcacatggcattgaacacgatttcattcaatatcgattccacacatcaccccaaatgcagacgtatatcaagcaggcttcccagaggagatgatgcagacgctgaggactttgatatctcttctgcatttgatatccaagttggtgcagtgctagaacgtagaacaggcacaacgacaacaacgttaaagtcatacagtctttgttacataatcactcatttgttatcacagaaataataccagtatcttcagcatgaccagg

SEQ ID NO: 123436 - DNA, 1055 bp, Homo sapiens
atttttttcatactaggattatggtctttagattaatactgattatatagagcacggaaagataaagaattgaacattttctttgtatacttttttacactaattttattgttatacataaatggtagtcttcatttttgaagtcttacattttcactctttttttaatgaagtatttcatactacaaaaatacataaacgtatatataaagggataataaatgtaaatatctgtgtactcatcagccagcttaagatacagatgttgtcgacattttagaagttccctaaggccctctccctctcaaataattatttggaattttgtgtttgtcatttgtctattatagttttacaacatacgtatgtatctgtaagtgaaatgttaattttgtatgtttctgaattttatataaatggcaaaatgtttacttctgtgactttctttcatttttattgctatatagtattatataaatatactacaacttattcattcttgatggacatttgagttttgtttatttgtttttgctgttgaaacaatgctgctgtgaacattgtatctagcagttatattgcttgatatattgataaaataatgccaaatttgtgttctgaagtgactgtactagtttatacctctcttggcactgtgagttacctttgtttcatagcatctccaacacttaagttcagacttaaaaatttgccaacctagtggatgttaagtggtatctacctgtgatttccagcaagattactgttatctctgctcttccatgtgtaagatgtcatttttttcctggctgcttttaaggttttctgtcactggttgtaagaagtttgattatgatgtgcttgctgtagtttttttttcacgtttctgctgctgcagctattttacctgtgggtttatggttttcatagaatttggaaattggggggcattttttcttctgttatggttttctctctgctcctctcatgcttctcctggggctctgatgacttggatgtacgttaggcccctcagaattttctcccagtgtgct

SEQ ID NO: 123437 - DNA, 1001 bp, Homo sapiens
gagacagcaagaccttgtctcaaaaaaaattctcctctctaacttctgtctttctaaacatggaagatgtatttgaacatctagagaggagctgttataaaataaaacactttaaaaattaattgctcagacccaagtatacattatccattttcttttttcgagatggagtttcgctcttgttgcccaggctggagtgcagtggggcaatcttggctcaccgcaacctctgcctcccaggttcaagcaattctcctgcctcagcctcccgagtagctgggattacaggcatgcgtccccacacctggctaattttgtatttttagtagagtttctccatgttggtcaggctggtcttgaactcctgacctcaggtgatccatccacctcaacctcccaaagtgctgggattacagacgtgagccaccgcatccagcctccattttcttatttaagacttactgacttgtctaagatctcttcctgctaagttatttcaatgatatcttcttataggattcttatgggaattttagtagtttcattgcagatcaataatgggaccacgttttgggggagtgaagggtggggagctgggaataagactatacataatcagaatttttgattttgcagattgctctagagacatgttctgatttcagttgagctatttcagttccatatttttgaagctgatccttcgtttcagccaaaatagtagatacaaatcaatgacgttgttaaacctttttctgaattattttattgctttgtaatttacaagattcttgacattagtggtagtgttcacatttaagctgttataacagccttctaatggtagacttttctaagttttattaattgaaaatgcccacaaaatgattattttactgattcacttgtaattcccccttcctttgacaggatatctatagagaaatggggtttggtcactatgaagaagaagaaagctgttgggagaaacaaaagagtga

SEQ ID NO: 123438 - DNA, 1036 bp, Homo sapiens
gttaaagcaaattactagttttagagttacttggaatagtttctctctgtggttatgacattaactagattcatatttcagttaaagtgtttcttttctttcttttttttgagacggagttttgctcttgttgcccaggctggagtgcaatggtgcaatctcggctcactgcaacctccgcctcctgggttcaagcgattctcctgcctcagcctcccgagtaggtgggattacaggcacctgccatcatgcctggctgatttttgtatttttactagagatggagtttcaccaagttggccaggctggtctcgaactcctgacctcgtgatctgcctgcctcagcctcccaaagtgctgggattataggcgtgagccaccgcgcccggccctgtttcatttttatttatttatttttaatgttttaagggttgctttaacaattttttgttttgtagttttaaaaactgtttccaaagtgaaatctacaaaatggtacatttagagaacctagcttccattcttgttccctccccttttccttcttccctctgtgggtaactattttatgtgttttatgggttattgatttaaaaaaatttagcaagtaaatatttgatatatgtagttagctctttgctataatccagcagagatagaatttcttctttctatagccctttagctgtttaaagattgccatcattcatgcctcatcccgttttcaggccatacttttgttggttcctgcaaatatttctcacatgaatcggtggtaataaaagtagtagtaggccaggtgcagtggctcatgcttgtaatcccagcatgttgggaagctgaggcaggagaatcgcttgatcccagagttcaagaccagcctgggcaacataggaggccctgtctctataaaaattttaaataaaagaaaaaagtagtagtagttaatattttttggtccttacaatgtaaggtgggttcttttatccccctttcacacaacaaagtgagaacaaaaattgttacttgcccatag

SEQ ID NO: 123439 - DNA, 1142 bp, Homo sapiens
gatgggcaggtgtggtggctcacacctgtaatcccagcactttgggaggccgaggcgggtggatcacgaggtcaggtgtttgagaccagcctggccaacatggggaagccccgtttctactaaagacacaaaaaattagtcaggcgtggtggcatgtgcctgtagtcccagctactcgggaggctgaggcaggagaattgcttgaacctgagaggcggaggttgcagtgagctgagatcgcgccactgcactccagctcgggcaacagggcaagactccgtctcaaaaaaaataataagaagaatttaaacatgataactcgatatgcattgctgaatttcctcttgattgaactaaaagaagagacatacaaatgtacctgttatcttatatagcttttctgggcattggaatttataataattttttctagttaaagatgtccctcattttctaaatttaaattttttaaattattgacaaatacgtttattttttcctcctaatttttttgcctactagtctttattttaagattgtttaggattaggattctttccatttctcctgactatataatgaaagaaaatgttagttttgttttagaaatgtactatattcttttgagatgctttttgctttagttacttttagccttatgacctcctttgtttaccagatcttaagttttgatgtcttaccagtattatttatcacatttatccttaactaactactgcagtacaaaatacgatcttatattagatgagcaggccgaagactcaaaatcaagtcactcacacacaagtaaaaaacacaagaagaaaacccatcactgttctgaagagaaagaagatgaggactacatgccaatcaaaaatactaatcaggtacctctaatgtccagacttagatgtggagaaataaatattttatccctctgtaaatgatgtcttagtgatataatttaggaggtaagggatagttctaagcagagatgggtttgttcctaagaagcagaatggttgcactggggtatgggattttaattttcaaaaatatttatcacaaatgataaaagatcatttttgacataacttaatgtatcaaatacttccacattgtgaagcaagagtgatttc

SEQ ID NO: 123440 - DNA, 1108 bp, Homo sapiens
atctcggctcactgcaacctctgcctcccaggttcacgcgatcctcctgcctcagcctcccgagtagatgggattacaggcacacactatctcgttagatctttaaaaggtctcttaaagtctcacttctctcaaacttaggtctttcagatcttaaactcaggtcccaaatcctcagttttccactggacttaatgttctcatgggctcaatggctctacttgaacacggcatttgtgtgtaatttatttgaaagtttgatgttgtaatattcacatatatcgttaggtggcagcatgtggctacctagcaaaaatggatgtctgatttcaaattagtaatggagatggaattactatgattcttttgttccctttctctgtctctcgatatatgccatttataaaatagctcttatgctttttataaaataattattgttcttggttaggtggtttttttactaagctctttttttcttttcttaataaataggtgggaaatacaccaagagtgatttcaaggagtatgaaaaagaacaggataaaccacctaatttggttctgaaagataaagtaaagcccaaacaggagtatccttaccaagaatcagttagttaatatgtattgaccatctgctatgtgtagagtactgtgtgatgtgttatgaaaagtcacaaaagctatagaagacaaatttcctgaatccagattgtttgtgaggaagtaacttagtttatcattatctcttttcaagatcttacatatactttgctttttcactatactctagtgtatggagaaagttaaggttgaaagaaatctgtagcctaattcttttattaatactttcctactctaggttaagtactttcctacttatcatattctcagaagatcttcaggtaagatttgtattttctttttgggggggctttcctgcaaaaaccggaaagcctactagacaaattctaaaagagctgtaacactagctttgtattttctatatgtaattgtaatgttttctattcctcataatctgaaatttattattgctaagctgattcctttgtgctacctgctgttatgtttaacttccttacctagat

SEQ ID NO: 123441 - DNA, 1017 bp, Homo sapiens
ttcatactaagtggataaaaaaaggtcataacctaccattaggtttggtgttactgccaaattaattttaacaacaaacttaggaacacaactttcactttccaggatgtttttgaattttgagtaaaaaggattgtgaacctgtataatacagtcagtaagtgtatatttatctgttcactgcagttggactgtctctctaaaatcctggctctgacccttgccaacaacttctatacttctctaaacttctgttttctcattaagaaaatggatagtacctcatggggttgttaccagaggtatttgaggtaatagatacaaagcatttaacagcatcgggtgtgtaataagtattcaaacattaatttttgtaacaacaaactttttgtattttcagtattctagctacagaaatcttttccataaagatttatgcttgagtttttataattattatcaggaagaagattgtgagaaagcattcttcaaaatggacaatgtgcttatagatgacagaagaatacatgtggattttagccagtcggttgcaaaggttaaatggaaaggaaaaggtatgatggtttatcttttgtttttgttctgctttttttttttttttgagatggagtctcgctctgttgcccaggctggagtgcagtggcacgatcttggttcactgcaacctgtgtctcccaggttcaagccattctcatgcctcagcctcccaagcagctgggattacaagcatgtgccaccatgcccagctaatttttgtatttttagtagagatggggtttcaccacgttggccaggctggtctcgaactcctgacctcaggtaatccaccgccttggcctctcaaagtgctgggattacaggcgtgagccactgcgcccggccttgtttttgttatgcttttcatgcttgtatgagccttttattgagtgctgttaattaggagaaatattaattgatgtaactcctgccatttgtaattttacaaacctgctatct

SEQ ID NO: 123442 - DNA, 1006 bp, Homo sapiens
aagcgattctcttgcctcagcctccccagtagctgggattacaggtgcccaccaccatgccctgctaatttttttgtatttttagtagagacagggtttcaccatattggccaggctggtcttgaactcctgacctcaagcaatccacctgcctcggcctcccaaagtgctgggattataggcataagccacaacactcagccaatcttagaactttttaagttctaagtaaagcccttcagagactcttaatttttccctgttacttaagtggagataaagttgagtaatagaaagagaactgaactgggtgttaagatttagatattaatacatcttttgttattagccagctattgtatgatacttggcagtttagttaaccgttctttctaggtcttaccttcttataaataaaacttgggtattagaatagatggccccttctagagctgtaataatgatagcttatgttgcttaaatatttactttaagctaggcattatgttacttttgctgcatttaatcctcacagttctgtaagatagggaccatccccttttccaaataagttaactgagacacataatgctaatgtgacttgttcaaaatcacacacctagtgaatgaatgtcatagctgggatttgaactcagatatgtctgattctgttcccattgagtttacactgtgctatggtatgctcttttttaatgcaactttggactcatatgtatccagtagtagctcattctaagttctaattattacaaagcatttatggaataccttttatgttttcagacacagcaataaggcctagggatacaagatgaatcatggagggttggggaagatagaccataaagttatatgtaggcactgtgtcagatgtaccagaaatgatacttacaaggtacattggtgccagcagaaagacctttacctttggtttgctgtgaaaacttgtagacctgcactagcattctatcattgacactataga

SEQ ID NO: 123443 - DNA, 1043 bp, Homo sapiens
agatacaatagtaatgaaaaagtttgaaatcttgtgagaatcaccaaaatgtgagccagaaacatgaagtgagcctatgctgttgggaaaatggcaccaatagacttactcaatacacggttgccagaaatccttaattgtaaaaaatgcagtatctgcaaagtgcaataaaatgaggtatgccagtataagctttgtactttttacttagttttggtaacaagtgtctaagaattggtgcagtaaatgtggactcttaactttcatgtatttttttgtcagtctgtaactgatttcagtttgagttatgtattatttttatggtatttattatgtgtccttctttatagtttcttatcaccacaggagaaaatctagattatcttgatggtgtccatacggtgtttggtgaggtgacagaaggcatggacataattaagaaaattaatgagacctttgttgacaaggactttgtaccatatcaggatatcaggtatggttacaatttgctatctgaatgtactagaatgttttaatattgagatgtttaacacgtagtggtatggataggaacggtatgcataggactggtttctggataattctaatcccaaaaggtgaattaatataagactgtaagaatctttataataaaaaggactttttgtatttttatacttgtactaattatttataattatgtttggaggaattatttatttatttattttttgagacggagtctcatgctgttgcccaggctggagtgcagtggcgcgatcttggctcactgcaagctctgtctcccgggttcacaccattctcctgccttagcctcccaagtagctaggactacaggcgcccgccaccacacctggctaattttttgtatttttagtagagacggggtttcaccatgttagccaggatggtcacgatctcctgacctcatgatccacccacctcagcctcctgaagtgttgggattacaggaatgagccactgcacccagctggaggaattgttaatgctttaatttagtt

SEQ ID NO: 123444 - DNA, 1053 bp, Homo sapiens
aactctgtgaattaacaaagaatcctacatattacagagggattttatcatacaaactggcgatcctacagggactggccgtggaggagagtctatctttgggtaagttgttttatttatttatttatttatttatttatttatttatttacttttaacctctggaagggcagaacaaattcttttattcttaaatgaggaaaaatataattgctcatgcttcaatctgcattttaaaatatggtttaaatttagattttttcccccaagttccctaaaaaaaaaaaagtaatattttgaattctgttggcatttctgtaaagaaataattgataaccctgtatgttactagtacttctgtatttcattttgagagtacttacatttataaccttatatgttttttcagccaactgtatggtgatcaagcaagcttttttgaggcagaaaaagtcccaagaattaagcacaagaagaaaggcacagtgtccatggtgaataatggcagtgatcaacatggatctcaggttaggaaatgagtaagaatatgagatttgcttagaaatgaaggactggaaggagcccacagagttattttttaaactatccagtaaggcttagagggtttcaatcagaaatatgtgttaggggaaaaaatgcactttttctatattaaaaaatattattttcttcttttaaatgtaaagcattcctattgtgaagaattgagaaaatacagaaaagtacaaagaaaaacattacctacaactccaccatccgtgattatcactgttcacatttgtggctcatttttcagtatttctttttatttaattaattaatttatttttatgagatgtagtctcactctgtctcccagactggagtgcgatggcacaatcctcggctcactgcaacctctccctcccgggttcaagcaattctcctgcctcggccttccgaatagctgggattacatgcgcctgccacaacacctggctaatttttatatttttagtagagacggggtttcaccatgttggccacgatggt

SEQ ID NO: 123445 - DNA, 1050 bp, Homo sapiens
gacaaagtgagactctcaaaaaataaataaataaataaataaataattggaattgtaaataagggtggaaaaatggctataaaatggaaaagatgatcttttaaactctcttaatgctgttataagtgattgtacaatagatacaattggagggaaaagagaaagccacgttgttctcaatctgtgagatgcacaccttccaatttacacaatacttgttttacaggacggcatcagaattaatgtaactacactgaaagatgatggggacatatctaaacagcaggtttgtctccttttctggttttaatatataatttagctaagtgctatgcagcttatttgattttttaacttgcacgtctcatttagttaatcttttttgacttgaagagtttgctattgtttataaatattggaattaatgtatatgctgctttattttaaggttgttcttaacataacctatgagagtggacaggtgtatgtaaatgacttacctgtaaatagtggtgtaacccgaataagctgtcagactttgataggtgagtattactaaattatttccataattgctctgttttttgtgtgtttgttgttgttgttgttgttgtttgttttttgagacagtcttgctctgtcacccaggctggagtgcaatggtgcgatctcagctcactgcaacctctacctcctaggttcaaatgattctcattcctcagcctccaaagtagctgggactgcaggcatgtgccaccatacccggctaacttttgtaattttagtagagacagggtttcgccatgttggccaggctggtcttgattgaactcctagcctcaaaccatctaccctcctctgcctctcaaagtgctgggattacagatgtgagcccctgtgcctggcctgttctgtttttaataatactaaattagcaaaacaatttttggatgttatatatttccattttaaagtaaaaataggctgggtgcagtggctcacgcctgtaatcccaacactttgggaggccgaggtgggcagatcacgaga

SEQ ID NO: 123446 - DNA, 2018 bp, Homo sapiens
ggtgaaaccctatctctgctaaaaatacaaaaaaacagctgagcatggtggtgcaagcctgtaaacccagctacttgggaggctgaggcaggagaatcccttgaacccaggaggcaaaggttgcagtgagccaaggtggcaccactgcactccagcctgggcgacagagcaagactccatctcaaaaaaaaaaaaaaaaaaaaaagaataggaaagatgttgctagtgtggtatttcatacaaagtctaaagatcaacacattttaccctttcaaatgagtgtaagcagtcataaagatttgtcagattgtctttgtttttaataaatctgaaacagcattgaggtcagggatgaagaaagccaaagaaatgggttttcaactgtcttgttccatgtaaatgtcatcaaaataatcacactcactcacagatttggtggtaatctttgttcaaaggtgtcactacttttttttttatagtgaagaatgaaaatcttgaaaatttggaggaaaaagaatattttggaattgtcagtgtaaggattttagttcatgagtggcctatgacatctggttccagtttgcaactaattgtcattcaagaagaggtagtagagattgatggaaaacaagtaagatagtatgtttattaattgggaattaaatgatatttagatttgtgctagatattatgcatgtgttcagttattttatttgtttccgacttgataaggaaggtgcctaatgttgcctatatccaattatttagaatttttgtatatttattttagcatttgaaatgtatttttaaaatttcccatattcatacatgtttgtatcactttaaaatgtacagacattattaaatagaaagtaagcaaagagattcaatttggctcatagttctgctaccatttcctctatggtaaatgaagtctctgtgtgtaaatgaagtagaatcgagattaagcttataatagtaagtgttaaagcaggacaggaatattattaaagttgcaagttaagtgccccaaagtgggagtacggggaaataaatagtaattgttagctgggcatggtggctcacacctgtaatcccagcactttgggaggccaaggtggacgaatcacctgaggtcaggagttctagaccagcctgaccaacatggagaaactccttgtctctactaaaaatacaaagttagctgggcatggtggcgcatgcctgtaatcctagctactcgggaggctgaggcaggagaatcgcttgaacccagaaggcggaggttgcggcaagctgagatcgcaccattgcactccagcctgggcaacaacaagagcgaaactccatctcaaaaaaaaaaaaaaagagtaattgtctgaataggacacatgttttagttatataaatctgggaggaaaatttgcttttaaatttttatggggctgtgctactatttaaaataaagaataattatattttctttcacaggttcagcaaaaggatgtcactgaaattgatattttagttaagaaccggggagtactcagacattcaaactataccctccctttggaagaaagcatgctctactctatttctcgagacagtgacattttatttacccttcctaacctctccaaaaaaggtaacttaaaagaccattatttaaagtattaaggagattatttatttagttggtagctttatatactcttgaactttgttattttttacactatttgcaaaagttgctatttatctttaatagttaatatgtttggaaatgagcttgtttaaaaaaatgcttcataacatgtattgcttcatatgtccatttaaggactttaggactctatttggagcattagtagaatgtgatcagtgctggttgcatagtgacatttttcagtaattactcttactctgggtactgatcacaaaatatgtaataagactattgtaaaggttcattcagaggaagaactattcattttttcacagaaacatagaacttc

SEQ ID NO: 123447 - DNA, 1025 bp, Homo sapiens
ctcttccttctcttgtgctctaggtactggaaacagttgactctgctccatttcgtttataatggactagcctaacgaatctcttgtcaattagcaattattttcacttgatttgtagttagaaaacaatataaataattttacaggctattaacatttttgtgcttgtattgttagaacataatttttaaagttgtaagtaacttcattgaggtacattctaaaataaaatcaccatttaaaatatacaattagttttgacaaatgtagtcacccatgtaactaccagcacaatcaaaatatagaatatttttatcatcccaaagctaaaacattaaaaaatttaaagtttattcttagagattgatgcaacttgcatatctaatcgaaattcctttttcaggtaatgtgtcagtggatggaaaagtttagaaaagatctgtgtaggttctggagcaacgttttcccagtattctttcagtttttgaacatcatggtggttggaattacaggagcagctgtggtaataaccatcttaaaggtgtttttcccagtttctgaatacaagtaagtatttcttatttttgaaatgttagtatttttaatgattaaaaagtgagacatatttgctatgttttagaatagaaaatataaaaattagaaagggtaagacaaatgggagggaaaataacacctactgtttttctagctcatcttccaatgttagcaaaattgaaacacatttattgaatagctattgtgatcaagacattcttggagagattcagatgtaagtaagacaaactctgctaagaacttaaaatctagtagcagaggaaggaaacaaatacatgtaatggaaaatgcaactgtatgatcagaggtgaacaaaacccgaggacttcatgatgtattttcaaccccagagtatcagtttaaaatgttaatttcagtagacaagcaggatattcattgcagcattgtttgtaatagaaaataaaagcaaaataggctgggcacggtgg

SEQ ID NO: 123448 - DNA, 1022 bp, Homo sapiens
cccgggttcaagcaattctcctgcctcagcctcccaagtagctgggactacaggcgtgcaccgccacacccagctaatttttttattttttttagtagagacagggtttcaccatgttggcaggatggtcttgatctgacctcgtgatccgcccgcattggcctcccaaagtcctgggattacaggcatgagccactgcacccggccgagaataaggtaaactttaacttggcactgtaaaggtcaattttcaggcagtcttagagtttagcaatttctctagtgtataaactgattcttaacgatttaaagaaaattatattcaagtggcaaatttggaggcaacaggctacttcggagtccatgatatgagatggcgttttaaatacatgttttatcttcaaggttttcagctcttttctctggaccatctggatataagttgatagctgtcacaggtatgacgtccactttatccaactgaagaattcctctgaaatagaaagtgattaattactatcaaaattaaatgtttcctctgcctgtagtttgatagtgagaaaaggctacttcaaggttataatatacacctaaggttaggtgcttttgctacattctatttaaaaattcatagtggttgtacaaactgagcccaaagtcactttaaccaaactggctgagagaatagaaaggcatcgaggaagttcattatttcctattttagggaagaatagggtaagtatagatctccaaggcagagttaggttcctagatacacccaggctgagcaaaaagcctaagcctaagcctctctctaaataatactcaccaccacaacacaaccttaggtctttagatagtgttgctctttttgttacttaaaatccctgaccagagagtacgtctttggattgaatctaggaccctgcattgtaaattcagtgttattctaataagaacatcaacgggggttagttgtttatagaaccaaacagattctaaagttcacaggggagtaactg

SEQ ID NO: 123449 - DNA, 1026 bp, Homo sapiens
tcgttaagaatcagtttatacactagagaaattgctaaactctaagactgcctgaaaattgacctttacagtgccaagttaaagtttaccttattctcggccgggtgcagtggctcatgcctgtaatcccaggactttgggaggccaatgcgggcggatcacgaggtcagatcaagaccatcctgccaacatggtgaaaccctgtctctactaaaaaaaataaaaaaattagctgggtgtggcggtgcacgcctgtagtcccagctacttgggaggctgaggcaggagaattgcttgaacccgggaggcggaggctgcagtgagccaagatcacgccactgcactccagcctgggtgacagagcgagactctgtttcaaaaaaaaaaaagttgaccttattctctaaaagggctggctattcatatgatgaattgttaaggaaaacttaaagtggaagagaacacatgtgaagagactttgaaattatcaaaagaaaaaaaaaagaccagacaaaatctcatgtgccaataacttttcaaggtgcctttgttaaggaaattatatccacttaattactataatatataagactttatgaaaagcactttataaaattctaatttaaaaggtcaagaacttaacacttatttttttattcagtacagtgtgcctttatattaagtatgtgactcagtataaaatcactgaagtgtatcatgatttgattgtatcctgtaccaagactacttaccttgaatgctccaagatttaaaagtagtatgacatgttctcactctaaaataaactttttttttttttttttgaggaaaaaagtatagctgttttggttacactgatataaaacctttgcccaggtaagaatggctgagatgcaggagtaggtatactttcatttacactggctgaaaccatggctcaaattgaatgagtccattgatgtcatgaattagactgtgcccttggtcttgtggttctagatatagtgctgtttaccctaaaagtgt

SEQ ID NO: 123450 - DNA, 1113 bp, Homo sapiens
agtctggaatacagtggtgtggtgtgatcatagctcactgcagccttgaactcctgggctcaagggatcctctcacctagcctcctgagtagctgggactcagacacgtgtaaccacactcaactaatattttaattttctgtagagatggagtcttgctatgttgcccaggctggtctcgaactcttgggctcaatccatcctcctgcctcaccctcccagtgttgggattacaggtgtgagccactgtgcccagcctccctcagctattttctgattgctaatctgtagattattttaaaatgaaataatagcttaatagcttgatattgcatggtttcttcctttaggctcgattttattctccagccaccatatttattgatgagatagactccatctgtagtcgccgagggacttctgaagaacatgaagcaagcagaagggtgaaagcggagctgctggttcagatggatggtatctgtgtttagcttgagttgaacagggacgggaggttgttaggtgtggtgtctccagttccagtgggtcaaactttactcatagtgctaacccaagcttttaataggtattcttaacttcagatggactagagggggtggcaagaagttcctgatagtgatagtaatagatttggtacactgacagtggtgacaagtcagaattaatggccacacacagggcacccttttggtatatacaactatcttactttagctatgaaattgaaataaaaataaatgcagataaattggccttagagtttatgtacgctttgaaaaagatttaaaattgttatgtatttgagatctggcttttcgattaaatctattttgagtcatatatttgcatactacagaactcattttctttggattacaaattcacataggtaccagttaacctaagtcttaaggaggcattaagactgtgcttccttgtattgttgtactaaatagttgttgatctttaaatagctgagcttcatttggtataatccaacttaatatctttttcactctccccttacccttattttaggtgttggaggtacttctgaaaatgatgacccttccaaaatggttatggttctgg

SEQ ID NO: 123451 - DNA, 1024 bp, Homo sapiens
gtggttctcaacttgattaatattacatgtaatcaaagatctgtaatgtattacaatgagttataaaagttaacttttccacaaagttaggtattttatatttctgttaaaaccttaatgattattaggtatgggtttgaatgatattaaaaaatattggggacattaatattttatacaatgaaaatactttttttaacagaaattgccacatgtagcagtagtagtaggtattctagtggttggagatgactttatagtaatctctgtgatactctttaaccttggcatctacctcttagtaaagctggaggcaaagcagctatgttgtagcctgtctctgctttatacgatttttattctttatgcttttttttagttttaaaatacatgggctcattgtttctaaatcatggagattatggaatgaggaccataagagcaggagtttaaaatgagttgacacataaccctgaagagtgtgcctgtagactatgttctcgtgatccaggctaaaaactgtcaaccgccaataactgaagaaaaggttgtgctctttatatatctgctggttgacatggtgggcctcatcacagtgcattagttcacccgggctcagagagaggctcaccattctgtcagcagtgcaacatcatgtgcttccagtggttctcaagagtgactgcatagacatgtatcatctaaagggttgttaataaaatgtcttctctttcagggatgatatcgctgatttagtagaagctaaaaagttgcttaaggaagccgtagtgttaccaatgtggatgcccgaattctttaagggcattaggagaccatggaaagtaagtttattactgtgatggcattgtcaaagtaaatggcagcatgttgatacagagagccaatatttatctatattgggaaaagtggagggagaaagtggagtcaggaaatgtttaaattaaaaggtatatgttgtgctactgagaattttgttagaccagaagctgttgcatgattccta

SEQ ID NO: 123452 - DNA, 1824 bp, Homo sapiens
tcctgcttcagcctcccaagtagctggaattacaagtgtgctccaccacacccagctaatttttgtatttttagtagagatggggtttcaccatgttggccaggatggtctcaatctcttgacctcatgatccaccctccctggcctcccaaagggaaatcatattttaatcaaacatcccagataaatattacagttaggttaatttcttatattctaggtgacttcatgccatctatatgtcaatgaattccaaatctctctctccagaaatggcctttctctgaaattcgtaatttctctatccagctgcttcctggctatcttcacatggatttcaaataggcctttcaaacttcacatgacccataaagaacttttttttttaagcataaatcagatactgttatcttcttgcttcgaactctgcaatatcttctcactttacttgaggtaaaaggcagaccatttctattgcttgcaaaacccacatgtattcctgccgcatttcttacagttcttgccccatttcctacagttctcccctttatcagctgtgctggtcttctctctgttgctgttatttctgtgtggaatacctaatcctgatttataaatggttgagtccttcttgtttttttacggtttagctgaagtcaccttcttaactggtcttccctagccattcagtcttatgtagctatccagtcacatttgttacatcaccctgtgttgattctctgtgtagggtatgtcactgttccttatatgtgtaattgttttgtttcttttcctactagaatgtaaccagagctttgtcttattatcactgtcatttattgaatgaaagatggatctaatttgtttgaaagtttgtccagagtagtaacagggagtgggctaaataacaaactcttaatctccccatgactcatattgttgttatttaacattgcataaattactaaatcttaggctaattttttttaagtgtaaaatccttcctattgacatctcagaaaataggctctaattggtaataaacaccatcagtgatttggcatacattgtgtcttagtttgtcacaagggagaatgttgttaaccctaaaccacgatgtcagaagattaaatagacttcaggtttactgttgtcattgttgactttatttacttattcttttgttgtgcaggtgaccatccacggcaagatagcatggatttcagtaatgaatggggggatccctcaagctgtcgatgtggagacagactgaagccattagagcggagagctgcacgccagcaccagcgatgtctagcacattctttggttgggactcccaattatattgcacctgaagtgttgctacgaacaggtaaagcacttctttcatatatattctcagtagacctttagaccagccaaaacgacactagaatatgccttatttttcaggcttataataaaagtattaattttaaagtataaattggtgatttaatgttaatttttattgtattctgagcatttttaaagtgcttataaataactttgttattttaggatacacacagttgtgtgattggtggagtgttggtgttattctttttgaaatgttggtgggacaacctcctttcttggcacaaacaccattagaaacacaaatgaaggtaaggtatggcatctatatcaaaagaattctcacaaagttgctacatcattgacttttatttattagtacgtagagcattttagtctggagttaaagaatgaacttgggccgggtgcagtggctcacacccataatgccagttctttgggagg

SEQ ID NO: 123453 - DNA, 1072 bp, Homo sapiens
ctcatatccaacattcagttaaagaactagattatcagtactttagaagcccttaaacaatcacttccccttttctcctccacaaagataattattatttcagaactttataatcggttctttacttttatcgatccttttatcacaaatgtgtatatctttaaataatatattatttcattttgcctactctttaacctttatttaaatataatctatatatattctttgtgttgacttgtttgaggttcctccatgttattgcttgtaacatttattttcactactatttaggatttcattacatgactgttacacaacttatataaccctaaacactttatgatccttgatcctattttatcctcacaatgtcactgtgaggcaggatgaagaaactgagacctagttagatgaagtaacttgcccaaggtcagacagaaatcaagtgtaagggctaggctttgaacccaggtttgtctgatttcagggcccatgttatttctactacaccacactgcctcaccaagatccctccaagcgctaatggaagtgtaagtcaatctaacatttgttaaatactatgtactaggtgcttaaccatatattctaatatgctcgcaacaattctctgaggtaagtattattagcctcctgtgcttctgtgaacacaagtagattgacattaaaatgggtagaactgagacaattgaacctactttaatgttcgacatagtggaatttagtgtcttcccagattcgactgaattattacctggaaagcttcttaaaaatatgattcctaggctctattcccatcttttgatcaaaaatcttcactggggcatagaaatctttttgttgttttttgtttgtttgtttgtttgtttttgagacggagtctcgctctgttgcccaggctggagtgcagtggcgcaatctcggctcactgctagctctgcctcccaggttcacgccattctcttgcctcagcttcccgagtagttgggactacagccgccggcaaccacgcccggctatttttttttttttttttttttttttttttttg

SEQ ID NO: 123454 - DNA, 1214 bp, Homo sapiens
ataaatgaatatgcatgttaacatgttaacagatgtttgttgcacattgagaacctttttttttttttttttcggagtgcattagagaagagtagaaagcttactcatctggtaccctcttcttgcactccacagctgaatttgcataggtactcactttgaatatccttttaactaccccttaggctgcacttttgatcattaatttcctttgaaatgttttctagatttctaacatgctttattaaaaattatgcatttaacctttaaatatatgcctgaatttttcccaagctatttcttaatattcaatattgaagaagataattcttatttaacatctagtttatttgcctaggttggattatctcaagatgcccaggatcaaatgagaaagatgctttgccaaaaagaatctaattacatccgtcttaaaagggctaaaatggacaagtctatgtttgtgaagataaagacactaggaataggagcatttggtgaagtctgtctagcaagaaaagtagatactaaggctttgtatgcaacaaaaactcttcgaaagaaagatgttcttcttcgaaatcaagtcgctcatgttaaggctgagagagatatcctggctgaagctgacaatgaatgggtagttcgtctatattattcattccaagataaggacaatttatactttgtaatggactacattcctgggggtgatatgatgagcctattaattagaatgggcatctttccagaaagtctggcacgattctacatagcagaacttacctgtgcagttgaaagtgttcataaaatgggttttattcatagagatattaaacctgataatattttgattgatcgtgatggtcatattaaattgactgactttggcctctgcactggcttcagatggacacacgattctaagtactatcagagtggtaagtaaactcataaaatttattttagtttgttcataataatgtaatttattgatgtagtaaaatataagatggtatcatcactggatgagagccagaagatgtgggtcaggtcttgattctgttggataaacttgggtgactccattaggcacttagacttatgaaatgaaagaatgtgctagacttgattgtttagacttatgaaatgaaagaatgtgctagacttgattgtttctaaatattattaacatttttgagtcacacctttta

SEQ ID NO: 123455 - DNA, 1380 bp, Homo sapiens
acctggactgcaaacaaattggcctcagtcatcttctgctccagcccagtcatccccgagcagtgggcatgaaatccctacatggcaacctaacataccagtgaggtcaaattcttttaataacccattaggaaatagagcaagtcactctgctaattctcagccttctgctacaacagtcactgcaattacaccagctcctattcaacagcctgtgaaaagtatgcgtgtattaaaaccagagctacagactgctttagcacctacacacccttcttggataccacagccaattcaaactgttcaacccagtccttttcctgagggaaccgcttcaaatgtgactgtgatgccacctgttgctgaagctccaaactatcaaggaccaccaccaccctacccaaaacatctgctgcaccaaaacccatctgttcctccatacgagtcaatcagtaagcctagcaaagaggatcagccaagcttgcccaaggaagatgagagtgaaaagagttatgaaaatgttgatagtggggataaagaaaagaaacagattacaacttcacctattactgttaggaaaaacaagaaagatgaagagcgaagggaatctcgtattcaaagttattctcctcaagcatttaaattctttatggagcaacatgtagaaaatgtactcaaatctcatcagcagcgtctacatcgtaaaaaacaattagagaatgaaatgatgcgggtaaaaccttttaaaatgtccatttttatacttaatcatctgtttgcttggtgtttattttaaaatattgtgtccagtatttttctttctttttatagctaaataaaatatattatcagttatggaatttaaaagtgaataaatattaaagtacttttgattgtagcattttattttagtatttcaatatttattcagaatttcctataataaaatctcgtgtaaattaagaaaaatataatttgcggtatacagtttaggtgtacataatacctttatatgaaaattggaggaagggttgtcttctaggcttcatacaatatcttacaacatttaaaaataaactagaaatatgtgggtctcaggctggggcatgggggctcacgcctgtaatcaaagcactttggaaggctgaggcaggcagatcatgaggtcaggagatcgagaccatcctgcctaacacagtgaaaccccgtctctactaaaaataccaaaaaaaattagctgggcatggtggcgggcgcctgtagtcccagctacttggaaggctgaggcaggagaatggcgtgaaccccggaggcggaggttgcagtgagccgagatcgcgccactgcactccagtgtgggcgacagtgagactccgtctc

SEQ ID NO: 123456 - DNA, 1098 bp, Homo sapiens
atctcggctcaatgcaagctccgcctcccgggttcctgccattctcctgcctcagcctcccgagtagctaggactacaggcgcccgccaccacgccgggcaaatttttctggattttttagcagagacggggtttcaccgtgttaggcaggatgttctcgatctcctgacctcgtgatccgcccgcctcggcctcccaaagtgctgggattacaggcgtgagacaccgcgcccgtccggaacataatcttttaacgggttttcacatttggatttctagatacagtaagtagccagttattactttaacgtcagaaaaagatgtctttaatttttttgtactctgtagtagaaaaattacgaaagaaggtacttgaaaacactaactgtatatttcctagaggaaaaactggcaaaggcgatcttcacaaagggtggaccgtaccttatacatcaaacccaacgatcccatcccacactttacattcagcttaaccagaagtaaaacctcttgtcacaccgtcaccggtattccaattatggcaataacgatctccttctacggatgcggttgacagataagatctctaaaccgctgctaatcaatcggtcctggctcaagcatttcttatctgccggattcagaaaatacagatgctggaagctcaccggcttgttcggggaaagaacgctaagcaagaataaaattttatttcaaagcgccaaaaatctggaattctgaggtccacagggaggtttcccagagcaactcagttgttcccttctgagaacgtagctccgtgaaatgcacatccctactcggtccagagaaatagatcaatggggaaaaggattgaatcaaccaagtaggctgggcgggagacagccttaacccacgggcgcgggcgagtcgtatgggcaggggcaggcgggagcgacgtggggcgacgctcacgaacgatcagagctgcgggcgacgcaacgaagcccggaggccgcaggctgcgcgctccctcgcagcagccgggcgggcaaaagcccccagtcctcggcccccgcgcaagcgacgccgggaaatgcccacatccgggaaacctgc

SEQ ID NO: 123457 - DNA, 1026 bp, Homo sapiens
ttttagtagagatggggtttcgccattttggcctggttggtcttgaacctcaagtcatccacctgccttggcctcccaaagtgctgggattacaggtgtgagccactgagcctggtctcttaaaaaataaacaaaaaaaaacaggctgggcacggttaccagtcatcccagcactttggaaggccagggtggctagatcactggagcctgggagtttgagaccaacctgggcaacatggagaaaccccatctctacaaaaatacaaaaagttaaccaggcatgatggtacacacatgtactcccagcaactcaggaggctgaggtgggaggatacctgagcccagggagtttgagcctacagtaagcaatgattgcagcgctgcattccagcctgggtaagtgaggccttgtctcaaaacaaacaaaaaacgtgtttcctgtgttacacaaagataaattatactttatttgattttgacgtcattgttatctcccacaaaaggactggtgaccgagtgccactccactgtgttgatagacatcccaaccaacagcatgttgtagctactggtggccaagatggaatgttgagtatttgggatgttagacaaggtactatgcctgtatctctgctgaaggctcatgaagctgaaagtaagtattgtgaagatacagaaagtttatattgggtgagttatatgacatataataagcacctttccataatgatacatgtggatcattttacatcatagcttttaatggctgaattgtgtaaatttaaatagttatgtaatttctttttactcgacatttaagttctttaacatttgtttttgtttttttggagacggagattcacccttgttgcccaggctggagtgcaatggcgctatcttggcccaccgcaacctctgcctcctgggttcaagcgattctcctgcctcagcctcccgagtagctgggattacaggcatgcaccaccacacctggctaattttatatttttagtagagactgggttt

SEQ ID NO: 123458 - DNA, 1051 bp, Homo sapiens
ccagcctgaccaacatggagaaacccagtctctactaaacatacaaaattagctgggtgtggtggcacatttctaatcccagctatttgggaggctgaggcaggagaatagcttgaatccgagaggtggagattgcggtgagccgagatcgcgccattgcagtccagcctgggcaacgagcaaaaaaaaaaaaaagaaacagaaaacagttcagatgtcctgtgagtaaatgtttttcccatccaaagagaatccatttaaacatatacattaaccatgcatttttctatagaaatttaaattataagttactggaaattgtaatatatcaatccatgaaaggagtgtgatttaagattttcttgggaaaaaaaggggactcattaacacatactaccattttttaaatttttagacaatgcagatagtagtacactccatgctgtaacctttcttcgaactcctgagattcttactgtaaattcaattggacagttgaaaatatgggatttcagacaacaaggaaatgagccttctcagatattgtcactgtaagtgttgatttgtaatttcagtaatgtaatccacaaattaatgtgttaggttgtttatagctactggctttaagccatattgaattttaattgcattttaagagggagatccctgattaaaatttggtagagcaagcataacttgacggggttggtactactatgcttcatttagtaattatttgttatagtgattcagagcctttactctttgaagtttgtattatttcatggagaacttatttctgctctttcaatgattgtttaatggataaaatatactccagatgtaatgattgggggaaaaatataattccaaatattttttctgagcagaaatccccctttgtaggtgtacaacgttctctcgtaagaaaatagaatgtgtcacactgaaaaaatagttacataaactaagcattaaataagatgataaataatatttagtatataattgatgtatgagtttttaaataatttaacaagtggaaatgtga

SEQ ID NO: 123459 - DNA, 1089 bp, Homo sapiens
gctggtctcgaacccctgatctcagatgatctgcctgccttggcctcccaaagtgctaggattacaggcatgagcgacagccgtgggccagatatgtatattttagatgtaggttaattcccataagaatacaaagagttgcctttgaacatccaactgcttgatccctaaaagtcattactgtagtttgagataaatgtggggcattattaaacaatattccttttgtatctaattcagtgtatatagaactttgatggcagtagtttctagatttcattattctaaaggaaaaaggagagatttattcttgtagaagggtgtgagtcagaatttaaagatactcttgttgggaagaagtgctaattccttagtactttgctttaatagtatcctcatttctgatgcctagactctgtcagtcaaccagcagtggactacagctcactaccacacaggccctggcagtccttcctatagcagtgcaccatgtacaggtgttgtgtgcaacaacccagaaatcgttacagttggagaggatggtcgaataaatctcttcagagctgatcacaaggaagctgtaagaaccataggtaagaaaaatcccagcctggccaacatggcgaaacctagtctcttctaaaaatacaaaagttaggctgggtgtggtggctcaccccggcaattgcagcactttgggaggccgaggcaggtggatcacctgaggtcgggagtccgagaccagcctgaccaacatggagaaacaccgtctctactaaaactacagaatttgctgggcatggtggcacatgcctgtaatcccagctacttgggaggctgaggcaggagaatcgcttgaacctgggaggcggaggttgcagtgagcagagatcgcaccattgcactccagccagggcaacaaaagtgaaactctgtttaaaaaaaaaaaaagaaaagttagccaggcgtggtggcgcatgcctgtaatcccagctactcaggaggctgaggcaggagaatcgcttgaacctgagaggtggaggttgtggtgagctatgatggcactctgcagtcccacctgggtgacag

SEQ ID NO: 123460 - DNA, 1049 bp, Homo sapiens
gtgcccacactggctatcgacgagaattgactctctgcagccaccgtctccgtcctaaagtcccatccaatcagggttccgcgggaagaggcggtgctgagaggcgcgtactgtgcttgctttttgcagtacctgctgcggccgctttcggcatggaggaaatttatgcgaagtttgtgtcccagaaaatcagcaaaacccgctggcgaccgctgcctccgggaagtttacagaccgcggagacgttcgctacaggatcttgggacaatgaggtatcgccgctgatagggacgagcccctacctcctccctctctccggttgagctgacccctggccttccgcgcgccaactcccaccttctggttcttctcgcacttttaggtcccccggacccctgtctcaggcgcggttgctccgtagctcagagccggtgatggcatgcctgagcctcgtatctcgttgtgttttaaactcaccataccatttgagatgttttggagcaacatttccggacgggagcacaacttttattttccgagagttgacgtttatgtcatctcaagacaaaactttctgttttacaggaaaattatatttcactgtggtctattggagattttggaaacttggactctgatggagggtttgaaggagaccatcagttattgtgtgatatcagacaccatggtgatgtaatggatttacaggtaaatctgtgtagcatccaaaagctaactttgaaagtcctgagtaatacatttaaacaagcagagcatcataaaagttgtctggtgtcacccctcgtttacagaaaactgagtgctctgtaagttatgatttgcccaacatcatttagccatttagtggcagaaaaaggactgggaaaggggatgtagatttaatcatacttttttattaattgactgtcgactatgtgctaaataccgtttggggagctttacaaaaattaattattgttgcatgccagtgaatcaagtatcgttactttgttttactaatgagaaaattgagactaatatatcttgag

SEQ ID NO: 123461 - DNA, 1285 bp, Homo sapiens
ggagtgcagtacaggtgatgctgctgtcactcaggtccgcgtccgggtccggcttgtgaggggcgtgccttcggggtgggagcgtgtgggctaggccttatggagagtgggctggcgctcaggagaccccaccctcgtcccctgcatttttctcaccttcctcctccataatcaacctcgctgcaagctttccctcttatgcagcctcccccgccctccgttttttcccctggagggagatgccaccgtctgatacaggcgaggggaggaagatgagagtattgccattgcagatgctgggagaaatttctcgggcggctgtccagtggaaagctccgtgcggggcggagaaagaacaggggatgctgttcctgagagacttgtatttcaggagcctttgcaggtcctggatcagcagagggttgtgtgtctgatgttctaacttttttcagggctaccataggctttaaaaaccttatgtggagtttctttatatcactctccttagttactgtattccttcttctgatgataattttaggataggatgagtgctgtgtcactttctttttttaaatcgaaatatagcgtccccgttttgttgggagactacaagggccgcagtctataataaactcactggtcagaatttatagcattattcgctactatgcagtaatcatatcttgtcacatggtatttttaattgtcctgtgttacttagcttttcatgtgtttgtcttatttctcaactcgatttgtaatttccttaacggctggcaccattaaaaaaaattttttttggccgggctcattggctcacgcctgtaatgccagcactttgggaggccgaggcgggtggattacctgagttcaggagttcgagaccagccaggccgacatggtgaaaccccatctctactaaaaatacaaaaattagccgggcgtggtggtgcctgcctgtaatcccagctacttgtgaggctgaggcaggagaatcgcgtgaacccgggacggggaggttgcagtgagccaagatcttgccactgcactccagcctgggcaacaagggaggaaactccgcctcaaaaaaaaaatttttttttgaattttctctaagaatttaacagtcatccctttttttcataaatgcccattaaatgtccgttatatgcctaaatctgtgctagacagacaaaggtaattgagagaaattaggagtactgtttggcacatggttggtactttttttttttttttttttttttgagacagagactccctc

SEQ ID NO: 123462 - DNA, 1041 bp, Homo sapiens
catttgtcattttctctacaaaaaataaacaaaattagctgggcattatggtgcatgcctgtagtctcagctacatgagctacgtgggaggctgagatgggaggatcacttgagcccgagaggttgagggtgcagtaagccaagatcatgccactgcactcgagcctgggtgatggagcaatactttgtctcaaaaaaaaaaaaatgttgagtatctgtatgggctgtatgggctttggtattgtatgcggtttcaggcatctattaagggtcttggaccgtatttcctgtgggtaaagggaaactactgtactgaccactgaaagcaattgttcttttatctatttttatttgtaaaaataattcagtccattcccctaatgatcaattgtttctacttatgtttcttttgcattcttgattttgtcattttacatatataatgtttatggaatttgtcatttagtcagctgatattttagtgctttctatatgacaggcactggggatacagcagtgaacaaaacaaacatccactccctcttgtagcttctaatgggagcagccaagtatagtatgtcacatgataagtgacaaagtagggagggaggacagagtgtgtggggcagtaggtttatagttgtagagaaggcctcagtaaggtatcattagaccaaagatttgctggaggagtagacacatatcacgcaggtagacttgggataagcattccaggcagaagaaatagcgaattccagatttggatttaggatctgggagaaaagattggaggcaaggatccaacaccaaggttttaggccttggcaactggaatgatttgccattttctaaattggaaatggtgagtgagtgagcagccacgtttattctgtgaggaggggactgtgggagatcagattattttgaggaatgcttttcttataagacatttaagtcgagatttttagtaggcatttgaatatgcaagaattatgatttgtagtttttatatcctaaaagcatttacttttgtaaataatg

SEQ ID NO: 123463 - DNA, 1109 bp, Homo sapiens
ggcggatcacctgaggtcgagagttcgagaccagcctgaccaacatggagaaacctcatctctattaaaaatacaaaattagcctttgtatttttgtatttgcttatatatgcaaagaatctattccttcctttttggaaggagtcacaagaaactagtaatattggttacctttacagagtgaaacctggatggttggaaatgggagtagggtggagacttttcacttataaatcttttaatttttttactgaattaattaaaagttaaaaattcacacactggaggtctaaaattactgaaacacatgatctgaatgtaagaattctaatcaaacagtttacttaagtaatacctgggcagatagccaagataacttggttatcttggtagatgacaatagtagaaaaattggtagaaagttggcaactttatttatataccatgatgtgtgtactttagtcttaatgaatattttgttttcttttggcagcatgcatatgcgctagaacttctatttgatcagttgcatgaaggagctaaagctcttgatgtaggatctggaagtggaatccttactgcatgttttgcacgtatggtaagagttttatttctcactctggccccaacagaagaatattatatgatttggctgtatgtttttttaactagtggttttcatgtttatttgtttgttaattctattaggatagcagttggaatgagcatcacttaggattttgttgttgttgcaagtgacagaacatgcaacccaaactggcagagctaaaagggagtttatttagttcatataacagaaaagtctaggggtgtatacggtctgttgtgtggctggatttagaagagcagatgttgttattgacgatagggttctctctgtttcttgatttggctttactttcctccacatgttggtgtcattatccggtaagctctacccttgtaatcacaagatggtggccagtagctcccaaactaccttcttccaagttctgatttggcagaaaagaatagaataagcctggttttcttttcttttttttttttttttcttcttaaaaacagaggttttattgcatttggtccac

SEQ ID NO: 123464 - DNA, 1024 bp, Homo sapiens
gctactcaggaggctgaggcaggagaattgcttgaacctgggaggcagaggttgcagtgagctgagatcgtgccactgtactccagcctgggtgacagagcgagactctctctcaaaaaaaaaaaaaaagaaattcctccctgtcaaattctttatgtaacattttaatatttaaagttatactttagatggaatttaaataaaaaattattgtactactattaaatattggtaattttcttcaaagttctagatttaatctaagaaagatataatttttcttagtattacaagttttattcaatgagagtgatagttgagaaagttgtatatatggtaaataatttatgataaactgagtgtttagcaatctatagaagccttaagctatttttgttttctctttgtagaatatgactttcgataaggaaaaacttcaataatactttagaaaaacaaatttagcccaatgagctactgaattgttttctcttttccaggttggatgtactggaaaagtcataggaattgatcacattaaagagctagtagatgactcagtaaataatgtcaggaaggacgatccaacacttctgtcttcagggagagtacagcttgttggtaagtatcagaaaactttaaaaatttcttcagaggatttttattttcagaagatccaatgcaagctaaataatactcagaggtaattattgtatttttttttacaatcacttttaagtactaaaaaataaaaacgattatttttgctcacctagtgtgtattttgcagccatctctttgtgagtttaattttgtattttcctattaacctctgagattgaattttttgtaatgtgtctgaccattaggattttgtcttttgtgaagtacctgttcagatattggattgcttgtatttttgacttacagggcttctagccctttgtctatatatataaatacatttcttctcccatctgaggtgtgccttttcatcttattggtacccttttgataatagaaa

SEQ ID NO: 123465 - DNA, 1061 bp, Homo sapiens
cacatcaccaagatagttttaggtttgcaaatctccatctctttcttttaatacattccatgcactatttcacaaaatgcttctgaaggaactttcttaaatgattaagatgtcttaaaatgtcttaaaatttaatgtattaaaatgccatttttgtcatccaaaaatgaaatgagggaagagacagatagtaggaaaaaccaaaagaggaaaccacatagggcatcttaatcaggcagaggcatggaagtttgcaggattgttacaaagggaagggcctggatggaagctgtgcagcaggcctggagaataaccagctcagatttggagcaagaggaggaaaggaaacaatgattggatacttcttgactcagcagcaaatcatagttacacagtcataactagaaatgattttaataaaaaatgattggttggattgggggaaggaagcaaaatgtagattaagggagttcaatccttatctagcgtatgttttgaaatataaaggtaaatactagaagacatagctaaaaggatttgaaatgactggatttagagagcaagggtggggtagggagaggaagtcagctgtttttcattataagccttgaaattgagaaaaacaagaagatagacttgcagacaaccaaaactttgattgagggcaccctttcctgaggtaataaatatccaaagtaaggtttctggctgggcatggtggctcatgcctgtaatcccagtactttaagaggccgaggagagcggatcacttgaggttaggagttcgagaccagcctggccaacatgttgaaagcccgtctctattaaaaatacaaaaaaaattagtcgggctcggtggtgggcacctgtaatcccagctacttgggaggctgaggcatgagaattgcttgaacctgggaggcggaggttgcagtgagccgagatcgtgccactgcactccagcctgggtgacagagcgagactcagtctcaaaacaacaaaaaactacaacaaaaaacaaaacaaaacaaaaaaccagagtaaggtttcttctttaatgt

SEQ ID NO: 123466 - DNA, 1091 bp, Homo sapiens
aggttaggagttcgagaccagtgtggccaatatggtgaaaccttgtctctactaaaaatacaaaaattagctgggcatggtggcgtgtgcctgtagtcccagctacttgggagactgaggcaggagaatcacttgaacctgggaggcagaggttgcagtgagctgagatcgtgtcattgcactccagcctgggcgacagagtgagaccctgtctcaaaaataaataaataaaataaaataaaatctgtaacttggtgatgtatgtgcttttttttttttcttttagctaatagatcagttaaagcccggaggaagattgatattgcctgttggtcctgcaggcggaaaccaaatgttggagcagtatgacaagctacaagatggcagcatcaaaatgaagcctctgatgggggtgatatacgtgcctttaacagataaagaaaagcagtggtccaggtggaagtgattttatcttctgctctttcttcttccacacatgcaaggtgaaagggtgtggattttaagacattagactacaagagctgtttttggttgtcacctttatgctcctccattataacgtcagaaattcattacattaaaaatgtgaaaaatgttgcatggtctgcccttattttggtttaacatatatatctttgggaaagggagggtgagacttggttggcacaaaggctttttttgtttgtttgtttgttttttttttagagagactttcagcttcaattcagtactttgtaaggattttttcttcattatcagccactctgtttttatgtttttaaattatttttatagcactggatgggcatggaaacaatgagtttggtctgtaaaagaggccaggcggagtggctcatgcctgtaatcccagcactttgggaggcctaggtgggcggatcacttgaggtcaggagtttgagactagcctggccaacatggtgaaaccccgtctctattaaaaatacaaaatcagctgggcgtgatggcacaggcctgtaatcccagctactcgggaggctgagccaggagaattgcttaaaccctggaggcggaggttgcagtgggccgag

SEQ ID NO: 123467 - DNA, 1045 bp, Homo sapiens
ttagtttgtgaaactgaggaatgttcaagtttattattccataagctctttgtttattgatgtcttcttaaagtgccttgcatctatgaaaaagatgttaggaattgactgcatttccaagactgacagtattggtgctaagggatccaattgatcccgtgttccatattctatattgttcctttttaatctctttacatatgttccagtattgtgacatacattacatccttaaaagcagggatatattctgttacttttggaattctttttgtctctcatagtgcttcgtacaaagcaaattgtacaacacttttattaccttggaagatccatgaaattattagaaaacgttcatggattttgattgttgtttccttatagtatatcttttcatttattcttggtaaagaatgtataagactaaatgttagtatcatagagttaataaaatctaataaataattaaattatgtataattatatactagtagaaatatatacagttattaacctaatgaatatatttagcatagtatatagcaattttaaagagcctttctaaaaatttagtacatactattttttattgtaaatgatctatacatgtaagtcagataaagaaatggtcatacagaattttgaacattggggaaaatttaataacttgaaagttacatggattttagagtattaggcttttaaaaaattgtgcacgcgctggcagcaagtttttgtttttccctagcacctctaattttaaaattcaggtctataaacctaatttcttttccttttttaaagtattttttagacagagaggatagttggaaaaatggtacctatgttgttgagggggcattaatttatttacagtatacttaatgtcttgcagcaggtaaattgtagtaaattattattattattattgttttctgagatggagtctcgctctgtcgctcaggctggagtgcagtggcgtgatctcagcttgctgcaacctccgcctccctggtttaagcgattctcctgcctcagcctcccg

SEQ ID NO: 123468 - DNA, 1034 bp, Homo sapiens
aaattgtagtaaattatttaaaaataacaatatctttggcttgggcatggtggctcacacctgtaatcccagcactttgggaggctgaggtgggcagatcacttgaggtcaggagttcgagaccagcctgagcaacgtggtgaaaccctgtctctactaataatacaaaaaaaatttagccgggtatggtggtgcctgcctgtaatcccagcgactcgggaggctgaggcaggagaattgctggaacctgggaggcagaggttgcagtgagccatgatcacaccactgcactccagcctaggtgacagagcgagactctgtctcaaaaaaaaaaaaaaaaaaaaaaagccaaaacaagaaaaacaatatcttcagttcatattctaaaaagcagaagtgaattttactttatgaatagagcactttgcaaataattctttgttgaccaaatattttaatgcctgcatgagttaagtaaaagctgttctatgagaattataacattgttatttggaagaatatattaagaggaagcagacttatgatttgtcatttaatagataatccaatactataggataaaggcagcttattggagaaatgattttaaaaatattttcttgcacaatttacaaaatttagtttaaaaaaattgtccagtaatttacccccacttacttgtgaaattatgagctctttatttcttcttcccttcaaatttatcttaacaactttttcaaaacttttaactttaatttttattgccaacaagttgctaggatagtacaaataactcctaaatctcttcatccagagtcatcaattattatcatttttctacatttctttcccctctttctatatatacatatatgtaatttttttcctttttcttaaaccacttgagacttaattatcaatatcatgcttctttacccctaaagttcttgtttttgtcactcacattaccttcagctatgaggcttgtgggcttctctcgtggttttattcattttttcacttttaacagtttt

SEQ ID NO: 123469 - DNA, 1589 bp, Homo sapiens
caggtatattatacctacagatgatgccttttctctcagagcgcttgggttgagattgacccactccacaattgctagtggacattctgagcaaaagaccacatttctgtccaattttgtgaatgtaactatcaactcatttgaactctaaaacacttaagttgtcattttactatagtgtaaagatgaccgtagatctaaaagatattttttctgaattttgacattgaaggaagaaatctatttttagaaatcaaaaatgaagaactcacgccctttaggttgcatacttggttctggagtggcatggaagatgtttggaatggctgaccctctgttgctttcacttgggttgtttgcatttttattttttaaatatattgcttggtgatcagcgcatttttattgacttaatagttgtgtctaaactattataaagccaaattgggtagtgtgtaactcctactaatgtatttctctcttttttcctcacagggatgaattgtaaaagcaacatcagcttgaccagtataaaattacagtggattgctcatctcagtcctcaaagctttttgaaaaccaacaccatcacagcttgttttggactttgttacactgttattttcagcatgaaaatgtgtgtttttttagggtttctgattcttcaaagaggcacagagccaaattggtagaggaaggatgcaaagtataaatttgtgtaatattactttaacatgcccatattttacttggaaatattaaaagaaagggttctgtaaaatggaaaacttagtttgtgaattgattttgaggagtggtttttcttttcttggacacttaattctgttctgatattaatttatcagattgcttttgtgcattggataacaccaccattcacaagttaagattcttggtatttggatatctgttagatgctactaagaaaatagagatgagctttctttttaaagcttttgatgtggtgtcatagaatagcatgttgtagatacaatcagctgctttgttaccttaaaactaggcatttgtaaatattaaaccataagatggcaggtgatgtcctgtaaacactcagctgttcagattggacataactgacttagttcttcccttctctctctctcaaaattataggagacttgtagtttagtgtggttttctgtttctaatttgctgctgataatgtatatgaacttaacatgctgtgtaagctgtgtcctagttcttgaacagtttatgcagtgctgctttgccaaataaagttaaaagtaaaagaggcattggttgtttttgaatatagaaggaagaacagcaagtccaccagatagggagtgtttacgatcatgggaaaaagactgtttctctggttgtttccttttgcgaagtctgagtaagtaattagcattaatccaactgtacattgtagaatgtgactacactgctccagggccaggaccgtacttcagtcgtcatttctctttgactccctagcccagggcttgccctgtagtagctatacagtaaatgctggtgagtgagtgagtggtgaatgaatcgacttaaagtca

SEQ ID NO: 123470 - DNA, 1070 bp, Homo sapiens
tttagtagagaggggtagagaggggatttcatcatgttggccaggctggtcttgaactcctgacctcaggtgatctgcccatctcagcctcccaaagtgctgggattacaggcgtgagccaccgcacccagcctaaaagccatttgtaaagaagtaatatttaagacttttttcaagagctggggggagtgttcacatgcccacgaaggttctttgccagaattacgcacccacacatgcacccagtagaagggctttgctgggagtgctgattctgctcattctggagcttatatttcctcagttccagaactacttcttataaaagttataaatcacaacatttaaataagatcccaaagtgctactgccttcttagaaattcagctatagtcattatattaataaatctttgtataggtgagagatgggttttggtctgttcaccctcaatcctgttctttcctgactttaagtcgattcattcaccactcactcactcaccagcatttactgtatagctactacagggcaagccctgggctagggagtcaaagagaaatgacgactgaagtacggtcctggccctggagcagtgtagtcacattctacaatgtacagttggattaatgctaattacttactcagacttcgcaaaaggaaacaaccagagaaacagtctttttcccatgatcgtaaacactccctatctggtggacttgctgttcttccttctatattcaaaaacaaccaatgcctcttttacttttaactttatttggcaaagcagcactgcataaactgttcaagaactaggacacagcttacacagcatgttaagttcatatacattatcagcagcaaattagaaacagaaaaccacactaaactacaagtctcctataattttgagagagagagaagggaagaactaagtcagttatgtccaatctgaacagctgagtgtttacaggacatcacctgccatcttatggtttaatatttacaaatgcctagttttaaggtaacaaagcagctgattgtatctacaacatgctattctatgacac

SEQ ID NO: 123471 - DNA, 1046 bp, Homo sapiens
tcaccatgttggtcaggctggtctcgaactcctgacctcaagtgatccacccaccttagcctcccaaagtgctgggattacaggtgtgagccaccacacccggtcgagggtttcaactcttttccagtcaataacattagaagaaaatgacattctgggaggaaaataatccattaacattgttcatgcaagtgttttaaattccactgccctaattttaaatactgccattgttcaaaaaaagttcactgtgcagtggtgcgatctcggctcactgcaacctctacctcccgggttcaagtgattctcctgcctcagccttccacgtcaccatgcccagctaattttttgtatttttagtagatacagggtttcactgggttagccaagatggtctccatctcctgaccctgggatctgcctgccttggcctcccaaagtgttgggattacaggcgtgagccaccgtccctggcccactgaacttttaaaattggtatataatgtacctctattaaagcatcttaaaaattcaattgatctaaaatagactgacatctttgagtaataatgctcatgaatttttgaagctattcttggtgtgtgattgtcagccaggaaacagctgcttagttttgtttcattagccaggtgggtatttttggttttcagctaaatgttaacaaattttcaatagtttgatattttactaaaatatatgagtatggtaactgaacactaatattgtaaatgaactaatggattatttttagtgttctaaatggggttcagaggctaatacattattttaggtaagtgctaacattcttctaggtataaatcattgcctacaacttattgtgttcttaaagaactgaacagtaaaacaaatgggttctgattggatttcagttggatctctggattcctctgaccattttccagaaagatgagtgttgtgttctcactgaacctagcacgtggctcaaatagagggctggtgaaagaatcccacttgaagaaaaccagctgacccaaggggccaag

SEQ ID NO: 123472 - DNA, 1016 bp, Homo sapiens
aatgctgtggaaggctggaggagtagctgctatctactaagaatgaaaggaaaaagtaagttttaagtgttcaggaggagttagtgagccttaggaaaagacatgtaaaacacaagaacatgtttaagagagaaattgtggacacctttccctttaaaattatgtttccattgtcttagatgcagaactccttcaatcagataatctacaggtaagaagatcacttttaaaagtcacattcagtctacctgatataaatattttgtagaccttgattctccttccctcgagtatgctttatgtggccctgggcatgtcactttctctaatactcaatttcccccgttgtaaaatagggttggtatgattgaatccaaataatgcagtaacagctcagtcaataatagcaacttatgattatattaaaaggaaaaaaaggcttaataataaaatacaatttattaaaggaatcatgtttacatagatacagaacatcttggatatttcaacaccatagcaacacaaaattaatttcttcatgtataaaagatgtgctgaaagctgcatgcctcatcagtttttattttattggttatggctatagttgacatctttccatataaaaacaaactgcacagcatcacatatagagtacagacatcttaagttcattcacaaagttaatttttctaaactgcccttcaaaaatttacatctttgctcaattctaaacattcaacaaaattagcttcccaagaaacaaaaatgatacccaatttctttgcttttctagaagtaactttccatttgttcatgtattttgatatgttatattccccacccgaattaaaccctttgttaaaagaacaacctactttaggttcagtctaaaaataaagcgtactagattctggagtgtttttcaaatattttaaaatatttgccacttatggttaaaaaaaacgtgaataagaatatcatgtgagtgtagataggcaccatactatacactcctc

SEQ ID NO: 123473 - DNA, 1430 bp, Homo sapiens
tctttccaagtgccctagtgacaaagacagaaaacaacagaaatgagggaagggtgtaggaagtagaatatttactaagtggaagaagaatacaataatttctttaattttggttgattttaactaggaagaaaagactttggaaaccatcctttagaaaggcaggctttagtcttaaatcccacaaactagtaaaagaagctttagaagaacaaaatataagcttaagttataaacattgagaaaactttctttttaccctatttataatatcaggacaatattaaaatataatgtttaaacaatagatagctaagaatactccagatgtcaagtacctgggtgacccccttggtctgctggcctcctggacttagcctgtcccaagatatttgaataaaaggggccctgtcccctatcaagggaagagggaaaccagcctgcctcttgcctccccacacatatgtatccagagagtctcagctctagttggctgttgcctattctggttgttacatatttttgttttgttttgtttttgagacatcgagtctcactctgttgtccaggttggagtacagcggcgcgatctcagctcactgcagcctctgcttcccgggttcaaacgattcccctgcctcagcctccctagtagctgggattacaggtgcatgccaccacacctggctaatttttgtatttttagcagagatggggttttgccatgttggccaggctggtctcaaaacttctgacctcaagtgatcctcctgcctcagcctcccaccatgctgggattacaggtgtgaaccactgtgcccagcctgttacatattttaaatgtcacccccattcatatgaacagaatacataattcatcaccctagctggttactgagaatagcatcatggtgtgttttagaaggagctagaaagttgtaaatctcaaattatccaaactaagccaactaaatattaaaagtcaagaataattttcaatattctggcaagtacttttgggagatttcattttccttgtcataaaagcattaaacaggaatcagatcagacagttcagcagcctcatatctgacttagcaaatagaacattttcccagatctcgtctgttttattgttaccatagctaaacctgagccccggcattgggattggcatcttcaaccacagcttcataaccctttagcctaaatgctgatgctcatctttaagcaagtcccccggactggggctgggtgttgcggtccaattcatgagaaatgatttggggttcctggggttttctgtgggtattgaccaaagtctctttttttgtcctgttcctttgtaacatatgcaacttataggaaggtggagggagaatgacaccttggggccacttagccttgtcagaacttctttcatcaggtgg

SEQ ID NO: 123474 - DNA, 1023 bp, Homo sapiens
tagtcaggcatggtggtcccagctactacgcctatagtcccagctactcaggaggctgagatgggaggatcatgtgagtttgggaggctgaggctgcagtgagctgtgatcgcgtcactgtactccagcctgggaaacagagtgagaccctgtctcaaaaaaaataaaaataaatctcattagccttactttttttagtgatagatttagttaaattggaggcataacgttgaattactagcacatgcatctctttcaagacaacttgtttaaatgttcacttgcttgggtgaagaggatttacacaaatacataatggttatgctgtttcatctcaaaacaacctaaaatttaacactttgggtattggtttacgtaagctaagtgttaatgtatttacaaataaatgtattagtgtctctggagtaggtacatgagtgtatttagtaagtgtcccttactacaaattagtgcaaatgtcaagatttccccccgcctttctggccaaattcttaattttaactcttatttcaagatacttccttaacactcttcaaacataaacttaattgtgagccaagtttggctacagaaaacaaggttcttcattgagaacccaccgtgaatccttacctggcatcacaggaatgatttgactctctggtccccaaaaggcggaatgattcctcttctctgtgtttgataatgcaggtggcttgtttggggcagtggctttctgagacttttccaccaaggagtcaccccctgcatcttcactcggccctgtggttcttggcagggcaggactagctgccgtgtgggttaccatcttgcggtccaggcccactgaagtgtggaagagctactgttagttgctggatttcttttctgagctttaatactaaaaacactacatctgcagctgatttaaaatcacggatatttggatgtaacagcccactcatctaagacatgtcagaggaccataaaaatctattctcacgttttcaaatgggtaatctg

SEQ ID NO: 123475 - DNA, 1045 bp, Homo sapiens
accaagatagactccttttccaacctcttgatttaaccacgtttcaataaaagatgtgtccaaggccgggcgcagtggcttacacctgtaatctcagcactttgggaggctgaggcaggaggattgcttgagtccagtagttcaagaccagcctgggcaacatagtgacaccctgtatctacaaaaaaaaaaaaaacaaaaaaaaaccaagtgtatgtccaagatttcacttgggtttgtgaactgtgctcagccatttggttttgaaggaatatcatataatctgccacttccccatgttcctgagagaattgtctagtccactctgtccctgtaaaaccgtggagctcctgtgacctgcttctagccttgtgccttagtccatgttgccagtaccagatagtcacccggttctcctctagctaagtctaataaagttggcttaatcaagggagagggaaaatgcatttcaggaaaatatttgtagctcctatgaattgcactgcaaattaaaagctcctaagaactccagaagggagaaatgtcgttatttctttctttttttttttttttgagacagagtctccctctgtcgcccaggctggagtgcagtgtcacaatcttggctcactgcaacctctgcctcccagactcaagtgattctcctgtctcagcctcccgagtacctgggactacaggtgcatgccaccaagcccggctaattttttgtatttttagtagagacggggtttcaccgtgttagccaggatggtctcgatctcctgaccttgtgatccacccgccttagcttcccaaagtgctgggattacaggtgtgagccaccacgcctggccaatgtcattatttcatgaaactaaattcatgccagcccataactaaattttgtttattctctacagtaccagggacgttatgataatcaacaaataggattcaatagtaaaaacttaatctcagtgaaaagtattacttaggagacaagaatgtaagacatagcatatgtaaaatagtacctctgggccag

SEQ ID NO: 123476 - DNA, 1048 bp, Homo sapiens
aagagatgctcccgcttctcttgactcgacttcatcaaagacaattgcttggctattctgggagaggactttgtttacagatggatggtccatttgctgcatctgttccaagagggaagctaaggagtttagtgaaaccagttgaactcgtggaagcagagagtggaatggcggttactggaggctgtgcgggggacggactgggaaaggagagacgctggtcaaagggtacaaagtgtcactgagaccggaggaacaggttctggtgatctgttgcacagcatggtgactatagttaatgataatgtattgtctgtttcaaaattgctaaaacagtaggttttaaatgttgtcatcacaaaaagattacaagtaggggagatgatagatatgtcagttagcttgatgtaatcattccacaatgcaaacatatatcaaaacatcacattgtgcctcataaatatatactctcctcttttgtcaattaaaaatacatattaaaaaaacaaggaaaaggcataccacaggattgaagaaagacttggctcttgggtgtaatcaattgctgatataataagtcacttcaaaaattttagaaagagaaaaagagtgcagctaaggagtacggttaaaattaattgaaatacgcaaaggacccatcaatttgaaagtgctacctacacattttcatagacactttacgcagatgcagttatattaataatataactttaaatacatatgatggttctcacattctgttgtacaatgtaacaatgtaaaacttatttcattcatctatgtttcttacttttctaaacatctacattttttttttgagagggagttttgctcttgttgcctaggctggagtgggagtgcagtggtgcagtctcggctcactgcagcctctgcctcctgggttcaagtgattctcctgcctcagcctcccaagtagctgggactacaggtgtgcaccaccacgccctgctaattttgtatttttagtagagacagggtttcaccatgttggccaacctggtctcga

SEQ ID NO: 123477 - DNA, 1041 bp, Homo sapiens
acgaacccactgtgtgatgcagctactgacacagttcatgtaacgaagctcattaatagaaggagaggcaatatctggatcacagtaggtaatgaatgagtcagaaaaccaaagcttaaatatggggttcaattaggggtattagatgttaagaagggtatggattaatatgagaaaatccagacaaggcaggatagtggcgggcctgaaaaatcaattcatatgaggaacatctgacaaactgtggggtgctgagttctgagaacagcataccaattggtgatgttctttctttctttctttctttttttcaaagacttccaaagcttttacacaggataaaaagatgagttcagtgtttttccaaagggaagacccaacaccaatgcacagaagtaaggggaggcgtagcctgcttgcccaacacagtgatgagtaatgtcatggacatgatgtgaagtagtgagcttctgcccttggaaaagtcagacagatggcagatgagccttggaaggggtgttgtggaaggcactcttgtttggaggagaggctgggaaggatgctgggtgtattagtccattctcacactgctacaaagaactgcccgaaactgggtaatttacaaaggaaagaggtttaattgactcatagttccacatggctggggaggcctcaggaaacttactagtataatcaccgcagaaggcaaaggggaagcaaggcaccttcttcacaaggtggcaggagaaacaaccaaatacttataaaaccagcagatcttgcgagaactcactcactatcatgagaatagcatgggggtgactgcctccataattcagtaacctccacctggtctctcccttgacacgtggagattatggggattacaattcaagatgagatttttgggtggggacaaaggcaaaccatactggacgagggtgagtccaattctaatgcaatataatcagggagtaaaatcactcttacttaaaccagtgatgagggacttccagatttgtttttgttttggttccagta

SEQ ID NO: 123478 - DNA, 1055 bp, Homo sapiens
ggtttggatgcagtttatctgcctaagccaggaagtgcttatttgcctaagccaggaatccaccctgagagggtgaataaaaagccacttgtctcaccacccaagacttcctgagcataggcagccaccagccacatggctgatttccatcggcggctatcccaggagccccgggcaggagccccgggcaggagcaccgcatgctggcctccctccctcacaggctcggtgtgccccagcagacctagctgccaggtaagctgtctactttccggctcatgtgaaggataagttcatcctattgttattgtcctctttagactcctttgtagtttcaaattttctacctggatcttgagctcagaaaaagaaatagaactttaaaaaagtaatctgagtcattaaaacaaagcatgagccttcttccttgaagtgtctttgtcctctagacaagtcacaaacagcagctagaaggagggtaggctccaagacaaatgatcgagattgctgctcactctcagcagaaaagcacattgagataataaaccattttggcataatcagttttatacagtctccattttatgccttctgctagcgtacagacatttagggagcatgaagtggcaggacattacaaaagaccacttcactgaaatactcgtttttgttagcagtgacaacatgcgttaccttcatgtccactgacgggtccccctgcagcagtgcccactcatactggacgatggcgtggtcatctgtgctctcgcggccgtctagaaccaccccgtctgtgggcagatgcagaaccacatcctgcccagccttgctaagtggaggcgcatccttttctgagaaagaaaataaataattcataaaagatgatttcttattttttctaatttatggagaggtatcttgtttgctgaatagatatgattcggcaaataactgctaagagaatccatattaaatggaaattatttttctatttattttatgatcgtggaatttagctataatatgcgcagaagaggctgtgtggagtgttggct

SEQ ID NO: 123479 - DNA, 2077 bp, Homo sapiens
acaggcagcctacagaatgggagaaaatatttgcaaactatgcagccaacaaaggtctaatatccagaatctgtaagaaacttaaacaattcaacaagcaaaaaccaaataaccccatgaaaaagtgggcaaagaacaggaacagacacttctcaaaagaagacatactaagtgtccaacaaacatgaaaaaattctcagcatcactaatcatcagagaaatgcaaaacaaaactacagtgagataccatctcacaccagcctgaatggtgattattaaaaagtcaaaaattaggtggattgctgggcggacccgtcacggagaagagaggagagtcgcgggccactgaataagcttccaaaatgatgcccacactagttatcctgttgaaagaggggactgatagctcccaaggcatcccccagcttgtgaataacctcagtacctgccaggtgattgccaaggctgtaagagccaccctgggtgcctgtggcatggacaagcttattgtggatggcggaggcaaagcaacaatatctaacgatgtggccacaattctgaaacttcttcatgttgtccatcttgcagcaaagacgttagtagacattgccaaatcccaagacactgaggtcggtgatggcaccatctcagtgaccttgctggctgcagagtttctgaagcaggtgaaactgcaggtgaaggatggtttacaccctcagctcaacattcgagctgtctgcacagccacccagttggtagttaacacgatcaaagagattgctgtgactgtgaagaaggcagataaagtggagtagaggaagctgctggagtagtgtgccaggaccactctgagctccaactgatctcacagcagaaagctttctttgctaagatggtggtggatgcagtgatgacgtgtgatgatttgctgcagcttaaaatgattggaatcaagaaggtacaggatggagcccagctggtgttgcatttaagaagactttctcttatgctgggtttaaaatgcaaccctcccaaaaataccaaaatccctagattgcccttttgaatgttgagctcgagttgaaagctgagaaagataatgcttagataaaagtccacacggttgaggattatcaggcgattgttgatgccgagtggaacattctctatgacaagttagagaggatctatcattttggagccaaagttgtcttgtctgaactccccactggagatgtggccgcccagtactttgctgacaggaacatgttctgtgctggccaagtacctgaggagaatctgaagaggacaatgatggcctgtggaggctcaatccagaccagtacgaatgctttcttagcagatgtgctgggtcgacgccaggtgtttgaagagaccctgattaaaggtgagaggtacaacttttttactggctgcctcaaagccaagacaggcaccttcatcctccatggtggtagtgagcagtttattgaggagacagagcggtccctgtgtgatgccatcatgatcatcaggagggccatcgggaatgagtcagtggtggctggtggcagggccattgagagggagttctccaagtacctccaggattcctcaaagactattccaggaaaacaacagctgttgattggggcatatgccaaggccttggagattgtctcattccagctgtacaataatgctggctttggggccacagagattctcaacaagctgcaggcatggcattcccaggggcacgtgatatgaggtggacatcaacaacgaggacattgctgacaactttgaggccttcgtgtgggagccagctttggtatggatcaatgccctggcagtggcctcttaggctgtgtgcctgattgtgtctgtggatgaaaccatcaagaatccgattgactgtggatgctcccccagcagctagctggggccgtggtcgtggccgcccccattgagaggcaccccgcctatcacatgactggctggcaggctggctgcagggtgtgcttactctccttggtttggttaatagactttacaaggaaggggtagtcactgg

SEQ ID NO: 123480 - DNA, 1146 bp, Homo sapiens
actgctgaagatcctctgccatccaggcccttcctcctctcttgctagagaggcctggcacctttctagcaaggtcacgtgttgactgatgtgggcagaggggcagtgggacatgtctggggacatgtggtttctcagcagacagagacttcctcctcctcctcctccttgtcctcatgcaaggggcgagcactcgccttaaacttgtagacaccacagttctggagggggcactccttcctgggccagcccagcctgccagaggcatcctcttattgacacagcgtggaggggggctaactaggggtcttttcctccccacccacccctcacctgcctttctccacagaccctcactctctttgctatgacatcaccgtcatccctaagttcagacctggaccacggtggtgtgcggttcaaggccaggtggatgaaaagacttttcttcactatgactgtggcaacaagacagtcacacctgtcagtcccctggggaagaaactaaatgtcacaacggcctggaaagcacagaacccagtactgagagaggtggtggacatacttacagagcaactgcgtgacattcagctggagaattacacacccaagggtaagtttcagatggcccaggacagcagggaacagatacagtggtaggttagaggcatttatagttttcatgtaaaaatacaaaagggtcctgggcacggtggctcacgcctgtagtcccagcactttgtgaggtagaggtgggccgatcacaaggtcaggaattcgagaccagcctgaccaacatggtgaaacactgtctctaccaaaaatgcaaaaattagccaggcatggtggcgcatgcctgtaatcccagcaacttgggaggctgaggcaggaggatcccttgaacccggcaggcagacgctgcagtgagccgaggtggtgccactgcactccagcctgggcaacagagtgagactttgtctcaaaaaaaaaaaaaaaaaaaaagccaggtgcagtggctcaagcctgtaatcccagcattttgggaggctgaggcaggcggatcacgaggttaagagatcgagaccatcctggttaacacagtgaaaccctgtctgtactaaaaatacaaaaaattagccgggtatg

SEQ ID NO: 123481 - DNA, 1050 bp, Homo sapiens
cagaaatgttaagttggtcaagggcttaatttatggaatttctattatttcattggttgggatgctttgccaggtcatgtgcttattgtctcattttgtagtcttttaaagttgtatgaacccttaatttgaagaactaacttgatttctagagaaatatccacactatctcagtggtattttgcattggaaaaaggaagcactgtgtagcagtgaattgtctgctttccaccgagtactgtgtttattctctctccaggaaagcagatcaaaagaaagttagcagatcgagtgtcttcttccttagaaataggttctggtagcttctgtgcctgggtagtatcagaccagtgggagtaaaccgagtgttaagtgtcaaggtgagaaagcctcacattctctcaagacagttgctctaggagctgagttgctggtttggaagtgtggagattgcatttctggcttctctcaatggcttgtgttgaggactctgggtgctcctggccctaattgtgcaccctgatccccgtgcttggagctaggcctggtggcgtgctctagccctctcagttaccagctctttggagaaggatcaaaattcagatggaatgtgggatgggtaataggtgagagtagaaacccttccctccaggaggcccccgctgactcccacagaaacccacctaccataagatgtcttcaggtggccttgtccaaggatgggggtcaggcattttatatcaagggtgctctgaacatattttattttttaaaaaaactatgtttgtgaattttgcgtatactggcaagcttttgaaaatgtatttaattttgtattgtttaccaatgatttatttacaagatatttactcaaataaatggagctgcttacaagcctgttgacatgtgtggcttgcacaacacgttaacatgatggttttgctgtgtcagtttctctgcagaggtgaggaccaagcacctcacctcgtttcatttcattttcaaggatttctaggcatgtaatcctggccctctcctcaggcatcttca

SEQ ID NO: 123482 - DNA, 1050 bp, Homo sapiens
gagagttggtttaggagttttgaacagattggatacagaactatattgtgttttgtatttagaccgggggaaagactagaatgttaactctagggtccagtttgtcatctaacagaattccgggcttgggtaggtcctgtaatgcggtacaataacaaccaggtgttaaaaccggcatcttctggattctcagattctgtagacagcatacttctaaaaaatgtagagattttggattttgattaaattgctgttaaaaacatttccaagcccatcatttcaggagatcagaaaattttcgaactttaattttgccctgtgggaccctgggcaagatacttgcctctggtcgtcttggctgcctcccttataaagcagtgcacacgaaccagatagcttctacggcctcctgctcattcctcatccccctcccaaacccctaccccctgtaatttggtctacaatatttaagacagagagaaaagtaacgggttgatgtttgactctctcagcattttgagtctggcttcccaattcctgacttgactttttgtctcatttgaggtcccaattctaagccaccaaaccacctgactaaagaaacttttttcttcagagtgctcccacctccctggcttcatcctcaaataggtcatcagtagcagtccacagtcaacagcaatggctgcacgaccttccccatccttgtgtagcagccccccaagtcctctgctaaagggcaaagcaaagtgagaaacagttacctggcaatcagatgccagataactgccccgattctgctcgtccttggtggcattttcctgcttcccctactctaaatgggcaccctgaattaggggcaccagcttccttcaatgcctttaatataggtgactgtcaccgaatacaggcttaaatatttcagtgggggattcaggctgtagttcaaagaagttaaatgatcatttttaaaacaataggaagtggcaacataatttttcaaaaccaagaataaccagtcctatgttgtgttccccctttgcggatatg

SEQ ID NO: 123483 - DNA, 1039 bp, Homo sapiens
cagtctttaagaaaaaattatagatcgagaccatcctggctaacacggtgaaaccccgtctctactaaaaatacaaaaaattagccgggcgaggtggcgggcacctgtagtcccagctactcaaaaggctgaggcaggagaatggcgtgaaccccggggggcggagcctgcagtgagccgagatcgcgccactgcactccaacctgggcgacagcgagactccgtctcaaaaaaaaaaaaaataaaaaaaaagaaaagaaaaaattataatcccttgtctcttttgacttaggaaaaatatggtttctaatgcgaaatgttggtgtattcaggcagggatgggaaggaaaacattttttagacaaagggtctgtaagcaacctcatgcttgtgtgtggcaaggcatctcagatattaatgtttcatcacaggcttgcatcaatcttgcttgataaaattaaaagctgatcccaatccattcggtcattcagagtcacgggcagtctgtgccaagtagaatttactgacagaagagtcagctttcaagtgattaagagatgactacatcttcagctttatattgtctatgctgatgaaaagcaataaatgctttagctgagaagacagaagtatatggctaatcacctagcgatggggcccaggtttgctgtggaatacctgggccatagcgtatctaatgctgcaaaacagcttcaggtatgcctgggtgatttccagtccagtgattaggagttgactgtgtatctagaatagtcttcatgtttgaggctgagtatcttttcaatatgtaaacctaaggttaaaaaaaacaaaaaacaaaaccaaaaacactttttctgatgagatacaagccaaagtaaaaatttccacatctaaacatcctttggtaaatattgaattaccgtttgatggaaagctaaatcctgctggattcgtggatccgcaaatccataactctcctcttcttttcccctcccttcgtggtcctagagggaaggcaatttgaagagtgttaatg

SEQ ID NO: 123484 - DNA, 1016 bp, Homo sapiens
cattgttgtactttaaaaaccagatagaatgtcatagccccatgcagtacggaatcatggatgtctcatgttcttaacatctgtagctgatgatcaacttggatagacccaccagaggcttgctcagggaccatctctaataggcacggaaagactgtcacctaaaatgtcaaaaggaccagatgcgcccagtagtgccagatctgcttttagcagctgtggataaggaatccagtgtctggaacagacatttagttataatatttgaaaaacttgtagaagcactggaccagattccccaagcttaagaagtcaataaaacaaaattacccacctttaggctttaggtagtcaaagcctacattcatgttgactgagctacagccaaccttacctcccctccgccttgtctcctttcttcctgtctcatcccagatcccagtcgtcctcatttcagttgcattgtccagggtaggcatacttcagaagtctgtgttttattgcattataccgtcatgccttttctgtgccacaggaaagcctgttctagaggaaggttacatctgtgataaaaacttttagagttaagtagggtattaaagcaatcattgtgttttaaaatagaaagacaaggaattgcaattgatcttaagtcctgtattaaggcgagtattttcttttaatattctttgtcttaaaaaaaaatgtgaggcctggcttcttatagtgttgtaacttcatatacattcttttgatttctaaagcatagtcattcaaagataaacggagttcagcaatttcccaggtcctcataaatggaatatagtaaccagactcttagtcaaatgcttgccaaatcatttgtctatggtttccctttaattcctaagcccctgccctcatttctaagtcttctcaattgaggacttccagtcacctctgtgatcacatattcttaaagctgcctctaactcctaactctcctctttgaggaaatgaagggattttagtacagc

SEQ ID NO: 123485 - DNA, 1050 bp, Homo sapiens
aggccaaggcaggtggatcacttgaggccaggagttcaagaccagcctggccaacatggtgaaaccccatctctactaaaaatacaaaaacagtggcatacgcctgtagtcccagctacttgggaggctgaggcacgagaattgcctgaacctgggaggcagaggttgcggtgagccaagatggtaccactgcactccagcctgggcaacagagtgagactctgtctaaagaaaaaaaaaaagaagaagaagaagaagtacttttaaatacatgaatgcttctgagcattttaaaatttccccaggagataaaatagaatatatgtgatgatttgattctgaaagagtagaaccattacaaacaatttgtaaattctcaacctttaagaaggtggataaaatggtaaagtttccactgctgagtgctaccaaagagcatgtcatgttgtaggcaatggagagagcagtgagcttggactcagtcctgtgcctaggaagactatcttagctcttgaagcttccttggaatttttgcaaggtcgtggagcttaaggcactagccttaaagaagcgaaccctgagtgggggagatttaaggacaggcaactgggaagtaagtcgggtgcctgggaattgggcaagtggtcctggtgtggtcctgaacaagcttctcctaattgagaatctcgctgagggccggccctgggaggggagcccaaaccagaagtttggttggtcattcagaattcagatggtcccagcaggggcatcagctttttgtgtacaactggaagagagtttggcttctccatgtattgagacatctgtttactctggccagcctcctgctggaagattgacacagacagtcccatgctgtgcaaagggaagatgctgtgttttgtttcctaataccagagcagctttcttacagtgaggaatcacaaatgtccccacatcactacctgcttaagaaagtgattctggtcctctttgatagatcctgaagaatctgcttaagagtttctgaagacattttgttattctggc

SEQ ID NO: 123486 - DNA, 1021 bp, Homo sapiens
tctggagctaccctactcattttagggcatttacacttgcaatagcatttaaaatttgaatacccacataaagcattacaatttagataaaaacatggactcttcctgcaggtccgtggctgtgctaacagagtgtatgaggaacaagatactggccaaattcttcagggagcgtcaggaaactctgaaacactcgctgcctctggggtcctatctcttgaaaccagttcagcggattctcaagtatcatctccttctgcatgtaagtttctgcctggcatgagcactttccaggggatgggagttttgtgtgtatatattaagtttggtggaaaataccagaaaatgctatggacatatggaaacatttcccacactcatatttcacaactgactaatctgctttgaggatttggagatatttatattctaggcccgtagccccattgacaacagccaagagaagagattaatcttagctctgattctgatggggcttaggagtgcctcgccctgtgcactgacagtttcaggcagggagctatcatgcgaatgaaaaacagattttgtaatgtttccatcagccccgattcagtaggcaattggaagggaaagctatttgtcatagattggcttttgtatggagagcaaagagaaggggctgaaaagggagaagacagatgagcagagtgataagtgatctccaagctgggcttagcgtcacttcagttatctcctcttatattattttccactacttttgcaaaatgcaagaaggctttagaaacaacgataatcatagctcttaaattcttttttcttttcttttcttttttttttttttttttgagacagggtctggctctgttgcccaggctggcgtacagtggtgtaatcacagatcactgcaacctccgcctcctgggctcaagcaatcctcctacctcagcatcctgagtacctggggctctaggtgtgcaccaccatgcctggctaatttttttgtatttttggtagagat

SEQ ID NO: 123487 - DNA, 1060 bp, Homo sapiens
gggttatgcccacagactaccactgaaaaagtagtaattccctgggccaggttgttttgaatatggaccatctgttaaaatacaaagctccaatcttgacagaagcatgtcctttgatactgaatcattagggcctacgactacctcgagtagtcttcttttttacccacctttttaagtattaaatgatttcacattggggttttcttttcacttttggttggctctcctttttgttttgcctgctggtgttgtcttgggatgccccaggatcttttctcagctttgcgtctgggtcctttcttgacatggtgggctcctgtcgacgttctccccagcaaggaggaggaaatctctcccgagtcatcttctgagagtgctgtcttccctgccatctggcagaggcacgtccctaggacctgatgagttatatccacacctcgtccagctgggtgatcgagaccacttcctgtgcccactaggctttccgtcagttgacatgatgactccttttctctttcttgtttatctgggcacaggacgtcgtaatcgaatggaccgattctccagacttctccgtgtgggccttgccgctttgccaggagcttgctctcggtgctgtgcggaaggaggagcaccttattcacctgccgaaactctcgagcatctttattgaactctctagccggggtctccaggccctgggtcagatttctgcctataaatcacccaaccaggtccagttgctcccatatcttagagcctgtcatagcatgctggccatcttgttccatcagaccttcctcctgatagtctttgagagcaaggaggcctttgggtttctgggttttttggtgatgtttcacatgggagaaaactccatacaggcttgagaaattttcctccttgtgtagagtagggaaggcacaattttatgcttttgtctgcatctcgagcaacatcagaaacatttattttaatcctctgtctggaggattaaaatgttgtttgatatttcccttggcaaacattattctaaatttttgtctgagatcataag

SEQ ID NO: 123488 - DNA, 1007 bp, Homo sapiens
ggtgtgagagtcaccaggacttgctgccagatattgctgactcgcatcaacagggcactgaaaaactctcagatctcacactccaagactcacagaaagttgtggtggtcaatagaaatttacccttaaatgcccaaattgcaacacagaattatttttccaatttcaaagagactgatggagatgaagatgactatgtggaaatcaagtcagaagaagatgagtcggagttggagctatctcacaatcgtagaaggaaatctgactcaaagtttgtggatgctgacttttctgataatgtctgcagcggcaacacattgcattctttgaatagtccgcgcactccaaaaaagccggttaacagcaaacttggcctttcaccatatctgacaccatataatgattctgacaaactgaatgactatctttggagggggccatctcccaatcaacaaaatattgtccagtctctaagggaaaaatttcagtgtctcagttcaagcagctttgcttaaggttcttcataataactgcttgaatcaacttcttattttgctcataaaacgttacagatactgatgaggtgttttatgtataccagattaaaacaattttgtaagaaccagaggtgtaaaatatactttcttttacagcacaacttttggaaatggctgacgatgcagcccggattgtactgtagcacatgttggcatcaacagtatattttctcatgctgagtgtcttcatgtttcatgtaagtcaatcttacttgaaagtttttagacttttaacacgatggccataacctgacaatagtgcccacaccttaagaaatgcaataatcctttcctgttatccagaaggcccaggtagttttatcctgtgactcaaaggcagcaaggagactttttcacattttaaaaggcaacgaaagctgttgaaagaattatgcttatatctcacattttggttatatttgtggtaacaccttaggataacgtaagcca

SEQ ID NO: 123489 - DNA, 1037 bp, Homo sapiens
gaaaaatcttgcactgaagaggggagtttgaccctagagatggtgttttgggaaacagagtatatatagtagtgaattcaggtgaattcatattaaaggagaatggagtggagatgatttggtatcacagacctgaagcctctggaggcttctagaggatgggtagataatacagtattaactagggaagtggaccaggtataaaacttcccccaaagcagctatacgttctagagatctttgtgacgtatgtttattttatcttaaaaggagagatttcttattttctacctaaagcatctgtatttcaagtgtaccacggttgctttaaatttgttgacgaagtccataatgaaggataaaggaaccatttcccccaaaggtcaaagcaagtgtccaccttttagggtgactttcacctttagatcccctccttagatctcatagcattggcctcaccagaatccaggtccacacagaccacatcttttttttttttttttttttttttttttaagaggtggaaatttggattttatgcttaagcctttctaaaattgtaaaagccgagggccgggtgtggtggctcacgcctgtaatcccagcactttgggaggctgaggtgggtggatcacttgagcccaggagtttgagaccagcctgggcaacatggtgaaaccctgtctctactaaaaatacaaaaattagccaggtgtgatggcacgtgcctgtagtcccagctacttgggaggctgaggcaagagaattgctcaagcccggaacgtggaggttgcagtgagctgatatcacgccactgcactctagcctgggcaacagtgcgagactgtctccaaatagataaataaataaataaaattgcacaagccagattgagcccctgggccagcagtttgcagcctctgacttaactgtggtttagtagcaggaatctgcttaccctgtggtcttgatggttccatgagaactatgtggagaggcatacattgctatgtaaacaggagggcaaattgggggct

SEQ ID NO: 123490 - DNA, 1039 bp, Homo sapiens
cagacatggataaaacgtgacagtggacccagccagaaatctatttttttctcatcattataagaaaaccactgagcaaaatgatgaaatgatgttattccaggacctgctgtacttataatacctaatacaatgtaaatgctatgtaaatagatattacactgtacttttttatttctatgattttttattattttttgttattgtaattttttcaaatactttcagtcccaggttgattgaggatacagagggctgaccataagttccaagtaaagtggatatcagattgtaattttatgattcccaagtgagggtcagattgttaactttatatttttacaaccttatacccttataattcccagataaggtgggaataaaactagtccaagttacagagattggttttccattagccgagcaccatactgggacagtgctggaaggacccttcatacaatcctaacaaaagtagggaattgagagctattgtcttgaccttcaacctttggaaactggggtccagagaggcccatctgtttactggcagagctgggagattgaggctgcaatgagctgtgagcgtgtcactgcactccaacctgggcaacagagtgagaccctgtctcaaaaaaaaaaaaaaaaaaaaaaaaaggcttcctgaagaaagtgaaagaggtggcagctggaggcaagaccttagcagttgagctaagggaaggtcagctaagggaaggaaatgagctaagggaaggtcagtgttggaaaagtgggaatgttggaaatgaaggaacaacatgagcaaaagtctggagtagaagagagcatgatgaatttgagatactgagagctgttcagtcgagtggggagggcaggggaaaatgagtagcaatggcaagtaagaagagctgggcagggccacgttgtggcaggtcacgaaaccattgcattgcattttttttttttttttgagatggaatctagctttattgcccaggctggagtgcagtggcgcaatcttgtctcactgcagcct

SEQ ID NO: 123491 - DNA, 1060 bp, Homo sapiens
actgaaactctagccctgaattgattctccgaggattggagcaaagtgggtgggggtgtgtgtcagctagaagtcacctggaatagacatccaggagcggaagtgtattagtcagaaaaattaaagaatgagctccctcaaaagcatagtgacctgttgttcctggtgatgggactagatgaccataatccctcagcctcccaagtagctgggattacaggcaggcaccaccacacccagctaatttttgtatttttagtagagacggggtttcaccatgttggccaggctagtcttgaactcctgacctcaaatgatccacccgccttggcctcccaaagtgttgggattacaggcatgagccactgcccctggccagtaataatacattctgtataatagtcacagtaatggtgaaaataacaaagctgctgctgatggcttagttctgagttttagctacacatggcaacctagctagagagctcacattccttcccactgtcctcaaccaaagtggaagctcacaaggccatttttctgccccaaggacatgaaaatctctgattagaaacatttatgctactttttggatttattgagcctaatgactcctttttctttcttgctttgtcactgtaggaatgagtaaccccaaaaaatgaaacattacacatataacaagttgtagggagcatgaacctattttgttttattagcttgggtggtagtagcgttgaactcctttacatacctgtacaggcacccctaagatattgtgggttcagttgcagaccactgcaataaggggaatatcgcagtaaaacgagtcacacaaattttgtagtttcccagtgcatataaaagttatgtttagacaatactgtagcctattaagtatgcactagcgttttgtctaaaaaaaaacccatatataaggccgggcgtggtagctcatgactgtaatcccagcactttgggaggctgaagtgggtggatcacgaggtcaggagttcgagaccagcctggccaacatagtaaaaccctgtctctactaaaa

SEQ ID NO: 123492 - DNA, 1040 bp, Homo sapiens
ttttgacgattgccgacttacctatagaagtgttcctttcagcccggcgaggtggctcacccctgtaattccagcactttgggaggcctaggtgggcggatcacgaggtcaagagatcgagaccaccctggccaacttggtgaaatcctgtctctactaaaaatacaaaaattagtgggacgtggtggcatgcaccagtagtcccagctactcaggagactgaggcaggagaatcgcttgaacctgggagatggaggttgcagtgagccgagatcgtgccactgccctccagcctggaaacaaagtgagactccgtctcaaaaaaataaaaagaagtgttcctttcatcaactatgaatggatcaagactatgaatgtttctgagaaaattattgctgttagtaagaatgtttttagtgtttaagggtagctttggggcacagaaaaaaacaaacgtacatttataagaaaaaggggaaagagccactgtagtatacctgttttacagatgaggaatctgagactcttagagacttgtccacgctagtaaatgaaatgcccagtaccaatcctgggccgtatttccacttagtgtctcagaattacctggactctgttaaaaatgcacatttctgggctccactgagacacgttgaatcagactttctagggctggaactgttattttttttgagacagagtctcgctctgtcacccagctggagtgcagtggcatgattttggctcactgcagcctctgcctcctgggttcaagtgattctcctgcctcagcctcctgagtagctctgggattacaggtgtgcaccaccatgcctggctaatttttgtatttttactagagatggggtttcaccatgttggccaggatggtctcaaactcctgacctcaagtgatccatttcaccttggcctcccgaagtactgggattataggtgtgagccactgcacctggcctggaacctttacttttaccaaactctccagtgatccttataccatgaaccgcttgggtcccaca

SEQ ID NO: 123493 - DNA, 1057 bp, Homo sapiens
tgagtgtgtcttcttttgtgaattttcctctctgaggtatgggtagctttcagaggtctaggaggtaagcacttacatgcattgcattacacaggatatatcgtggtccatgtgtcctcacaaatgcttaccaaatgtgatttgaaggtgctgggggaaaaagtggcactttgtttcaatggacacagatgctagatgaaacatggatatttggtaatctttttactctatcttttaaaacctgccataaacttaatgggacaaaagtcattaccctgtcaaaagggctttgcattccacatacttcttttggctgcaggctctggttctgagccacagttggccccagttgccatcctgcttggcacacttgtgtgatggcaggtgctgagaaataaggaggtgagccaagcctggaagcaaacacagcctgacagttgggctgctaccgcagggcttggcatgcccttagcgtatcaaaatagcagcctctggttccaccgtgctgcgtatttcaggattacagagctgtgctcaagttacttacattctctgggatctgtagccacatcttgttacaaagaaagacaagttagaacaatagaaagaaaattagattagggctcgggcctcctgggaatctgcttactccctggctttccatctaaaggcaaaccatttcaactcctacctttggtatccccattttttggcttctttttgtgatggggtcttgctctgttgcctgagctggagtgcagtggcatgatcttggctcaccgtagctttgaccttctgggctcaagtgatcctcccacctcagcctcctgagtagctaggactgcaggcatgcaccatcacgccgggctaatgtttgtattttttgtagagatggggtttcaccatgttgcccaggctggtctcgaactcctgggctcaagcaatccaccgcctcagccttctgcagtgctgggattacaggcatgagccactgtgcccagtcggtgtcctcatttttagagaggaaagctggctaggttactatgtcttctaatag

SEQ ID NO: 123494 - DNA, 1633 bp, Homo sapiens
aggtcctatccaaaaaaaccttgtccagaccaatgtcatgaagcatttcccctgtgttttcttctagtagttttatggtttgagaccttatatttaagtctttaattccttttgagttgatttttatagaagtgagcgatgagggcctactttcattcttctgcatgtggatatccagttttcccagtgctatttattgaagaggctctctttccacaatgtgtgttcttagtacctttgccttgacttattttttgacaaggaatcatttattccgtatttttctttgggaaaattctcatagagtgaatttgtatggtgttatattgaaaaagagtaggtaccttaatttattagttaagatttgtgttggcatttgttgcttctaccaaatgcttggtacaggtggcaatagtttcctcgcttcattctggtctctgcttggacatcgtggcctctgaccaccctccacccatcatcactctgttagccttttaccccactgaacctttatttttctgcatgtcatttattctttccagtgattttattattattattatttggaagggaggaacttccctcctccactagagtataagatccacgaggacagttttgtttatagctgtatttcctttacttagaactgatacagagtaagtgctcaaaccatttgttgaatgaatgaaagaatgccaaatgaatgaaacaaagctttctttctgattttgtacctcaaatggtttcccctgccactgcacaggtagtgatttttgctaggcaatgaaacaaaaatggtaaaccaacccttccccagagcctctgagtgagatctatatgcaaagataagtatcttctcacttgtgagcaaatatttttgttaagtgagatgaatcaggatcttatctcctggcataaaatagacagagaggacaaagcattgcttatttagagacacacccagacatttattagcttcccaaaatgtagcttggtctttttcctaaatagtgaattattttagtgtttcccataaaaggagctgtgcatgctaagaatttttctagcataagcctttggaaaggcttcttgtgtgtcattgaggtccagataacccgagggcctctgtgactgcttggacgtcatgattagtgagctgtgttgaacacattgtgtttgaaacgcacaggcttagctgggccagattggaatgcttcagattcatgcttcctgtccttcctgaaaactggcagtgtgtttggcttaaagtatgcttgttgacagagaagtgtcctttgtctatctaaaccttaatagctgttgagctttggttttgttctgttttgtctttttctggcacagagtagagccatagaaaggcagagaagtcactaaaaaattcagccaagccttttaattttttttttgagccttgtacacatgatgaaaagaaaaaaataggctttttattatgctttacaccaagtttccaacaaggagcaaaacaacaacaaactataacagatgcattttcatgaatccactttttatataaagcttcctttgttgggtctcattttcacaaaactaatttttattttgtttttttgttttctctttagattataga

SEQ ID NO: 123495 - DNA, 1083 bp, Homo sapiens
ggaaccaaaagggtttgaatagagaatttttgttgattacaacaccccactcctagttcctagtcattgtaggttggtgctgagaaagttcaagttttaaaagggttttttgttgttgttgagacattcttgctctgttgcccaggctggagtgcagtggcgtgatcttggctcactgcaacctctgcctcccaggttcaagtgattttcctgcctcagccttctaagtagctgggattataggcatgtgccatgacgcctggctaattttctatatttttagtggaggcggggttttaccatgttggccaggctgatcttgaactcgtgacctgaagtgatccgcctgcctcagcctcccaaagtgctggaattataggcatgagccaccacacccagcctaaaagggtctttttttcttaagataaagttcttaaaggaaggatctgaagttttgagtataatattgaattttcatttggttagtaggtgtcaacctagatggaaagaagattttggtagtgggggcccatgggtctttggaagctgctctacaatgcctgttccagagaaaagggtccatgacaatgagcatccagtggaaaacacgccagcttcaaagcaaggtaaatttcatgttagaaacatacatcttgaaggcttctgttagaacagaagaaagtctagaaatgtataagctaagtgcttaattcaagaaattagaggaagaaaattgaatagacccatatccattaaagacattgaatgagtctactcaccagacaaacaaacaagaaaaggcaacaggtggttttacaaatgagctctatcaaacaaagaacagatcattctaatacaatccttttctccagcaaatggaaaaagaaggaacgtggcctaacagactttatgagtgccaaaaccaaagaagggtaacatgctaaaggaaaattaacaggccagtttcagctatgaatataaatgaaataatcgtgagcgaaatctgagaacaccaaatacagcaggaagtagggtttattttaggatttccaggtgattgaacatgagaaagtctgtcactgt

SEQ ID NO: 123496 - DNA, 1460 bp, Homo sapiens
atacttgttaatgagctgaagtagagtgaatgctgtcccctccctgaggcctggggctcatcatcagctctccaggctcccctttcagaggggatggtgagcaccttcggagagggcagggatggacacacaagacagcctcagttatgtgagttcatcccctcccctgcctgctgtgggtgagatggagaaaaaagcactggaccctcctgggcatcacagccttgtacttagcgagtggctgaggtcatcagtagcccaggtcatcagtagtgtggaattaagtgcactgaatagtgttggcccctgagctttgtttgacagatttagggggtcagctcaccactttcccctcttgcttctgtctgatcattgctctgtttgttaataccaaggaagaaagtgaatagaactttttagagagccaaaaaaactttattagactttatgccattcattatacttagcagtgttgagggaaggatttgtgagacgatatattcaaactaatgggcatgagaccaagaaggggctgtgtggcgggcgcggtggctcacacctgtaaccccagcactttgggaggccgaggcaggtggatcatgaggtcaggaatcgagaccatcctggctaacacggtgaaaccctgtctctactaaaaaaaaaaatacaaaaacaaaattagcagggtgtggtggcaggcacctgaagtctctgctactcgggaggctgaggcagaagaatagcatgaacccgggaggtggagcttgcagtgagccgagatcgcgccactgcactccagcctgggcaatagagtgagactccatctaaaaaaaagccggttggggtgggggcatgtaattaacagactgattggtcttaggtggctcagaatttaagctgagaaattaagattgagaagaaatgatgtattgtcgttatatcaaatatgtgagtaaaaacataattaaaacaccatctatctccagttttcccaacattacctcccttttatgatgcccttcctgtaccttattaggcaaaatattctaatttcagtctcattggattatgttctaaatgtttgaaggttggtctgaacatggaatgtattttctcatagatataatagtataaatggtgttagggtcatgggattgcgaagccagttccactgcagtagaatcatattgacttgctttccgatttttctgtgggaaacttcatctggagctttaatgcacttcttagctgtggggtaagtttcagcctccatgacgcttgtgttactttgtagtcacctgtggccaaccacaaataaatctttgtggtcatcaggggccagtgaagtgtatactgcacaaaagagagcctaccccaattctggaagaagggctgcaggcctgtgtcccacaaagaacaggcaggaagcatcaccttcagcccactggcagcaggtcatc

SEQ ID NO: 123497 - DNA, 1007 bp, Homo sapiens
cccacgtttgaattttatgtttttcctaaagtatagggaagattattattattattattattttctttttcagacggagtctcgttctgtcaccaggctggagtgcaggcgcgtgatctaggctcactgcaagctctgcctcccaggttgaagtgattctcctgtgaaagggaattatttttgatgagtcattaaagtatatccattcccagaatggtgctgcatttttccttttatcatctgtcatgacttttttaagtgtgaagcttacttccagaggaattgtcttttctagcattttggacacaactaaatatctttgatattttcttctcatatgttgagcagtaaattaagttgaatggtgaagtcagaggtgaacttaggaacatttagaaaaaggaaggtcatttattatttttcaggggaaaagtttggtagaaaaatgctgtaatcctaattcccagatgtccatttggcttgtagtcattttgatttatgaaataatcataagaaatgtcttcaaattttaaaagccaataatttgttctactaatcacagatgagagtagaaataaaagaaacacacccaattcctgaaaggaaaaaaattctcccaggatgagatcactgggtggacgtgaagtgggtaaaataccttttgctgcaattgtcatccccttatcttgccaaagtacgacaacatctgaatgaagatggtttgatgttcttagtttagagtagttatactattattttaacattcctatttaatgatatgttttaatactgcaggggaaaggtagatacagattcatagctacaaagcaatactcttatgatcaatgttcatttaatttcaaatacaaagttagacattcagagttaaaaaaaattaatgcataggctgggtgcagtggctcacgcctgtaatcccagcactttgggaggccgaggcaggcggatcatgaggtcaggagtgtgagaccagcctgaccaacatgggg

SEQ ID NO: 123498 - DNA, 1056 bp, Homo sapiens
ttctgtagagacattttatggaatacgtaatcctaggagagattttcctgatggctaatatcccagacacagagctcagaaaacaattatacccagctagttggttctgttcactctactattgcatgagtccaatgtttagattttaaaacaaggaaatttcaacattctgttttctagctgtaagagtaactactttaaaaaaaaaaaaaaagacaaccaaaaaaacctatttcttagaaaaagtcttgctctgttgcccaggctagagtacagtggcacgatcacagcctcaaactcctgggctccagcaatcctccctcctcagctaattaaaacaattttttttgttgttgttgaggcagggttctcactgtgttgcccaggctggtcttgaactcccggcctcaaatagtcctcccgcctccacctccaaaaagtgctgagattactggtgtaaaccaccatgtctggcctaaaaaaattatttcaaatgaaaaaactacgcactgctcttgtagtgccctgcttgctaaacagcagatttcatcataagcaaaatcattttgtaccctaaatattaggacttatttactgatgtaacaaatgggaccaaggagaagctggtcttccgtcttaggctcagaaaacagtatcaaaacagcaactctgtggctcagagtaatttatagcatcattttaagctaatgtaattctatttagtgtggaagaggggaagagccctgggatgctgatgtgctgggggtcccgagggaccttgagactttctctcgtatggctctgaagggagacattagaacttactggaggctgggcgtggtgtggctcatgcctgtaatcccagcactttgggaggccgaggccagtggatcacttgaagtcaggagttcgagaccagcctgagcaacatagtgaaacctcatctctattaaaaatacaaaagttagccgggcatggtggcaggcacctgtaatcccagctacttgggaggctggggcaggagaatcgcttgaatccaagaggcagaggttgcag

SEQ ID NO: 123499 - DNA, 1821 bp, Homo sapiens
gccaagagaaacatgtggccagcccgatcggagattattatgcaatgaccctctattcatcgctaatgaataccatgatggcccatacagagcattttgctctgtagtcgaatcacacttgcaggagggttttggacacattataatatgctgttcttgtctctatgccataggtgttatacttccacctggacacaattctaggatctttgtgagttttttggagttgcatttctaaaatgatacaccattttctcatacacgttaattattagcagttgtgcttattactgcctgggagaaaggaccccaaagtaattgcattgatttcatcgttggcgtgatgtgtggctgttttcactccagttgtgaccacctaagctgagaagccttttctctctttcgtattgtctttcccctcagtgacattgagatttcaagaggacaaactccaaaagctgtggatgtccttgccaaggagattggattgcttgcagatgaaattgaaatctatggcaaaagcaaagccaaagtacgtttgtccgtgctagaaaggttaaaggatcaagcagatggaaaatacgtcttagttgctgggtaagacaccatctaacatctacttgatcaagcagacatatttacaaaactcttccctatttatctctctcctcgtacccctcaatccatcctattctcacatttgacatttcgtccatttcatttggcatttctttatttggtgtgagataagtttttattttcagtgcagagcaaactagtcgactctacacaagataaagtcaaacaagttgcagtgctttatcttttgtttctcatattatgttgttattacccctgctcctccttgactttttgaatttcatttttcattataaaaatcaaaataggaattgaaagtaaactattttgaactgagcagtttgttttgtgcgttctacttgaaatattttcgtggaaaaggtacagataatcatatgaaacatgttttcctgttaatatccttgatcttacctacatattcacatttcaaaagctcattatttccctttttctgcatttcaaaactaatgttgggccattttcatttgtgttggttattttataaaagacaaattcatagtttttgtgaaaaggagtgtttgcctttttccccttctttttaaaaaaagaagtacattcactagctgaaaagatgatagaaagcaagggatttcaaatatttattcagtgtgacctgagggaacatcatgagaccatataaattcctttgctgccttgaaatttcatttcagtgactattgcttatgatgtatacaaagcttcaggcacaaaacctatttgtcaggcagagacatttcttgtaattggaattgactcctaggtaactttgtttttacgtatttaattattaatgtaagtgcttttttctttatttctttttctggttataaaaagaatgtagtttcattgtagaaatattctaaaaattcagaaaacagaagtgaaaaagtaaaacatcccaaacccaagcactcagaggaaacaactgttgacctgcgaggactgttttgacgctgatagagtctctcagccatgaggtcacactcacatgctattgtgtaagcaacctgattattcaagcatatgtggcatactgagctccatgtgagtgaatattgagctatgtcaccatttttcatgacaacataacattccatcactcacatcccagattctttttttttttttttttttgagacagagtcttgctctgttgccaagactggggtgcagtggtgt

SEQ ID NO: 123500 - DNA, 1667 bp, Homo sapiens
aaatgactgttatcaaaccattatatgcactgttgcaacttctttaaaaatataaatgacccctccattaaatggagaattatttcctttttctaaaagtcttttctaattctgaaaataatattagcttattgtaaaaaatttaacataaagtaaaaaggagataactaggtctctcataactcaatattttatttatatattcatctttttacacattgagatcatgctataaatatcatttttgtcctgcctttttctctgaacactgtaacataaatctttttccatgctttagaagaattcaaatacccaagtaatttttaaataatactaaataacaatatatttgttattacatattttaatttatatagaaatgtgatttaaatatatcagcaatgggattaaaatataaaacaatgagatttttttaaatcttctattattaataactcaaatgcagaacagattaattcttttaaaaagccattcttcaaactttaggatttcttattcagtcagaatcatctgcatttcatcaactacatatcgcatggtatttacacctacacatcactttatttgctttgcctgacaaaatgaaaagtattgggaattgttcagggaaatatgccaaaagaatcttagggactcatgagttttacatattttcccagttacactaatgaaaaggaattttgtttgagaacttgacttggagtgcagctgcagggcatttgaatctcagtctccatcaggcctgcacccatttctgtgcagaagtttctagaatttccctgaattggttggacagagcagctaaaaaagcagcccaaactgatctgggaatagactgaatttcacattaaagaaaaatttgaatcattcacatcatttcatctttttttttttttttttttttttctgcagagggccaaatacccgattggattttttaaaaatgtttcaaccctttatttcggtacaatgttaaaataatctgacttttctatgatttggcttttctgccttgagtaactatttaaatatctgtgtgattttcttttatttgtgctacttctagaacaaaacagaggtatttagaagaaaccacttcccacagggcctttgaaccgtttacctaagtcaagtgtaatgagaaacataaccaaatgcaccatggggtttattgttagataataaaaggcttaaaaagcccctagaccctaaagatgcctgggatggatgatttatgttcatatgctacttgagcatgtagttttggagtgcatggtgaggcccatggctaatggcagtggtgctattcaacaagattctgggtctttagaatagttcaaagttttaccacttctctctggataagccatctttttgacctttgagtaaattataaacttcttttcagattgtgtccaaatggtcacaggtactttgacagtttttactgtaactgccaataagtaatactcatctttaaaaagacatcattctggcagggcatggtggctcacgcctgtaatgccagccctttgggaggccgaggcgggcggatcatttgaggtcaggagttcgagaccagcctggccaacatggtgaaaccctgtttctattaaaaatacaaaaattagctgggcatggtgatg

SEQ ID NO: 123501 - DNA, 1030 bp, Homo sapiens
gagaacctggttaagtcagatggctggctttgcctcccagctctactgcttactagctgtgtgactgtcggcaagttgcttacactctgtgcctcagtttcctcatctatcaagtgagcgtacaaataattaaccccataaatatgaagcatagcacctctcctattaactgccccaatccactctcagttttatctagttaacatttattaatttgccgggtctcacctaagatgttacttcctacaggaaacattcccagatgttcaaatctagttagatcctttttccatgtaccctcataattcagtctgactgccctatttccctgtcttagtgtttgtcacatttatcgtaattgctgatatattcagatcagctggaagctcgtgaggatagagatgaagtctgactggatcatcattttgtccccagcgtctagctcagtgcctggtacatagcagtacttgacaaatatttgctgaatgaatgactcatggaattgtagggtatgatgacgcctctaaagacattctttctttgtggttacatccttaggttttgtagatcagaaaactctattagattggttgtggttgagtatccttgacaacatggctgacagtaactcatggaagaccaaactgtaaaccctaatgacagcctttaaattttttaacgatgcttgagagctaagctggaaggacgtggggtgcttatccctcgtagaaatgcctgccaatgctttctcatttggacccaaactccagatcgggagcagtcttatagctggatcagctaccaagagaaattctaaagcaagaagagaaaagcatttcaatttgggacatttatttgcacctggaaatggggaatgggctatcagaccagacttctatcctgtccaacctgccttcattcagtccttccacattgttattctgggtttggactgtgctggaaagacaactgtcttatacaggctgcagttcaatgaatttgtaaataccatacctaccaaaggatttaa

SEQ ID NO: 123502 - DNA, 1621 bp, Homo sapiens
gatatctggaaggagaaggacaagtggggactttagggtcccttctaatcctgagagtctggcagtgccctactcacccaaggaccgttgagctaggccctgtccccaaaccataggccctgtgcccacaccctgccccaataaatggctcaggaagaacaactgctatatactcatcagcaagaaatgccccaccatcagctgaattatttaaaccattttgatgagtggttttatggcctttcttgaaactgatgttgttattagcactgcctaataccttttccttttttggtttcttggtaaaggtgtgtctgtatcttgactttagcttatgcctgtcctgtgtgatgtgagtagaccataatagcccgagaaaattaaattatggagtgcattttgaaatgagcaccctcagatttgattctggtgtcttcggctggttttgcataggttgtctgggaaatattataaaattcactttctccccccgaactcaggatcacacccacccctcttggagaagggaagagcacagtcaccatcgggcttgtgcaggctctgaccgcacacctgaatgtcaactcctttgcctgcttgaggcagccttcccaaggaccgacgtttggagtgaaaggtactgtctttaacaactagtgtacttttcagggcaaagttggggggagagaattgtaaaaagaacattgtcaacagataaagagttaagacttttcaggggacttggtacatttcttcactgcacactcagtacatagtggtcgccccatgttggttcccccgggcatgaaaaagagcagtgggagccgccagggcttcactggatgcctcaggagcctgttcctggggctgcgttgctcaaggctcccgcctcgagtgcggtctcccatttcatcagggccttctttgccaagtgatcttgaaacacggccatccatatcggtgtttgatcatcccagtcccggggaaaggtctttccctctgctttagtctcggctcattggagttgctgtgtggggcccgcagagctctctggagacggactggctgtggacagcgagtcgtgatgaaattcctccttggccgtggtcgggctgatatctggcacttccccattcattactctttcttccctgatttatcatgaaatcattccttagctcactttacagtggtggttattgctgcaattacagtttgtccttggcacttcgtgattttttaagaatattgcatttgtattactgttaaacatattaataacgtatctcataaagtactgataacgcacagagtgtcatgcatcgtgtagtggaatgaacactagggttggagcgagaaagccaaggttttggtcacagctgtgtttcctaccgccatgtgacccttggccacttgagccagtcacaacctctcggagccgcatctctaaaagtccaaaatgctgagagcggcaccaggctcacccagttgttgtgaggatcaaatgagaaagcacgtaaagaacgagggctactgtcaaatgatacacacatgggcggtgttgttctgctttaggaaagagcagtccttttactctaacaaccaacattttgagggatac

SEQ ID NO: 123503 - DNA, 1849 bp, Homo sapiens
gcctcccaagtagctgggattacaggcacccgccaccatgcctagctaatttttatatttttaatagagatagggtttcatcatgttggccaggccggtctcgaactcctgacctcaagtgatccgcctgcctcagcctcccaaagtgctgggtttacaggcatgagccacctcgcccagccacagtgtattttttttaaacaaagtttgctcagatatgaaatcatatacaattgatttagataaagtatagtcacagagatctaataataaattatcaaaatattctcatatcctggtatgttttacagtaatgacatctgctctatttttaccttttttttttaagcaaagaaacagaggtatagttagacaaagtgtcaactttttttgttgttgttctgcttggatataaccattagtgtctctcactgccttttgttacttcatcttgggtgtgacgcctctctgttgggtttggggagctgtgtcccttggcctgtgtccatcgtggcagctgtacttggtgacccgtttgaaatgcctcttgctctgttgtttaggaggagccgcgggtggtggatatgcccaggtcatccccatggaggaggtaagaccttgaagagatgcgggtcagctatcactgtgtttccttcctgacatcttgtctctgctcccatccacacaggcccacagaccctcatccataatcccaaagtcattaaggctctgaaaccccaaaatgtttgcataactcatgcagtgacaaaccctagtatttactgtgatgagctataattatatggattttgtacgtgctacttggcgtgaatattcatatacattgctgtggaaaaattatttttgattaacaggtgctgacctagcccctgcttggggtgttttacaaataaactacatgtaaatcacactgccttcctaaacttcaaaaaattcagaatcttgaaaccctgctggccttgcgggtctggatgagagaatgtgggtctgtgcctcccttgatcatctgctgtactgccaagttcacgaagacttgacgcttcccctctgtcaattcaggctctagtgcgtgcctcggcagcatagatactaaaactggaatgacacagagaggattagcatggtccctgcacgaggatgacacacaaatttgtgaagtgtcccattaaaaataaaagaccccaaaataaaagagttccagaggaaaatgggcaaaaagaactgacgttgttaattctcacttctgtaagaactccacctttgttccacataacctctttgttgcctgtaactaaccagtgaccagctcttttcagtttcactctctgcatcagccttatcattcagggcctggacaatcttccaaaacccaaatctgagcaggtcactttcctgttctgtcatttccgccgttgcctgtcaccctccagcacagcacaggaggtcctcgtgggtggctgctcctgcttccctgtccacaagtccccacctgccttctctctactgcgtcaagctccttgcagactctttttttttttttttttttgagacagagttttgctttgttgctcaggctggagtgcagtggcacagtctcggctcactgcaacctctgcctcccaggttcaagcaattctcatgcctcagcctcctgagtagctgggattacaggcaactgccattgtgcctgactgattttttgtattttagtagagacggggtttcaccatgttggccaggcttgtctggaactcgtgagctcagacaatccactggtctcagcctcccaaagtgttaggattacaggcgtgagccactgtgcccagcc

SEQ ID NO: 123504 - DNA, 1055 bp, Homo sapiens
tagccaggcacaatggtgtgcacctatagtcccagcctactcagtaggcttaggtgagaggattgcttgagcccaagagtttgagaatacagtgagctatgatcatgccactgcactccagcctgggcaacaaagcgagaccctatttctgaaaataaataaatagaaagatatcttatttctctagttcaaccttcacttgactggagacatccacgccatcaccgctgccaataacttgctggctgccgccatcgacacgaggattcttcatgaaaacacgcaaacagataaggtgagaaggatgccttgctagccattttgggtattgtatcctggaattcctggattcttaaggagtttgtggaaagaattctggtgtctgcaaactctgaaatgttattcaattcaattttgtgatttttacatatgtccctgtttcccaaggagaaggagccatcctttgatcagattctcaaatgggtttatgagcactgccaagttattgggagaattgtagtatgttgtaaaagccaaatattctctaagatgagtctttagttttaaagatggtaggtagaccagttctcttcattctggtcataggtccaatctctgatctgttctaaggggattggacagatgtcgttttaagactaatgttatgtggagctattttagatgtgctgaaaagatgtcagagacccttattgggcttcatgtgcttgtaggttaagagttaaaccacacccccaaaggggacagcccaccagaagctaattcctcacagatataggacatagataaaaggggtaccttctggcacattttacaacaagggtcctcactttctttaattaaagtagttccttagtgagtctttgctacataatccagatacatcttcatatggtagttgtagcgatatagatcaagaaatatatttatgcaaactctttgcaatgtgtattatttcagatcttgtcagttttatgaaaatgacagaatttaagtcaacattgtttatattagcccacaaattttaatagggtctt

SEQ ID NO: 123505 - DNA, 1069 bp, Homo sapiens
atttttagtagagacggggtttcatcgtgttggccaggatggtctcgatttcctgacctcgtgatccgcctgccttggcctcccgaagtgctgcgattacaggcgtgagccaccgcgtccagcagattgtttcatcttatgcctcataccgaaagtttaaaggcctcatgttcctggacccagagtggaacaaggaacccacagacctttccagaaatacttaacataagcagaagaaaatatagacatacagccattttgttacagagcataattttgcacagatgagcctctgcctgtccgagccccggggcctcacaggcttgccgtctctccatctccctcgcatgcccaactcctggccatggaccaagggcccacaagcctccctcagcctcagggaatcaaccatcaagtggctggttccttgccccaacaacactctagggaatcagtaccgtgtcttccactggggccgaaacagtggacctgcccctgattgaacaccttgtactgccaggctcttggccaatattggctgtttcatcagccattaggcatactgtggatgttccttaggacatagtcagcactgtagtatagtcagcactgtagtactaaaagggatggtccagagcaaaaaataagcaaacagatctcccccggctgcctccacccccacacccactggcattgtcctagcatgccttacataagaggctggcactgtcttcactatatctctgtacagctggctcgggactaggcacaagtagcccctcaatacatactccaggagtgaataagtgtttcttattccacctttagttctatcattcagagaccaggaattccattttggatcactaacttagggttactttctagtatctttcttgtgggctggaatttaaccttcacatttcttatgtatcactgatgcatcacttaccgggccatgttaaaggcagaggtgggctttggaggccactgattctagttgatcttgccagacatttttttttcttgttttctctttgctagataaaaaacagctgaatttctcttg

SEQ ID NO: 123506 - DNA, 1036 bp, Homo sapiens
agaagggaagttgctggttgggtttttttttttttttttttttttagagggggtctcactctgtcgcccaggctggagtgcagtggtgcaatctcagctcactgcaacctccgcctcccaggttcaagtaattctcctgcctcagcctcctgagtagctgggactacaggcacacacaaccatgcctggcaaatttttatatttttagtagagatggggtttcaccatgttggccaggctggtctggaactcctgacctcaaacgatccacccacctcagcctcccaaagtgctgggattacaggcgtgagccactgtgcttggcctctagtggatttttttgtttgtttgttgtttatttgattctttctctatgtctacccactagatggtcagcttgggggagcctgaccttttctctttcaccctctgcaacttcctgagcatcagaacaatgccagacacacaccaggtggctggtccatatttgtcgactgaatgactaatctgttctctttcagtattggatacaaatgaccgatttctacgaaaaataaccatcgggcagggaaacacagagaagggccattaccggcaggtaggtggtgctttcttcccgggtgtggctctgttcttacgttcatttctactggcctgggagctcactctttgcctttcttgtctcatccccaacctgttgtggccagtggttctctcactgttttgggtgctcagcagggctgggagaggatcagaagacatagaggctccagtgtctttttaccatcttttctatgtatgtttatttcattttctttttttcatgtatgtttccaattgtgtttccaggaagagccactcagggtattctttgaatataaattctcacttattttattgggaaccatccaggtaatactacatctgcataactgataaatgaaaatctcagacacattactcaaatttcatatatcaaagaacaaacacctagttattagacttaatagcatgaggattttttaaaggataatgg

SEQ ID NO: 123507 - DNA, 1976 bp, Homo sapiens
tgaaccggggaggtggaggttgcagtgagcagagatcatgccactgcactccagcctgggcgacagattgagacataaaatagactgagaccctgcctcaaaaaaaaaaaaaaagagtcctcaaactgttcatatacaggactgggcttgctagggaaagaagggggaattcttcagactactttacaaggacacaagaactcctcaacctaaacaaagtatgaaggtacatagacaagtttcttgtaagtcggaaaacagagaaatccacagtaactataatacatcccttaaaggataagcatgcatttgtaggaagcaaacaaagctttccatagagaaaccacttccaccagatgattatatggacttgggttttgtttctgcatctgtcacttggcaaatgaagataccatcttcaggatgttccgtgtcatcgatttcatttaaggcataggctgttttaagattactttaaaagatatggacctttttacaaaataaaacactgcattcacttaaaatatttgcagacgtgaactcttgtaccctgatcctatgttgtcactctgggttttatgtatctaatcattgactaggaatctatctcagcagataatccaaaaatctagtttgactagttggtagattatgctttcccgctcacatctgaacacacctggttgttagtctggtaggaggtcatcaagggccacatccttacaggttgccaggagaccagtagttcttaatcctgactgcacttgagaagctcctgggaaggtttaagaatattgattgattgatgccgggctccccatcagacccagtgaacgtaatgtctgaggataaggcttgggtatcatgtattgccagactgaggaagacttaagacaagaaaacagtgagagctgttaacattttcccacaggttagccgtgtgtggtgttgatggaaacttcacatgcgagagcacactgtccaatatggcggccactggacatgtggccatttcaatctaaattacctaaacttcaataaaatttggaattcagttcttcagtcattttagccacatttccatttatgcatttatttgtttatattttactgttcatatttaagtgcttagaactctggtaagctaacaattacttgaaattacttgaaatattaatcttatgaaatgtttgaaagggccattatggagaatattcatagcaagatagttcctgccttattttcctgagtgttctgcatgtaaaataaaacccagaactcaagataaatgtgtgtatgcctttgagttagtcatagaattttttaagcaacatgtttaatttgatgtactgtatcttatagctatatccatgtttgagtgtgcaagtgtgtgtgtacctgtgtttggaagtctaacaatgacattccaatatttttttctcaccaactccatactgggagttttaaaaccagagccctaatcttgacttaattattaatttcctccgtggccctgaagaattcccttagcctctctgggccttaaatttctggataaagaagttggctgcttcgtgctctcaacattatctgattctgtgatttctagctaaagctacatttatacaaaaatataaagtgcttttgcaaagtaaagagtagaatagtggttatcagaggcagtgggggatggagaagttgaccaaataatacaaaattccagttagacaccacctgtgtattcataaacatgtgtccctaggttttatttatttatttttatttattatttttttcatttttgagtcagagtcggtctgtcacccacactggagtgcagtggtgcgatctcagctcactgcaacctccacctcccaggttcaagctgttcttgtgcttcagcctcccgagtagctgagctgggtttacaggagcacaccaccacaccctgctaaattttgtatttttagtagaga

SEQ ID NO: 123508 - DNA, 1532 bp, Homo sapiens
ctctcaaagtgctgggattacagacgtgagccaccgcgcctggctggggacctctgttctaatatgcttaccatgccaaatgcattatgaagaaaaacagaaacaaggcttttaatgttaaagtcttattttctcgctactgaaataggcaaaatgtttcaattttgcaaaaataatatagtattgtgtataggatcttccctaacctgctttttacatttaattaggcttctacgagtcattcgggtagttgcatctagcaggctatttatccattctttatagaccctttagaggtttgagacccctttatagaggtttgagagccctttcttgccccagttctcttgtctgtaaagctgtaggaaataatatgacctaacatacaaggcagtgtgaggacagcagaagtgacttctgtaatgcatatggtgctgttccaggcatggataaatctttgctaacagtcgtaagagtttacctcctgtgaggacctggctacgtgctgagcaccctgcttggtgctttgtacattgtgactcattcagttgctcaaacaacaccatgagtagtttaccagaattacccccatcttgcaggtgagaaaactgagcatccgagtgagttagtagtttgctcaaaggcaggcagctagcgcaagggggagcaggaatttgaacctgagtgtcggccccacagcctttgcttttaccaccgtgctttgccacctctgaatgttcactttcattccatagcagcatcatacagccctgtgcataacaggaagtgcacgtttgttaaatgagaaactagtaacacttctggtagctgaatgacttaactactggtaaacctgtctgcatggccactaggctttttatggtgaacacaggcatattttccatgtgctgtgttgaagcagcaattaaataaatcaggtaaaagagtaattaaatttaaaaggtaaaacgttttggaaggagttttgaggtttagggctgtctaacctgaccttgactgtttctctatgtgctgtaagatgcagattgattttcaatgagatattcagcccatccctgcttatgatttatatatattctaagtaatatgcttagaatgtagttctgcttaccatcataaaatgtggagttaaaataagatccttgtcaaaacattgtcatgcagagattagtgctatgaaagttaacattaaatgattttaaaatgtgatccagaggttaaactgaagttttgaaattcataaaatgcataagctttttgagaatttttaaaaatatccgttacataataactttaaaattacgttatatgattgctatcttaccccatcttagccaagagcattcagcctgaggatactcaaaaagagtcaaattaccccttccttgtataagctatagtttaggatattgcaattatatgaggtcgttttaaagtttttagcaacgtttggtataattacaatattgtgctgttcttacacaaagaaaacataacagaattttgagcta

SEQ ID NO: 123509 - DNA, 1500 bp, Homo sapiens
gacaacagggcaagactgtccaaaaaaaaacccacccaaattatctaaattctgtctctaaattactctaaattctgctcatttgtttgtgtatgtgccaaatgaagaaatggttttttggaagaaaaaactattttcatacttgtttaaaatatttttagaagttatatcatgaaattgttgcctgtccctgaaaagtaaaaacaatctactctcaaccaaaacatctatgcaatttcataaaacaaacaaagaaaaagggactaaacaatatggagagagaaatcaaaagaaggtactcagattgctggtgtttacaattcagcatctttgtttgcataaacactcaaacatacgaaaaaatttaaaacctcattaaaacttaaccgagcatcacagtgctgaatcagaagcactgggtgagtgatgaagccatgcttgctgcccttggaaagcagcctacatgggaaaccactgagaaatctcagcactgttcatgtctctgggtttcgtttgcagagagagtcgtagccctgctcaagtcaggtggttcacccagtcaccaactgcccgcatccctaccattcaacccaagggaaatgcaggaatttgtgcagcctcaaacaaaagccatcagtgctgcaagaaagtaatgtaaggcccctggcccactaaacatggccattgacatccagatttagttctaaaaaaagtgaagatgtaaccacatactcatcacaactgccaatcttggctctggcctcaacctctctcctaaattacagacctaaatttccttccccaccctgaaatggacaaacattaacattttaccatgattacttaagattgttcctctttcagagaagtaaagcagcatagctgagttcagtatcccatgcgctcatcccacccctctacttcttcccatggtcataactcctatgaactcagagcttatgcagatcaggttttcagactttttctacataagcacacatgcataaacagaatatagcattgtgttatgtgtttttcaaaaatgtaacagattgtatacacacttccacaacccgttttgttttttcattgtgcatttctgagctccagcagtgtggacatacccagaagtagcattgttggttataccacgtgcacatctcttactgacgaaggagtcctttcctggggagggagccctgttagataacaatttgtccactctttcccttcacttattcgacttcagaaaagtggtatgacttatctgatggggggttggaaagaaacagtatcttaaagtacagtcctggcaaaatcattcaggaagtcctcatggattagaaactatactaactcttctccatgacttttaaagacattgaatgagactccagtctatttgctttaccctgtctctgaactagcgaactattttgattccttgaacacaggccaatctttctcccctctcaccttcttcaaggctcgcctcagtgc

SEQ ID NO: 123510 - DNA, 1028 bp, Homo sapiens
agctgcagtaataatgccgaatttctcttatagttaattgaatgatttatcctggtgttgtctcctggtagtcactgaaaaagtcattacaatcctcactttctcccctttaattcaagttcagaattcatgtgttgctgtgactttttttgagtttatctgcagacagctgccattgaataaacatgtttatatagggcagaaaaaggcagcctgaagattctactttctatttcttttagcactgtttggcagttaacaccaacagcgcttcagaatgaggtactgtccagcatacaccttgcttgttcctctacaaagcttctatttttgtttttgatttgttgtgaggaagcaaagtgtagcctttacttgaatgaaagctacagttttatttttctttcttatttacaagaaattcttttgatgattaagttagccagatacgccccgtgcgctcatatttcttaacctattttgagctgagctagttgcaaggactagttcttctgtgaaacctctggcagtccataaattcaagttcgtgtccagacgtaatggtgaactcaatatgttgtatatttgatatatgtttgttgcacacatggagagaaaagttgctaccattgtgaagtagccatgaaatccgacagttctaatttctttatcttctgagtacccatggaataaaggacctcttagtgccatagcaaggcagaagtttaatttgcaattctggtggcaacatccaggtatttcaagtagaaattaagaaaactttacggaaaaactatctcagcacttcagtttaactatttttcaaagtccaaggagggttttccccagtgtaaaagcagaaatgagaatttcagatctaaagcggttcttgccttttcttttccctccatgcacatgtgctgacaacagaaagtaaaatttgaaaagaaaacccaggctagagcattggggtcactcatttcccatccagcgaagggagagctggtgcctggctgggggaggttaggaag

SEQ ID NO: 123511 - DNA, 1078 bp, Homo sapiens
gccgagatcgcaccattgcattccagcctgggcaaaaagagtgaaactccatatccaaaaaaaaaggggggaaaggtcagaaagacgttctttttcactaggtgatgaattaatctttcccatctttgtcatgttaaaaatgtgcctgtggctgtttctccactaaatgaagacactggcacacagatgattgtgtgtaaacactaggcaagacactaggcacaatcgtaggggttcagtaattattgaatgagaagaaagaaaggttgttcttgaattctgtgatgtgagtgtttaatgatgtttttgaggagaatgccatatgtagcagacagaaccctgggctgggcatcagagggaccgggggcaccacactgggctttgtgtcattatctccagaaagtaactggcctggtgcacaggagaaagttagagtacattgtccatacagttcccacatagctgtagggttttatgaacccatattttaaagggccttctaatgaagtgaggatgttaatgcttttttttaaaaaaaaaaaaaaaaaaagagagagagagattggtgattactttaaaatctgagtcctggccaggactcacgcctgtaatcccagcactttgggaggctgagacgggcagatcatttgaggtcaggagttcgagaccagcctggccaacatggtgaaatcctgtctctactaaatacaaaaatcacgctcctgtaatcccagttacttgggaggctgaggcagaagaatcacttgaacgtgggaggcggaggttgcagtgagccaagatcacaccactgcactccagcctgggcaacagaatgagactccatctcaaaacaaacaaaaaaatccaagtcctaattatcgctgcagctttctttaatgtgtgcagtaaggtggggacatacagaataacttaagatgtagaaatcgtctctccctccctgaagaatatcatggatactacatttgcctgccaggaatgttgtgttgttctggtgttctcgtttctgccgttatcattgtttctgcttaatttttacaacacaactctggccgcaccc

SEQ ID NO: 123512 - DNA, 1016 bp, Homo sapiens
tgtgtatgtgacaaaagtcatatattcaatgattattgcatagtcaaaacaagtagcaggtttgccatcatgaaacgctgtaaagcaattctttctcctgggagaggtggacatgatttttataccattttacagataaggaagctgagttttgataggcttagggaatatggacaatgtcagcaggccagcagagagccgagaacttcagatctaaatctcctactatgtccaccatgcagagctggatgttaatgaagggcagaagttttctaaatccaaatccactcctaatacccgacacttaagcacttcatttttgcctaaagcttcatcatcatttcaaatgcaagaatgatataatacagattaaaagtagtaaatcataaagaattctgacttcactcaaaacaccccttgttgctacagtccttcctggattttagacattgaatctgtataacaacttctatttttaaaaactacttccgcccatgtaggatgcatttggaattctccctccctgccctgccaccctgaaaattatagaaagggcttagagattgtctgatctcattcagtctttataaagagaaaatctctgaggcacagggagacgcagtgacttgagtggtgtcacacatctatttcagggactgatcagatctacagtcctggtctcttgacatcagtcccatagttttccagactctggtctctgtcctgtaaaaattctctacatggtttacaatcctatttcattcatcttaacatatgtgctctgttattcagtggttgcactttcgtgccacattaatcctttgtgtctcttccactgctgcttaatgtcatggttctcagccagtgatcatggtaacatggaacagggttagtaggcacagatatgggtggaggataagaaaaggtggggaccagccaggcgtggtggctcatgcctgtaatcccagcactttggaggctgaggcaggtggatcacctgaggagttcaagaccag

SEQ ID NO: 123513 - DNA, 1010 bp, Homo sapiens
ccttcatattgaatagctctgtatttttgaaccatgattattcatttctacttctgttttcttttttcttttttgctacaaatactgcgctgggatcgacttccttttgatcattacacaaataaccatggctgcctcttatgtttattcagcttgttttttttccataatttgtacagtggaaaatcttgtggcccttgaatttgcccattttaaatttgccctcagtcattttaaactcacatcctgtcccccagagtgctcggccattcccagtgcaatccaataactaatattgtgctatgctttgggatccacagattctttcacaattagatctttaaactaaccattgtatgaatcagcattcttcacacatagaaccaataaggatgtgtgtatatatagagaaagatatttattgtaaggaattgggtcacatgattacagaagctggcaagtccaaaatctgcactgtgggctggcaagctgaagacccaggagaggcagtggtgctaatgcagtctgaaggcagcagtctgctggagaattctcctgctctcaggggaggccagtctttttgttgtactcaaaaaggcctttgactggtcagttgagacccacccacattatgtaggacaacttgcctactcagaggctgctgatttccatatcaatttcatcatagacaccctcacagaaacacgcaaaataatgtttgaacaaatactggacaccctatggccccagcaaagttgacacataagattaaccacaaggccaggcacagtgtttcaccctgtaatgccagcactttgagaggccgaggtgggaggactgcttgagcccaagagttcgagaccagcctggggaagatagcaagacctcgtctctacaaaataataaaaaattatctgggtgtggtggtacacacctgtattcctagctactggggaggctgaggcaggaggatcacttgagcccaggagtttgagaccgcagtgagctgt

SEQ ID NO: 123514 - DNA, 1084 bp, Homo sapiens
ttgtgtcttggggtatttggtctttctgtgcttcatctaaaagtatacagaaatacccagttctttctgtttgtttatttggtttggtttcattttagcaaatgtgttctcacaatgttattaaggaagtgaaatttatatatagtgagttactatctccttggcttttttttttttttttttttttaattctacccagcatttttgtctgaaacaaactgtgaatgatcaaagggatatgttatggaattttcttgataacacccttaacgacttgaaatatttgagtcactttagagaggactttttttttccatgctttaagtctgatttatttaaacacgatgtgaccacttttgatgtttaaaatgtattcagtgttagggagcgaagttctgtataaatggtgagtctttctttgaaaacatagctaaatggatacagatgcaaaaccacaaacattttcttcactaggaccgacacccgcgctgagattgacttggtgtgtgagcttgcaaagcgggctggtgcctttgatgcagtcccctgctatcactggtccgttggtggaaaaggatcggtggacttggctcgggctgtgagagaggctgcgagtaaaagaagccgattccagttcctgtatgatgttcaggtaagatctagtaaaaacaatggctcacatttcttacaccttagcatgggttgtcccattctgttgtcaccacaaccctacagataagaaaactaaagatagaagagtttaggcccggtgcagtggctcacgcctgtaatcccaacactttgggaggctagggcgggcagatcacttgaggtcaggagttcgagaccagcctggccaacatagagaaaccccatctctactaaaaatacaaaaattaggtgggcatggtggcgtgcacctatagtcccagctactcgggaggctgaggtgggagaattgcttgaacccaggaggtggaggctgcagtgagccaagatcgagatcacaccactgcactccagcctgggcgacagagtgagaccctgtctcaaacaaacaaacaaaaaggtagaagagtttaag

SEQ ID NO: 123515 - DNA, 1029 bp, Homo sapiens
cccagtgggggctggatgaaggaagagcaaaacaaaccacgaagacagcctggagccgcagccagctctgctgacttctgaacttcacgctctcactgcccagatggccaggggtgtttcctcctctgctggtcttttttaaggcaggatgtttgttgttattgttgttgtttttctggttggttcttaagaaattattttctacatcttgaaaatgccagctggaacctacaccagttgttggtggggtgtgagaactatcctttacatggacttggagcatttgcaactagagcctccacattgaaataaacatttaaaaatgcatatctatggatatacagtgggggatcttccattgtggtaaaaatatgtataacatacaatttcccctttaatcgcttttacatgtatagtctgtggcattaagtacattcacattgtacatacagggtttaattaataggatcttaaaacttaaaagggtattgatgcacatctctgttgccttttacatttcacagtaattagaagggaaaaaacacactctaggttgaaaggctgtcctttcttttggttgtccttgtccctggaaaagctgtcttccccctcagggcctttgacctcccccggctctccctcccatcttcagacacgcccagggccagcctgagtcagtagccctttcttcagcgctccctcttctcctgttgtgcattagaatgtttggagtgttctgtggaaagctggtccttacattttccagtcagttatgcatctcactcataaacctgtttcttcccccatgctctttaatattctgctttcttaattatggttgagctgcctttaaacagtcttagattgttcaatgtgagtggcttcaacaagcctcccataagcctcttatcccctggccccctttccatgatccaaccccaaatctccagataccccctgctttttttatgtttttttgtttgttggttggttggttggtttttgggttttttttttttttttgaggca

SEQ ID NO: 123516 - DNA, 1047 bp, Homo sapiens
aaagaaaacaaaacagaacactgtacatgagtgttcctgggcccagcagagtgctcgaaccagtcagcactttgccctcttttgggtgagatgagatctttaaaatcacttattcccatatattccgttttttggcattgctacactattctatttgagagtaataaaagattacccatgtggatttcttactatttcatgtggagaaatgcagcttttctagcggcgagcctttcttccatttcccagagtccggttaccctcaccgcaccccaggtttgccgtagaaggatgagattccctacatgtaggcgtcttcagagtgaacctgttgctcagggcccgcgagcccacagggctccatgcccactgagcaggctcgtggacgtcggcacgtagctcagatgtgctgatttccagccaaggacatgctttgtgtcaacgatacaggggcctgttgttctcagtaacaagggcagagccgctcccgggactccagttggtattggtaatgcaagcccttgcacctagtgtggtgtggtcagtataaattaatatcgacagcttcatgttgtactttaatttgaagtacaggaaaggctgcttgccaaactgtatttgtagatcatttaaaatttatgcttcatttaaaatgcaaaatacgaatggaaataattactgtgtatccggaaatgtctattcaacttacaagtttattaattgatccttctctttacatgttttacgggacttggaatacactttgctaatatcacagcataggaagatttaacccatatgaattcaactctgtagccttggtgaaagaaaagaaccatgtatttgtcattcactgtggcccccgatgtatgccaacgacttcatttggtgcagggctgaagaaatggcagtgtgttccaatacttcacaacagtggggcctcattaagagatgctagggtattgagagtggagtgttacatagtgtttttcataggtcttctaaaagatttttcagagttgctgacttaagaatttggcctctgag

SEQ ID NO: 123517 - DNA, 1110 bp, Homo sapiens
gtgaaacccagtctctacaaaaaatgcagaaaaaaaattagcttggagtcatggtgcacccctgtagtcgcagctactcaggaggctgagatgggaggatcacttgagcctgggaggttgaggctgcagtgggctgagattgtgccactgcacgacagagtgatactgtcttaaaaaaaaaaaagaaattatagtaaactatatttttttaatgctacaatggataaaaatggttacaactagataagaagcctctaaattgcctgaacacctaagacttatttgctagttgacatctgatctatttctgacactgaaaatttcagtgctttagggtgctaaaaggaaaaaagagggtttgctaggaatcctgcagttgctgagggggtactctgataagggaattttaagcaattacagaacatctcactaaagtttttaaaaaatctttaaccagattaaacttatacaattttgttataatttgtgtttctccaggttccaattgtggacaagataaggaccattgctcaggctgtctatggagccaaagatattgaactctctcctgaggcacaagccaaaatagatcgttacactcaacaggtaaaagttctacttttaggggaaaagaaaaaattcaccttaggctctcagaatactcagcttgacttgaggatttgtacatatcgcaccagctaacctttgcttaatctattgtatggttaacaaagatgaaggtaatatcctcgggtagagtgtagactatatttagaactttatggtgaggcatatatcctctgatccatgcatcatttacttctgtgactataaatgtgtctgatatgggtggtatccctgtttttaggtgatgtgtgatctttcatccctcccactcagccctgaatgttgaagctatcctttggagtagagctgcggagtcagatttagatgaattgcaatgcttcctcttccttacaggcctcttacttactaccttaaaaatgctagcgtggtgccagggtaggcagataggagtgcagcctataaagatgggaatgtttgctgttcttcttatgcaagcggttcactggctttttactgagcttg

SEQ ID NO: 123518 - DNA, 1002 bp, Homo sapiens
cccgcacagtggctcacacttacaatccgagcacttttggaagccaaggtagaaggattgcttcaggccaggagtttgagacgcctgggcaacatagccagactttgtctctacttaaacaaaaattagccaggagtcatggcacgcacctggagtcccagctactcaggaggctgaaatgggaggattacttgagcccaggagtttgaggctacagtgagctatgatcatatcattgcactccagcctgggagatagagtgagatctctgtctctaaaaaaatgaaataaaataataaaaaacacaatataatttaaaatctttggagtcactaaacaaatatacaatgtgaatctcctctcactccagctaacgccaccatatccaacactaggtaaagaccaaagccgttctggaaaatcagaatctgttgccatggctcatgcctggacaccaggctgtccgctcctgacgtcactctttcacttacgacttgttagaaaatgaatgtgtggaatggccctggatagctgctgcagctccctggtttcctgaagtgagccctctgtgtcattatctggtcttctcagccctcagccgagttcctcctgtggccacacacggggtcgcagtgagcgtcagtgcacagtgatgaaatctcctggaacagtcgggtgtggggcatgaggaagggagtggtgcctgactacagaagttcctggaggtcaggaaactctcactggaggcggtggccctagagggctgctttctatgacagagcaggaagctgcatgtgtagtgggacacacgcaccagaggggccaggatctcctaataaggactggtatttatttttacttgaccccattctgggccttgccacagtctgctgaaatgccttgaacattcatcacccgtgtgggagacaggatagtaatttcctgctgagatgactgaggggacggggaatggggacaccagggggactggctcctgcaggt

SEQ ID NO: 123519 - DNA, 1056 bp, Homo sapiens
tgatggtagccaatttttccttcttaaaataactttcttcattcctagtaagcttcatatgtattttatgtattcttccctcttttttatgacatgatacatattattgaaagctaggaaataatgcaagattcttgaacgacataataccacttagtacatctttttgtaagagatagtttttctaatacaaatctttgatatgggaagaaacaagcaagttgttttttaaggttttccaaccctatattctactacaaattaccctgttatggtatgcttccaaaattctttcaaggattatggtttatagagttcaataaacctaatagtttataaaacttctcaaaaaataatctcatgccaaaaataatttagtagtaggtggtctttgtcttgtggtcacatggttttgatattgtctttaagtttctataatttacaagggctgtttaatcagttggcataaatttcatgacaaaaatactaatatgtaagcaaagtatatgaaacaatattattgagaagtaaattacattccatgtagaaaaagactagaaagacaacaccaaaaccttaaattagacagtgttattatgagtagctttttttcttctctttttccatatagatcaaattactacattgggcgtatatcacttttataacatgaaaatacagtaaatagggcgatgataaactgcaagtgcttggggagaatgcttaactcaggccagttgcaagagagtgagaacacacacgcagcctgtgggagcgggctccatgccatcacctggccggtcctggctgtgttgctgtgttttcgcacctcaaaagttgggacagcaaagaaaggccataagagctagaacgtttccataagaagtgtattcagtatgatttgtctagctctgactaatgtgtgcaaaccccacattccactaagcaaatgcaagattgtttttccctgttcatttgttcctgggcccttcttgcttactgtgttgggagttggagaggggataattgacttctttcttctcacagtgttttctc

SEQ ID NO: 123520 - DNA, 1049 bp, Homo sapiens
ccgtgccttcctccacaacccagggaaagctacgtgtgtgtctgtcccatagggaaggagtcatccctgtctcctcagtgtggtgtgttcaggaggaaggaaagtaaccagcgtcgttctcaatttccagaaactgtttatcatattgacaagaagaagaaagctttgtgactcatgagaatgatgttttcctctctggtacataaggttatctaggtccaatccatttgtgtagaggatcttctctcccctagtgtgatatgcacttatttttagcacaagtataaaactactttaaatgaaatcagcctcagccagggaaatatgctgagtaataatgttgccaggtactataccactgagttgagtttgtaattcactgctattaatccctgtgtattagttctgattttttactctttgcatacatagaaaaatggtgtttctcttcagagtcaaggagggaaaaaaagaaaagataaaagatgcttataacacttttgtgtccacccctaaaatcagcatattgatctattattttttctaggtattgatgagatgttgactcatatactttcatacaactggtaatatatatatatatataatatgtgtgtgtgtatatatatatatatatatatatatatatatatatatatatatagactcatttttcttccactttcatctacagcctacttgttttcttccccccatttttcgtatggattcatagcataaattgacaacaaagatacatctcaatttagagcttccaaaaggcacccataaaagtatctggtgctcatggaattgctctttcttctatgtctcttagttacacttttctcttattacacttttctatcccagccatggctaagaggcgtataatcagaagcagctaagcaatatatgcaagggaaataaaatgaatgcaaaccaagataccggttttgtaaattagatagccaggccaccctcagagtcagtttgagggtatagtgggaagcctgaataaaaagagaagttaaacttttaagaaaagg

SEQ ID NO: 123521 - DNA, 1150 bp, Homo sapiens
agagactgtgtcttcagttctcttggccttcccacaatgggaagtccagtgtagaacataccctaggagccaactaaatgtgctagtggcctgccaaccctgcagagggctagggaatcttcaaggagtctgctgccagtgaaactcaccagtactagaatcccaggctccaaagaagtctagaaaagtacatcttttaaggaggtaataagaggctcaagtgcccacaaatcctatctgctcttggcctagttcttttgggatcaatgtgctagtctctcttgtcgaaccagttactgaccagcaagactaaaaaaccaggcccaaacacattctattcatgtgcttagatatggacctacggatcaaatatcccactgtaaagcaaaacagcaaactgtttttcccttgtactttcacactcaacaatagcacgcttctgtggctggctgtgtgggggcttttccttacacaccaaatatttctcacaaacaccaaccaggtgtcctcttattcaattcaatcctgacactgtctacctggagatggtgtcggatcccacagattgacggctcagtcccatgagaccagccccacttcaggcactaattgcaaatccaggccatgcatacttctctgactgcctggctaaaaaccgcattcacagccgggcacggtggctcatgcctgtaatgccaacactttgggagaccaaggtaggtggatcacttgaggtcggaggttcgagaccagcctggccaacatggtgaaaccccatctctattaaaaatacaaagattaggccgggcacagtggctgacgccagtaatcccggcactttgggaggccgaggcaggcagatcacgaggtcaggagattgagaccatcctggctaacacagtgaaaccctgtctctactaaaaatacaaaaaaattagccaggtgtggtggcagacgcctgtagtcccagctactcaggaggctgaggcaggagaatggcgtgaacccgggaggcggagcttgcagtgagcggagatcgcgccactgcactccagcctgggcaagacagcgagactccgtctcaaaaaaaaaaaaaaaaaaaaattagctgggtgtggtggcgggctcctgtaagccaagctactaggga

SEQ ID NO: 123522 - DNA, 1032 bp, Homo sapiens
aacttggatagaaggatacaagacagccatatatatatatatatacagctgttgctctttaagatatccacttcaccctgttgtggggtgggaggaggggggagggatagcattaggagatatacctaatgtaaatgtcgagttaatgggtgcagcacaccaacatggcacatgtatacatatgtaacaaacctgcaccttgtgcgcatgtaccctagaacttaaagtacaataaaaaaaaaaattaaagaaaagagatccacttcgctcagcacatgtgatttggctttggtctttggtgttaatttggatgcctaaagaactgactttccttgatgctcactccagcctttttaggactagattggatacatttacatgtttgctggctgttttttctacagtcacacatcctacccataataatattgcaatattctaagttgtcttggaggatatcatcaagtaggtgtcaagtaaaacttaatggtagactgtaaattttaaaacaagttacaggtcatttgtgtagtctctctctctatatatattaaaagaaacaaaacttttccctcttgaatctttattcctatctcagcttcatttattgcctcgtttgtcatctaaatggtctttgttctttcagctttcaaacatgattaattgacattgtgcagcatagcacagggaaaaggctgaatattttgtatgatgagtaatctagttaaacgcccatctttcttttcaactttaccaacaaatgtgtcttatgcagatgtaagggcggtttgcttatttccctgttcaaaattttatgctattagcctagcatagcatgtttcttttccattgagctagccaaaaataatattgacaaattcatgaagccttccatctgatactgttgcaaacttatgcaaatgtattttagactgttaagggaatgtaagaattaaataattaaacatccaaatgtcaagaatgggataggaagaagtaactggcctcatgttggaagttaatgaaatattt

SEQ ID NO: 123523 - DNA, 1046 bp, Homo sapiens
actaatctcaggagactctgtaaatattctgagtatacatagcccaattacttttgaaaagctaatttaatagaaacttcttgatatgaattgaataaattttttaacttaaaaatcatttacttacaacttaagacagttaaacttgagagtatttgaaagctagtaaacttcagagctttcttcagtaggcacgaactttaccatttttctgacactcagcacggtcagcaatgacacattcattggaggactcatcaatatccctaaaaatagtagcagtactcgtgcacagcctgatttcttttgaacttggctcaatttcttggaagcattgatcatgggatcccgctttgattccttttctgtagactagtgccagtttgcccagtttcattacatttttggaaagagctaaaactatggtatcgttttattgcagtcctcacatcaatcataatttggagcagtcttggtgaaagatgaggaattcagactgggatcctgggcaaggcaggtccagggggcaagagggatggaatgcagtgagtacttattttatatcataagtacagccacctcagcctcatgactttttagccacggcttcattccaaagtgaccacagtcataaggcccaaaactatcttctctctctttctctctctctctctctctctctctctctccctccctctctctgtcatagggacctccctaatcctccaggttgtacagccaggaagggtaaggtattgtcaaaaacaagtgaggtacccccttgatagctcagtgggccagagggcctctggatgctggctgatcatggcaaaaactaaatacagaatccatacagtggattctctgtgctttttctcttcacccctccttacccttgaccaaatttctgactgtgttattttcttattgcagtcctccctgctagatatacaactttgactttcatcagaagaaagtgctcccattgcattattagctaaaccatgttgcagtggcaacgctccttcttccagcttgcctcggtg

SEQ ID NO: 123524 - DNA, 1032 bp, Homo sapiens
agattaggttttataaattatgtttggcaaatgataatccacaaagtagattctaagttaaaatactataaagtactataatttatgtttaaatgtctttcaacctgagagttactctcccttagaagtccccaaaaatgctgaaaccacaccaggttgatatctgacctttcacttttggaaaatgtgtatattgttgaacctctaatctagattcggacaccatcaccaaccagcttctctctttcagttgccatctgcactttactgtttagtttttgttgtctttagggaaagttgtaaaatacccacattcttctcaagttcttcaagtcttttggtttttagtaaacccttttgtgacattgtctttgagaacagaggtcaacaaacatttccttaatggactagatagtagatatatcaggacttgcagaccacatggtctctgtcctaactactcaactctgccgttatagcacaaaaccagccgtactcaatatataaatgaatgaccctgtggctgtgttccactaaaacttcataaaaataagcagctggccagatttgctgtgtgggtcttagtttgccaacccctgatctagaagaaaagagttttgtgtaatgtttgggtaataaaataaacataccaaaccatctcaggaatccctaaccttttcctcattgggaactattttcccagtatccccaagtactggtgggaatgagataaaaagggccaggcatgccattccctaaagcagatagccaaccctctttctttccctgtggaaatcccctctgcctacagggaggagaagcaactggtttggaagctgccagccagtccgtttatttagaaaattctaagcccagttccagatcactttgcgtcaactctaaaatacagccacaaatgaaataaatgttgtttataatcctaccaagtctagtaggtgtgtatgtgcttgaggttaaacttttgtgtaagctccagacttactttaggtttatagaaaattacatcgcaat

SEQ ID NO: 123525 - DNA, 1366 bp, Homo sapiens
ccacaaggcttcaagaggacggagcctaccccttggtcactgaggggtggccctggtctgcaaggctacagaactgccttgccaccctgtggcactgcctctcatttcatagctggcacatgtcattttgccacccccatcacatgtcatgctggcatcaacccagggaggtgggtagtatttttgttgaagagctgcaagaactctgcccagagaagtcgacaacctgctcaagttgtgcagctaataactacaaaagccaagactcaactcagatctgttgactctcagtattaccccaacctttatgccccaaaccaaaggatgcccttttcatttcagtcacgggtaaaatgaactttggcccattccgaaagatgataccagctatttgaacagacaggtacttgaggataatgaggtaattttttctaataagtaaagataattgtttgggtattaaaagctatgattttgtcataattctttttagtccaagtataatagagccagctctttcctaattctctaatggaatggcatttctaccccttacccaccccccaatccaaggcctctttcttctttgtgaattgctaaatacagttctgggctagtgggcagtggttcaaaacccatcgtttgaccctgcttgaacaatcaaaaacagatccagtgtcctaagataaaaccactatacaaagcaaacattccctctcagtggctcctcggtaatgacccagcaagtattgtctgtttcccgtgcctctcactatagccatcagggaccacttctactaataatcagaggtctgcggctattcaaaatgcataaaataaaaatgttaaagcttaggtgacagcttggacaaacgtgggcatctgaaaggaaatgtctggcttgctgacgttgctccttcagggatcacaccgtagatggtgtgcatacccaggtgcggagcagcacactcattattcccccaggaaagtgttgaaggcgcgttccactcaggaagaagattgtgcttggttgatgacaactttctgtccttcccttcctcacctttctagcctgtctcacctcctaggaaaccgtgtgaaaccaaaggtgaacattatatgccaaaaaacatcagaattggagctctccttgctccctcttcccaagacttctctgtagtgccttcactgtggttagaataagggcatgactcattcttttggatgtcactaaatagaactaattaaaatagattttttgtcccagtgaaattgatccggctgttgagtcttttgtttaaagattattggaatgaaggatttgatacttttccccccattcttttttctcacttggaaactttat

SEQ ID NO: 123526 - DNA, 1262 bp, Homo sapiens
tggcgggaggattgcttgaacccgggagacggaggttgcagtgagccgagatctcgccactacactccagcctgggcgacaaagtgagactctgtctcaaaaaattaaaaaaaaatttttttaaatcctaaatattctcattccacaggatcctgcaaactgtagatcccaaacttggaagttctgggaattctgccagtatccccaagtaaatctcttgggaagtttagaatgctgcatggcgtagctgtgcctgctcttatagagtggtgcagactctgcttctccacgtctgctaagtaaaatattccaaacacagatcagccttatctagcgaaccatcactctgctcttgaattttcttttggcctcaaactctagagctataacatgttaacggtttaacaccagaggagaaagctattcttaaactactcaaacatggtttttttttctatttttcagactcctgaaacagactactctttgcctttttgctgcagttggagaagaaactgaatttgaaaaatgtctgttatgcaatgctggagacatggtgaaataggccaaagatttcttcttcgttcaagatgaattctgttcacagtggagtatggtgttcggcaaaaggacctccaccaagactgaaagaaactaatttatttctgtttctgtggagtttccattatttctactgcttacactttagaatgtttattttatggggactaagggattaggagtgtgaactaaaaggtaacattttccactctcaagttttctactttgtctttgaactgaaaataaacatggatctagaaaaccaaccagcaagttttcagtgccagataaaactctgcgctctagaggtaactcctcatgggaggcagctaggagtgttacctgacaccagtttcctagaaaactgtgacaagcaaagcaataacacacgtcgagaaatatctgatcaagcgggaaatcttctgactgtcggggatctctagtaagatctcttggaatgaagtgcactgtgtatccaaaactattttccagcgccagtgaagttgctcttacctaaaacaaatgggtttatgctagtttccaccaaggaatgagtctcgatggccattaaactttctaaggcccacagggctaggaaaagtcgctcttaaaggtcaggtgtttggaaaatgtttttccttttgcccaacccttaattagtagtagagaatgttctgtggcctattcccctctctgggagt

SEQ ID NO: 123527 - DNA, 1048 bp, Homo sapiens
ctttctttctttctttctttctttctttctttctttctttctttcttttctttctttcttcctttcttccttccttccttcctaccttccttccttccttccttccttcctttctttctttcctagacagagtcttcctgtcacccaggctagagtgcagtggcacggtctctgctcactgcagcctctgcctcctgggttcaagcaattatcctgcctcagcctccagagtagctgagactacaggtgtgcaccaccacgtctggctaatttttgtatttttagtagagaacagggtttcaccatgttgaccaggctgatcttgaactcctgacctcaggtggtccacccgccttggcctcccaaagtgctgggattacaggtgtgagccattgtgcctggccaaagcatttacttcagtgaaatgatggggcctcaaaagttctaaaaatgtgtggcccctcaaattctttttgtgtatgtgtgtgtgagccaaagatttatttcttcatttcttgcatttgaagtactcttggatgacatccttggcctgagactccttgccatagtccttaactactacacaactgcaaccaaccactttacagggtttcccttctctgttaattttacagaggcctatcctttcccctagtttcttgttgtcatcaaccttaattaggttgatttggtgttcatggcaaagggcctccacgacttgacatacatgggctcatcacagttgggtacaagcacacaaagatgggcttggcacttgtctaaggcttcggcagcttcgtgaattccacgtgctaggccatcgtggatgagggcggtcttcagcacctcttgtaaagcagtattaacgtccattacacctccagcagcaatgccttccttggccatggcggtggattacgggtgaagctgaatcttgaaggcacccaagcctccgcctccgcacgactcggcagaggcagggaaagagcctcaaattcttagcgcgttaaaaatttctgcctagatctgagagacctcctcttaccat

SEQ ID NO: 123528 - DNA, 1050 bp, Homo sapiens
aatattgtaaaagtcaatatttgtaaaagacacaataggttggcttggcaatggtaagaggaggtctctcagatctaggcagaaatttttaacgcgctaagaatttgaggctctttccctgcctctgccgagtcgtgcggaggcggaggcttgggtgccttcaagattcagcttcacccgtaatccaccgccatggccaaggaaggcattgctgctggaggtgtaatggacgttaatactgctttacaagaggtgctgaagaccgccctcatccacgatggcctagcacgtggaattcacgaagctgccgaagccttagacaagtgccaagcccatctttgtgtgcttgtacccaactgtgatgagcccatgtatgtcaagtcgtggaggccctttgccatgaacaccaaatcaacctaattaaggttgatgacaacaagaaactaggggaaaggataggcctctgtaaaattaacagagaagggaaaccctgtaaagtggttggttgcagttgtgtagtagttaaggactatggcaaggagtctcaggccaaggatgtcatccaagagtacttcaaatgcaagaaatgaagaaataaatctttggctcacacacacatacacaaaaagaatttgaggggccacacatttttagaacttttgaggccccatcatttcactgaagtaaatgctttggccaggcacaatggctcacacctgtaatcccagcactttgggaggccaaggcgggtggaccacctgaggtcaggagttcaagatcagcctggtcaacatggtgaaaccctgttctctactaaaaatacaaaaattagccagacgtggtggtgcacacctgtagtctcagctactctggaggctgaggcaggataattgcttgaacccaggaggcagaggctgcagtgagcagagaccgtgccactgcactctagcctgggtgacaggaagactctgtctaggaaagaaagaaaggaaggaaggaaggaaggaaggaaggtaggaaggaaggaaggaagaaaggaagaaagaaaga

SEQ ID NO: 123529 - DNA, 1142 bp, Homo sapiens
aagagaagaaggaaagaaagaaaaagaaagaaagaacagagaagaaggaaagaaagaaaaagaaagaaagaaagaaaagtaaaaaaagtaacaaactttgtagcattctgaagcactaagtggcatacccaaaaggttgggctatttcatcgctagaggtcattaataacacaaccacttttcttttcttctcttttttttttttgagacagggtctcactatgtcatccaggctgcagtctggaactcctgggctcaagtgatcctcccgcctcagcctcccaagtagctaggactacaggcatgcaccaccactcctggctaaatttttttttattttttgtagagatgggagtttcactgtgttgcccaggctggtcttgaacccctggtgtcaagcaatccttccacttcaacctcccaaagtgctgggattacaggcgtgagccaccgcgcccagcgcaatgattttactttttacaaataagagtatgaacatttacatggcctggaaaataaacaaaaagcaagtaactgctaatctaagcagatgctgatatcttcctcagcacgtaggttgtacactgttggcttgaccctgcaatcctttctgaaaatttaaagggtagtagatgtgaaaagctttgctaagaatttcccaggaacaaagtaaatataatctcacagaatgtgaaaatgttgatagtatttgtgctacttactgatacattttcaaatgtgctgacgttaatcattctcaaatagttttttttttcttcttctttttttttttttgggacggagtcttaatctgtcatccaggctggcgtgcaatggcatgatctcagctcactgcaacctccacctcccaggttcaagcagttctcgtgtcttggcctcctgagtagctgggattacagacacgcgccaccatgcctggctaatttttgtacttttagtagagacggggtttcaccatgttgcccaggctggtcttgaactactgtcctcaggtgatccacccacctcggcctcccaaagtgctgggattacaggtgtaagccaccacacctggcctcaagtaggttttaacagtgctttttgctcttaaaatcctaagtgaggtccaaatgccacgtttc

SEQ ID NO: 123530 - DNA, 1043 bp, Homo sapiens
aaagcagatgccagttggacttcctgctcttccaactcctggctgtgaaacctgaagcacacaatttaatttctccgggcctactcctccccctcctgccaatggtaaaatgagaataatactatctatcccatggggttattgtaaagattattatgtaaagtgcattgaacagtgcctggtacagagtaagaattctaatgtttcctaaatagtcaaaatttaagtcaaaatgggggaaatgtgtataaattcctaaaactaagcattttgcaaatatactgtttcttaagagataaactccagagaaattggccttcgtgtagtcctttaaataaaaataattaattcagaaaacaggcccagtgtggtggttcacacctataatcccagcactttgagaggccaaggcaggaggatcgcttgagctcaggagttcaacactagcctgggcaacacagcgagaccttgtctcaaaaaaagaaaaagaaaaaaaattaattcagaaaacaaatttgatggtgagtaactaacctatggttcccagggtaccattcgattcatgcaattcattaggcatgaaacatcctagtgctgaactactgcttacaccctttctacaaaattgtactaaatctgagtatgagatatttatctggaatttggtgtgaatattccgaaagtttcttccttctttctttcttttttttttttgacagaatcttgctctgtcgactaggatggagtgcagaggcacagtcatagctcactgcagcctcgaattcctgggctgaagtcatccttctaccccagcgtccccagcctcctgagtagctaggactacaggtgcaccactgcgcctggctaatttttttattttttgtagagacaaggtctcgctatgttaaccaggctggtttcttcattcttaatggagattcaaagtatttgtgaaaactggggcactcggttgctagttacaactggaataaattttgtctttcagccccaaagccttaatgctttgcgccaagcaatccagc

SEQ ID NO: 123531 - DNA, 1453 bp, Homo sapiens
cagggagcgcttgcctttctcctgctaatggggaggaggctggaacaaatgtttggagttaaacacaatctgcaggaaagcaaatggggactcggactcgctcctgggcgagctgaaagtcggctgcagcagaagctcctgccttgggtgatccatcatttaataaaccccagagaatccagtgtccccggcaggctttttgctcccctgctctcttgccttctgaggccctgggtcgtccccgcagctctagtcgccctgttagaaacgggaggcgcccgagggccgggtgggcggctgcctggacctgggctggcgcgtcgcagcgcctctggtcccggcagcctgggggcagatgctgctgcagggcgtgtctggggctgtgctcatgtgatgaagcgagggaaaaaccggggggaggggggcggaggctaagaggtggcctttttttttttttccttttcttttaaggagtttgccgcgagcgcgtctccttcattcgcaggctgggcgcgttcgcagtcggctggcggcgaaggaaggcgctctcgggacctcgcgggcgcgcgtcttttggctcttgcccctgtccctgcggcttggggaaggcgtaacccggcggctaggcgcgggagaagtgcggaggagccatgggcgccgggagctccaccgagcagcgcagcccggagcagccgcccgaggggagctccacgccggctgagcccgagcccagcggcggcggcccctcggccgaggcggcgccagacaccaccgcggaccccgccatcgctgcctcggaccccgccaccaaggtacgggcgtgccgggccacctgcgccgggaggcgcgggtctttgggggtgggggtgggggtgggggggtccctccgatttccgccgagagaacttcccagcccatccagccgcatctgcaaactcaggagtgcgaacccctctttggaggcttttcagggtctttcgcgccggggcggggccagagcagcggcgagcgcggcggggggcttgcatctttgtcgcgggtctccaggggaggcgactgcgccatgcgcaataataaaacccgcgccctgcccacggcggctgagcctttctgcgcactcttccggtgggagccatgcagcccgaggcggaggagctgcgcggagggggatccgtggagaatggaccccgggccgggcctccggagctccgagatgcggaaagtcagctgtgaggccaggactcgtggtggagcccgccggggagcccagccaccctcgggttccccgtcgcgtaccgccctggatgccagcggtgcctggagcgagcgggtttggtacccagtcctcctgcggcagcggcccgagcaggcaccgccttcccgaggcagagaaagcctggggtgtagctcgctcagagccaggaaaaacctgggcaggcgctgcgtttccaga

SEQ ID NO: 123532 - DNA, 1903 bp, Homo sapiens
tgctagttttagttaccagttattcactaagtgcccttatctgaacagacattacactggttgaattatcacttgtattaggtcaaatggagagttaaacaagcttttgattactcaggcttaacgtttagatgcactaaagcagaagtcttggttttatctatggttcatttctgtaaaatggaaggagtctttatcttctattcaatcttttgtaatctttattttttccgttagatccagagatagactggaaatcttttacagtctttatatgtaagatccaggcgggggcagggggaatggcttggtctgttatctgccagggtttaattttgagacatggccgtttcacaactgcagggtgcgggaagattagatgacctgaatgctggtggtaagtaaagcctcacacttcacattattccttaattgtctgtttttaaaaatttgtcttaaaaaaatattaaggtggcaacatattcaggtggcaacagagggtggggtgaccagtgacaaactgacttccatgtctctggctaatcttgatttctggagccaggctccagactaagtctggacaatcaattaattagcctttctatatgtattgcctgatgaatgatttcaatgctggacattgaacaatggtctgttgcaacagggtgaggccattgtctctggcaggtggggagatgggggctcttgttagctccatttgattacaagagccttgaatcaccaaaacataaagatgtactcgaatagaagagtccgttgtctgactggtaaatttaaggatgtgtttgaccctcgtgcattaaaacagacaattggccgggtgcggtggctcacgcctgtaatcccagcactttgggaggctgaggcaggcagatcacaaagtcaggagatccagaccatcctggctaacacggtgaaaccccatctctactaaaaatacaaaaaattagccaggcgtggtggcgggcgcctgtagtcccagccactcgggaggctgggacaggagaatggcgtgaactcgggaagcggagtttgcaatgagccgagttggcgccactgcactccaatctgggcaacagagcgagactctgtctcaaagaaacaaacaaacaaacaaacaaaaccagacaattgaggcggccagctgcatttcataattcctcccataagcttcctcctatttgccacttgtttagcaatggaaatggagaacgaagatggcctcaaagtgactacatcaccagtgttacaaaaatgggccagaatttaaggcaagaattatatgtttcttaatagagggatgtttctctgtgtgtggctacttgtattcctgtggatttttaccagattataagagctgctaatttctgatcagaacagagaccaaaaattggagatatggatgtggggatgattcttttgggtaccgatagactgcaggaatcgcagggcttcctttaaatccattacagcttataggctagtggatgaataagataagtggagattttctcttgaaatatttccttctatgaagaaaaggccttgaaatgtgcatcctctttgggttgactaatttctatgcctttacagctttaagctgacattataagattattctagtttggatcttgtaagataattaacaaaatggaaataaaatgttttgtttttaaaaatgctaataaattatttattttcctttgtcttagttagttttaatacatattcagtgcttaaagaacaccagtgcaggaaaactcaaactaaatggcatcatcccccatctctataattctatatgcagtagccattcatgcgaagttagaaattagaatttatagcactaagcattctaagaaaaattaagccagtacgttta

SEQ ID NO: 123533 - DNA, 1057 bp, Homo sapiens
ggaaaccctgtagtttctctctgcctaatcttaatcccagttgtagtagcatgtcagtttcatgtttgatttcaaaacgaaataaaccaaaatttaagaaggagagattactgcagtttattggctgaccatctatttgttatatgcaaatactgcaaactgggagtattgaaggattaaatttttcctaattcccaaacctggtggtgctattgaatcacctagagagcttttcaaagacacccctacacctcatcctggatttattgaattagaatcccaggcaatctcagggtctgggattctgtgatttttttttttttttttgagagacagggtctcactgtgtttcccaggctagtcttgaactcccggactcaggccatcctttggcctcagcctcctgagtaactgagactaccagctcctgccactgtgctgggattctgtagtcttaaaatgctcatcagatattctaatgtgtggggtgtgggctccattaccttaagggaggggaaggagtaggcgtaagagctgaataagggccagggagaggttcaggtctaggtgacactgggtgatagcatgtgcagatttcactgagattggaacttgtgtgggtgagagggacggtttcacatgatgaaagagtagcattttccttcacacatctggaggataaaataaaggaaaatatttcttccacataatttcattcctttgtttgactatattaaaaagtgggttgctggccgggcatggtggctcacgcctgtaatcccagcactttgggaggccgaggcgggcggatcacgaggtcagcagttcaagaccagcctggccaacatggtgaaaccccatctctattaaaaatacaaaaattagccagtatggtggtgtgtacctgtaatcccagctactcgggaggctgaggcaggagaatcgcttgaacctaggaggtggaggttgcagtgagccgagaccgcatcattgcactccagcctgggcgacagagcaagactctgtctcaaaaaaaaaaaagtggattgctaacgga

SEQ ID NO: 123534 - DNA, 2559 bp, Homo sapiens
gcacctaaaaaatgaaagagcctggtcattgactgtattccttccatttgtaggcaaagaaatgaggttgcttggggaatgcgtgtctttccctccagagaagacattttcgctttgtaatttttccatccccagtgtctgccctttggtttgttgttcagaaaacaatttatgatttatttttctttgtgtctgagcctatgatttttttattgaattgagccattacaggccctgggttttacctgccacaatgatgaatttctattgtcactccctgatattgaccacttttagtgaagacatgcttcattggctcctagttttcttcactctgtaaagtatattttgttgtgatacgtaagacaagattgttgatgcatttcacagtttttaacctctttatgttttcagttcttggtgataatttttcacaaagttataggaaattactcaaagaatatgtctttagaaactttcgtttgaaattgtttttcatttggatacatatgtaaaagtcttttgttcgttttaatttttttttcttttaaaataaaaagagacaggtcttgctgtgttgcccaggctggtctcgaattcttgggctgaaaggatagtcccacctgggcctcctgaaattaaaattacaggcatgagccactgcacccggccaaaacagtcttattcaacatcaataatatattgaatcctatagaaacttcaaccttaggtggcctatctactttgaacttacacttgatatgcactgcagtacaaactgggagggagagggggaataggattgtagtctacaagagattgctaagaattagccaattttgctatgatgatttttttcacaaatgacttttttttttgaggcagagtcctgctctgttacccaggctggagagtgcagtggtgctcactgtgacctctgcctcctgggttcaaacaattctcttgcctcagcctcttgagtagctggaattacaggtgtgagccaccacacctggctaatttttttgtatttttagtagagacggggttttaccatgttggcctggctggtctccaactcctgacctcaggtaatctgcctccctgggcctcccaaagtgctgggactacaggtgtgaaccactgtgcccggccagaaatgacgtatttatccaatacttagacatgagttcctgattcctatattgttaacctaaatatttaaatggaaatttttgttcttgttctgctctgttttacatgaaataagctattgaaaagcagtggaacatgtcactacaaaagtttactaaattagtcttgaccattacaatctttgtattccactgacaaaagcagtggaataaaatttaaacaaaaaatagttgaccttaatgtgggcaaaaacccagttgattggttttatagctgatttattttctttgtaaaaccttcaggaactaaagtttagtctgaactcagtttgatggcagttttagattagtcttttttgtttgagacggagtttcactctgttgcccaggctggagtgcagttgtgtgatctctgcttactgcaacctccgcctcccaggttcaagagattctcctgcctcagtcttgcaagtagctgggattacaggcatgcgccaccacactcggctaattttgtatttttagtagagaccgggtttcgccaagttggtcagactgatgtcgaactcttgatccacccacctcggccttccaaagtgctgggatcaaaggtgtgaaccactgcgcctggccttagatcagtcttcattttgttgataatacagaaagctcatttagccttgattaagacaacgatcggttattcgtttgatattcgttaaagacttactgaggtttttgaatttttgtcctaaactgagaatctggtgactgaagagggcttacaattttatcttgaatcgcaacaatgacagagatttcaagtcacttctggaactgtgcctgataaacaatctctgcatgacagggaggaatgcaaagaatgcttaagtattcagggaagtaggtcatgttaaagtattacatttgtcagagaaagtttctcaagcagtccctgtgatcttcagaacccagcttgttcttcgcccagaatgctttagttgtaggcaaatttgggggctgaattaacttcccagccgctaggagggctggactgaaagtcacagattcagcacatgtgcctgcacccttgtcaacaaaaatgaagttacagttataggcaggtgactggaaaaacagtagatgggattgataaatgtttttgttttttttttgagacggagtttcgctcttgttgcccaggctggagtgcagtggcacgatctcggctcacggcaacctctgcctcccgggttcaagcagttctcctgcctcagcctcctgagtagctgggattacaggcatgcaccaccacgccggctgattttgtatttttagtagagacgaggcttctccatgttgagggtggtctcgaactcctgacatcaggtgatccacctgcctc

SEQ ID NO: 123535 - DNA, 1227 bp, Homo sapiens
cactgcacccagcctagctcccacttacaagtgataacatgcagtatttgtttttctgttcctggcttaattcgcataggataatggcctccagctgcatccatgttgctgcaaaggacatgattttattcttttttatggctgcatgtcacaacttttaaatttacagtatgtgggaagtgccttagattatcctgatgaaagatttcatatttttaatctccttattaagttacatctgtctagacttgctgatactttggggattgggtggaagagaaagaggagtagaaaatgaggataagtaaaatttttttgcattgagcacactttggatggatttcattgttcaaataattctgataatttgcattagatttagtttttattttttggtctccagtaacaactgtttgtagaactaatttctatggcacgtaattgcatgtggagctaaccctcctggggcaagccacttatgcctacaaactctcccttaaccatattttctggggccagagacaattggactactgtggagtgaaaagctgtagattattgtgtcctcaaactctctgccgctcctgcaatgaatactggaggtattgtaactgtatgtgaacttgaacgaagatcaggggaaggtcacacagagccttcttgaatggagttgcaaattcttcctctggcaaatacaagtaaagggaaatgtcacgagtttgttgctttttatggtcatgaagagggaaaaatccccaaagcttgtgattcctttgctgtgagctgaccagctggcttttttcagcattggagaagaacttgagaaggacactgatttattttttccttgagtctgatcactgacagtctcatagaaaagcaaataactatattctgagactgtaactaaactaaacttttaagaaggttgtttctttgtaaaacctaaaaatcaacatagggctattcttgtaagattacttttggccacataaagaggaagagctcattctactgattcctgcttcttaataaatatctactaaactatatgtattttattttattaatttatttatttgagacagggtcttgctctgttgcccaggctggagtgcagtggcactatcttggctcctgggttcaagtgatcctcctgcctcaacctcctgagtagctgggcttacaggtgtgtgctgctacaccagctaatttttgtatttttag

SEQ ID NO: 123536 - DNA, 1053 bp, Homo sapiens
ttttttttttttttgagaaaggaccttcctcttgttgcccaggctggagggacacaatcacacctcactgtaaccccaaagtctgggctcaagcgaccctcccacttcagccccccgagtagctaggactacagttgtaggccatcacgcccagctcttttctttttgaaaatattgtaatattagatactttacggaatactcacaatgccccattttggcaatcatatttcacaaacctttgacttttgactgagttgcagttagcttgaaacactcgcgttttgctttcacttagagaattaccatttcttatgtgtaattctaaagatatatacagttaacaaggtcatgtttaaatttaccagtaaacacattggcagcttctttccattctgcaggaagtggctgtgtttctgtgctttcatcctgttatttccttagggtaaacatctaggcttcatgcaaagtagaaggggcatgtgcgtggtgttcaggatgtggatttgaatccccaactcagccacttacattagataagtgacttaacttgcgagcctccctctacaaactggatgaaggttgctaaagaatatgtttttacaagttgtgctaattttaatgctactgagaacaaatgagtgctcagatttggccacgtcagtgatattggtagtgttactttgacaggtgaaggatggtgttttaagtttgccttgacttttgcatttctgtaacgtatgggaagagataactgtaattctgtaggtctatgtattggttcgctattttaatttcaggttatgagcagatttagtgcccactttatcttttgaggtcttcttatatgcttcagatctcatggttgatacttcacatttgcaagaatttctcctacacatagggaatagcctcccaaatcctaactcaacccattgtattttgatgatgctatatagaattttaagtcttggaattggggcattctatgtgaggctaggacccaatttcctgcggcttcattcttttctccacacacgtttgttttattta

SEQ ID NO: 123537 - DNA, 1132 bp, Homo sapiens
gtccccagaagcaataactggaaacagttttagaggacataacctaattggtataaaaacttttcactctcagaactatttttcccattgtcataggagtggataccaaataatgttttcctgtcttggcagtgattcacattactgagtttgctattgaactattttttccttgccaggaagtacacatcagagagctgcatttcactgtgtgtgtgtgtgtgtgtgtgtgtgtgtgtgtgtatctatttcaatctactgattaccaaagagcttataattcttaatggagagtttgtggaaaagatgaaaaaaggatttttttaaagaacaataaccagaaagtttgagacaattgagtattatagcaaagtcctttcttgcggtgacttctctggttgtaatgtcttgggttaaaaaaaaaaatcaatttcatgcaaaaaaggggggaggattatgtaaacaaaaacaaaaaaatttaaagtatcacagtctatcatttgggtgagttgtggaggggaaaagaagtcatttgtacagtttgatgaagaaataaatgtattttctagtttctaagataatctgtgtatgctctaaacttaaagcacatcatttcctgtaagtcagtatttggttcaaaagtgcaaaggctttatgattgatcatctacatctatcacatgattatcttctggaggtgataatttttttttttttttgagacggaattttgcgcttatcacccaggctggagtgaaatggcgcaatctccgttctctgcaaccttcgcctcctgagttcaagcgattcttctgcctcagcctcccaagtagctgagattacaggggcaccaccatgcctgggtaatttttttgtatttttagtagggacgaggtttcaccatgttggccaggctggtcttgaactcctggcctcaggtgatccacctgctttggcctcccaaagtgctgggattacagccatggaggtgataatttttttaaaagattaaggcaacagcaatttgagagtgagtcattgatgggacacttgtttagggaaagccctttttcctgcagaagcaaacttgcttcaggaatggcatcaggctgaaagcattttctttgcatttc

SEQ ID NO: 123538 - DNA, 2205 bp, Homo sapiens
tttcctccaagcagactgataaacactggctgtgctcaagcagcagcagggctggattcgcgtcacttactttggtatgcaggaggctgcttgtattccgtggcgcagggagctaagcacacacgtcagagaaagccatttcaatttatcattttaattttgctattaagcatccacggaccctaaatggattctccacaatggcatctgcaagtccattatcagctaaatgtttaatgagttttttaagtaaccgatggatgccacagtgtataggaaactttcttgagtttttttcacatataaggaggcatttctcgaagtcacttgggatggcttaacatagctcatccctgccagctgacttgtggcctctttcccttccttccatgtgcagtgccttctatcttgaatgctgcagccagcagaggttctggcagtggaaccctctgcctagtgggcttcagaaaggagcctgtgaggcagagacatttcaattgaaaagcagtttagaattcagcctccatttgctaattcccatagatgctcgtcagcaaacacaggacagttgtttgtggatttgaaatttgctactttttcattctgtatcttacattttggtgattgtgctacaaatatttggagttgaacataataggataatcactgttgattcttggctaaatcacattatcttaggccatctttgcaaatcaagtgcattctactgaaaaggagacaagcaattttgcttgttctttttctctttcagtcgaatggagcatggacttagaattgaagttgcaatggggtgggcaatacattctaactgggtttttagttaaaaatcagcaatcagtttaagcaatctggttcaaaggcagtatagctacaaatttgcagacagtgtgtagtacagttgtccttcagtatcttagacgaattggttccaggaccctcccacccctgttggtaccaaaatacaaggatgctcaagtcccacagtttgccctctggatccaggggttcccaacctcagattcaaccaaccaaggattgaaaagatagtttttgccggatgaggaactgcagatacggaaggctgactgtatttcatttcaacaggggtctcgattatcctcctcattgaatggtaatatgttacctgttttggcaaagtttggagtaaacttctgtctccacctccctgtattgcagctgtcagcatggtgaagagcctgcaaggcgtgttgatgtgtgctgcctagggctgcctaacacaaaccaaacaaacatcccttctcaggatgggagaagagctttttatgagaccttcttctgtcttcctcttgcccgtctctgcctttgcccccataagcaagtgacagttgtgtagtgtttagccactacgtatttctcatatctgtcttcatggtggagcttctgatactcctatcttagggacacacctttgattagaagaagtaatattagcctctaaaattttttgaactttaaaatcaagaccttacttgggataacgctggtttcctcctctgttgaaattgtttatctcttggactcagaaactatttagcctttctgtggcacacagtggatttcaaaacatttggtattatcagatttctaagcaaggatgtgatgtaattattttactaccaaatgaggattcttttgagagaagcagccacttaacgtgagagtaattgcttgaatatgaagtggtgtgtaggaattgagtgagaactgagatcttgacttgcacgtatgctgtagataaaacctactatgaatttgctggtgcagggccacagaaaaaactagtcatgagaattgccagaattgtcagaaatgtgttttgagatgatttatattcattattctaactcttcacaataacattttgcttattttgcaattggaatttgtggaggtccaagaagtcaagatggtaattaatttgcccaggacagctggtaggtgcatcagctcagagcagcgggtggtggggaacttgtcttagacattcacgatgcaggtcatgacactggactataaagctgtagctctaggggtctgtattctgtgctctgtaacttgacatgatctgggacccaaagttaaataactaatcaagagaagtcaggtgcttttttgttaaacacggaactccagtattcctct

SEQ ID NO: 123539 - DNA, 1028 bp, Homo sapiens
tgtgttaaaacatactgcatgcatccgtggtgtctttagttatggggaatgttagtagatgtgactcagagagggttccttgaggaactcattttagaaaatgcagtgatttcctccttagtggttcagaatgcacattaaagagtctttaaattctaagtaaatctgcttaactctgtctgcgtcagagtttcccaagctaacctggagcacagaacacttctgagataatgcgtggtatgttggtgttgatacacgcagtatactcatgctctcagagaccggtttgataaatgccgatctttgagaatttagaggcctaatttgtagacaacattcctgataaaatgagttcacctgtagtggccagtcctttggggtttccataagcaatgtgagatacattattttctaataagacatccaacaatttgaatattaatgttcaatggaattaattttgcatgctaaaagccaactgatgattttagtggatctctcttaacaatcattctttctcatgtctaaagatgagtttgggttatttctcctgaaattatggttaactaactttcatgaattttactgaaaatgatgagaaacagaaaaatctgggatttgtagacagtggcgagaaactctctgtctagtatttatacccctcaccaagcagcactcctgggccctcaagctctgctgctgtgcagaaaccgttccagccgccttccttaaatagcaagcactgccatttcaaacacaagataaaattaatattggcattctggaaattagcatttttgcactaggattaaattaaattagttaaacgaatgtgacagcatgacaaagctggtctaaccaagccaatcaggtattgaaagtggataaatgttgctgttgggtgaatagctcctactcggcagttggtgggatgatgtagcgtaggctgtaaaccccatcttggaataaagacctgcaggataaagtgcagtaggacacgtggggttcagacagctgggccctgtttt

SEQ ID NO: 123540 - DNA, 1064 bp, Homo sapiens
ttaaatgatgtttttatttggagacgagggtctctctatgttgtccaggctggcctcaaacttttgggctcaagcaatcctcctgcctcagtctcctaagtgctgggactacagcgcacgtcacagtgcccggctcagtaacatttctaaaagagtagacggaaatttgtgcctgtgtgctatagtcttcatgtttaaagagactcagtttggctccaactaaagataccttggattgggcaattcacagaggattataagaattttttcaataattttaggtacttggtagaaccctaaactctatagaacttcagagttctggttcctaaataagaggcacaattgaccgaagtttattgcattgaaattgaggtattaagatggcttttttatgttccctgtttagtttgccatatcatgaaactgtgtatgtcaacagtttctaggtttaagattcactgggttaccatgtagcccacgataatatgtgattcctgctttcctcccccaacttttcttcctgttactaatcaaatctaagtcctgtgtacatactcaatgatatttagttagaatactctgacatttggctgggcgcagtggctcatgcctgtaatcccagcactttgggaggctgaggcgggcggatcagctgagatcaggagttggagaccagcctggccaacacgaaatcccgtctctactaaaaatacaaaaattagctgggcgcagtggcaggcacctgtaatcccagctactcgggaggctgaggcagaagaatcacttgaacccaaaaggcggatgttgcagtgagccaagatcatgccattggactacctgggggacaagagcgaaaatccatctcaaaaataaaaataaaaaaaagaaatactctgacatttttgcagatgggctttgtggagacacactgcccccttctccattccctaccccctgcttttgtctttaggtttcatttaaaatgcccatctttcatattttggtaagagaagactttaagtggaaatgtaatctgagtattctgtttaataaatggactc

SEQ ID NO: 123541 - DNA, 2316 bp, Homo sapiens
gtaattatttgtttaaaagtctgccttctgacttgttcagtcaattatgcttaacctgcatctaatcacaaggaaacattatttattattttaaagtaaaaaagaggtttttaagtctgccttccatagtaatttgtaagctcaaagctctgggaaacacatctgattttttcatggttatatttgaaataggtctggaaaggtgaatgtatgtatctggtgttccaatgaatgaattaatgagtggatgaatggctgatgggcacacttacccagatacaaggccctatctgcttgtaaggtagctggatctttcagacaaatataagacttaactcttcattgtttttgaacttccttttctctgtatttcttctttcactggtttgtattctggaagttaatgccttgtttctgacttggtcatgaggactgaaattaagtttctatggctttgtcttttccatagctcctacagaagaatggtcagctgtccaccatcaatggcgtagctgagcaagatgagctcagcctccaggagggtgacctaaatggccagaaaggagccctgaacggtcaaggagccctaaacagccaggaggaagaagaagtcattgtcacagagggtaagccgcccctccaggaactggaaggcacacagcacttgcaacaaactttggactcagcagaaaatactctgtcatactgcctggtggtggattggtgttaacagcaaaaacaatcaattggttacaaaaggaagtatttatctgaccatttggataccccctatacttagaccttgaagttatgtttcctttttcttatctggaacttgatgctttttaaattattgttgctttgtcccaactgcttgtctggagttgaatgtgaattcttgttggaaacagaagtcatggttgctttaaaagagtcattatctctccctctagagaggagcctgctatacttgtacaactctttctgataggcgcattgcaaggcacgtacccctctttgcttaaactatgatgtgctgcgtgttttatagctcttgagcctagagatcttcgaggaatggttattgaagagtgaccgtttggacacagtattgggatttgatttttacccatatagggggtgaggaaccgtatcttgaggtcagaattgagagcatgtggcccagtaagtctcttgtgaaaagcgaaaggctgcatgttgaagaaggaccttgagctcgttgttccatttaattataaataaagggataaccaataactgctatcaaatatatgtaaaatgatgattcggcatacggtaaattgattcgtgtaatatgaataagagagacaaatgaagggaaaagtcctttcacaggagattcaacatcgcctcacttagatgagattcttcaaacatgtggaacctgtttttcttcttgtttgatgcccccacagagctgcttcaagcagggagctgcttttgaagttggtgggaatacttatctgtatatagcaccacaggcacaatataaagttagaaatatacacagtctcacaggcggagtatttgcatgacctagtgtgagagtttcaaataattttcacccaaatgattggaatggacccaactcaaattcccaagtccaaagctttgtctttcccatgttaacttttgaatcaagtcaagcaccagcaacatgtgagcttactatgaccaagtctgtaaggttaagacaaggcaacttggtgactaccaaatgaattgtgcaagggatgagagctgcagggttcaggtggagcagtcacttgaggtgagaggggagattagggggaggctggatttagatgtgtgtaaacaaggaatgtcagcaaaagtgaggagaataataacagccaacactttatgtgcttttattatagggcccagagaggtgccttttgtgcgttatcacctttaatagttacagcaaccctatgaagtaggtgatattgttcccaagatgcaaatccagatcagcagattccaaaaccacttaaccactgtgctctcactgtgccgggcaggttcggaggctggtgtgttggaacagcctagcccctgcaaagagtttttattgaagggtgtagaatgaaagcccagaagggaaaaggggccagataacagggccctgaaagcagagtggagtttagaaagtatttagtggacaacgtgtgatcactgaactatgccaccaaaggggtgccggaggcttcttgtctgacttaggtgatctgtaggatgtataagaggagggagggatggggcagggacaca

SEQ ID NO: 123542 - DNA, 1077 bp, Homo sapiens
cacgtcagcctcccaaagtcttgggactacagaagtgagccaccacagccagccttaagtaatttctgttcacacctcttgtgtacccagagttgaggatatttacaccagcagcaatggagcaggaagcagctgggtgctctgaccttggcatttgccactctggggctagctgctttaaaactgtcagccagtgaccagatgaaccaggccttgttacactaatcagataacggtatagaggcggctcccggtgtgtgcacgtggaccgccactgtgacaccagctgtgatcacaccccccacccccggggaaaaatgagaaacaaaaaccctcaaaatgctgtcacttaaagcagaagtctttgaggggatgtatttcttaacgttttacaggattccacttttctacatctgagtattttcccccagatatagtaacaaatacaacactttagagaatttcatttttctaatggcgcttaatgtcatcgtctgcttttattaaatttgccatttgaacccaccagctcctggtgtacagttcctctgggaaacagaaaggccgaaagattaccgccagataatcccagccctccctaaagatcttgttaccttacagaaaatccattctgagttaaaagtcgttcttctttgctttgaacatttaataactttatctgtatagtaggcaccctaagacctgctctgagcctcttcaaagatgactcccccaccccatacctgtttcctctgcaagaggctgctttctctgcccagaaggaatatttttatgatttgattccttttctatttcagttttcaaattgtgacatcattggtatcttgttagaagtgcctgtcacccacattacagccctccactcctcctttccttttctctacaccagttgttaacatctggcatttgacatctgtctctcacccacactttggctaaaatataagaatcaagcccaggtgcggtgacttacaacggtaatcccagcactttgggaggccgaggagggcggatcacttgagcccaggagttcgagaccaatctgggaagcatagt

SEQ ID NO: 123543 - DNA, 1003 bp, Homo sapiens
agacagagtctccgaactctcccaggctgaagtacagtggtgcagtctcagctcactgcaacctctgcctcctgggttcaagcaattctcatgcctcaggctcctgagtagctggaattacaggcgtgcaccaccacgcccagctaatttttgtattttagtagagatggggttttgccatgttgaccatggctggtctcaaactcgtaacctcaagtcatccacccacttcagcctcccaagtgctgggattacaggcatgagccaccgcacccggcctctaatctgatcttaaaagccattttctatatttgaagttttaatttaattaaacaaaaagttcaaggggggaattttattcaaaaatatcttgaaacataatcctcttggtgtcaaagaataagataaatcccttcacaaatgtggccactaaacgtcatcctctcatccccccatatgtgttctgctgaatgactggcggtcaggactatgtaatagggattggttatagccagggatgggggaaagaagttggtaaatgccatagctgcttgccctaaagattttcagtcagccttggagatgttacctataaatctctatagttcggaggccactcaagtccactttcaaattgggtccatgttctggcccatttgagaaggagccaggcaagtcagcctgtaggcttgcccaagtaacagtctaagaattaggcccttttctgctgggcacagtggctcacgcctgtaatcccagcactttgggaggctgaggtgggtggatcacaaggtcaggagttcgagaccagcctgggcaacatagtgaaaccccgtcctactaaaaatacaaaaattagcccggcatggtggcatgcagctgtagtcccagctattcgggaggctgaggcaggagaatcgcttgaacccggtaggcgagggttgcaatgagccgagatcacaccattgcactccaccctgggcaacagagtgagactctgtct

SEQ ID NO: 123544 - DNA, 1056 bp, Homo sapiens
agaagtggcgagcaaaagggggaagaaccccttataaaaccaccagatctcatgagaactcactcactatcatgagaacagcatgagggtaactgcccccatgattaaatttcctcccactgagttcctcccattaaacatggggattatgggaactacaagtcaagatgagatttgggtggggacacagacaaaccatatcatatagaaaaggatgctttgataatgtctgaagatatattctctgggcttaaaattcaacaactgtttagcctgttaatcaagatttattcctgcatatcatgcttcgaattgttttcaaattgctctttacttcaagtatcagtatagcctgatatcaggtagttttcctccgacctctagtgttaaccagtgcatgcattagtcattcaggtgaaaagtgctatgtgctagattgaattaattgagtgaactggttgctttcatgtgtcttaacatggacgtgcaatatttagaccaaccgcaggcataaggtcattatccccctgtattaatttgctaaggttgtcatgacaaaatactcgactggtggttcaaacaacagaaatttattttctcacagttctggaggctggaggtccgagatcttggtgttgcaggtttggttcctcctgaggcctctctcttttgctcgcagacggccgccttctcactgtatcgtcacatggtctttcctctgtgcacatgcacattcctggtctcttggtgtgtccaaatttcctgttcttataatttttttgagacacggtatcgctctgtcacccaggctggagtgcagtggcgcgatctcggctcgctgcaacctccacctctgggtttcaagcaattctcctgcctcagcctcctgagtagctgggattacaggcttgcaccaccacacctggctaatttttgtatttttagtagagacggggttctactcttcaccatgttggccaggatggtctcgaactcctgacctcaagtgatcagcccgccttggcctctcaaagtgctgggattacaggcgtgagc

SEQ ID NO: 123545 - DNA, 1034 bp, Homo sapiens
aagaccccgtctctacaaaaaaataaaaataaaaaaattatctaggtgtggtgttgcatgcctgtagttccagctactccagaggctcaggcaggagaatcgcttgagcccaggaggttgaggttacaatgaatctcaccatttacactgtagcctgggtgacagagtgagaccctgtctctaagaaaagaaaagaaaaattcatgtacctcatttctgggaaatttttttacatatatctataccttttcatttggtctatttcatagagttgcctaggtaaagaaataaatatatgtggactcaaggagagaaataatatttattctacatcacttttattatttgagtttttaatgtttattttcccgttgctttttaaagtgattttaaaattctcttttagtgtttctgttgtatcataacaattcctttgaggaactattcttcagagtatttatcttggattttgaatagcaataaccatgtctatacaaacatgtccagttcaactggaccataaaactcaattagttgatatttatctatgtgcatagcatgcagcagagagcctgcccatcctgtagataacctgacagtgtcatttagattcagggtgtgtatagatagatagatacagacagatatctatctatacacaccctgaatctaaaagacaggtgtctgtctatctatctatctatctatctatctatctatctatctatctactatctataactatctagatatagatatatctctatatagatatatatatatagatatagatatatatatctatatagagatatatctcctcttttacagttatccaatttggagctgtatttcactcaactttaaattatcttggagcatttcaaaggaataacaggaggtgaggtcaccccactgattgccagggttgacttggctgatcgggctggctaggcgggtgtccccttcctccctcaccactccatgggcgtccctcccgaagctgcacacttggttgaagaggatgaccatcc

SEQ ID NO: 123546 - DNA, 1724 bp, Homo sapiens
ctctgcccatgctcgtctgtccctatggaccgccttcctttgtgccccaggtagggagtgtcccctcatcccttcagagaccagctccaaggctacctcagaggtgagccaaactagagctgcccactcccgccactgggcgtgtccaccacccactcccgccactgggcgtgtccaccacccactcctgccactgggtgtgtgcaccatccatgactgagctcccgaggccagggatagtatctcatttagatccctgggtgttttgcgtaataaatatggagcaacaacttggtaaatatttgttgagtgaaccattctgatttgggaaaacacgttttctatcatccatctatgtattatacagcaaaatgtttcctataattcttgctttgggtggtgatgtcttcctctaaaaatcctaatttaacaaaaacagagaatggaaatgataaaagaaagtctcctgcattggacagtgaccttaggtctcatctttactcctgcttttatcctaattgatgacttttctttgtaaatgcagacacacagaggctcgctgggcagctgggccgtgcaccctgtccttgatcattcttagaggtagagatcaaaggagacccattggctgagagagtctacaacttgccacatgatctattgctctgccttgtgattttaattgcctctttaagaatatcaaatcaggccggacgcagtggctcatgcctgtagtcccagcgctttgggaggccgaggcgggtggatcacctgaggtcaggagttcaagaccagcctggccaacacggtgaaaccccgtctccactaaaaatacaaaaattagccgagcatggtggcatgcgcctgtaatcccagctacttttgggaggctgaggcaggagaatcacttgaacccgggggtcagaggttgcaatgagccgagatcgcgtcattgcaccccagcctgggtgacaagagcgagactccatctcaaaaaaaaaaaaaatcaaatcagatgtgttagcgtcttcatgaatgtcataaaaagaaatgtttcagtgccaaaactgaacagcagtacagtgacctttgaaaatgttgtttagggtattaaatgtgtaactagtgacattttgtgtgtttttctttttcttcctatccagctcagtggaatagctgttgcttgtcccagtgttagaatttggactgatagaaaggagaggagctggagattcattctgctctgcaagggcagactcgatttcagaagtggcaccagatgatagccttgtgttgtccccaaccactggtgctgagaaatgatgcagaaccaagccctcagatcccagatcacccacggctcctgggacatctctggggaagggacttattaatgtagaccctgatgcaacatcccaagtcgtctttatccatgatttgcacagccaggacactctggggctgggattgggaggagaggaatggccaagttgccctgcccccttggctctgtggactccagaaggatggtcagtaccagcagcatttcacacacaccagcctcattattaaaattggagcaatttgtgaaatagagttgagacttctctagagaaaaaaggttgggaagcagctcagtggctgggtctgggagtcagcttccaggcaatatctcactgagtcaggacaaggcccatcattccctgttcccgccaggccgggta

SEQ ID NO: 123547 - DNA, 1125 bp, Homo sapiens
ctatttccttgaaatgacttaaaaagctgagatacagaagtattagtaaatcggtgccaggaatgaagtaaccgtttagatccaatgcgccggctccagcatcgaactcatgcccagcaccctttaaaccctcccgggactctgcagaacccgctgaccactcacagagcccagctcgggggagggctttaaggtgaagcacgtgaccccctgcttgtgcggcccgggcggggaagtttgcgctcccgaagtcctggagctcagcaagggaggggccagcgccagcccgcgtgtgggtggctgggtgggggcgtgggtgggggtccgcctataattatctggggaaatgcatccgcgctctgcttttcgctgcggcagctccgagggcacctccggttctcccccatcctccgggagtgtctgggcgctcagtccgctctgatcccgccgaaaccacctgcggttggcaggcaggagactaggcgtctgccggggagggcagggacccgctaagctgatctcctgtacagtagtgctacttaaaatatgctggggaccatcaccatcacaggtaaggcacaagccaggtcgcttttgtcctccctggacggcaggcacggggcacgaaaaggggctttcttccgttgaatgagcgtttggtggggagcccgggaggtcagtggcgggaccgttattggcatttatttctctccgtgtactgagtttttcttcagaagaacattctcccttgggctcagcaagaatcagacaacctcagtgtttcatttttggctgagctggaatcttcttgactgtgcctatgggagacctttagtatattttgttcggggttgtacccttccccttagggagagagggatgtggagaggaacaacagcagccgactgaatagaaatatgtcagatttgtgtgaatttgaaaataagctgtgaaagcttaatctcttgccgtagtcatagacagaatacattcctcttctgggcaaattacaagtgtttgcattttgacttgtttactaggaactttgaataaaggtacacttggtggtttaggggactaacatttaagctctgctttaagtggtggttttaataaagccatagt

SEQ ID NO: 123548 - DNA, 1166 bp, Homo sapiens
tatgccattgtactgtggcctaacctgcgtattttctcttcctgtcatcaagaaaattaaattccgtttgtgaatttaactttataggaacaggacttctttattctttaaatatttgagatcattgctgccaaatctttttttttgtttgtttgttttttgtttgttttttgagatggagtcttgctctttcgccagactgaagtgcaatggtgtgatcttggcttactgcaacctccacctcctgggttcaagcgattctcctgcctcagcctcccgagtagctggggttacaggcacgtgccaccacgcccagataatttttgtatttttagtagagccggggtttcaccaagttggccaggatggtctcgatctcttgaccttgtgatctgcccgccttggtctcccaaagtgctaggattatagacgtgagccaccgcacctggcctacattttttttttttttttaatcaactgtagaatttctaggacttaaaattttctcaatgcaactgctcctgcaaagccatgcgctccagtggaatttacaagaatgtgaaagttcagcaatactaaaattatctctcacttcctatagattagcttgtttactttgagatttccttaaaattcgacccccaagttgacttggctaacctttctaccatttactcagcttgaaagtttatgccatatctcgaaactattaataaatagactgtacaaaatgaaaaaaatttaaaacacaaaaatctccattttttcccccagatcattaacttttctatgaatgaaatatgcaaatgtgtattgtagggagtcacagctggggtggtgcttctgagatcatgacttttttctgagtactttttgggtacaatatgatttttattatattcactattcaattagtcgcatactgagattcctatggtaaaaggaggtggtctaaagttttagcagtaattaaaggttaataaactgggagcacttgagggggcttgtaatagttggctcagataatcccaatggagtgataaatgaatggaaatagtgggaaggactaacttttaaggcaaaatcaggtaattggctctattgctttctaaatttacttttcttacaatgtgggtgtggaggatatggcaaaattttgcactttt

SEQ ID NO: 123549 - DNA, 1050 bp, Homo sapiens
actagcctgaccaacatggtgaaaccccgtctctactaaaaatacaaaaattagctggacgtggtagtgtgcacctgtgatcccagctactcgggaggctgaggcaggagaattgcttgaacctgggaggcagaggttgcagtgagtcaagattgtgccactgcactccagcctgggtgacagagcaagactccgtctcaaaaaaaaaaaaaaaaattaaattgacagtaaggtttaatgaaatcttaaaggtctttgcatctttgggattattcacttaaatactatagaaggttattgtagttatctttagtactatgttattttaggaggcctgtgtttaaattttacaattcattaacaggactgatggcattttgtaggaactacttaggaacaagtttgcatttctgaaagtaaggaaaagctgtcacttaatactattatccccctcccccctgccacacacacaacccagtttacacaaaccactaaaatgaatgcagtggaaattgaattatgaaatgattgcttattcacattacatactgttgccattcttggggtctctttctctcacatctcatttgcaataagttagctttgagacaagaaataagtgatgtgacacgatgatcatccccttccccactcaactgtaaatggcgtgccagcataaaaatgcctttttttttgagatgaagtctcactctgtcacccaggctggagtgcagtggcgcgatctcagctcactgcaacctccacctcccgggttcaagcagttctccctgcctcagcctcccaagcagctgggattacaggcacctgccaccacgccccgctaatgtttgtatttttagtagagacgaggtttcgccatgttggccaggctggtcttgaactcctgacctcaggtgatccacccgcctcagcctcccaaagtggtgtgagccaccacgcccggccaaaaaaatgctttttgaattaagcaagtatcttttcgcttttctctaacacccacattactgaaactgataatattgatacatt

SEQ ID NO: 123550 - DNA, 1050 bp, Homo sapiens
cttttgcctatatcaatttaggttaggttactcattttttttttttttccccgagatggagtcttgctctgttgcccaggatggagtgtagtggcgtgatctgggtttactgcaacctccgcctcccgggtttaagcgattctcccacctcagcttcctgagtagctgggactacaggcacccaccaccacgcccggctaatttttgtgtttagagactgggtttcaccatattggccaggctggtctcgaactcctgactccaggtgatccgtctaccttgcactcccaaagtgctgggattacaggcgtgagccgctgcacccggccataggttactcattctaagccagaatcctgcagaggtgatgttgtgtccttctcagggtattgcacgcggtgtccatctgtcccttgtaggctgatgttaaggtgttttccaatttctccactgtagaattgggcttttctccctccctttcaacaataagcatgtaaatatcctctcctctcctccatttagcactttagcacccattgattcttgctttatccagctttcactttgatggatgctcgggccgatcttttgaatcactatctgtgagtgggtgggtaggatttatgcactcttttcaaaacgatgcatgactgtaactgtgaataaactctgcctttcacactgaaatagaattcaaattgctgtccacattagacataaagcagtttttccatctaagtgtaggagttgacatatcgaaatacttgttcttgccataagtggcgcttatgaactataaaaagttgtaatgatttatggaaaataagaatgtttatgctttaaaagtgtatgaaattgacttttctttcaaaaagacaaactgtgtattttgctcctttagtgccttcactctaagcactacccagccagcctttggccctcctgagataccacacacctatatgacgttggtcaagtcatatgaccgtttttaaaaagactgtttttaagagcagtttcaggttcacagcaaaattgagtggagagttc

SEQ ID NO: 123551 - DNA, 6033 bp, Homo sapiens
aatcaggaggctgaggtgggagaatcacttgaacctaggacagaggttgcagtgaaccgagatcgtgccactgtgctccagcctgggcgacagagtgagactctgtctcaaaaaaaaaaaaaaaaaaagttaattttcttgggctaggcactatagctcacacttgtaatcccactgctttgagaagctgagacaggagggtcacttgagcccagcagttggagagcagcctggacaacatagtgagatctcatctctacagaaaataaaaaacttagctggacatggtggcatgtgcctgtagtcccagctactcgggatgctgaggtgggaggattccttgagcctgggaggttgaggctgcagtgagccgagaccacaccactgccctccagccggggcaagagagtgaggccctgtcggagaaaaacaattttcttgtattgtaatcaccttttctcttctccccacccccccgcccctttttgttaatagttggacagagagactctgaagatgtgagcaaaagagactccgataaagagatggctactaagtcagcggttgttcacgacatcacagatgatgggcaggaggagacacccgaaataatcgaacagattccttcttcagaaagcaatttagaagagctaacacaacccactgagtcccaggctaatgatattggatttaagaaggtgtttaagtttgttggctttaaattcactgtgaaaaaggataagacagagaagcctgacactgtccagctactcactgtgaagaaagatgaaggggagggagcagcaggggctggcgaccacaaggaccccagccttggggctggagaagcagcatccaaagaaagcgaacccaaacaatctacagagaaacccgaagagaccctgaagcgtgagcaaagccacgcagaaatttctcccccagccgaatctggccaagcagtggaggaatgcaaagaggaaggagaagagaaacaagaaaaagaacctagcaagtctgcagaatctccgactagtcccgtgaccagtgaaacaggatcaaccttcaaaaaattcttcactcaaggttgggccggctggcgcaaaaagaccagtttcaggaagccgaaggaggatgaagtggaagcttcagagaagaaaaaggaacaagagccagaaaaagtagacacagaagaagacggaaaggcagaggttgcctccgagaaactgaccgcctccgagcaagcccacccacaggagccggcagaaagtgcccacgagccccggttatcagctgaatatgagaaagttgagctgccctcagaggagcaagtcagtggctcgcagggaccttctgaagagaaacctgctccgttggcgacagaagtgtttgatgagaaaatagaagtccaccaagaagaggttgtggccgaagtccacgtcagcaccgtggaggagagaaccgaagagcagaaaacggaggtggaagaaacagcagggtctgtgccagctgaagaattggttgaaatggatgcagaacctcaggaagctgaacctgccaaggagctggtgaagctcaaagaaacgtgtgtttccggagaggaccctacacagggagctgacctcagtcctgatgagaaggtgctgtccaaaccccccgaaggcgttgtgagtgaggtggaaatgctgtcatcacaggagagaatgaaggtgcagggaagtccactaaagaagctttttaccagcactggcttaaaaaagctttctggaaagaaacagaaagggaaaagaggaggaggagacgaggaatcaggggagcacactcaggttccagccgattctccggacagccaggaggagcaaaagggcgagagctctgcctcatcccctgaggagcccgaggagatcacgtgtctggaaaagggcttagccgaggtgcagcaggatggggaagctgaagaaggagctacttccgatggagagaaaaaaagagaaggtgtcactccctgggcatcattcaaaaagatggtgacgcccaagaagcgtgttagacggccttcggaaagtgataaagaagatgagctggacaaggtcaagagcgctaccttgtcttccaccgagagcacagcctctgaaatgcaagaagaaatgaaagggagcgtggaagagccaaagccggaagaaccaaagcgcaaggtggatacctcagtatcttgggaagctttaatttgtgtgggatcatccaagaaaagagcaaggagagggtcctcttctgatgaggaagggggaccaaaagcaatgggaggagaccaccagaaagctgatgaggccggaaaagacaaagagacggggacagacgggatccttgctggttcccaagaacatgatccagggcagggaagttcctccccggagcaagctggaagccctaccgaaggggagggcgtttccacctgggagtcatttaaaaggttagtcacgccaagaaaaaaatcaaagtccaagctggaagagaaaagcgaagactccatagctgggtctggtgtagaacattccactccagacactgaacccggtaaagaagaatcctgggtctcaatcaagaagtttattcctggacgaaggaagaaaaggccagatgggaaacaagaacaagcccctgttgaagacgcagggccaacaggggccaacgaagatgactctgatgtcccggccgtggtccctctgtctgagtatgatgctgtagaaagggagaaaatggaggcacagcaagcccaaaaaagcgcagagcagcccgagcagaaggcagccactgaggtgtccaaggagctcagcgagagtcaggttcatatgatggcagcagctgtcgctgacgggacgagggcagctaccattattgaagaaaggtctccttcttggatatctgcttcagtgacagaacctcttgaacaagtagaagctgaagccgcactgttaactgaggaggtattggaaagagaagtaattgcagaagaagaaccccccacggttactgaacctctgccagagaacagagaggcccggggcgacacggtcgttagtgaggcggaattgacccccgaagctgtgacagctgcagaaactgcagggccattgggtgccgaagaaggaaccgaagcatctgctgctgaagagaccacagaaatggtgtcagcagtctcccagttaaccgactccccagacaccacagaggaggccactccggtgcaggaggtggaaggtggcgtacctgacatagaagagcaagagaggcggactcaagaggtcctccaggcagtggcagaaaaagtgaaagaggaatcccagctgcctggcaccggtgggccagaagatgtgcttcagcctgtgcagagagcagaggcagaaagaccagaagagcaggctgaagcgtcgggtctgaagaaagagacggatgtagtgttgaaagtagatgctcaggaggcaaaaactgagccttttacacaagggaaggtggtggggcagaccaccccagaaagctttgaaaaagctcctcaagtcacagagagcatagagtccagtgagcttgtaaccacttgtcaagccgaaaccttagctggggtaaaatcacaggagatggtgatggaacaggctatcccccctgactcggtggaaacccctacagacagtgagactgatggaagcacccccgtagccgactttgacgcaccaggcacaacccagaaagacgagattgtggaaatccatgaggagaatgaggtcgcatctggtacccagtcagggggcacagaagcagaggcagttcctgcacagaaagagaggcctccagcaccttccagttttgtgttccaggaagaaactaaagaacaatcaaagatggaagacactctagagcatacagataaagaggtgtcagtggaaactgtatccattctgtcaaagactgaggggactcaagaggctgaccagtatgctgatgagaaaaccaaagacgtaccatttttcgaaggacttgaggggtctatagacacaggcataacagtcagtcgggaaaaggtcactgaagttgcccttaaaggtgaagggacagaagaagctgaatgtaaaaaggatgatgctcttgaactgcagagtcacgctaagtctcctccatcccccgtggagagagagatggtagttcaagtcgaaagggagaaaacagaagcagagccaacccatgtgaatgaagagaagcttgagcacgaaacagctgttaccgtatctgaagaggtcagtaagcagctcctccagacagtgaatgtgcccatcatagatggggcaaaggaagtcagcagtttggaaggaagccctcctccctgcctaggtcaagaggaggcagtatgcaccaaaattcaagttcagagctctgaggcatcattcactctaacagcggctgcagaggaggaaaaggtcttaggagaaactgccaacattttagaaacaggtgaaacgttggagcctgcaggtgcacatttagttctggaagagaaatcctctgaaaaaaatgaagactttgccgctcatccaggggaagatgctgtgcccacagggcccgactgtcaggcaaaatcgacaccagtgatagtatctgctactaccaagaaaggcttaagttccgacctggaaggagagaaaaccacatcactgaagtggaagtcagatgaagtcgatgagcaggttgcttgccaggaggtcaaagtgagtgtagcaattgaggatttagagcctgaaaatgggattttggaacttgagaccaaaagcagtaaacttgtccaaaacatcatccagacagccgttgaccagtttgtacgtacagaagaaacagccaccgaaatgttgacgtctgagttacagacacaagctcacgtgataaaagctgacagccaggacgctggacaggaaacggagaaagaaggagaggaacctcaggcctctgcacaggatgaaacaccaattacttcagccaaagaggagtcagagtcaaccgcagtgggacaagcacattctgatatttccaaagacatgagtgaagcctcagaaaagaccatgactgttgaggtagaaggttccactgtaaatgatcagcagctggaagaggtcgtcctcccatctgaggaagagggaggtggagctggaacaaagtctgtgccagaagatgatggtcatgccttgttagcagaaagaatagagaagtcactagttgaaccgaaagaagatgaaaaaggtgatgatgttgatgaccctgaaaaccagaactcagccctggctgatactgatgcctcaggaggcttaaccaaagagtccccagatacaaatggaccaaaacaaaaagagaaggaggatgcccaggaagtagaattgcaggaaggaaaagtgcacagtgaatcagataaagcgatcacaccccaagcacaggaggagttacagaaacaagagagagaatctgcaaagtcagaacttacagaatcttaaaacatcatgcaggtaagcttccttgtcttctaagataatttttctcttttatgccaatagatggcaaatttgttacataaggaatcgggagcaaataattaatgccttcgtgtagaaccttcagttgaggaaaataactatcaactagattcaaagatctaggatagtttcatggtttttggtgattgaaatgccatttagtcttatcgatgttatgaaaagaacgacttcgttttacctcctaatgtgactgctttagaataaaataaaacggcatgtgtgtgtgcacatgtgcgtgtttgacccaaaggcataagaaatacattgtgttcactcaactatcttgttgagtttttttaaaaataactagtgctccaatggctgggcgtggtgcctcacgactccgtctcaaaaaaaaaaaacaaacaaaaaaaactagtgcccccaaatgggctaatattaaactgcctgaaatatagctgatgatagctctttcagaaaaaatgga

SEQ ID NO: 123552 - DNA, 2029 bp, Homo sapiens
gatctgcccgcctcggcctcctaaagtgctgggattacaggcatgagccaccgcacccagccctatctttgttttttgtttgtttgtttgtttttgagacagaatctcgctctgtcgccaggctggagtgcagtggcacaatctcagcttactgcaacctccacctcctgggttcaagcgattctcctgcctcagcctcccgaatagcagggactataggtgcatgccaccatgcccagcttatttttgtatttttagtggagacagggtttcaacatgttggccaggatggtctcgatctctttacctcatgatctgccctcctcagcttcacaaagtgctgggattacaggcatgaggcaccgcgcccggccccatctttgtttttttaatggagttaaactatggtattattaggtcactttgacaactatcctgttgttaataaatgagagagaaaaaggagattttatttacgctgattcttcctcctcctacagttaaactcattgtctgtttggaagaccagaatgtgaagacaagtagtagaagaaaatgaatgctgctgctgagactgaagaccagtatttcagaactttgagaattggagagcaggcacatcaactgatctcatttctagagagcccctgacaatcctgaggcttcatcaggagctagagccatttaacatttcctctttccaagaccaacctacaattttcccttgataaccatataaattctgatttaaggtcctaaattcttaacctggaactggagttggcaatacctagttctgcttctgaaactggagtatcattctttacatatttatatgtatgttttaagtagtcctcctgtatctattgtatatttttttcttaatgtttaaggaaatgtgcaggatactacatgctttttgtatcacacagtatatgatggggcatgtgccatagtgcaggcttggggagctttaagcctcagttatataacccacgaaaaacagagcctcctagatgtaacattcctgatcaaggtacaattctttaaaattcactaatgattgaggtccatatttagtggtactctgaaattggtcactttcctattacacggagtgtgctaaaactaaaaagcattttgaaacatacagaatgttctattgtcattgggaaatttttctttctaacccagtggaggttagaaagaagttatattctggtagcaaattaactttacatcctttttcctacttgttatggttgtttggaccgataagtgtgcttaatcctgaggcaaagtagtgaatatgttttatatgttatgaagaaaagaattgttgtaagtttttgattctactcttatatgctggactgcattcacacatggcatgaaataagtcaggttctttacaaatggtattttgatagatactggattgtgtttgtgccatatttgtgccattcttttaagaacaatgttgcaacacattcatttggataagttgtgatttgacgactgatttaaataaaatatttgcttcacttagatttgctggttttattagataccaggaagcctgggacatatgtgtaccacattagaattctaaagataatgattgataagctagaactttctgatgtagtcattacatgaaaccccttgtcactggtttgtgtgttcagaggaagccatggccgagatagctttcctgaaataaaccagtagcttttcagattgacgttcttgctacaattgtaccatctggtaattcctgaaaatgtcaatttttttgtgttaatatttttggtttcaaacaataacaaatgtctctagaaagaaattttaagaaagcttaattaatagtaaaaatgcctttcctgaaataatcttggaaaattttttaaatgtcaaaatgatgagtcatgctaatacattgagggtttgtttttttgtttgtttgtttgtttgtttttgagacagagtttcgctcttgttgcccaggctggagtgcaatggcacgatc

SEQ ID NO: 123553 - DNA, 1047 bp, Homo sapiens
tctcccatcatcgatgggcagcagcagtcggaaaccccacccccctcagacattgctgacattgacaacctggagcaggccgaccaggagagggaggtgaagaggcggaagtacgagtgcacaatatgtggacgcaaatttatccagaaaagccactggagggaacacatgtacatacacaccgggaagcctttcaagtgcagcacttgtgacaaaagcttttgcagggccaaccaggctgcccgccacgtgtgcctcaaccagagcatcgacacttacaccatggtggacaaacagactctggaactctgcacatttgaggaagggagtcagatggacaacatgctggtgcaaacaaacaaaccctacaaatgcaacttgtgtgacaaaacattctccactcccaatgaggttgttaaacattcatgccaaaaccagaactcggatgtttttgccctagacgaagggcgatccattctcctgggcagtggggactcggaagtaacggagcctgaccacccagtgttagcttccatcaaaaaggaacaagaaaccgtcttactagactgaatgtcacttatctttttaaaaaactctcatttttacaaagactatcttccctcccttccctgaattcagaactgtagttctccatggcatgatacaaacaggtccttgttctcttctcctcttccccttttccacatcccagccccacctctgtaaaggctttgtgcattataaacctggaatgtatcgactttctttcaggggatattggaaagataatggtcattatacttataaactcaaattttgagaggttttagattattcagaagcatacttggaactaatgaagggtatataataaaacaactggaatccaatttggtaagctaaaattatgactttccctgggtaaaaagtcttctcagaaaaacaatgtcagaaaataacagcgtgctgcttagaaatacggctgggctctgtactatgcaaaatctagaaagtgtggggaaactttaaacccaagaaaacgttctt

SEQ ID NO: 123554 - DNA, 1090 bp, Homo sapiens
aagctaacactgggtggtcaggctccgttacttccgagtccccactgcccaggagaatggatcgcccttcgtctagggcaaaaacatccgagttctggttttggcatgaatgtttaacaacctcattgggagtggagaatgttttgtcacacaagttgcatttgtagggtttgtttgtttgcaccagcatgttgtccatctgactcccttcctcaaatgtgcagagttccagagtctgtttgtccaccatggtgtaagtgtcgatgctctggttgaggcacacgtggcgggcagcctggttggccctgcaaaagcttttgtcacaagtgctgcacttgaaaggcttcccggtgtgtatgtacatgtgttccctccagtggcttttctggataaatttgcgtccacatattgtgcactcgtacttccgcctcttcacctccctctcctggtcggcctgctccaggttgtcaatgtcagcaatgtctgaggggggtggggtttccgactgctgctgcccatcgatgatgggagaatcagagatgtgctgcagctcactgtcacttatcatcccggcttcaggcacttccatggcatctttcccgaggtcagctgcattgctacagagagtcagggggacgcgactttctccctgttggctagatgtgaaaggtactcctgtgtggatctggaggtgttcacgtaagctgctccggagagtgaagcgccgtccacacaggtggcaggcatagtactttggaaagctcccattcctcttcatgatgcttggcttgacgtgggctattgtgagggacgcaggctgctcatcggaggaagatgcttccagattggtctcctccccgggaggagggggaggaacaggagtggaaacaagttctggagacagcgaggtctgcagggggtctgagggagtcatatttgtccgattcacctgggccagatttgaagtcagctgggagagctgtgaggcctcagggacctgctcctggcttatcctggaggtctgtggccgtggatctcgcccgagtttttcaggtgctgaagcaatcttggtggcttgtctcaactgatg

SEQ ID NO: 123555 - DNA, 1042 bp, Homo sapiens
tccttggcctcccaaagtgctgggattataggcgtgagccaccacgcctggccaagttaaattaaatattatgtattctatttttatacagaactccaggagttccttatcaaatgccaccatcaacatcagcactgctcctgggctttacagggatgccttctcacttgattgtcattcattctcattttacaggaaaggattgaggattagagggttaataacctgctcaatatcatgtagttggtaagaggtggagctggtatttgaaacaatgtttgtctaagtccaaagccaccacagcaagatcctttagagaatcaaaacaatcctgtatggtagataaagtggatttatttagtccgatttgacagatatggaaactgaggtcccaaaaagttaagtgatttatctaaggcacctaaagccgttgaagatgctattaattttataactttagattctactccttttatcatttcagaaacatcattcctgatcaagcagtaataatgaagaggttcccaagaactcttcccagaccatcggtagtaacaaattctaaagcatcattagaaattagtgagatctatatccacatatcacaaggtatatattatattccactgagtggatattctatagacaatgcatttcaaattcaaagacagcttccttgaatgcttttagaatttataattttcttttattatactttttgtattgtaatcttctttggcccttttagcaatcatgttcatttgattaacaaatattttcttttcttttctttttttgagacggagtcttgctctgtcacccaggctggactgcagtggtgcgatctcggctcactgcaagctccgcctcccgggttcacaccattctcctgcctcagcctccagagtagctgggactacaggtgtccgccaccacacccggctaatttctttttgtatttttagtagagacggggtttcaccatgttagccaggatggtcttgatctgctgaactcgtgatctgcccgcctcggcctccca

SEQ ID NO: 123556 - DNA, 1059 bp, Homo sapiens
agccagccacccaacctcagcgaacccttccagcagtaatctttcctggactcattatctaagccctatctctcattcctccagccccagtcccctgagtatccccctgactttcagcatttattcttgtctcctcctctaacaagaagctcgagggcatgaatttctccagtttccctcttttctatcttaaaacagctctatctttgctcagtttctttcttctcatctctcctgtcttgagaaaagggcatctcagtgtctctggaaaatgatctcccttcttccctcatgctgggagttcccactcctctatttttattctgttctttttatctgttttcatacaccccccaccctgcccccagcccatgtgggatcagcacatcctggacactgctgtctgcctgagttacggtgctgcttctccttcactttactatgaaagcccttaaaagggtaatcgaggtcctcgcctgcactctcctcatcccacactcttcctatcagtgcgcgctgtggtttcctcccctccttcattctgctgcagtcttttctcaaaggtcacccctcatcaaaaccactgcccttctctcagccttctagcatcctgtcctccagcatctgctgttgtttgcttccttcttaagtggttgtcatctgcatttttatagctgaatatctcttgtttttctgccctctaaacctgggcctttggtaaattttgtcttttgcacccttcctatgggtgtgtgtctttttcctagatctcgcctctgctggaaacttcagtttataactctggccttgactgttctgtctccagaactctattcccaaggcctcaggctgtgtgctgggcatttagagttgagtatctccttttgtgtctttgaggatgtactgaattaggccttctccgaagttcctcctgcctattttcttatcttcaagtatcccaagcttaactcagtccccaaatcatgttttcttcaaattacctttcacatttgtcacttcttttcctttctcacttccattacctcatcacccattctc

SEQ ID NO: 123557 - DNA, 3690 bp, Homo sapiens
cggagagactagtgcaaagaggctgcgagcggctcccgccgggggggagaggcggcgagagagcagtggcggcaagagccccctccgccccccccccagccgctcccctccccccgcccgcctccgcctcctgctgctctgccgccgccgccgccgcctgcagcactccactgccgctcccacccaggctccgcgctctgctccagccaaacttctgcagaccatgtgcagccgaggcgaggaaacttctctccacctattggggctggaggcctgagtcacaagccccttgtttacataaagtgtttaggtagcacaagtccttgagatgctcggggtagagatggagagccactgctcgtatccttctgccggcttctgcttgagatctcttggcctttacccttgtcccttgacttttcgtgtttgttttaatctttaagacttgaaatggagtggcctttagaaccggggagatactgtaaaccagcagtatctttgtgtcaccaatggtaactgaaagtcatgctgaagtacagattcctgtagcgtgcacagaggcagaggtgcttcctttaccttgcagatgagttgagcggcgtaagatgtttctgttagggttgaatttcatggttatttcagcaacgattttcgtttttgaagttttggcccccccaaaaatgaaagtctgcaacgcatgtttgttaagagaacagtttattctcctgttaggttttggtctttgaggtatggattccagagttggctattctgttagatttagaggtgtggaaaatcttttaacggggagatcctgaaacacggaaacatggcagggaagttagaatttcctgatggtcatttttaacattttaaagtttactttttggttgttgccatttttctagaatccgtgtcttttttggggaaatacagtcctttgaggactagaatttaatgatttctttacacatctaggattttttgagatttagaaaggatatggctttattcctaaggaagtggaggcagcagtttctaggatactctggtttcaaggcatgctaacttggttgtgatgtctaacccattttggtttacacagtctgaccactagcacaatgcctggcacatagtttacaaatcatttaaggcaagcttaccatcttaagacaatttaatacatagaagtgtccctcctaaaaatctgagtttgatttagaaatccagttatacctgcaggtactgatgactaattccttctttgaagacaaaataagcagctgtgtagcttcagtggctctcaaatggataatagattcagtgtatactcgctttgaactttcctgttttttgatcagctagataaatgactttagtgggtaaatgtctgcctccaaaaccaaattctgaccctgatctaagtattctactgcaccgctgtcactggaatatcaaagttggccttcagactggtgcctggttccttggattggcttgagtattgaggtctgtctcatcttactagggaactaaaatgatgttgattgttttgtagagaattgtaattagagatctgtaggttcttaattcttttggaattccattctgaaaattttcaaccttatggtgttggtggagtgctcatgtgaagagtgaaactgacttaagaataaaagaaaaagtgggcaaaactaatgctaaacttgagaccattgggcagaaatttgcctgtgtgtgtagagtaattggtcttgagtcaaagtaactatgcttatttttaacatcactgaatattttctagcgttacactctatataggcttgtagaaataaacccaggggtaagcccagaaattgaatatcagtcctaaagaaagcctatcaagagcatcctattctctttaagagctgctattcgaatttaggactgggctggtttgctgctcattctctcgaggcataggcagccacacttgaattttgccaagtatgcagataattccaacttgtagtcaggatcatcaggtaatagcattataaggggagctgtacagactgtatactttctacagtttgttgaaatagaaacatttatatggatacatacatctgcaaaggttagggagaaaacggtagccctggcagagaagagctagttagtgtatttcaggatagggccaagggaagctgtcatttctctactaagtctcattgtggaaaagccacaaatgtccctagtacagtaataaggaaaaaaaggctgagcgtggtggctcacacctgtagtcccaggactttcggaaggattgcttgagcccaggagttgcagatcggccaggacaatgtaagaaaaccccatgtattagaaaaaaagaattagccaggcgtgatggtgtgggtctatagtctcagcttgggaggctgaggtggcaggatcgcatatagcccaggagttcgaggctgcagtgagccatgatcgcatcactgcaccctagtctgggcaacagagtctctaaaaaggaaaaaaaaaaaaaaagttaaatcgctgtttaattatgtgccaatttattttggtattttgagaatctggtaaattaggaattcaaaaatagttttaacactttttacttcaaagaaaatcacagtgcaagcaatctgagtggattcatcaaaagttatacatgaatattctgcagagtctggtgttgctgaaagttttgatttgtgttctgctgagacacaaccatgaaaatatgcacttgcttgtattccgaagaggatagttccagtgagacttggacaatgagcagaaaaaatttttttttgagacgaggtgtcgctgtgtcgcccaggctggagtgcagcggcgcgatatctgctcactgcaacctctgcctcctgggttcaagcgattctcatgcctcagcctcccaagtagctgggactacaggtgcccgccaccacacccggctaattttttgtatttttttttttttagtagagacggggtttcgcagtgttagccaggatggtctcgatctcctgacctcgtgatccacccgcctcggccttccaaagtgctgggattacaggtgtgagccattgtgcccagctcagaaaatttaatagtactagatctcgtgtgtgtgtgtgtgtgtgtgtgcgcgcgcttaggttgaaggtggaatttaacattgatttaaaaaaaataatagtaggaaaaaataaatgcggtttgagtccaaagcagcatttttcactaattttatgaaggaagtccttttgagtaatgtcttaaattaggaaaatggcgtacttttacatgttagacattaaactctagggcagataaccatgccctgtgtgttgtgtatcaagcttagcatatacataggaaaagatgtattgtgagagtgtcttacatttcgttggtttggtcataaagtttatagaaaatgcttgttttatagttggttgttattgagatgagagtccctcaaggaactccctatgctttagggagctttttgttttaaacctactggttagacttgtgggttttaatgttttcagctgtggttgtaagaaacacattttaaattgcacctagtatagacatacatgtaaaacaaacaaaatttttacgaagtagtacttgtattaagagtgatgtactctgctatcttct

SEQ ID NO: 123558 - DNA, 1045 bp, Homo sapiens
cgcacctgtagtcgcaccactttgggaggccgaggtgggtggatcatttgaggtcaggaattcaagaccagcctggccaacatggtgaaactctatctctattaaaaatacaaaaaaaattagctgggtgtggttacgcatgcctgtaatcccagctactagggaggctgaggcaggagaatcgcttgaacctaggagactgaggttgcagtgagctgagatcgcaccactgcactctagcctgggcggcagagtgagactgtctcaaaaaaaaaaaaaaaagttttcttgtatacaaatttttctttgcatcttagattatttccttaggataaactcctagaaagggaattacctggaccaaaggatatgagaacatttgtaacactcttgatacaaattgtcaaaatgacctccagaaagatgatatggtgtctttttcaaaggaaaagttaaagtgctttttaagatttagaaggtattatctttttgcttttcacaggggacagtcaaaacttcacaggggggaaatcaagttaaattcagagctggatttagatgatgccattctagagaagtttgctttctccaatgctctatgcctttctggtaagttactactgcttatgggatagggtactacagttgtcatttcactgagggaagtttaaatagtcacgattttggtatattttcagaatactcaacaaagccttagcattccttttcctttttttccctccatcagaaaaaatatctagtataaaagatagtactgtgctgaagttactcattccttattaattgtattaataaagcttaacctctccaaaagtattttttagatgatgattatattagcctttgtttttttctcttctctctatgcgattgttattcttagatagtctctaatccagacagagaagcccagccttgtgtgactgggcacaggtcccagtgtagaaaaacatactctagtgttccataggaatgggacccagagtcacagtggctataagtttgttctgaaagatccacatcc

SEQ ID NO: 123559 - DNA, 1061 bp, Homo sapiens
gtgagcgtggggagcattattccatagaggcctttaaccatctgatgcttaaattaaccaccatctctttattccacaaaaatccaggcatagccctttattccttgcacatagtagagtctgcctaatgagagctaagacaaggtctcaaaaaatttccttattctgatttctgtggatcagaattgaaccaggtatgaaagagtctacatacgtgaagttatatagtattacaataatggctatttgtttggcaaaccatgtgagaaatcataaattttgaggaggtcaggttttatcaagaattttattttagctcttattgtaggaagttcacctaaggaccataatatcaaattagtaagtaccatcatattttgaaaaatcgcatcctgtatacattctagaagttacatggttttatatacgaccctaaagaatgtattccatctgtatcttagttgtttcttttatttttttaaatcagggaaggagctgctgtgttttggaatgtgaaagacaaaactgtaagtgtaaataaaaatgtgaaaatataaaaatttagttttgtgagaatgaattgttaattagcacatactgaaacattagaagggaaattaatagattatgcacaacttatttgctctgcattacatgatacttatcagtttcatcttccaaaatatattgtattttgggttaagatttcctgctttttcctttctctagacacacactaatttgtggagaatcagaaccatcctaactatactgcagacagaagtactgtagactttgcatgttgtactatacaaaatgtatgcagttaattggaagctggttgcattgagtgttcttttaagtcaagttgtctagaacttactactcatgggaaataattttttcaagatccaaatcaagatttgtttaatacaaccattttagaggcaaattggtaatctacattaaagctttatatttaacccagtaattttacacctagaaatttatccaaaggaaataatcataactattcgtgatgatttttgtacaaaaatgtt

SEQ ID NO: 123560 - DNA, 1054 bp, Homo sapiens
attcttaagactcaatcccatagaagatagttgaaatatcattgtgataatccaaacagaccgtttgtgtgattaggtgacaaaaacaagcatagttgacttagaaagacagagctatgtctagagccccttggtatgaaaatttgcctggaggtattgttggctgatgctgaaggctgccagctgtgtggtctgtgcttcacagaattgcaggcttcactgccctgggttgtttcagtcgattttattttgcttttggctgtgtaggcaaactctgtcctatgtaggatgtagtaattaacaatttagaaaaaaaaaaaaaatcacagttttggtctgtgtctgaattgcccatcacccagcctttaccagaaatttctgaagctttgaggatcctaattttatgttaattccgttaagacatacaaccttttgcaaattaatagtatattttttaattgatatattaacattggttgtaatttatattatggaatatatgcttatgataaatatcactatactaatatataaagcaacttcttatgatgaatattggtatattagtatatgttttaacaatacttaggccaggccccgtggctcatgcttgtaatgcactttgggaggccaaggcaggcagatggcttgagctgaggagttcacgaccagcctgggcaacatagtgagacctcatctctacaaaacataaacaaaaacttagccaggtgcggtggcacatgcctgtagtctaagctacttgggaggctgaggtgggtggggcgggggggggtcccttgagttcaggaggttgaggctgcattgagctgagatcatggcactgcgcttcagcctgggagacagagcaagaccctgtctcaaaaaaaacaaacaaacaaaaaaaaaactttttttttaaatagttgcaggtggctgcagtggtagcccctgtagtgattaaccttgaaatcacatatgttttgaagtggtcagtatctttatttctgtgtattttctattgccctactttttatactttaaaattcagcaggag

SEQ ID NO: 123561 - DNA, 1330 bp, Homo sapiens
gtactctggtaactcctgatacatttttatttgtatatccccgtgttcctactttcatatgtgactatgggaattagctaatttggaaggaattagcagttatctgctcataattagggtactacatccatttatccccacattccccagtaatttcagcttgtctgactttttttctaattggattagtctcattttgtttatgagtagatactttattgattttggatttttcagtttgcatggatcctcaggttctctgttattcctctacctttaaaccacgcatcagagctgtggaacagattgaggaagggcaaatggggtcaggccatttcatgagaaagagccaggagatacagaatggaggtgggaggaaggaatgaattaatatatacttctctagaatttcataccaggaatatacagaatgggaaagaattggggagctgagaggagtaaatcctaagaataaatgttgatttagtgactcataaacttgttttggccaactagaatctaacaactactgaacagttgtgttagccacagtcctgagcactttgtttattagcttatttaaactttacaacaaccccataaagtaggcattattgttattctgatactcttttaaaattgtaaccaacttctgtgcctaaaatcttaactcttatgccaatagctttcaaactttattgaccacatcttatagtgagaaatatatttaacattttacatacatagcgacctagagtagatacatagatacatgtaagtgacagaaaacttcataaaatagcatttcctgtgaataatgcactgtaatattttctatttagttttattaaaaaagctgttttgggccaactaaattggtatcagaactcactaatgtgttgtgacttacagtttgaaaaaacacagcattgagccatagtgcttaccatctgtattttatatagacacaagatgactttcctcatgtgtgcaaaggcaagatggggcatgagacaaagtacaaaccaaaccaagacacatgctcagatttacagacctttttgttaaatgttaaccagtgtaaaaatactgtaattcctttggggatttaaaggaatctgcctgtacaagagtagttacaaattaggaaatgacctcaaatactaatgttgctttgaaaaagagtcatggaaactcagggttggagagacttaaacattccatccagtcacccatgtgatgccttaatcatctctattttgcattcaatctgtgcttgagatactaccagttgagtgtggcttccctttcagaataatccattccatct

SEQ ID NO: 123562 - DNA, 1084 bp, Homo sapiens
atcgcttgaaccggggaggcggaggttgcagtgagctgaggtggcaccactgcactccagcctgagtgacagagcgagactcccatctcaaaaaaaaaaaaaaaaaaaagaatttactcaaagagaataaaaagaatccaggactgtagacaaacttctaaaatattttatagtttcttcaaaattaagtggttcaactggcatggcatagtactaattaaaggtgaactacagtagccaattggactagaatgaagcacagaatgcgagcttttgaagggattttggaagcagcaggttctacctcctaaatatcactgtgaatcatctttgtccttatcctgaagagaggtagtaaatacaaggtagtgggtaagagtgttgactttggaattgggaaagcctgggttttattttagttacatctctgcagcttcttaacggtgagcacttagcctctttaaacctcagtttcctaatcagtgaaatgggatcattatgaggtgaagccgagcacttagcatgtagaaagcgctcagagtgatgtcagagtctgtcttgtttcctcctacatatcatcaccaaaaatttgtttcatgaacatgcatttgaccgtgtgactctgagttaaaagctcagctttctccccacctgtagaaactttttaggatgactttatatatcctttggtgatctggccatcggctcttttggtccttacctcctgcagctcactcctacctccccgagatggggagatgaataggactccatgcctggggtgtttaacttgctgatccttctgccctttcaagactcagttcaaatgtcacctctgtgacaatgccacactcttcacatgctcctttctctggactagagcaatttgtgcatctcgttcattttcctctgctagactttgaattctgagatcattgattcatctatctctagcacctaacatattatttttaaaaaaagaattattgattactacggtctaacttttttttttttttgagacagagtctcattctgtcgcccaggctggagtgcagtggggcaatcctggctcactgcaacc

SEQ ID NO: 123563 - DNA, 1014 bp, Homo sapiens
agcggatatggaagcgagcgaaagccggaagcaggcaagggaccgggaggtcccagggcctagggagcggaagaggtcgcggcgacgcggctcacgtggtcagacagtcacgtggcccgagtttctcccgctaagtgggaccagagttcagtgcggctgcgcagtagcgggggtgggcgggagcgcccttccaggagatgggttggctgcagtagtgagaggctgggggtgcggctctttccctgcagtcctgccgaggaagcgtgcgtccctggcgcttccttcttctcttccggcggagaggttagtgtattgccttttctttagcagctcgagtggtccggcttggaggtctgcgccctggctcctggccgcccggaacgtgtacagttacgggttacgccagtgcggctgtgaccctttgcctcttaccgtgatctttggtcagcttagctgggagtaaaaagcactcaattaatgaaccctttttttgagccagtgcaccgcggtaactgtagaaatcgataaaataattttgagtttgaggaattgaacggcatactcccaaagatgagcgccacttagctctcgaatcgtagcctagctgtaatcgattttcttaattggtgtaattgttctctaaaagttgaaatgtgcccgggaactgagtaactgccttgtatttcattttaaaaattcgatcgaatgcctactatgtgctgggcgctattgtcaggagatataataggaaaaaacacaaatccgtatcctcagggagcttccattctggaaggaagacacaaaaatctgccctttcctcttatttttttcctttagctttgtgtctcacgtattttactgatttacctcgttttgtctgtcactcccaatgcaaggttcaaaagattcaaaagataggatttttgtctattttattttcagctgtattgtcagcaactaggacaatacctggcacatgataagaactgagttcgtttgcagtatgaattaata

SEQ ID NO: 123564 - DNA, 1117 bp, Homo sapiens
acttctttcagagccagtttacatgcctcaaaatgaaaattagtcttcctgtatttttactcatttttgattaaaaaaaaagtttttatccaatttgatcacacacctcattctactgaaatcactccgagtgacttttggctgtttccaaaaataaattgactccaaaggatgaagatatgtgatcactgacaggaggtttaatgatgtgccataggttctgaagaaaattcctaaagaggaattccaaaagtgctctgagcaatggcagcgcccttggaataagggtgtagcttcccgaggtgactgactggctggaaggaggcagccatcatttggatgtttaaatactggtatgttatttaaaaaaacaaaacaaaacaaatcaagccgattacatcagtgttagattgtttttaccctaacatgaatgacccatggaaaaagtagctaatttggaagacccaataatctgaatgtcttttatattcaattcagtaaagattattatattagtatttatatctccttagttatgattttcttaggccaatataatatgatttaatctctcactggaaaacatgaaggtgtagccatgccacatatatcacctttggttaaagttgcccaaaaatacctaaaattagtgataaaaaattatcattcttctaaaacttacaatagtattgtctgatttatcttaagtactcattgtatttccatcatactctgtgtttcattctgttaatgattgctgcattgtattcaaatattctgtttatattctatacatttgttactggaactctgccacatcggtggttaaaaaatgtttgttgaactaaagcagttgtcttgaaatttatctttctccttcttgtgccctggaatccctgctaggtagataattatgagcatagtcactatcactatttaatatgtccagaaaaatacttgatttgggaacttttttgacaattaaaatgagtttgagagatttttgtgtaatttgattatttagtattaagtttttctagttaattagataaatgttatatctagtttctgttagcactgattattgagactgtatggtgctattttctttcaagaa

SEQ ID NO: 123565 - DNA, 2821 bp, Homo sapiens
aagtagcgtctttagatatcactttgttcagttttttaaattttacaaatgagagaaccaaatcccagagaggtgtcacgtcctaaggttatgcaattagtgaaagaaactggacagttctgcagggccaaggaggaaaaaataaacttttatttcttctcttgactctggattatatgggcaactttgagcctctcttcacacatccgatgatgttctaatatctgcaagctgcaaaaacttttattctgaataaacaatgtgagtgctgaaataattgaaaccagtttttttaagtccattacatactgatgaattaaaaatttcagttttatcttgttaatacagcatcatgtgaaataatttttgtgcattgttagagaaagtatagatttgatggtcatgtaaagagttttgtagatatttagtagttttttagcaatgtccccccatcccgctacataatggagttttgttggctattcagaagaagggtgaatattttgtactttttctttttcagatttcactgtggggaaataagtgtgatctgtctctctcaggtggagaaagtagttctcagaataccaatgtactaaattcattggaagacctaaaacctttcattttattgaatgatatggaacatctttggtcattgcttagcaattgcaagaaaacaagagaaaaagcttctgctactagagtgtatattgttctcgataattctggatttgagcttgttacagatttaatattagccgacttcttgttgtcctctgaactggctactgaggttcatttttatggaaaaacaattccatggtttgtttctgatactactatacatgattttaattggttaattgaacaggtaaaacacagtaatcataagtggatgtccaagtgtggggctgactgggaagagtatattaaaatgggtaaatgggtttaccacaatcatatattttggactctgcctcatgagtactgtgcaatgcctcaggttgcacctgacttatatgctgaactacagaaggcacatttaattttattcaagggtgatttgaattacaggaagttgacaggtgacagaaaatgggagttttctgttccatttcatcaggctctgaatggcttccatcctgcaccactctgtaccataagaacattaaaagctgaaattcaggttggtctgcagcctgggcaaggggaacagctcctggcctctgagcccagctggtggaccactggaaaatatggaatatttcagtacgatggtcccctttgacttgatttaggagctctcagttgcatagaaagatctggtgagcaccttttcatccccagaaaaggagcacgtgaattgagtcgcctggcggctctgtacgcgctcagggaagcttagcttcttggtgcccatctacgtgcactggatgatttttcttttgaacattttgccccactacactgttttggggatagctgggttaagcaagttaaagatatttacatttatattggaattttagcaactttttttcaggttaaatatataatttcaagtgcttttaatgaacttatttttaattggctagggagcaaaaaataagtgagttctgcttttagttagttaaccttgttcttttcttaaatagtacactgcatggtatttaatattccaggaagcatgggattttattttgcttgattttgggcacatgaaataatagctctaggaaaatgcgcatcttaatgactctttgtaaagagaggcatttcttacaactgtgatgtttgcttacataaaagttacctcataagttaattctaacttttattcttgaattttatttcatttcaatagcttgtttcatttgcacgcctttgtattttgattgacctgtagaatggatgttaggaaactcaaaattgaacacagtgaaacaaatggtatttgaagaaatgtaatatcttttatattctatttatgatatccataatcaaatgagattattttaccacataaatgttttaaatatcagatttttagtttgcagttttaggaaaatgctttagatagaaaaggttcttatgcattgaatttggagtactaccaacaatgaatgaatttattttttatattcttacacattttattggtcattgtcacagatagtaaatactaaaaatttcaggtcagtttgttttgaaactgaaattggaaataaatctggaaatgttttgttgcactaaaataataaaatgaattgtactgaaaatctccttggttttattttctagtggggaaaagtcaagaaaggaagattaaaaatgagatttatataaaaagagacataatatatattctagatgttgccaaaagcagttattaaatatcatttataaaaggttattagtctatgctcttgctaagtattaaaaaagatttttgcaaaatgtttatataaagctgtacattttgaatctactgtgtttctttatccacatgtgtgcctattttaaagagtaagtttgtaaaatgcttccatattagaattatttgtaggcatttgacataatttagaacacagttgtatatttaggttgacttcatagccaccgtgtgagctccagcactggaagtagttcagcacccccactcccccatgaaaaagagcaaggaagcaaactagtgcgagaaaggtggcactgaggaagaggaagtcaggtcaaggtggaattttttttaatgcttagcaggaggaagggcctacctatgttttcaccagttaatttttaagttttaatgttagtttag

SEQ ID NO: 123566 - DNA, 1130 bp, Homo sapiens
gcctccctagtagctgggattacaggcacgtgccactatgcttggctaattttttgtatttttagtagagagaggtttcaccatgttggccaggctggtctcgaactcctgacttcaagtgatccacccacatcggcctcccaaagtgctgggattacaggcatgagccactgcgcctggcctaccagccaattctttaaagagctttggttcctaagactggtgaatggtgcttagaaaccaaaattgatgatttataaatgctcatttattgaatacttaccattagcccagtcattgtgctaatgatcagagaggttattcactttgctcaagttcacacagctattaaatggcaaagctaggatttgaacccatatcattacattattgtaccttcagcaataatcctctttccatatatattcacagttacatcctacatacaagtctgatgccagaaactatttattagtcagtggaacaacaataataaatagccatacaaatgtcctcagtgagtaattttaattcaattataactagtagttattaaattatcaagatttgaatattagggggagaggaggggttaaaaaagacttgactattaggaagaatttaatatttatttataaaaatgcatctctagagatcagtagtaggaaacgagtaaggaaatgtgttgtaatagcacattcaaaaaccagaacttattcctcttcttatataagtgtcttcacttgtaatgactgatgcaatgttgttcagactttggaaacacattcactttgggatgaagttcctgccaaaatcataaaaattgtaaaaaaaaaaattatatgggcaataaaaaaacttgaggtctttaataaagtactttattcataggattgtgcctcccgaagatttactacttaaaaataccatcaggtggttttactgacacattaacagactcaggaagagtcttcataatgctttctaaagctctatttttgaggtaggaaacttactttattagtgaggtccagaaggactgcagaagtagaagtagccacaggactagggtgtggtttctacataactcagcttttctgatctgcttgaagactctacttcagttcctt

SEQ ID NO: 123567 - DNA, 1030 bp, Homo sapiens
gaattgttatcagcaatgttatggtgttcggtggctttcaacgaaataaacacacctgacatccttagtaaagagaaagctttctgaaataagagtgagggacagactgggacatgatgctttgcatgaaataggtgttcagtaagtatttgtagagttggaagaagttagattaaacagggctattgtatggcacattgtcattagggagttagagagggcttctggaaaggtttggtcagttttgacttaccttgcaataaatttggactataataaccatttcactagtttgtaaaaggtactggcaaccaaagatggggaatgccactcaatctcacttgttctactttcaaaagcttgctttggtcacattgaaaggttccatttggtgaagtatagcatatcacagaaaacaatggagtttgggagttcgggaacaaatggttgttttgtgataatgaataactttgacatttcgtttgaagttaagttatgttgtttgaacttttctgtccctgaacaaggcatcgtatgccaagaacaggtaacagtttctggatcactggggactcattagtcatggatggttagtggtactacattgtggtcttccttcaatattgaaagctgtaagaagcttgtgacaaattcttaccttggccctcacacagtactggtagggctgggatgttattgcttttgtccaccaacttccaactgtagaagtctaggatgatcacagcagttagagatgatccatttagatagtctatattaagggaaagtatccttcatccatggtgttgaacattcgtaggattaaaatgaaagaagccaaaacctttctagatctttattggtatatcaacagaattagctgattaggtatgcagaaaaaacttgggacttgaagacaccattaaataaataactgtacataaccatacattaaataactgtaacaccattatataaataactaactataaataaagagctctacattcaaactgcttttcactgcatt

SEQ ID NO: 123568 - DNA, 1055 bp, Homo sapiens
aaatggtttaatagagcaagtgaccctttcaactgaattttttaagaatgaggatttagccagacaaagaagggcaggtgaggttgtgaagaggaactgagtggtactcttcagagctccagcccagttccttggacagaataaatgcttactaacttatagagctgaatattgaattaataaaataagggtaaactgttaagaatcagagaaataacttaaagaacactgatagctagtgttttttgaacaccatgtacccaggtgccttgccgaaaaccttaatgatcatcttgtttaaaccttacatttctcataagaggctggtactattgttattctcattttatgggacgtagaaactaagacttggagaggggaagtgacttgcccaaggtcatacaaccagtactggagaattagggattctagatctagaatttggactctggagcttaaggttttaacccacgacattatgcagagaaattgacaggatttttctgttgctgatcaatttacttggcagttagtttgttacttccttgtctttattttagttgtgacaatgctttcatcttagactgtgtcccgaggctgctgcttttatttttatgggaaatggctatttttatgatccttgctaaaagcatgtttaaacaattttccattaagtagggggatgtttttccttctaatatcagaagccaataaatgaaattctacaaagacttgctggtagcaaccttaggaatttctttgcatgtgaaacccatctgagaacttaaaatctgggtaaaattgtagtgtaatttggtgcaatcgtctctttgcacaaataacatcataaaatcatagtattgtcatctaggaggggccttagacatgatggaatcctaccttttatattttccaggtgaagaaatcaaagtctagaaaggtgaaggaacttcccccaaagtttcccagctggtagagacagaaccagggctaggtcctctattctgactcctgaccactacctcacacctaatagatggaggcatgcccagttc

SEQ ID NO: 123569 - DNA, 1638 bp, Homo sapiens
ttcatgctagtagaatgtgtatagagcagttattttcgttgatagaaaatgtttcaccacattaaggggtaaaaggagtagaatttgaacctaattacttacgtttagttgactgactaaatgtttatttcttgtcagtgcagtttccaacaacctcatttgatggtggggggtgacctgggcacactgtggaaggctggcagctgatcgccaggctggggtgtgcttggcatggccctttagcttccaggaaggtgcagaggcaaaaagcagcgtccctccgacactggagttatctgagtaatttatgtccattcttctctcaggtccacaaaaggtggctccgattcctccctttctgagccagggccaggtcggtccggccgcggcttcctgttcagagtcctccgagcagctcttccccttcagcttctcctgctcctcctcatcgggcttgcctgccttgtaccaatgtcagaggaagactacagctgtgccctctccaacaactttgcccggtcattccaccccatgctcagatacacgaatggccctcctccactctgaactaagcagatgccatctgcagaagtgctggtagcataaggaggatcgggtcataagcaatcccaaactaccaacaagaggaccttgatcttggcgaaagccctcggtgtggcagctttagccctcctccagatcacatgtgtgcaaattatggcttcagaggtggaagataaacagtgacgggggaacaaacagacaacaagaaggtttggaagaaatctggtttgagactctgaaccttagcactaaggagattgagtaaggacctccaaagttccccggactcatgaattctgggcccttggcccattctgtgcacagccaaggacttcagtagaccatctgggcagctttcccatggtgctgctccaaccatcagataaatgaccctcccaagcaccatgtcagtgtcgtacaatctaccaaccaaccagtgctgaagagattttagaaccttgtaacatacaatttttaagagcttatatggcagcttcctttttaccttgttttcctttggggcatgatgttttaacctttgctttagaagcacaagctgtaaatctaaaaggcacttttttttagaggtataaagaaaaactagatgtaataaataagatcatggaaggctttatgtgaaaaaagttgaatgttatagtaaaaaaaaaaagatatttatgtatgtacagtttgctaaagccaagttttgtttgtattgatttctttgcatttattatagatattataaaatagtttgtctgtgcttttttttccctaaacaaataactctaagtttcattattaagcaggcactgatcagaatgcaacctaaatgatcatttttctgtgcaatgaatgaagctggaacattagtgtatattaaaggaaaaggatggcaagaggcagcatggatttagacatagaagaccccaggtgattcctttttttctcttccttccatagtcaatcaaatctcctgaattcttgtttccggaaacctttcatcctctattctccattccttttgcacatgggagaggcttcctaggagctgatatctgaggtcccttctcc

SEQ ID NO: 123570 - DNA, 2201 bp, Homo sapiens
taaaatgatcgggatatttctttaaaatgctacatttatttcagtgacagtatattgactgccattgctttcattagggataaccagtgctgtcaacttacggtgggtttgaatattttcccctgttattctctacccacactacctgtgatggtaaattttattagccaaaagcgcttttctgatcatggaattcgaatgtttctatttatgactcctgttctggctgaaaatgcatatgttttactttagaaggtaatagactcttgtcttgtgattgtatatggtcaattaaatagcccctacatgtcttttttaatgtaatgagaaatacatctattatgattcttttatatcaatgtaagcaacaacaatagcaaaatcacatgagatttgtactccctaggccttccagcaggaaatttcactgaaccacaataagattgagcagataattgcccaaggagaacagctgatagaaaagagtgagcccttggatgcagcgatcatcgaggaggaactagatgagctccgacggtactgccaggaggtcttcgggcgtgtggaaagataccataagaaactgatccgcctgcctgtatgtaacattgattttcttagttgtcattaaatctaaagagaataagtcgtgtgggattgggttgtattgatagtgggtgagagctcagactctggagctggagcacctgagttcaagtcctagctttgtcctacattgtcgctgtcaccttcggcaagctactcacttcacccttcttgcctcagcttcctcaaaagtgaaagtggtttagtagcagtaactaccctgtacaaaggattgttttgagcattagatgagttaatgtatacaaagagtttagaagaacatttggctcatatcttctatggaagataaataagaatcttttgatcgcagaaacatggggcagcactgctctagagaagcctctagaagaaataagagaagcctctagaagaaatacaataaaaggaagcaaagtgaacagcttcttaattgatgaggttaggtttaggtgaattttcattcttccattttcctaattgctaccataatcacatcttacttatagagatgttattagagtatttggaatcttctacgatcaaacctattttatatctgggctataaggacaagctaaggtcttagtaatttgctcttatttccgatccttgccagtgtgtaggtgttgtgtggtgggcatggtagtagattgcctttctttataatatttatttaatcttatattaattatttgaagtatgttttaatgttattcccattttaccaacaatgaaactgaggcttatgtaggataatttataagactttttaattttttcccactcaaaaaaaaaaaaccctgtgggatgcctgggactgttattcccattttatagatgagaaaactgaggcccagaggaattaagttccttatccaagcttaaacaggaagcacacagcgtaactgagatttcaacccagacagtcaaactctagagcagcactgtcccctgtatttctgtgatcagaagattcttatttatttgctcataagaagttaaaaattgtccccacatggtaggcaggtggcccagataagaagctagtctgaccactacagtgacagggttgccttgacttcccttctagctcccagacgatgagcacgacctctcagacagggagctggagctggaagactctgcagctctgtcggacctgcactggcacgaccgctctgcagacagcctgctttctccacagccttcctccaatctctccctctcgctcgctcagcccctccggagcgagcggtcaggacgagacaccccggctagtgtggactccatccccctggagtgggatcacgactatgacctcagtcgggacctggagtctgcaatgtccagagctctgccctctgaggatgaagaaggtcaggatgacaaagatttctacctccggggagctgttggcttatcaggtaggaaagagcctctccagtttgccagcttaaaggaaagtcagagggaattaatattgccctggaaacatgacagctatccagaatcatttgcttccttctttcatgcggggaaattgtacctaagtgaacacttagatatgaatgtgattataaaatgcaaaatttggt

SEQ ID NO: 123571 - DNA, 1091 bp, Homo sapiens
tatgcttctctgtggccttaggctttccagcgacaggtccacgagtgcctgacgcagctggaactgatcaacaagcagtaccgccgcctggccagggagaaccgcactgattcagcatgtagcctcaaacagatggttcacgaaggcaaccagagatgggacaacctgcaaaagcgtgtcacctccatcttgcgcagactcaaggtttttgctatgcctcatctgtaatttagaggccagaggatgggactgggccatttgaatgcagtcttgagacacagtctcagtgattttgtaagaatgggatggcaggaggagtaaaccggggagtgatatagcaaaggattgcaggcttctcattgcttgctgagaaaatgactttacagaacactggaattcgctgtgccatctccatatgtttagaaggacttttaataaaaataattgttactactttcctcttgccttccagcattttattggccagcgtgaggagtttgagactgcgcgggacagcattctggtctggctcacagagatggatctgcagctcactaatattgaacatttttctgagtgtgatgttcaagctaaaataaagcaactcaaggtaatagattatttttcaagttaccaaagtgaagaaagcctgaaaatgaaaggatttgtggctcttttgtgaagaacatagcaaataacttttcttttgaaaaattagttctggactgcaaaaaaattcagaaaatgtaaaatatataaaaaatcagataaagagcactacccagaaataaccactattgcttatatctgggtagtgctcttatcttatttgatatcgatattgttgttgatatttttcaacagcttgattgattttcaatcagcttgattgccagggtgttagggatgttctgctgttgttgttttgttttttttttttttagagagagtctcactctgtcgcccaggctgaagtgcagtggcgcaatcttggctcactgcaacctccacttccctggttcaagcaattctcctgcctcagcctgccaaggagctgagattacaggcacataccaccaagtccggcaaat

SEQ ID NO: 123572 - DNA, 1050 bp, Homo sapiens
atgaggtatggagtatgttaactttacacactatttatatcacagccttattataaataatgatataattaaaacaatgacagtttgaatttgagctatatagattctattcctttaaacttctctttcacaacatgaatttaaggataaataaatgtagtgaagagatttagaaagaattagaagtactgtacacccaaagattgccatcatcctcattacctaccctgaaactaggaatatgaaacattaatttttattatgttaactagaaatgattatgtctatattcacatgaaccaggatcatgaaaaataaaatagcacatatccacatttggtgagaggtggtaatctgctcatgagtgttggttattatttccagatggaataacttgctggaagagattgctgagcagctacagtccagcaaggccctacttcagctttggcaaagatacaaggactactccaaacagtgtgcttcgacagttcagcagcaggaggatcgaaccaatgagctgttgaaggcagccacaaacaaggacattgccgatgatgaggttgccacatggattcaagattgcaacgtatgttcaggagctaccttgttttccccacatgcccttcttagactgcccaagtttagcttttggtctgtgtaagctttggtatgtctttctatgtgagacagttacccaaaaataactgtcttaggatcaaagagcctgcctgattttcagaacacaggtgcacatgcatcagactaagaggtctcctcccattgttttattttttaaaatgagttgttttcccatttttcctagtggaatttagtcaatgtgaaagattgaggctctttgtgttttctagggtggtcaatataagacatgaccatatggggaatagtgttctatctttaaaaaatcttctgttccagatgttgtccatttacattcattaactcctatgtaagcatctacacaatagtttcatctaagatattaatggtagaaagaagtctttctctcctaatttactggtatacttc

SEQ ID NO: 123573 - DNA, 1047 bp, Homo sapiens
ttttacttttttaaagttatgctaatttgccatgtgtaaaaagatgactttttttttgcatttgagtgtaggaagaagtacttctgcagcgtgcctcttctgaaagagataagctttttggattagtaaaaggtttttaggacatgaaactataatggcccaatttcagtgcaccccagagttccataatagaacaatttaaagtgactattttttaaatctttcaggatctggaagatttgattaaagcaaaagaaaaagaagtagagaaaattgagcagaatggacttgctttgattcagaacaagaaagaagacgtctctagcattgtcatgagcacactgcgagagctcggccaaacctgggcaaatttagatcacatggtaatattgctcacagaaagccagctccaggaccgtgtttgccagctctgtccaaactctgggttttggttttcctaaagtagcagaggaaataatcaaatctatacattatctccttgtacttttaagtccacttcgttatcctcttttttttttttaaagtctagtttctggtgttttctagaataagcctttattttaaacattactctcttaatgatctcatccattcccatggcaatagatcattctcaaacatctgtctccagcctggcaaaagatatacaaagtggatatctgtatctaagtgatgcaaaccaagctaaacacttttctgacagagataaataattatgaggaaggaatatcttagatgttttgtcttaagatatttatctgagtgtgtgtgtgtgtgtgcgtgtgtgtgtgtgtgtgtgtgtttgcgcatatgtgagatagatatggatattgttatagctatagatagatttcactttctgggacctgactacctgtattcaaattgaaatttctcacattctagcagtataatcttgggtaattttcattacctcttagtgtctcagtttcctcatctataaaatggggataatgatcatacctatctcataaggtgttgtgaggattaaatgagttaatgcat

SEQ ID NO: 123574 - DNA, 1035 bp, Homo sapiens
caggagaaagtgaagactaatggaaagttggtgaagcaagagctgaaggaccgagaaatggtggagactcagatcaattctgtgaaatgttgggttcaggaaacgaaagaatatttagggaatccaacaatagaaatagatgctcaacttgaagaacttcaggtacaaaaaagtctcctcattctctttacccatcatttcaaaaacaattgccctgattttagttgaacatacttgtttgtatttattgaatattgaattaaaaaatttcagaagtgtgttatataaaagatatttagtattacttcatgggattttcctttgttttttaaagtgaacatactttatattcagagacaaaagaacaatgttgtattaagatatttttctaattccacacttaattatatgttgatgaaaaatatacagccttgtctataacagtccccttagaaggttcccagaaatttcttattttgatcttttcttcagattctcctaacagaagccacaaatcaccgacagaacattgaaaaaatggcagaagaacagaaggagaagtacttaggtctttataccatattaccttctgaactctcccttcagttggctgaagtggcgttagatctaaagatccgagatcaggtaaacctatgatcaagaaagagtgtctttccattttgtttatagggtcagtcctcttgtgtgagagttcttgattttcacaataatgtcttcttggagacagagttaaaaaaaatagatggctataaaacaataatattaaattagaagtctttttcataggcaagatgatcatagatatgaccaataatgccatacaattaaagataatttttgtgcttcccctcacctttaaaaaaagacttaaagaaacaaaaagtaagatatgtttcatgtgttcaacaaatatttagtgaatgcccagagtgtgccagggactcttccagctgttattttatttcagcagtgcaacaaaatgtcagttaagtaggtgaagatgttggaggaaag

SEQ ID NO: 123575 - DNA, 1050 bp, Homo sapiens
atgttataatttagttcaaattttaccctatctctattgcagaagcatctcagttagagaaacattggttatctttttttgagatcattttttatttttacttttagttgctagcttaaacaaaaagtgcaatatttataccataggaagagaagctgcaaaaacctctgacttatgtttatgacaattaacttcaatgattttatgtattctagcatgcctctacggttatatttaccctgctcatgttctcttcccctaatccggatattacactgtgatgtgtggtccgagaagttatcaactggggtataggcattgcattttgcaacatctggggagacatacaactgccttagatattagatgaaattgcagaatcttggggggaaaatccatttagatgtactggtcatgtttcattgaatttgaatgatctttatagaggtagaaagcagttctcataatctcagcatgattgtattgtctcagatgtaccagagtttggaacacgaacttcagaagcacgtcagccgacaagacaccctgcagcagtgccaggcctggctttctgcagtccagccggatttagagccaagtcctcaaccacctcttagtagggcagaagccattaagcaggtagtaaactcctgaaagtttgtgttattcttgtgaatcattcagagcgtcagtgaaaatgtgtgaagtacctatgatgtgccaaactgtattgactcctgggaatctaaaagtaggaagaaggtctgaggttggctctagtggagttcatgtgccagccagaagatggacatgatactgaggggccaacttggtagactagaaagagaatggggccaggcgtagtggctcatgcctgcaatcccagcactttgggaggccaaaacgggcgaatcacttgaggccaggagctcgagaccagcctggccaacatggtgaaaccccatctctactaaaaatataaacattagctgggcatggtgacgtgcacctgtaatcccagctaccctgggattgaggtagcagggtacc

SEQ ID NO: 123576 - DNA, 1050 bp, Homo sapiens
ataaagttgatgaaatagtaattagattgttttagataaaaattatgccagaattataacttattaacctgaaaaatatagggacatctttttgtctggtaataataccatggagtattatctctctgagaccagccatgaacacattctagtgttaaaggttacttcatcattccttatgtaactaatctcttaaactcattgactcttcctcttggagtatccctgaaaacatacatgtgcttttgttttcatttaatatataactaaggtaaattgcaagattctttcaaaaacaatattaaacagtgaaataatctatcttaaactttgatggataagttacttaaaagtagaattctgaaaactctgtattggtttcacttttgcaggcaatgatggaagaaattgctggttttgaagaccgtttgaacaatcttcaaatgaaaggtgatactttgattggccaatgtgcagaccacctgcaagcgaaacttaaacaaaacgtgcatgctcatctgcagggcacaaaggacagctactcagcgatctgcagcacagctcagagggtgagtgcccccagaacattccacagtgacaaggaattatggggagaggctgtgcagtctagagactttttacaaatagaatcgatgctcaaatctttggattcgttttggtgtgttgccagacaggaaatacgaggataaatttcacagttgctatgtgaacacaaaactaacatattttgtatttgattgatgtgactaagcagtgaatttcagatattggtttttttgttttgttttgttttgtttgagacggagtctcactctgtcgcacaggctggagtgcagtggcgcgatctcggctcactgcaagctccgcctcccaggttcacgccattctcctacttcagcctcccgagtagctgggactacaggcgcccgccaccacgcctggctaattttttgtatttttagtagagacggggtttcaccgtgttagccaggatggtttcgatctcctgacctcgtgatccgcccacct

SEQ ID NO: 123577 - DNA, 1016 bp, Homo sapiens
cgcagtataataggaggtagagctaacaggatttcctaatggtttagaggacggagagctagagaggacgctggaacaattcccatgttctgggttgaccgtctgggtgggaggtcatggcatttgctgtttgaaaagagatggaaagagaagggggcttcatgggggctggggtagaatagggatagggtgaacatcaggggtccatttctggacataatcagtttgaaatgttaagagtagaaatataaagtagttaattggtaattcatatgttagagaaagttctggaccagacataaaatacacacacacacacacacacacacccatgcattcacacacatatctgtgtcaaatagataaaatgatggaggagtggacgaataaataacctgaggtcacttgtcaactgtacaattaaaatatcttgattttagcagtgtcgttgatgtgatggtgcatgaatggccactttatttttcttaaatgctctctagttattaaatgaagaagtgctgagttacagcagcttgctggagaccatcgaagtcaaaggggctggcatgacagaacactatgtcacccagctagaactccaggatctacaggaacgatacagagccatccaagagagggccaaggtacggcaaagcactttccttgtagactcaccaaaaggggagtgtttggagctgtgctcctttaaagactcatttatgttcaagaatgacaggcttgggaaaacagaacaaaagcaaaatgaatttttaatattttaaaggaattactggcaaaatcaaaaaccttcaaatattgttagtattatgaaagctatgaaagtaagataattttcaactaaaaattcctagaaaggtaccaacttaaaaaaaattctggacaccttcaattgaagactcataaatgccttattatgtctgatgatgagagttttctaaggtgggaaataatcactgatagtattaatcattcttcatttagtcctcacaaagaaa

SEQ ID NO: 123578 - DNA, 1034 bp, Homo sapiens
ggtttgatagagttaagtgttgcttctctccctgcccagagctttggctccagaaaagacccactcaggggatctctctcagttttgcctttgaggctcccccagtgtctcgtgtccccccagccgctgactcttgagttgatagctagttccatgtttctgcatattggcctgggtttaaatgttccttgcttcctgaggctgcccttcagacctggactcagtgtccttaagccctgggcagcctgctcactcccaagcaagcttcttcctgatctcttgaccccttgcttactggagtggatggagcagacacaatgacattttagactcctaaggattctcaatgtggatttattgtcctttcaaatccctttcagccaactcgaaggagctctctccaagtggacaagttatcaggatggcgttcgacagttctccggttggatggatagtatggaagccaacctgaatgaatcagaaaggcagcatgcggagctgcgggataaaacaacgatgctcggaaaagccaaggtgagagctggatttcagattccatgtgttttctcacaggcttctttagaatgccacagtcagacaaaaatgggattacgtgtaccctagggcagtgcacataagcaaattacgtttggggcttttagtataatctctaaaggcttcttaaactggactttcatttgtgattactttattagtgagtgaaaatttttccttccaggaaaaccatgtagatccatgttttatgatacaaaccatttaaaatgtagcaccatgaaatatcttttaatgtcttcagcctgctcatcattaggaagtcttccttttttttttttttttatcacatccctttgtgttatcttttgtgcattcgtcataatgcttacattagtacagtactacatggaaagatttttttaaataaataaataatggcatgttcttaaaacttattggcagtagtattcaaacatgaagttttacagtcctttggtttatagctgcagcctcactcc

SEQ ID NO: 123579 - DNA, 1094 bp, Homo sapiens
agaccagcctggccaacatggtgaaaccctgtctctactaaaaatacaaaaattagctgggcgtggtggagggcacctgtaattccagctacccgggaggctgaggcagaattgcttgaatccgggaggcaaaggttgcagtgagccgagatcatgccactgcactccagcctgggtgacagagtgagactccatctcaaaaaaaaaaaaaaaggaaaaagaaaaaaaaaagagtactgtatatgtcaatttccatatgttattcacacatttcagcttccagttccatttcccacccacccatccttgtaatcttaataaagtaaaaggtatggtcaagtctgactttctttgtggtccctgttcccaactacagtatttatttcttcattgcttcccactgagaaaacgtttctggctcctttcccaggcaaagttccctgatctgtgcttttgaccctacattgagggctttgctcccaaatttgtgctccacccctggcattttcatttgcttgctctcctttggaagataggatactttccacagggaagtgcagcttggctttggctccttgggctcattacctgtcctcttaaagagccagtgcatctacataagaagcagaagaggatagcacccactctactttatcaaataagtcagaaacaatcatattagaaatcattctactataaagacacatgcacatgtatgtttactgcagcactgttcacaatagcaaagacttggaaccaacccaaatgcccatcagtgatagactggataaagaaaatgtggcacaaatacaccatggaatactatgcagccataaaaaggatgagtttcatgtcctttgcagggacatagatgaagctggaaaccatcattctcagcaaactaatacaggaacagaaaaccaaacaccgcatgttctcactcataagtgggagttaaacaatgagaacacatggacacagggaggggaacatcacacaacgggacctgtcaggggatgggggcttaggggaaggatagcattaagagaaatacctaatgtagatgacaggttgatgggtgcagcaaaccacca

SEQ ID NO: 123580 - DNA, 1016 bp, Homo sapiens
tttggtcaccacctgggaattctgggtaggtctagctctactttcagaatgccctctcacatcttccctggaacctcagttagagcttccactctcccacccagtgttaacacaatccttcctctttctatttgcccatcacttcatgtgtttggcaactgtgtccactgattttccttcttggaaaggcatattaacattggagctggcttccatgatgagacttgtgtggctttgacaattaagctgcacgtgaacagaatttctactgaatgagtattcttctggtcttcagagatattgatgaaatcttgcttgatatttagtttatagaagcagacttaatgcagaaactggagcatgccaaagaaataactgaagtagcaaaaggaaccctgaaggatttcacggctcaaagtacacaagtggagaagtttattaatgacataacaacatggttcacaaaagtggaagaatcgttgatgaactgtgcccaaaatgagacttgtgaagcattgaaaaaagtcaaggtaggtaataaactatcattaagtgcttccattcaaatggtgattgtagttctgttttgtggtgactataataaaaaatataacctctgctctcagttacccatatgaacaccagaccaacttatttatgacattgaacacagcaaagtaagcaacacgtgaagaactgggtgcaggtgttcagaaatcaaaaatgaataccttgaaaatagaaagcatgtgttgctgtagtgcctgctcagagtctatgcttgttcaaagtttttttttcttttttataaaagggtggagcctctggaagaactatgtgacttccacaaattttcaaacttgagtatccaatagtttttcatcacttaattatatttattggtcactgtgacttctttcatccagataatgtatattttttgaaaaagaagaagttgagaaaacattctatttccatgttttctatttttttatttttattttttgagatggaat

SEQ ID NO: 123581 - DNA, 1108 bp, Homo sapiens
aagcatcatttgacatcagggtgttccaaaaagaagaaagcaaccatgacctgaaagggagagaaactaacaatgagaactttgtgatgatcaatttccatgatgtgttagaaaatcctgtaatgtaatgcccggcatctgaataacatggtttggcaaaggagttgaggaaaggatgggtaggaatatagatgaaagaggttggctatcagttcataatttctgaggctggaaataggtataatctctctacttttgtaattatatgacgtttgggcaataaagggtgttcttttaaagaaataagtaatagaatgtagaaagaagtcacagtaatgattattcttatggaagacagaaaaaaatgaatgagcacaaatgtaggtaataggtagaaagacaaagtttatttcatacttgaagaagccaattttttaaacttaaagaaagaaaatcgttgagtataattgaagctaaaggcaatgttactgatttctagagattaataacttgccttaaatgatactgtctatgctggaaaattcaacagtcaaaattgcttctcaaaaaagatttattgtattacagatttatactccaactttctcccatcaacttttataagacgtttaagaggaagctacgttcttttgccttttgtaatcgcttctctgaaaactctgtcaccagtgtctatagcatcggaatctgtggccccacctttaaatgttctccttccttgacttggggggtactccattcttctggttctcctgcctttctggtttattaaacactggtgtctgcactcatcttccacaaagtcccttctcagaaacctgtactgactgtttcccgccctgaccataaagggcaatcctgatctacaatctggttcctgtcttcttgcaaatacatgtggggtattcccagaggggagggacttcacagctcttttccttataaatgaagacactgactcaaggctacatgggcatgtaaaactgttgctgcccatctccacgtggaaactaagtgccatatgactgagaggactgcagactctgttactcctgcatcctgacattgcgtcagtaaggcagcctcg

SEQ ID NO: 123582 - DNA, 1110 bp, Homo sapiens
tttttttttaacagaggcgcctacctttggtaaatagaaagcgggctcccataagacatgctaagaatgccaccattctaatgtattattaactgaaaagagtgactctgaatttatccacagcctagaaatcacagaaatggtttcttcagaggctgtatttttgttcagtactgtaaggaacattatgtaatattgcaaaaacagcttataaaagaaacagacgagagatgtgttggcaggggaaagaactaaatcgaagacttcaatcattcatgctttgcttttaaatccagagctagaaaaggaatcggatttccagaaaatgatcagccagagttagaagagcttgtggctgcattctatttaaggctgacatgtaacaggttaagtaagcatcagttctgttactattagttacattctataaattctccctgttttatttctaggtttcattttgtttcctccacatcagagctacacctaatgaaaatggaatttttagaattaaagtaccgtctgctctcactgctggttcttgcagagtcaaagctgaagtcttggatcattaagtacgggaggagagagtcagtggagcagcttctacaaaactacgtggtgagtcccccgtgctttgacagagaattcctatgagccatggatttagcaacacagttcagtttctttgatgttgttattttaattcttgaatttaaacataaagatagcgtgtgttaaatgggttagatacaagtttatgagcttttcagaattatctgaaatctaaacctatttctttggaatttgattatttaaaatcccctagttcagtttagtttaatgctttgctgcattaatcatatgggaccatcctgactggctttattgatttttaaaaaaagtttttgtattgcatacccacattttttattggaggtcaccatttcaactacattaaaatacttaaagattaccttcatgtcttttaaaattcaactatgactagtttagaaccattctcaagtgtccaaatgggaactatctattttttttagattgtgtccactgtgtctttttttaccgtaattccctgggcttcattgcctc

SEQ ID NO: 123583 - DNA, 1065 bp, Homo sapiens
aaagcaggtcaaaatgtgatcatagcaaaatatatcaggttagaaatagtttggccctaaggtttttctaccatgttaaaatgtcatatgtgggcaagcatatacaaacctgaacattttaatttataatagaaaagttttcacttgtcccaccaagtgtgtctcttgattttaggctggttttgctactaatttctctaatttgctaaattttagtatgagataaaaatattaattttaatgtattattttggtggtctaatatgtcttactttttcaatgagtgacacatttttaagtactgtatttattctgcaatcaagacacaaactaagctctagaaattaaggcatgaatctcctttcacctgacttcttccttgcttctatgtgagaaattggtgagggagtgtaaaatacatgtacatctttttagaaattagtttgtaaatgatgaaaaacacagcaaacaaatcaaagaagattcaaattaacctaaataaatgaatcaaacctgtggagttctatacagtctataattaatatttattaacatcacatttaatcttctcactgtgttacctatggggtattccctgcacttgtttgaaattttctaatcaaaagggtatttcaaaatatattgtaatatgattgatttactttagatggcaagcaaataccactttataatagtctgcatgcattcaaagtaaaataacagtagaaagcctaatctcttttgccattaaaggtttcaatttgtcatgctcagttttaagcttttaaaaaccaacatatccagaaaggcaaaaaatactaaaatcatttcatagcagtaattacattttcctttggatcatgtgcctttaaaacgtctgaatgcattgctgtgcaagtgtcatgtgtgtttaaaagatgcataattattagatgcagttccagcatagtgttttaagtacaagcacccagctcctattcaaggtaagagcctttgacaggcaccaagctgcctctgaatgtggcagcgggatcaaattgttgaatacattgactcatcggtgcg

SEQ ID NO: 123584 - DNA, 1033 bp, Homo sapiens
tcatctcctctgtgccctataatctgttaccctaccaccttttcactgtatcctgttctctttaccatctccttttgtgctctgcttaaatgcaatgtaaaagccccactcatccacatcctcgcttgccttgtccgtatttcactttgttttagtgtcctggtaaaaacacaatgccggtgaaagccagctctttgcctagttcatgcccacacacatgtagctgactgtggctggaaaaaaacacacccccaggcgcgatgactaacccaagtgggcccttaatggtgcctggcaatcagaaggcatttcccgactccattccctcttcatttctgggacaactatttcatatcttgtctcttcaaaccttccacacctcctccccatcctcactcttagctgatgacattacttcctttttctttgagaaaatagaagcaatcagaaaagaattgccaccagctcccacggccacatcaacccacctacgcaattgcatctgtgcccgaatacacgctcttcacttctgttactatgggtgaaccatctgtgctctgggccgaggccaacctctctatgtgtacattagatcccaccctctctccaaaaggtaattcctgtccttcctcccttctctatttttttctctttctttctttgttggagtttactcatccacatacaaatatgctgccattaactcatctttaaaagtctttttcttagccccacttcccctcccagctactgtccaattttcttccttccttttacagcaaagctctttgagagaattggctctttcttctttctaaattctcttctctcattctttctaaaatccattccaatcaagcttttatcttgccatctaccatgtgaagtttaccaggctttgcctcattcctcatccaatggccagttctcagtcttcttacatcacctgtcacaaacatttcacatagttgtccctttacccttgaaagactttctttaaggcatggtggctcatacttataatcccagcatg

SEQ ID NO: 123585 - DNA, 1036 bp, Homo sapiens
gatgtgtgaaaaactgtctgtcttcactgttcaggtctcaactggagttttcagagcaatttgagatgacaatgaagagtaataagaaaaccaaaaaatgtaaaatatgttttctttttttttttttttttgagatggagtctcactctgtcacccaggctggagtgcagtggtgcgatctcggctcactgcaagctccgcctcccaggttcatgccattctcctgcctcagcctcccaagtagctgggactacaggcgcccgccaccacgcccggctaatttttttgtattttttagtggagacggggtttcactgtgttagccaggatggtcttgatctcctaacctcatgatcctctcacctcggcctcccaaagtgctgggattacaggcgtgagccaccacacctggtcaatatgttttctaaatagacttagaaacatatataaagaagaaaaaggctaaggagcataaccaaaagcttacaagtagacatcacgccaatagttagaaatcagtgacttcataaaagaataagcaaaatagaggtaactactgtttcctaggtctctaaatgaaattaatttggcatttgatagaaatatgttagcttcttaaaaacaataagttcagggaacctcttttgttccttgccaggattggggcacaaacattggccaccagcgtgacttaactatagttattactagtaaagtaattgtttctaaaaagcaccacaaatggctaaagcaaagactccatgtgcaaatgctggcatggattgatgcaaatattttggagtcatctggggcttgctgggttttgataatattgctgtgtgaataagaaactctataagaaaacacattagacttacctcatatagcacagagaaaatccatccaaacttccatctggtttttatacgtgaagtccttatattacccagatggatttatatctaatttggtgtctgaggttttactgttttagagtctctgacattaatcatctctccagattagtaaactgagt

SEQ ID NO: 123586 - DNA, 1050 bp, Homo sapiens
gaaattttcccctgtgaaattcattaatcttatggatattagcatatattataaattttttgtgtatgtatgctaaaatggatgtggagaaaattctagagaagttgtaaaatgaagctctcaaaatgatcctagagatcatagtagattctttcataaaaagttaaaaaaattgatgttctttattttccataaagatatcttaaacgtcttatactgattgattcaaaggaagtagatatacaagtttgtaatctataccagttctcaatttttattttttgtcattgaacctgatgaatgaacttcaccagtgagacaaaaatcccataggtatatctcaaatcatttacaatgatttttgtgctagcttttactccacctctgtgatgtaaaactagtaaatttaaactttcaagagtaaagtatttgtgaaatgattttgcatctgacacaaatttaaataaaaaaaatgtacaaacatctgagctttttattaataacacacttcatgaaatcttggctgagaattattgagctagaggtctgaagggtactttattattatttgttttcatttgttaggaattattaaaaggatgtttttgatggtaggctatagaaattgaatgagatagacttaaccatgtaagtccattttgttgggacttagcaaacaactttgtagtggatgaaaaacattagcatgaataatttgggtcaattgtacatagattgacgtctctccttaatgctttatatgtcatcacccaaaagtagggaactgaatgctaataggctctgttttgctatttcttgcctttcctttgtttttctttaaaacgtattaccacagtcaggttctaaactgactacctacctctttattccctttgaacaaataatgctgattttgaaagatgatttatgtatatctattatcttctccctttgtttttcatgtcagtccatgcacagaggatcaccggttagtacaaattttagaattcttaactcctgatttttataggtaaaagggaacataagtta

SEQ ID NO: 123587 - DNA, 1052 bp, Homo sapiens
actcccaccgcccccccacacatgtaaatgcctttatttcagttagcctttgctgtgtaacaaactactccaaaactctgtggcttaagccaatcagaattcatgctttctcacagtatgtggatttgctggttagttcagttaaatatggatggtttcataaggacacatatataagacaatataccaggcagggggctgatctttaggaatacgatattgaggaaaatgctttcttcctacaaggaatttgtatcaagtatgtatggatgtgagagagaggaggtatcagacacatcagtctcgaagtcttaggcctcagtttgttgacttcacttgggttcacctgtggctgagttcatctgcagggctgactgagcttgaagatccaaggtgacctcattcacgtgcctggtggttagttctaggtaacaaatgagacatctgaattcttccacagatggaaacatcttctaatataaactgctttctttgcacagtggttttaggatggagatccaagacagctaaaacagaaacttcacgacctcttaaggcctagaatcagatgacataaagtaatttctgctgcattattaattaaagcaagtaccatacgagttcagattcaaggggaagggaaattgattctacccctggatgggaaggacaaagtcaccatacaaaagaaggatgcatagttggaccacaggattttgtggccataatttaaaatctgtcctctggtcactactgtttgttttctttctgcatggaaagtacattcatccattctcaaggtatcaaaagtctcctccagcctttggtttggcatcaagctctaagtcctgtgttgcatcgtttgcatcttgtccagatagagatgaggttcctcaggtgaaatttctctcaatccatagacccgttaactaaaaagagaagttacctgctccccacttcttcaacatgcagtgatgaggcaggagtggggtcacttcaatagatgcttctgtccaaggagtgagagaattgaacagagggagcaattgtgg

SEQ ID NO: 123588 - DNA, 1041 bp, Homo sapiens
atttaaaactcttggctttcctgatttcttgcttgttatgtggctgtagagggttaagcctggcttatttttcaaaaggtgcccttagtgctgggtgccctcccagggacccacctggatgggcctttgcagggtgtccctaccagcctcttttggatgcagggtgaagaggaaagaaagttaattacctagaagacttcaaaatgtgcctgcctttccttctcccttctaatgttcaccagaactgcaaagcgaggaagcctggacagtgagtttcaaaagagctcctctggcaagtctgacatcccacacatccctcctccccaacccttcctatccataatgtaggggcagcttgacctgctgagaggattcttttttcttctgcaagtctattcttgacattgcttgtcctagaacctagttagctactgatcaggactctcattggctgtccatctactcagggagtaaaagcacacacagaaaaaatccagaccaaagaacttttaatagaatagttcttgcctttctgtgtgacattgtatcactgatcatttcaatcttgaaaattgtcatctctatttagcccagcacggtgtaagcttcttcaaggcacagattatataagatacttctttatccttaatgcccagtacagaccctcaacaagaaagttattttaaattttcttgtgggttttgttgttgacatttatgttttattcactgctgcccaccttagtcctaagtctgatttgagacatctgtatctgatgaagcagctgggggtgagaagttaaagaacttgaatgtcagctagactgtgtaaatctctaggttcttcagacagacaagtgataaaggtgaagcagtcttgaaattttacggcatctatgtctaagataagtgtccagttaaatcctgctattattattcttaaacagaaaaacatttacaagcccaatgtaagagttggttctttgattcaaggtgactgtccctcttacttaaatcaatgtagtattcccaaaatcataat

SEQ ID NO: 123589 - DNA, 1050 bp, Homo sapiens
acatcagtgccctacatattgtctagcatagtgcatttcataatatggacacttcataagtatttgttaagtgcatataatataaatagttaatattatatttattttcaatgggggaagctgggaggccggaatagaggttatttttgacaagtcaagagacagatgatgggttgaacggtggatggggagagaggtggtaatattctagatatattttgaaggtaagactaaaacaatgtgttgatgaattcggtttggtgtataagagaaaaaaattaaacttggtcctctcacttttagttttgaaataaagaaaaactgttgtgtggaacagcattgaggaggaaaactgagaccttattttggatatgttacattttagatacctggtagatttccaggaaaggagttgagtatatgtatgtaactgtagagatcaatggaggagacacagcaggagaaaacatttggacgttgtcagcacagagatagtgtttaaagctgtgagattggttggcaccacccagggagcccggacagataagaagaaaagaggtttgtgaaatgggcactcaacactgagggaagtggggaatgaggagagtcccacatatgagactaagaagctgcagcctgtgtggtaggaagaaaaaagacaaaaggaaggtctgaaagccaaacaaagaatgagttcaaggagggagtgatcaactgtgttaatgttgttaattttctttacatgtacatgtttctacatgttcataatatataaaaagagtatgtgcattttatatataaatatcaggtctgagccggtgcgcgtgtgcctgcctatcatttaaaatcatttctggaaaaataaagaatggctttgtgcattgcccacaaggaggttcaagatgctcagaaattcactggttaggagcaattctttaagaacacgttaaatataattctataccttatgtagagcccatttagacataagtcctcagagtaagacgtctcttctttcaggccctccctcaatcagcctccctctcttgt

SEQ ID NO: 123590 - DNA, 1063 bp, Homo sapiens
atgtagataactttgcaagcttaatttagataacttaccaaaattatagaatattttctgattcatgttgatcagtaaatataaatcctacataataaaactattcttaaattttatgccataatgactaatgcaacatacagatttattcaaaaagcatttattgagcatctatcagataatgcatagataaagggcaatagttagggcagtagttatcgtatgtgtgacagtgatatttcatacatgaattggggaaggtgcaagggtgtccttggttttattaactaaagtacatgtaattcttgctgaaatttgttaatgggttttttttttctttttaggttgccaagacattgaaaaagaacgaaagcctcaaagcctgtattcgctgtaattcacctgcaaaatatgattgctatttacaacgggcaacctgcaaacgagaaggctgtggatttgattattgtacgaagtgtctctgtaattatcatactactaaagactgttcagatggcaagctcctcaaagccagttgtaaaataggtcccctgcctggtacaaagaaaagcaaaaagaatttacgaagattgtgatctcttattaaatcaattgttactgatcatgaatgttagttagaaaatgttaggttttaacttaaaaaaaattgtattgtgattttcaattttatgttgaaatcggtgtagtatcctgaggtttttttccccccagaagataaagaggatagacaacctcttaaaatatttttacaatttaatgagaaaaagtttaaaattctcaatacaaatcaaacaatttaaatattttaagaaaaaaggaaaagtagatagtgatactgagggtaaaaaaaaattgattcaattttatggtaaaggaaacccatgcaattttacctagacagtcttaaatatgtctggttttccatctgttagcatttcagacattttatgttcctcttactcaattgataccaacagaaatatcaacttctggagtctattaaatgtgttgtcacctttctaaagctttttttcattgtgtg

SEQ ID NO: 123591 - DNA, 1060 bp, Homo sapiens
agtgctgggattacaggcatgagcctaaacagcttcttgagggacagtcaaatcagtaccacagattctactttttctgttaacatagtgagtttctaaagttgatttctaatagcagtgtgcctagagtactttgaaatttgtctattacttttaccagatagctaacatggtatcatatatacagtgggggctactatttgatgtttgcagatattgtgaaaaaatactgtacaaagcagtggttcttaagcctcaatgcactcagaattacttaatgaggagggagctttttaaaaatacagagccctgagcttcattttagaccagttaaaaccgccaggcaattgtaatgtggtcaggtttgagaagcactaataatataaaatatctttttgcactgctgatgtttttctactgtattcatcttagctctttgtgatgctttaattatttcatttatggtgatttacttttccagtgtgtctaaagtgagcacaacttggaagaagatcctagaagatgataagggggcattccagttgtacagtaaagcaatacaaagagttaccgtaagtgtttgcagatgatgtttttagttaaaaatgcactgttagtgctcttctagaaatagaaaagaaaagaggtaatctggaaacccttctttacagtcataaagtatttcagccttatactggaacttagaaaccacattcaaaaataaagaaatctcaactcaacatttatttcttggattcttcctagaaatagaatgtctaaagtaacaaagggaaaattactcatttctcagatagagtcgaccatttagtcaatcttagttgccagttgtgtgtatgtgtattttataacatctggaaaatttggaaaagctgttttactttttaggtattaagtaccatatagactgcatctaaagtgatttcccatagtatttggttcacagtttctgtctataagttaggcttgatatgtgtgagtatttaggttttgctttgtttaagtacgtgcaggtaaattgcatgtagggataagtctctta

SEQ ID NO: 123592 - DNA, 1050 bp, Homo sapiens
cagatgtttattatatagcccctttttccactattttttactcaatcagttatagacaacagtcaggtgttacagccaggcagatccaaaagcagtctgttctgaagtgccttctcaagaataatataatatgtatgtacttataagatttaagtaatattttcacatattattgtcatatcaataattaaacttgaataacatcacagctatgtaagcaagtacatgtagacaatacctaatgctgagagattgcaaagtaatctttgtatatcccaatttaagaagtagggatgtgtggaaattttgccattaagatgtaaatgttatgttctttttataggttgtaaagaagaaagttctaccctttctgtcaaaatgaagtgtgattttaattgtaaccatgttcattccggacttaaactggtaaaacctgatgacattggaagactagtttcctacacccctgcatatttggaaggttcctgtaaagactgcattaaagactatgaaaggctgtcatgtattgggtcaccgattgtgagccctaggattgtacaacttgaaactgaaagcaagcgcttgcataacaaggaaaatcaacatgtgcaacagacacttaatagtacaaatgaaatagaagcactagagaccagtagactttatgaagacagtggctattcctcattttctctacaaagtggcctcagtgaacatgaagaaggtagcctcctggaggagaatttcggtgacagtctacaatcctgcctgctacaaatacaaagcccagaccaatatcccaacaaaaacttgctgccagttcttcattttgaaaaagtggtttgttcaacattaaaaaagaatgcaaaacgaaatcctaaagtagatcgggagatgctgaaggaaattatagccagaggaaattttagactgcagaatataattggcagaaaaatgggcctagaatgtgtagatattctcagcgaactctttcgaaggggactcagacatgtcttagcaactattttagcacaactcagtgacatggac

SEQ ID NO: 123593 - DNA, 1559 bp, Homo sapiens
ctcctgcagcgccagccccagcgcagtgacagccgccgggcgccctcgaccctcggatagtgagtgaggggagcggtcgcgaggggggcgcgcacgccaggaggggtgcacggggagggtcgcagcctgagaccctgacccgacgtccctcggagcctggacgcgcggccatgccacacgcccggcctcgggcggcggcagcggttcctgggtccgggaggagggcggctgggtgtcggggggaagccagaagagccagatgtgcaggggcgggatggcgggccgcggggtcccgccacccacgccgaccgtggactccagccccgggaggtgcgggtcgtggcatcccagggcgccctttttcctcctcggaagacccacctaccccaccctgcttgaataggcgccaaatgcccctcccctcccccaccccggggcccccggcggtgacagggctgcgagcgagaagcccccagggcctggccaggtgcctcaccttctccccctgcgccccttttctacatctgccccgcaccctcacagccaaaggcagtttccccgatttttcgcggtcccagccttgctggcgggcgcgggagatcgcgctcgcggttatctcccgcctcctccgcgtgtcccgcgccctgaggggcagccccaccgatccctcaggagttccagggtctccctccccactcccgccaaatggagagacacccccccaactcattggaccaaactcaactgggacatccaaacaaaaacgttactttttcccaattttttctccctttgcccgttaacccagtctcagggcctggagtggaaagggaagactttaaaaaaagcaatttttactacgaaccttgaatttgtccatagtattaagatgattttgtaagaatcgaagaattggtgactttttcccgataactcatgaagaattagatagtcctttatttcaaagcttgcagagaatggaatgcactcaaatgcttatttttatcctctttgttgctacctctaaataaaatctatatgcacttatttttacctgagaaataacccaaaatgaaaaaatttagcaattcggcattgtactattttgtaatgactctattattaaaaaagaactctagaaaaaaatacttaattttaattttaatagattaaatatatttctagaagatcctggatcgtcagtctaccatcgaaattctgaagcttgatggccttatgagggttttttttttttcttttttgataactctaattgtctttactaccttgctcctcagaaagaaatgactgcctgttggaattttttccccagtttacaggtttgaggagatgaaattaaaaatacatatatgttacttccaagtagttttcaaaggaggcttttgtaaaattttctcttaaagattactttatggtcacaagcattgggcctcttaaattcttaaggaatagccatgcctaacgttgaccacatggtcgttatctgtaggtattagagactggaacttaattatttaacagaagagttacaaagattt

SEQ ID NO: 123594 - DNA, 1047 bp, Homo sapiens
ctgggattacaggtgtgagccaccgcgcctggccggtatttaattttataactacagagccttttaagaattcctcaatatgggaaactcaccaccttgttaccacggaagatgactgcattaattcacagagattatatgtattcagcgactataggaatagcatctatgtgccaggctctattgtcatcatcactgtgtagtagacactgtattttgcagatcgggaaactaagttgcccgaggtcatagaacattgaagtggctgaggcaggattcagatattaatctgattttagagcacgtgttcttttttctatatcatgttcccatgtcatttgagattctaagtgtttaaaacctggttctcgcatttgattcatgttataaatcaagaacttaagtctccaaataagttaaatttgtaggtttaaattgccctgaatctagctgcatctcatctttttctctatatacagattggaagtaaaggaagatcagagaaaataagaacatataattttccacagaaccgggtcacagatcacagaataaacaagacgctgcatgatcttgaaacttttatgcaaggagattatctactggatgaacttgtacagtcattgaaggaatacgccgattatgaatctttagtagaaattatttcccaaaaagtttaagttgatttgttatttatagactttcgtatcttagaaaaattctacagtacatccacatagggtgaaagtacccttactctcttgaaaaacgttgagttaacacagttggaggtaatatgcatattctgaagtcatagataatttacacagatctctctcaatgcattagcaaaaatcatacaatatacagatggtcctcgatttacattgtggttaattcccaataaacccatcataagttaaaaatgcatataacgttagcaacacagcagtctcctaattaatgacagcttgacttaacaattttccaactttaccatggtgtgaaagaggtatgattcctaagccctaaggagctcctcagctt

SEQ ID NO: 123595 - DNA, 1003 bp, Homo sapiens
atatgactaattttccactgaaatagatcctcggttaccagagaagtatatacttctaaggattgttattaaatatttgatttacttagaatccttacctgatactccgtgggataactgcaaggcgaggaagagggagggatccaaactcagggaatgtctgtattaattactatttatagaaggtgtggatggtcctttcaggtggagttctgagttttacacttaaaaagaaaattctcacaatgaagtaattatcatgggttctttatcagaaaatgctctaaattgttggttctgagcctttttgcaggggaggggaacatggcttcctttaaaaaaaaatgatatgaaagcattggacctcctactcagaaacacatatacagttttgcatataattgcaggggcttctttccattaagttcattcacatacttcgaggggatctgattctagatagttaggcaaagggactatatcgaaatctccagtatactgtagctcgaactaaacgtctttcacaggtatcaccacagtgattcacatgtgataaagagcatagggatagcaaatctcagttatctagaaaggaaacaagaatctcttactgtgactgatctcaaatgggcatagtccctattaactaatagtggttgaggccagtactggattgttaacgattttgttcttttaaattatgagaatatccttatgttaaactggatgatgtcttaggtaatacagaatatgaaacaaaaattgggggaaaaaatggatagcctaaaaaagttaagtgattttctctggtaataggatttttcatgtatcgtagtttctataagtagttgttacttttaaaacatggtggctagctgaggggaaacaatctgtattaaatgatttatgcttattgtttagtatgtatgccttcagtatagaaatactttgtgctaggccgggcgcggtggctcacgcctgtaatcccagcactttgggaggc

SEQ ID NO: 123596 - DNA, 1079 bp, Homo sapiens
tcagtctaaaaaatataattttataatgctaaaaaattaaggatttgtaaatgatacaatgttgcattgtctgtgtattagtattttcctaataagtagttattgtgagatcatctctgtgggtgaaataataacctatttaaatatggactggttgcctttataatgacttctgccttgtgtgactggtttgtggggtattaacagcaacaatcctatttaacaaaggtaattacttaacagaattgctgcttcataacccagttacattaaaatgaaagtatattgttatactgttcataatgagtatactttattctcacaaagcaaattctcagtctatatttttaagataacttagtgtaggagttctgttttgcctcatttcccttctactgaaaagtgatagcagatatctgacttgtttttcagaatgaagtgtgaatgctttgagaaggaactcttagtggttcctatgctaattttgggaaaaagtgctatttggctctgtaataggtttaatggagttcctttctttaggtcttagtttctttagatctaatttttgtgtgaagcataggtgagaaactaagcagttaagggagagagtaaagtagaataaatggcaagagccacatctagaaacctagtcacttatgtttaaccatcttggggtggaagttttcaggaaaagatgagagactgaggtccatgtatcatctaattcctctagcaaccataagagggagtcaacacagggagacatagaggtagaaggcccagagaatggtaggattcttactgtcagcattgcagagatgtcacagaatggttcttagttgttcatgaaacagtgcttttgatggtggctcctaggacaaagcattaccttgacctcagatcccagtgtgttgaggaattgagactcatgacttcttggccactcccatttccatttggctcatctttgcctccaaatatgtttgaaataaaacaaaacagacccttcccacagttctcacgctaccatttttttttcctgctgctaggctctttaaactcagaaaaatttgaaaaaa

SEQ ID NO: 123597 - DNA, 1027 bp, Homo sapiens
acagacaaactgttaagtattaatcccttgtctattttctccatttctctttaacttaaaatggtattttcagcagttcttgataactgaaaccttgaaacccattttttaagaccggtagtaaaggacagttaataaaaaggacaatttgtctgttgccaaagttcaatttctacagggcaagactgtggccaatagtagatcaagagctgcacagtgaatagttaaacatttactgaatgtctgttgtaagtagttttagtccaaatgtgtgtccatattttaccacctgtagaaaagaaagatgtaaactcaacctaatatttcgtaatgatcgctctaatatggtagcatttgggatgtttgtaaatatcacagaaacagatagaagagccagaattcatgttcagaaactcgtgattcatgcctgtagactccagatttgtcactctacggcaaaggcacaacggagaaaaaaatttctcaaagatgtttaatgaaatgaagtatacctgcgtcatgtgtactgccttctgtagaacactgtgtggaaatgtaataaaaataaactcaaggagtttattatttaagcaggggatgaaagctcttttgctagttgtgttatagtgccttaatatgtgtttgcacacacacatagaagctcaataaaggttgacagaatgagtatcaatttcctattttaaaaagagctgaatagaatttaccaaaaaattgtacattttatatatacaggaagttttacagaatattgtcagcagtgtatccccccccatccacttttcccatcatgactggaaatacatcaaattccagagaagaactttcttactcattcatgaatctcctctaaaatacttatctggcctatttgtatagtgacatagaggactgaggtttcccaggctatctcaaacctcagacacattcacagcactcacacgcaaatacctccaaaattatgcactgtctctgaattcctccccaaaattacactacgctaaaggct

SEQ ID NO: 123598 - DNA, 1002 bp, Homo sapiens
attactaggagtataacaaacatgtcaacagctatcgagttctataagcatgttattcaataacactttttatctactatctgtgcaatgaattgaagaaacaacattgaattaagatgagtttgaacataatcgtcaaacagatatggatttgaattatgtctctaccccttattagctatgtgactctgaaaacctgggttctgctctttttctgtaaatacataggatattttatctcacaactgattgaaatatcaaatgagtaatgtgtcatgtttcaataattctaagatacatatttttcacattccagaaatcagtacacattttacaatcaatgatatctttggttcaataagatgtggtatcctcttcaaagcttttatatgtgaagctggatggtaattatggtttagaatcttccaggtcactctgacaattttaagatgtttacctctcttcctctattgggaaaaagtagcttctactgactaatgataatgtggttttgtcttaaaacgtttaatagccattcttttgtggattgtctttaaaatttgtttcctgattttacccaaaagaaaagaaaagataagatacatttttaaagcattaacaacagaataatttgctcaatttatttcttctcaagaataggctggcatttggtttttcggggtctctctacctgtgtgtttgcctcagtttggtttacactttctcttgcctttggtttgatcatggaggacaagaatagacgaatatcctggcaacctcagcaactgcactttaacataatatggttgctaggagaaaagggtggtagcagcacttgagaggaagtgtggctctgctgtcctggaggagccggtgacagaagccaacagctcacaacagcatcctccaccccgccttctgctgaaggtcacggaaatataactatcgtatcagtggtaataattatggcatatattaaataaattatgaacacaaagggaa

SEQ ID NO: 123599 - DNA, 1007 bp, Homo sapiens
tatagaaatgttggaatgagaggtcaaaagaaggagattccaccctcttgccttctctcattcaaggaaatatatggctcatagcatctgaagttctgggcacaagggggagaagtgagcttattttttctcaggctggaaatctgacttccctccaggaatttcccaggaatgaatgcctgtttcatcttcatccctgtgccatttctgccatttgcctgccaaacttgtttcctagtattctgaggtacatttctgagaatttagagcataattaactgaagcagaagaattttgagatataccagaacatttagatcacatttaatggagatagaaaacctaaaggaatatgttcctcagatgcatattaggtgataagatggaatgcagcaattttattttgtctaaacttttgggaaaattatgtacggaggctgtataatgtgctcagccagaatgggaatgaaatgaatgaagagcagaagcagcctcaaataacaaaaaaggaggtggcactttttgggggacgggagaggatggatattttggagattgccccataactgacatgaactcagggtttccaatcatatcataggagaagcactatttcctgaaagcactcatttggagcaatctgagctccccttttacctgtgatttttttaaatgacatatacacaataacggatggctttgttttcaagaatggcactgaagcaagaaatgagaaattatcaagagctgttagggatttgattgctgctaagggaaaatgaaagaaaagaatctgaatgtattccaggaaaatatgtaatgatagctaatgcacctgttggtgttttatttgttttgaaatgatagatgtggagaagacgtagcaggtacccaaccaacacttgcaacgatttcaggtgaaacagagcaagtgatatttttacagctaagacttttaaatattattttttttaagttgtgtgtttgggtggagttaaaatttcatt

SEQ ID NO: 123600 - DNA, 1360 bp, Homo sapiens
atactctctcattctcccattccccattagctgatgagctagtctcaaatgtcattttggaaatacagactatcagaattgaaattcttcatcttccactacaggatctatccacttaactatatcagaacttacatatcctgccttcactcctgtagaaatggatgaggtgaaatattcatgctcccagggaagacccgttcttgatatcctattgtctctttcctccgcaaagacttcacacagcaattacctcctctctctccttcacctgctttccctgtctgctgggtcattatcaccacaccaatatgctctgggatttctcattttggtctcacatttccagtattccatttttcttcttcttcttcttctttttttttttttaagtagttagcatttaatgaaactccctccatgcggcttcaagccaccaggacacaggcccccccaacactcttaatcttctcctcagctcttctgctgaagaatttggcctgcacggtgacagcctgcttggggagctttccctttcccagaactttgtagtagccagatcgcaccacatcaatgatgggagcagccccagtcttgtttttagcagcattcacccgtgtctgttcactgaccaaagtccacaatttgtcaaggttgacagttgggcagaagctctggttcctctttaagtggtaatgcttcataccaactttcccaaagtagcctgggtggtatttgtcgaagttgatccggtggtgatgcagaccaccagcattaccgcggccgccggggtgcttccggtgcttgcctatgcggccgtggcggtggctcacgtggcccctaagtttccgggtcttcctcagtctggatggcatgttggcagcccagacgaaaaaaaaaactatcttcttcttcttgagcaatatttctagaaagacttgaataggagttaagacttttttcaactcctattcacactttaaaaatataaatcaatattcttttagtaacacaacgaatagaagtcaatttcaagaaaatcagaatgcagaggaacaagagaaaaactatcaataatttcaccactgcaacaagttcaaaatctgctatatgttcttcctttttaaactatttaatttataatttcatcaggtagtgtatatacataaaaattttaaaaaattagagatgaggtcttgctctgtcacccactctgcagtgcagtgatgcgatcatagctcactgcagcctccaactcctgggctcaagttatctttccacctcagcctcctgagtagctgggatgacaggcatgtaccaccacctgtggcttatttatttacttattttgagacagagt

SEQ ID NO: 123601 - DNA, 1208 bp, Homo sapiens
tggtacatgcctgtcatcccagctactcaggaggctgaggtggaaagataacttgagcccaggagttggaggctgcagtgagctatgatcgcatcactgcactgcagagtgggtgacagagcaagacctcatctctaattttttaaaatttttatgtatatacactacctgatgaaattataaattaaatagtttaaaaaggaagaacatatagcagattttgaacttgttgcagtggtgaaattattgatagtttttctcttgttcctctgcattctgattttcttgaaattgacttctattcgttgtgttactaaaagaatattgatttatatttttaaagtgtgaataggagttgaaaaaagtcttaactcctattcaagtctttctagaaatattgctcaagaagaagaagatagttttttttttcgtctgggctgccaacatgccatccagactgaggaagacccggaaacttaggggccacgtgagccaccgccacggccgcataggcaagcaccggaagcaccccggcggccgcggtaatgctggtggtctgcatcaccaccggatcaacttcgacaaataccacccaggctactttgggaaagttggtatgaagcattaccacttaaagaggaaccagagcttctgcccaactgtcaaccttgacaaattgtggactttggtcagtgaacagacacgggtgaatgctgctaaaaacaagactggggctgctcccatcattgatgtggtgcgatctggctactacaaagttctgggaaagggaaagctccccaagcaggctgtcaccgtgcaggccaaattcttcagcagaagagctgaggagaagattaagagtgttgggggggcctgtgtcctggtggcttgaagccgcatggagggagtttcattaaatgctaactacttaaaaaaaaaaaaagaagaagaagaagaagaaaaatggaatactggaaatgtgagaccaaaatgagaaatcccagagcatattggtgtggtgataatgacccagcagacagggaaagcaggtgaaggagagagaggaggtaattgctgtgtgaagtctttgcggaggaaagagacaataggatatcaagaacgggtcttccctgggagcatgaatatttcacctcatccatttctacaggagtgaaggcaggatatgtaagttctgatatagttaagtg

SEQ ID NO: 123602 - DNA, 1018 bp, Homo sapiens
tcatatcttttctattaaatcccttccacttccttcaatgaaatcgtatatgaaaacaaagggaatcggagcattttgcccacctcctagttggctgaattatttttgcctcccattcccatcttgaagtggtattcctcaaactcgtttctatgtttcctgtggttttaaataaaggaataatgtagaatggtatctattttggacattctcatcgtgaaaaggaactcttacacaaatacaaagccaagagattgtgttgccattgttgaagctgaaaaggacagtcactggatgcctccccacccaaggccaaggctttggtaggtccaggaagtgaaaaggaaagagaagctatgggagagacaaagggaagtaaaaaatggttgttcggctcagcataacaatcacttttgtggggcttattggttgtgcataaatttcatccatttgggcacacacacagatgtgacacccagaccactcagacacttggctaacactgatgccgtcatcctgaatgttgtttctggaaggactttcatgaatagaatctatttcagattggccgtaagtctcgatttattgatccgcaccactggactggggtggggttgtgtccactttttccctgccccttccctgctttggctcttgtgattgtgtcctccgtgtgtcaggcagagccctgtgaaggtgtggatatgtggccatattttacctgcataatctgcagttcatatgattcagcctaatgggttgcaatgccctgaggacagagaccatactttttcttcctttgtctttttagcgaaattcaatcctgttctgcgcctgcgccacagttgcaggctgtactgtctgccctgtgcatctcacacacccccactgcactgtgcacctagtgatggccgcagatttgcttttactcatcttccagggcctaccctgttaattccatcacagttgcaggctgtactgtctgccctgtgcatctcacacacccccactgcactgt

SEQ ID NO: 123603 - DNA, 1054 bp, Homo sapiens
tttgctgatagccatcatcttcccattgcatccttacatggcagagagagagaaaggaagcaagcaagctctcctttcccttcttgtgagggcgctaatattcatgagggctccaccctcaggacctactcacttcccaaaggcccacttatggtattagctccgcctcctaataccattgctttggagattagggtttcaacagatgaattttgggaggacataaacatgcaatccatagcactctgcttttgtatatttttcaaacctttcatgctaatcagctggaaggtgaatattttaaaatctattttaaaactggcttaaggagcacacaaaagctgatttctgatgtttcttccaatacgtggaaaattttgcatgatgtattaacccctagttagggtccctcaaccccagttgaggacctcaacacacatttggtaatacctaagggaatttaaatatatattttgtagcctatagcatatggaattagaaaaaaattagtctctttactgtaaaatttaccttttaattatttggaaatttcacaattgccaagtttcaacttaaagtttctatttatttggggccagaattattgccagaagtgtgctaatttgacaaagggtaccttttacataagtaaaggaaaaagtgattacatcatgttcagacctgctagagggccttgtttttcctctagttttaggggtgtggagtctgtcccaaaccctatatatgtgtgcatttgtgtatgtaaaagacaaattttttatactcaaaagtttgtcttaaataatggcctatggcctactgatttggatagaggagagaaattttgtctataagcaacaaaaaatgctacacagccaggagactgtcacacacagtttttcagaacctttgggccacatactgcactccccttccatagaaatacacatggggtcagtgattaaggactcaattctggttgtgacttggccatccataggcatattctaaagttctatggcaacctttatgaagctcgtcttctgagttgatc

SEQ ID NO: 123604 - DNA, 1036 bp, Homo sapiens
tgtttcaggaggctgaaaaatgagtattgttctgaagggactgttgttaatgttttataagtttaagtctcactcggggctatgtctctaaacgttggagtaatgagttaatctatttgtgattcactccagggcatgtacatcaaatcaacctatgatgggttacacgtgattactggaaccacagaaaatgtaagtgtatattcattaagtgtaaaatctgttgtgtgtttaaacagatttgatccacagtctctatactttgaatttaaacgtgtgcatgctgtttgattattgtgagagcgtgggtacctgctttgtttatttctgttgatagagtactgcttgtcaccagctgttgtcaatctattatttaaattgtcctttattgctcttgttcatataccttgcccagtttttacccctacccttgtgttaattattccttttgcacactggaagtgttaagccataaatacaaaagcaatgatctttttgtttttgagagtcactcttataagaactgggattggtggccatgtgtataaaatataattttttttatttaatggaatttttatgtctccaaagcagctatttcaggattttttacaacatatttttatagttgtgtttcataatatttggcatgatattgaagtttagtcctctctccccagcccttgaataggaaaagcaggtctgtttctactgtgagagacttctgtacactgtgtacttccttctggaaattctgctatgtgtagagttgtctttagcccctcaaacattttgaatttgtgagaagtagagctggttgaatgctttcttcttgcagcctacaatgtggcttgcttttgaaagacattgatatgaaactaaaaatgtttgaatagcttccctgggtctgtgcaaaagaagcatgtatttgggggaattaacctatttaatcagctaagacaggaggagataattcctaaaattaggggaaattttagtagctgcttttctaatctgtttggtagaaatatgtgtc

SEQ ID NO: 123605 - DNA, 1033 bp, Homo sapiens
cttagattgaaaaatatgtttcttgacaagtgctcttgacaagcgcatgttctgtagtaattgaagaacatagctgggagaggtggctcacgcctataatccctgaactttgggaggccagggcgggtagatcacctgaggtcaggagttcgagactagtctggcaaacatggcgaaaccccatctgtactaaaaatacaaaaatcacccagggcatggtggcggacacctatatatcccagctacttgggaggctaaggcaggagaatcacttgaacctgggaggcggaggttgcagtcagccaagatcgcgccacttcactccagcgtgggtgaaagactgaaactccatctcaaaaaaaaaaaaaaaaaaaaagaacataggtgctttgccaaatggtgatatttgtgcatctgtgcgctcagatacatacaaattagaaattacaaacttgataaatgagttgagtgtggcttaccccatgtgcgttgtgatggtagcaatgagattgaacgtgccaggggacttcacattctcttgcagctgcttgacagaagatctgttgactctttgggaagacatctgtctttgccatttattccttttaactggggaattggaggaataaaagttgtatctctttccagtgacaaagaacatgttctgtctgagcctttattcttggtgtccttgtctgtgaagagacatttgcttgtcccatctctcttctacatcttgccgtccccccttcttcttcttgtggtgacatccttccttccatccatctctgcatccttccttccaataataatttatgagtcctctaatttgaaggatacatattgctgcttcttttctcctgcaaggaaactgcacatttcttttaagaaatttcttcatttcttaacattttttcagctgtagtcctacaccaagtacaaggatagatcttcccgttcagtgttgaggctgtaatttgagatgaaggaccccaaggtgggaagggattgagatctgtatttccagtgtagt

SEQ ID NO: 123606 - DNA, 1111 bp, Homo sapiens
atgtatatggtaataaaagttccaagtaatttatggtgacattgattattgaaagctgactttcctgcttttagttcaaaactcttcatgtaagttggcaggctgagtgaccgaatgaggggacctttccctttaatcatagttacaagtccttcaaaacaagctctgtcttgtggcctctttatccattcaattgtgagtctttgattctttgaatttaaaaagctgtgatgcaaatccatcttatttttgtctctctattgaaggacaatattattatattttagtctctagaaaataacaaaaaatgaatatcacatttagatagaaaaatactgctaatatagaatattcatttatattttgaaattcagtttttttcaaaagtttggaagagaacattttcagctaatttttgcttctttcaaaatttctaattttttaaatattattttttgtttcactaggaggtaacataaatttaaacttcaagtaaaatctatttaaaattagaattgttttgttaaagttaaagccttttgttgttgtttttaacttaccattgttcatcttgcaaaaaaaaaaaagtttcttacctacttccgagtatatttatgctttatgtatcttgattttgacacgtgacttgcctctctctggcccacatagccaaagccagctgaaagaagtttctccacagccgggtgcagtggttcatgcctgtaatcccagcactttgggaggccaaggtgggcggatcatgaggtcaggagattgagaccaccctggccaacatggtgaaaccccgtctctactaaaaaattcaaaaattaactgagcatggtggcacttgcctgtaatcccagctacttgggaggctgaggcaggagaattgcttgaaccagggagtcagaggttgcagtgagccgagatcacaccactgcactccagcctggtgacagagtgaaactccgtttcaaaaaaaaaaaaaaaaaaagtttctccacttcagaggggatgtgtagaattttgagaagctgaatagctattcagcttgtgctggatccaggatcactggacagttttccttattcttgtctaatgtccatct

SEQ ID NO: 123607 - DNA, 1014 bp, Homo sapiens
atttaaataactgatatttgcacttgacatgacctataaaatgggaaaaaaatgtggccttcattacattttgtagatgatgggttttggctttaacatgaatgagtaaaatcctgctgggtcctgacactagaatcacatgggtagcttcgttaggtgtgggccaaaaacacctgtaaggacattttgtttataaattggttagtgtgggtgggattcaagtctgcctgtcccggtgccaggctaaagatgcagtttacttaactgtcaggatttggacaaactcgacagcattcaggctgggttagtaatgccctgaaccccagccaggggtatatacaattacatcactgagaatggtgggaaagaatgtgctgctgatgattttgccgtcgctggtctgcgtactgttgattatataacacttgctgcattgtgtgtattcttcttcttaaaatggacagagccttgtcttctgctctgagatgtgctgctcttgtttaggaaagtaatggggaaattatttgtagttgataaatgagctgccgcctgggagacgctatggccaagtagtctgagcacgggtctgggaagcaggaatttgcattctaatcctggctctgctacatgctactccctctgtgacctctggggaaatggtgatgtctgtttttcccatctgtacagtaacgctcaccttagatgtggctgtgtactattgtgtgttttgcactgcccagacatctaagcatcctgtttattaccgaaactgtattttcttttttttttttttttgtacaaacgtgtttgagtttacttttattatactttctgggaacatggcttttccgtcttttctgcttgatgttttgcaaattgtctctttcactttgcagtaatactttgaggacaggtaaatttacttggaaatccaaagtaagagaggcaggaagggtcagctagagacgcatcacatgcatcaagtgggatgataaacgtaacagctgcctctgg

SEQ ID NO: 123608 - DNA, 1249 bp, Homo sapiens
tggatctttattatgtgtttggatttcacagggcccctgcttccaagggagcagcagttccagctcacagctctgatcagggtcaaaacccgacttacatgcatcgtctttatatggtttttttcaagaccaagttcattcatttgctagtctttctttctttcctttctttctttctttctttctctctctttttcttctctttctttctttctctctttctttttcttctttctctttctttttttcttctttctttctttttctttcttttgtagctttgaggatatttaggacttaagtttctgggcagcttatttcctttttcattctctgctcttgtaagtaaaggtaacttctgagtagctcaaacatatgttggaactatggatctttagacctgaaagaagcacggcagctttccaatccagttttcagacattatgtttcatcatggtccccgttcttcaaattaaatttaaccacaaacctcgaaggatgactgataaaatcagagctgcaattagtagtgtgcgtgggtgtcagttctaatggaagcctgctaatccactgatgggaagcctgagaaccagaactaagtgagttagccagtgttactggggcaggacagggagtacagccaggaggagaaattgggctcatttaggtagaaatcagattagtggcagctggggacggggctgtagggagggagtaggcagcaaaggggcccgagggaactttttttgggggtgataggaatgtttctatcatgattgtagtgtggttgaatgactgcctgtttgtccaagctcactgagttgtaccctggaaattggtgacttttaatgtctataaattatgcctcaagagaactgacaaaaagaaaataataaagtggctcaaaagttgtaaggaacctcctaaaacattcaggtctttcattaggggaggggggagcattttctatggttttaaattcagtgtaactgtatgaaatgattccttaaaaaatacaacaaaaaaagaaaaactcacattcccttaattccagactagactggtggagtctatttttctggtcggcagaggtcatcatcactctgtactcatcgctgctgtcagttataccaagggcctgtaaacctgggccaggtagtaaatattttaggctctgtgggagagccatacgtctctatcacagctattcaactctgccattgtagtacaaaagcagccagaggcaatc

SEQ ID NO: 123609 - DNA, 1051 bp, Homo sapiens
ctgaggccgagattgtgccactgcactccaacctgggcgacagagcgagactccgtctcaaaaaaaaaaaaaaaaggaaagaaaaaaagaaaaaggtgagaagatgagggtcagacaggttcaccggaaagaatactgacagggtggggggaaattgtacaactttattgatttatgcatctccaaactgcagtcttcaacctcagctggacttttccttcctttttttctctttcattcaaccaatcccaaagtgcttcctctgtgctgggcagtgcaggtggcgaaatggtaaataatgcggccatgcatggtcctggccctctgtggcgggaggcagggggctcgctgcagcataatgaacacataaacagtcacaggtttggaaaggcttgtgaagggcacagcgaataacagaatgctgggctccttcatataccgtggccagctgaagcctccctgcagatgtgaagggagctgagactgagccattctaggtagatgggacctcacagggaaaggcctcgagataggagcccgaggtgcttggccagcatccagcatagtggttaggggagaatgtggccggagatggagatgccttcaggaagatcacactggacctttttggctgtagattttatccccagtgcagtgggaagccagtagggcttggagcaagggaagagcattgaagttgtgcattaagaaggctttaaggaacctcaaaaacttgatactaagtgaaagaagccaatcacacaaaaccacatactgtatgattctgtttatgtgaaatgtgcaggatccattatgtgaaacatccaggcaaatccatagagacagaaagtagactagtagttgcttagggttgagggtcagacaggttcaccggaaagaatactgacagggtggggggaacttatacaacgttattgtataatttcggggggagggacttctaatgggtacagaattttctttggtgagggggtgttaaaaattctaaaattgattgtggttagggttgcacagctctgtggatattcta

SEQ ID NO: 123610 - DNA, 1039 bp, Homo sapiens
cctcttccccaaagttttgcctccctctttgctgcctcctgcctgcctgtcctgtttgttttctctttgcttagctctcttccttggagtggtactcccacattttcttctcttccataaaaaaatacaggtgggctgagctcactcctctaatcccaggactttaggaggctcaggtgggtggatcacttgagcccaggagtttgagcaagcctggacaacatatcgagaccctgtctctataaaaaaaaaaaacaaaaaaattagctgggcgtgatggtgtgcacctgtagccccagctactcgggaggatgaggcaggaggatcatttgagcctgggaggtggaggctgcagtgagctatgattgcgccactgcactctagcctgagcgacagagctagaccctgtctcaaaaacaaagcaaaaaccaaaaaagcaattggaggacaatagctcaagaggtcttttttcactcatccttcccctccccacatccccccatccccaacatgttttctttaagggatcacctagttgtttccataagggccaaggctgggtcctggactctgggagtgtgaaccctcagtcagggtttacaatatttccaaaatgttgccagtattgctgctcatgcttgtgcgtgtttctgtggggcaggcgcttcctttgtttttgtttttgtggtgaaacacaagtccgtacatgagccaagggaactggcccttctctacttacaagccactagacaggtattttgtttctggagcccttaggatatacaggtacatggtgacctgtgctgacaactacttgacattttctctttctgtagtactgtttctctctccctgcttttgtctatttctgaaatgtgaatggcacacagaaaacttgaagtacacagcctaaagtaccatattgttatttggttccagcaagggataacttgccattttctaaagttttttcaaaataaatttggaacatataggtagagagtttgtgaattccacaagtgtttcatcctttggaggc

SEQ ID NO: 123611 - DNA, 1054 bp, Homo sapiens
acgtgtgttgggctgggtgaggaaggctgaattgtatttaagcacaaccagtgcattgtgtgtgtgttttttttaaattatacttggggccagttctgtcagtaaagcccatccaggcactttgtcacattatggatagcgctgtctgggcttgcctgcccagggcaggtgctctttattttaatttgtattacgtatatttgctctgaaagttgtttttgttgaaacttgaaaagccaggtgcttgcagctagagaatgggcagacttattggaaatttgctgaacaaggtttgttaccatgaagtagggacaccctcagccaagtgtaatgggctatgtagagaattgtccatcaaaacccccagtatgatggccactatggaactggacttctatttcaggactggcatttcctgaagcgttatggcagggtctctcaaagtgaggtgcctgggatagtaaagagattacgttataagagacacaaacgtgacagggaactactgtgtcactgatggttccagcaccttgctgtccagtctgtttgatgaggtcaaggaaagattctctctgtagctgtcatttttccagcaccttttatttgcaaatttttcttttagcatgaataagcaggccctgggagacagttccatctagctaagtttgctttgctttcatatttatattcatgttatttatttattgagagggagtcttgctttgttgccgtggctggagtgcaatgatgcgatcttggctcactgcaacctccgcctcctggattgaagcaattctcctgcctcagactccccagtagctgggattgcatgcctctgtgccaccatgcctggctactttttataattttagtagagatggggtttcaccatgttggccaggctggtctcgaactcttgacctcaagcgatctgcctgcctcagcctcccaaagtgtgcattcatggtatttctatttatggcaagcaacacatatttatagcagtgacttaaaggttcttataaaaatgaaattaaaaatgaattgatttgtt

SEQ ID NO: 123612 - DNA, 1064 bp, Homo sapiens
cattctagtttggaggaggacgtagtggagcagagctagccacagtacttggaatttgtcagaggtgcagcagggtggctccgccccaggaaggcctagggctggggagtcctcctgtccccagaagactgacatttgactgagagtgcagctttcagggggacttggatggagctgagagggagcaagaggccctgggaaatgcccaatagcagaatcagccccatctgtcagcgggtggcataaggtggccagaacaccacacctgagttgaagcttgtctatacatgccggtgggtagggaggacagcaagggccgcagcagatggaggaggtgaccatttccaccggggagggggcgtgaaaacttcatggatgagggtggattattgctgggtcctgcctaatgagcacagtgctggattggagaaggggagggaagggcgcccagggggagagatggtggccaggagggacgaggtggagaagggccaggcgtgtgttgtaactctgaggtgctggcttcttagcagaacttgttctacctcccggcttctctggctgagcctcccagtgggaagacaatgggttctggagtcggatgggcctggacctcaagaccagttctaccactttttagctgtgtcatcttcagcaatgtccccagtccctctccatcagcttcctcgtgtacaagggagatcaggagtgatcttgcagacttttcagaaggaaaaaacaagacttagatttaaccatgaacaatgtaaacatagtatatgctcagtaaatggtgatttccttgggccagctcttccgcagggccctggtctggagcctcctgaggcccgcagtctctgcccaactttctgactcactcacagccactgtcaagtcagcaggcacaggaggaaaggcatgacctcatcttcttcccacacttctcctctctcttttgtgccacattttctgtctagtgtagagtttgaacctggtccaaacccttggcaccctctttggctagtttttgcctttcatgtgatgtcgtagtccatcatctcatc

SEQ ID NO: 123613 - DNA, 2271 bp, Homo sapiens
gggagttttaaataaaaaggcatttgtttgtgctttcttcatgggcagaccttttcaaagatggcattgtaaaaagaggatgtgcatttcattcctttattaacagaggccctagaggcacggctgtcttgaaggacctggggctgctgctatggagatgagtgtcacagctccgggactttaaggaactccactttgctcaggcgtcagacacatgaataaacacggtgcagtccagaggggcagaagggagaagtgatgaatcttgctggtgaggaagctggtgcgtggttggtgtccagagaaggcctcaaaaaggaggagaagcttctggggagccttggaggatcaggaggagttggccagaccagataggtgtgtgggtgatgctgtaggcagaagaagagcaaatgcaaatgcatggagtgtggaagcagcgaggtgtgttaggagaaggaatcccagctcccgaggctggagtgcaggttgcaagaggaggacgggcggaggaggagcttggccagcaggcctcgggccagctttgggaggcctttgcttgtcatatggtcatgtcattcaggctgtactcacctttcttgagaggacttcttggataagtgccattctgcagccccggtgcctgccttagccttcttccaagcacttaccgcctgccctgttctgggtttgtgtgttcgctgcctctcttccgtcataaggacggaagccccagcagagcaggacgttcttctgtgatggctcccctggtgcctggcggtgagtgatgttaggggatttggactcatctttgtagtgaatgatgggaggatcactgaaggtctaaatcaggggagtcacatgagtgcatttgggtgtttgaagagcagtgtggatggcaggagagctgatgacaagtatttagggagagcctccatgcacattgattgggagtccattagcagtcctgctcttcaggctaccttgggtgggcccaagctttgctggcctagttaattaccaatagctagtatcaatgtcattccatcagtgacattttgaaactactagaaattacagagaagcagccagacaccgtggctcacttctgtaatcccagcactttgggaggctgaggcaggtggatcatctgaggtcaggagttcgagaccagcctgaccaatatggtgaaaccccatctctactaaaaatacagaaaaaaaaaaaaaattgctgggctttgtggtgtgctcctgtagtcctagctactcaggaggctgagacaggagaattgcttgaaagtgggaggcagaggttgcagtgagccgagattgtaccactgctctccagcctgggtcactctgctcaaaaataaataaataaataataaaaataaaaattacaaagaagctcagaatttttttttttcactctgcaaagctgatagctgcccaggtattccaataaaagccatgatgttataatgttacaatcatttttgatagttcagtgattgaaaaatctgaaggaattgtctttttttgaaatgctttgaaataaagttggttctttatgtaaaaataggtttttttaggtccttaaattggcttcaggacatcctgacctcacagccatgtgcatttcatagttgggctatttgcaaagttaaaagaagataagaaagtagacattctgcagttcttctgagagaattgatatgatgtctcattctgtttgctgggcccatgagggaatgaactgtttcatatatagggattttcctgataaccgaaccttaagacctggtttaaggtctttaaacctggatatttttaagacctggatatttttaatttttccctgtagttttggatggaaacctttctaaaataaatttttaactttttgggcttacagagtacattcaacctgagttaatgatttcttcattccttgcttatgaaagaatgaattattcagaatcactgaagtgtgtggttaccataatgacagggcctaccgatactcgtatgactactttgccgagtgaccccagaatgccatgttttctaagttactgtccttggcttttaggtaaccgatgctccaagtaacacacactggctcctcttttggatttactaaacttgtctctcttgaaggctgggaaacaaaagaacttttctgctttctaaaatgagaacaaacaggccttgggtgaaggtctgtctttttttttttttttttttgagacatagtttcgctcttgttgcc

SEQ ID NO: 123614 - DNA, 1080 bp, Homo sapiens
taaataaatatcaaataagcataagactgctatcaaataaatatcaaataagcataaataaataagccaaataaatatcaaatatgcgtaagactgctatcaaataaattagaactgactgctatcaaataagcataagactgctataaataaaatagataaatatcaaacaagcacaaataaataagcaaatacataagcaaaataaataaatatcgaataagcataagactgctatcaaataaaataaatatcaaataagcataaataagtaaatatcaaataagcataagactgctatcaaataaatatcaaataagcataaataaataagccaaataaatatcaaatatgcataagactgctatcaaataaattagaactgactgctatcaaataagcataagactgctatcaaataaataagcataagactgctatcaaataaatttcttaaagatatgggatcatgcctggctttaaaagaaatagtaattgcgagatatggtggcacatgctcagtgaactgttttaatctggctttcaaggaaactgggctttatgggattataaggaggtcaagaacgtggtatatcttctgttggatgtaaaattgatgtttatagttcagtagtgtcacttctttgatagtgggcaaccagggacacgctcacatgatggttaataaaggctcttcagacactagatttaaattctgcattcatccatgtagtaagcattgactaatttaatcgcatggagaatgagccagggagacagctttgttttcctgtatccatcctgctcatgagactccgccgctctcaaaggctttacctgcctgcctgcggaagtcacacacaccagaacaggtgccccacctgctgtagggggaaagcagagccagtctggggcaaagtaaaataacccgtgttgaatcctcactctagcactcaatggtagtatgaccttgagcatttagcccttcggagcttgctttcacatctgcaaagtgggcataataatacatcacatggctgttatgagcattaatgaaacagcaggagagagtgcccagct

SEQ ID NO: 123615 - DNA, 1049 bp, Homo sapiens
tcacaccaattttgtgggttaaggttggtaattatcatctttggtggtaattatgtaactataacattataaaaacattataagactaccttacttttcttataaaagcagattgcatagtttagatcttatcgttgttattgctagttttgtttgcgctttacagatctaaagttatagtgagagtgacatactgttgataagatgtaaagattagagttgtttggtttgttttttgtttcatgtagttaacattcttttttctcttttaaaaataattattttcatctcaaagtcaagtgatagtagtgttaacatttgtccttgagatggtcaaggatggcatctgtttgttcaaattagggccctggcaataaaggtctttggtaaatatttgacagggaagaaggtaaaaccctaaagtctctttgtccaacaaagttggaatcagcctataaaaaccatggctctggcttcagcgcgtctgttttgggtaaaggtgggagcacatgcctgtagttaattgcctgcaatagagaataattgttttacttttagggattttgcctggagagaaaatgtattcatgtgtccattcattcacagtctcttcctgtctctgttggggctggataaatcagtgtgtttgtgggtgggccgttcctcattctgaaacattgtggctgctgcagggtgacacagtactggagaaccagggctgttcaggagctgcccaagtttggatcctttactcctctcatggttgcctgacgttggccaatttatgtacattgtttagtcaactagctcatctttaaacttggaatcatgctgttactaaactttcaggatttgttttcagggctaaatgagataatgtgagtgaagcatttatcataatatcagccatattttaagtgcttaataaagcctaggtgctacttttgttgcatagaactcaggcatatcctggaaaaaaaaatcacatcttccaacggggtagtttcaatctcaaatcaaacaaggatactctgccttttataaatagt

SEQ ID NO: 123616 - DNA, 1034 bp, Homo sapiens
tctgttgtgaggtgaatggaaatagatgaggctggagagtcgggagtgggatgttagatcaccaagcccctctgtaagtctccaagcaggtgggatccaaggaaagaatgaagatcttttcgtggccttcctttgtggaggaactgtgtgtgtatttgtatctatgtattgtgtgtgcacacatataatagatacattatacatattagatatattgtatacgtatatacacacacaatacatggatacatatgcatattatatatcatatatacatgcataatacatatgatatatatacttagatacatacatataaatatgcatacatgtgtatttattttttagggctcattatttgattcagaattctatcaggcaggcactgtcctctctttaatgggatgtagcactaactgggttttagacctgcagtggcccagtcaccctactgtaggggaagctcctggatctccaggggaaatgtcactgaaaggctctgtgcaaaaaggaacttgacttactgggtatttatttcctttgatctgtgaaatgtaaaactgagctgactttaagcataagaaaacattaaaaactcttcattaaagaaagaagaaactactaacacattgacctgagctaaaaaaaagagatgggagtttgggctgacagggagtgggagaggaaaggggagccatgatgaatggagaggagggagactggggtgggggaaggcggaggagcccagacggcggaagtttggaggggagtgttccccggaggtcacaccttgaggtgtgggtgttttctgtgttatcacctgtgatctgctgccccttgctgatgaacgattaggaattgtttctagcttagtatgtaatttagtctttatatgttcagagacttcactctggtgggataagccaaagcatagcattggttggaattttttctctggaagtggttagaaatatcaatcatctgagggttaggattccctaaccccacgcccccaaagaagggtacatgtaaga

SEQ ID NO: 123617 - DNA, 1112 bp, Homo sapiens
agcataaatcagaaaataaagcagagaggtgaaggagagggactgggtgggggactcctttggatgacgtcatcagaaagcctttcagaggtgacatttaggcatgaatggtaggaaggaaccagccatcagaaaattagggagaagggcattctaggagagggaataactcatgcaaaggccctgaggtgcgaaccggcttggagagtttgagaaaaggaagttgtggtggggtcatgagagcgagggtgggggtgatgggtgaagagcaggtgagagagacacacagaggccagatcatgtaggttcttacaagtcgtggtcagggaggtgcaattttttatttttattttttaatagttacggtggaaagcagagagtgacagtatttgatctgtgtgttgaaagatcagtcagggtttttgagcagaaatgaattcaggaaatccagctggaaggcattgcagtattctggaggcgatggtgtcttggattcaggtgttggcagtttcagcctttgtgaagccaagttctagttacagttgggtcattgacagcttccaatctcagtaatgtaaacattatatttgaagttgggatgtctgctcattctttcccctcctgccagggctaaggtagatgctctcctctgcccctggctcctctctggccaagtatgatggtcatttagaatagagagcgccctctgtctttctgccttgttcacatcattgttattttctggcactttttgctgcggctagtttctgaagctgtttattcatctatgaatagagtttttgtgaaattggacttagcctactttgttttctttgacatcaaatggctgattgaacatttttaaacctgggatcagaagggcaaatatggttgtttattaaagcaaagcagttccttagaatgcgaatcaataagatgtagaaattagaaagctttctatgtgaaaacttttaaagtatttgagtaaagaaactggtgtatctgacttaaaatattttgccctactgaaagactatcctaatgtttgctttagaaactatagctcccatacttttggtggaatagatggcattttgagaaattttcaacaa

SEQ ID NO: 123618 - DNA, 1087 bp, Homo sapiens
accaacccctgcccccctttaaaaaaaaatctttaacacaagtagtaagaagggagttgtggggtggtcagtggtcactgtggttgaagtttgttctcaggatcctcagtaggacctaggaggatgagatgggcttttggctagtcacactatcctatagttggtgaccacacggggtttaccacacttaactgacttttggtggagattttattgttgatgggaaatgacaccaaatgtcatttcaggaataaataaccatggcagttctaaaaacttggcacaaatatatgagttgcgctgagactggggtagctccatcctttatccatggagattggcaagtgacaactcctgctccggctccttcgtgcattccccttattgtgaggaagcgagaggggccctcccgtctgtgtccccatgcctgtgtcactgcctctcttttcacccagcgtgttgtcttctagctcccggacctgagcgttcttgccttgctttctctctttcctctcatttatgctatttctggcgtgtcatcactggcttacccattatgtaagctttaagtgaaaaaatcagatgttattttcatgagctctgagggcacttctgcatttgttctcatttgactcttctgaagcctggagatgcacaggaaggcagtttccactgcagatgagcagcatggaggaggcttttggaagtgaaatgaattgtccaaggtccagaggtgaggagctgggaccaggcctcacaggcttctgttctgtggtcctgtcccgtccctggtttctgctctatccaggtggtgccttctagttccttcctaaccaacaagtgtgggaggctgggtgtggtggctcacgcctgtaatcccagcactttgggaggccgaggtgggtggatcacctgaggtcaggagtttgagaccagcctggccaacatggtgaaaccccgtctctactaaaaaaaaaaaaaaaaaattagctgggcatggtggtgggcacctgtaatcccagctactcaggagactgaggcaggagaatctcttgaacccgggaggcagaggttgcagtgagctgag

SEQ ID NO: 123619 - DNA, 1009 bp, Homo sapiens
ctcttcctttttcctatagctccaggacacaaactgttttctctgagcagtgaagtctttcataaggtgtattcttatcatccaggggcacctgtcagtgtcaaagagatttctctgccgtttaccagctggtcagaggatccggggcagaacttgcagctgatcaggaaggttcttgattagcggagtgataaatgcctcttgcaaatttcgtgagctttccttgggtaaattagtttgagccatatttcctcacttttaaaaaatagtacctgggcttgcagtgagcatggcataggatggtttttgctgtcaactgttggcccctgtctggtacctggtctgtgaccagcaacttcagcatcacctgggagcttgttagagatgcagaagcttgggcctgccgaatcagaatctgcattttaataagatcccctggcgattcgtgcacccatcacaattagagaagcactgttctagcacgtagctgcaaatgtgttttcaaactttgctagagtcctgctattgtagtattgggctatctggtctggtatgtactccagctgttttatttacattctggaatgatgacacttaatttgagaaggcttgtctttgccactaattaaagtaaaaaaccagtcttacggtgtgtgcttatatttataagcaccacctagcaacagcatcaggcaattcttagcaaaataagtgagacatttcccttgagatttcttccttattccttgaagagttcttataacagccttttttttttttttaaataagaggcagggtcttgctctcttgcccaggttagaaagcagtggtacgatcatagctcattttagcctcaaactccagggcttgaggcttgagtgatcatcctgtgtcatcctcccaagtagctgggaccacaggcacatgccactacacctggctaattaaaaaaaaaatctttgtagagatgggtcttgtggtattgcccaggctggtctggaactcctgg

SEQ ID NO: 123620 - DNA, 1043 bp, Homo sapiens
gccagggagaaacctcgagccaggactccccgggaggcagtgacttttgctccgggaggcgccagtatccccggtggcgctgcattttcaggccacatgtaagcactgggaaggagaaatataattgtttggaaccactgtcttgattcatacaatatttgggatgaggaaggcagtggggctggggcggtgggggggtggtggggggaatgagcagaggtagaagcttgtcctcctagctggctcgcttacttttcaatgtctcctacgatttcgagggaaaggtactagagtttactcaacccttttctgtactttcaagagaacaaagtccaccaagaacaatctgtattttcatggtttccccccacccccaacgacatctctgtttcaagttactatttgtttttctatctgctcttccaggtgaggaatggtgttctttctcagtaataactagaattgtgtagcgctttacagtttgctaagagctctctctgttattgtccttggtcatcacagtaagcctgtgaggtaggtaatactggtaagaccaggtcgtctttcaaaccgtcccacccatggctgcagcataatgaaaactgatcaccgctacatctcatttctcacgcctgtgacttacacatagaccacgtggaataggatgtccgaggtgtgtggggtgtgtcagtgggtatgtctgaccatttcctgctcctctgggagaactccttgagaacgggtttgtcaagtgagcagaatttcctggactcctatataaaatgaagctaaaaacaacacatgtttctgccttggtgactaggtttcccttggtaaagagtaagtggcattgccagtacttggtaggaagcatgagcttaaaagccatccatgcccacgctagcttgaaatgaggtgtgttcctccattcaagatgctgccaaattccctaggctggcagcttcctgaaactgagttgatatgtattttatctgtatgtccctcatagagccaacttgagacactgcaaatttcagctactg

SEQ ID NO: 123621 - DNA, 2215 bp, Homo sapiens
ccataatttctcaaaggagttgacctttcacttctgtgttaaaaattactatgtcagaagatcctttaattgtgcaggaattatgtggtaaatttttcttctcacgagttaaatgagatttaggctcaataatttattttttaagtgccccatgctaattttgtgggagaaaaataatttctatttaaacatcatcactgtgatgaaagtttaatcccatgaccactactttcaattctgaaatgatggaagacttaagttcagattacaatacaagatttcctcagaggcaatgggtgagcagttaaccataagagaattatgagtgcaagctattgcagttgctgctgctctaagatggtggcgcttgtaatgatttagcatttcttcctagtgaaaagggtcgcagattgaactgcctaaatctgtggattactttgggactgcattgattgctggaatgcagcagttttatgtgagctgcatatctatactctgtacttaagaatgatcactatgtggaggtcattctggtaggatcttgttctattgtttttttgtttccttttttgtttctttgaaaaggggtcgtgagacagtggcagtgcatgacccattctttcctttagtttgagagggcattttaaaatacagcagattgttgttgttattgtttaagactgagtttctcttgcccaggctagagtgcaaggacaggatcatagcttactgtaacctcgaactcctgggctcaagtgatcttcctgcttcagcctcctgagtaactaggaatacaggcatgtgccactatgcacacctaatttttaaattttttgtagggaagggtggggggtgtcaatatgtggtccaggcttttcttgaactcccggcctttaatgatcctgctgtgttgacctcccaaagtactgggattacaggtgtgggccactgcccctggccagattcttttaaattttaagtactttaaaaaaacaaaaaacaaacgtagttcctttaccattaatcacacttcaaaaaagttaacagtaaatctttaatataataaaataccaatcagtgatctatttttttcaggtcctttgtatagctagtgtattacaatgtagcctttcccccatgatctatttctcttgctgctctgaataggctgagtgggaagatgtaggaccggatatgtaggtttgagatatgtcagaataataatttcagtttaatttctggatttaccttagttcataaattgagaggattctgttacctttagttatatttaggatacctaaattcttagtattttttgtctttgggatccttttggatagattaatctttaaactgttccaggatgcaggctttccagaatcaatttaatatccactacatttttctgttctataaagtgaactcccatctccactttattttacttccaaatttgtatccagggtgggtattttgtctaactataggactttttataatctcaccaacatctagtagtagacatggcttggtagagaaaagtggaaaaggtagagggaataatataaacatgtgaaatttgtttttagtttatttttcctttgttgatggttcaggatagggaatttatgggaagcagctataaaacactgcatttgtcttttattttcatctaccagggaatctgtctctggttttcctttcctattatcattttctagagggagttctggttaattctgtcagtcaggctatatttttttctttttaccttgtgaaagtcctttaaagatgtagcatattaattagtattataaaggaaggaagtctttcactaacccctttctgctcatatgagaacccaagagctaagtatcttgggaactattgatattttgggctggatacttgtttgcttggggagcagtcctatgcattccaggatgtttacagcatccctggcctctatgcattagatgccactagcaccctccacaattatgacagccaaaaatgtttccagacattattaaatgtttctttgggggcacagtgaccctggtccagaatcactgatttaggtctcctgttaaactgtcttaaaatactgtgctgtttcttccagtgatcatagcaattttaagtaattttaatagtctttaccactagataataagctctatgaggacagtgactgtatttcctttgtttc

SEQ ID NO: 123622 - DNA, 1956 bp, Homo sapiens
ccccagtagctggaattacaggcatgtaccaccacacccggctaatttttgtaattttagtagagacggggtttcaccatgttggccaggctgatctcgaactcctgacctcaagtgatccgcccgcctcggcctcccaaagtgctgggattacaggtgtgagccaccgcgcccggcccgtttgcatctttttcagaaggggtatcagtggcttagaattagtgatagtattactagttgtatgtacaatttcagatatctctttctaaggccagttacgctgttttggacaacttctaactcataatggtgtgaaagaatgtaatcaaccttgaccttgaacactggctgagctcctgaacttttaagtgagctcattttgtctggttttgtgttctcaacatctttctctactcctctctctcaggattgtgcctctactcctgcttgtacagactgcttttccagcagcatggacacaagaagcatagtaagatgatgataacccacataaggcaggccctttggaatatgttaggtttcaattggtagtggaatagtgtatttgattatatggttagtacttgggaagcagaatgaagtttgtcacttagaatagattggtagtcttaaaagagagcgtctagggaataagttgaattgcttcacaaaaaggttaattggagaaaaaagttttatgctcaatagtgagcataaatcatatatatataaacttttgttatgtttacttgtattctgctccatgtgattttacaaaagagatagaactatttgagtgaattgcagacctcttaattgaataataaaatacaccttttgaagaatttctttgaactataagatgacaaattattgacatatatgctataggaataaagaattgaatttttgattttctaattatagaggcagcagattgtggtagaggtactattgattatgagaaataaatgctgatgagaaatgtttctatagtttgtgatttcgtacctaaatggattctgtctcatatttgatggtaaacatgatgcatttgctttttctgattttgattttatgcatttgttttgtctttctaattttgttttataagagtttctgatacagccatcctttaaacttaaggaaggctatgtaaatgtattaaaatacctattataggtcaggaaaaatctcagtaactttgacatttctttatttattcagaatggggactatgttgctcatgttctctaaagacaattttgactattaagttgatgtatgacaaatttgtttttaaaataattctgcaacttaatgtgatttatatagattgacttgaaagatgtaggatttcattctttcattaatttgttcatgcacgtaactaatatttaatgaacatgtatcgcggcctagggatttttttttccatctcctgggatatagtggtaaaccagacaagcaaaaaccatgccctcttggagcctatgttgttgtgattcttttccttttgtctcattagcagtttgtgtattgaacttgctgcagagctggggaggctgtgcaggcattactgactccagcattgcttctttgctagggactatgttgtttgcagcctgatccgttcttagcattttgcctcttagagtccagattgcctgtccactgttcaaaatagagactgaacaggtagacttagttaaatgatttttcaaacagtgggaaaatatgactagctacattgttttatacaaaattgtctgttatatatgttttaaaatctccatttgatattttggaatcttaactatttcttgtaaaatacagctttaagaatgttttcttttgtccgtgagaatcattagtctccacatgcatgattttaaaaagcaactattcttaagtggagaccaaaccttatgaatttagaagaataaactaataagt

SEQ ID NO: 123623 - DNA, 1730 bp, Homo sapiens
cacttgaacccggggggcagaggttgcagtgagccaagatcgcgactctgcctcaaaaataaataaatacatgtataaagtgtctattttatatatatacatgtatacaatgtacatatttataatatttatacatatttatgaagaaagatgcatgtagaatacgctggaaggtggcctaccagccgtttaacagtggttatttctgaagaaagcagtaggtggatagggtgcaggaatgagaccttttaatagtttgatttttttcacagtgagcatttattaccttattactattaatttaagttgaactcttactctgtcacacaggctggagtgcagtggcatgatcatagctcaccgtagccttgaactcctgggctcaagtgatcctccctcctcggcctcccaaagtgttggaattataggcgcgagccactgtgcctggtctccatattgtttttgtaatattttctccaaacccaaacagtatgtgtcttagccattaggagaaaggtggagttagtctattttaatactgcttgaattaaatcacttagagaaagggagcttaagagtttgaagatccttaagccctattgaagacttaaaattcatgtttaaatgcagtttatttagctgttacttgatcatgcttaaataattcatgcttaaaattcatgtttaaatgcagtttatttaggtgttatttgatcagtagactcaaaagctttataatcttttgtttttaaagtcttcttggttattcgttggtgctactaaatggtgtgtcaccacagtcatccatcatctgattcagtgacgttgctagctagtgaactttttgttttgtttttggaaactgggctacatctgagtgcctaggtagtgagaagaactggatttgagacacagttccataactcacaagcagtttgattttagttaagtcacttaacctaattttatacgtttataaaacgagaatagtaaatatcaatcttatcaggccattctgaaagcaaaaacagttgtgatagtgtttaataattgacagtggacctcacagatgaaaagtatattactgtctttattgtttttctcatgcagctccctgtctctttcaaatttttgtgttggttagtctcatttctgaaatggttttatccttccttaggccttgtaggctcttcttctacttattctccctttgttatttagttttcagtatttattccttatcttttcaactattatctcttcagaaattacttgtattttttaattttctcttttgggattcagtctcatatcttcaaggtattttatgtacatgtgcatttgaaatcattgttgtcacctcatgtctaaacttgcctttcctccacaaacttacttttagacttctgtttatatcagtagtaaaatcatgttcataaatactcaaagttgaaaacttggaattattttagatgctactctttcatccatacttttgtcagtcatgaaagctaatgaattattttttaaaaaatgtatattctgcatccttctcattctttttattctcagtgttaacactttagctcttatcctcatcgcttctcctttggtttgttgcagtcagtttttaattggctcctaatttactatgctctttttctctagttcatatagtagaactaggtattttagattattagattattattatttttttagacagagtc

SEQ ID NO: 123624 - DNA, 1049 bp, Homo sapiens
aggatggggtcattagatagaggggattatatagggcttgtacagggtagaagtcttgggggccatcttagaattctgcctgccaaagctattctaaccaaaccaatgataattttgtagtatttccttttaatatttttttgtgagctaccatttttatttataatacaaatattttaccttgaggctttggaagtttcattactatcacttataaatatacccatattatttctgattataaaataagggattttatttgagagttcaagtatctgtagtgtagttttaattcttaacattttagttgtggtggttaccgtcatatcccaaaataataattttatattgctgtttctggaatggtcagttttagacattatttattgattttttgcagcagcaggtgatgcactagttcacttgtgtcattcctgccctgtaatacctctatttggggtggtgagactttggaattctccatgataaagtgttttcctccttggttgtattttcttgtgtgtattataacttatggttttcttcttatttcatcatttaccaatctttttatcacgtttccattttctggaagtttgtcacatctctgctgatttttctcccctcctcattctgcttttcattgtgaatttttatacctttttctttcttgagttctttattgtcctcccagtaagaggaagaaaagaaaaatatctggttagcatgctgtcttgaattcaaagtatgaagattgtgttggctgcagaaactttcatgaagtttctgatttctttgaagatttgggggattctaatcagtactctcaagggcttaaaggaccattgttaagaaagatggactgggttgattacatttagttattttaggttcactcttaaggttaattcctttgatcatagaaccagcaaccttgtacatgagcaaaatgttgatggttctctgggatgtaactcataataagctgtttgttgggccctttaaggtcatagtagaattcatttcatattgctgaaattgggaaaggc

SEQ ID NO: 123625 - DNA, 1087 bp, Homo sapiens
tttcagccctagacaaccaccaatagatttgccctttctggatattacatataaatggaattatataatatgctgcctttttcacctgacttctctagtttagcataatgttttcaaggttcattcaggttgtaacatgtatcagtactttttttctttttatggctcatatttcgtcgaatagatacatttgtttactcattagctgacagatatttgggtgtctgcttttttatgaattttaaatgaattttatgtgaatagggctacaatgaccacgtgtacaggttattattattttttctttctttttgaaccctcagacgggaaaaagtatcatgtacaagttctttgtgaatacatgttctcagttctcttgggtacatacctagaagtggaattggctgggtcttacgttaactgtgtttaatcttttgaggaactgtcaagctgttttccaaagctgctgcaacattttacgttcccaccagtattgtatgagggttccagtttctccacatccttgcttacacttgttactgtctttttgattataagcaagtaagtgtgaagtggtagctcattatagttttgatttgcatttgccttatgggcagtgatgttgagcttgatttgtaaaagaaaagcagtatgttggtttcattgagaatataaaaatgaacatgtttggtagtttcatgtaattgcttggagagttttgctgtatgtaaatttgttcttttttcatcagttgtattccctgaatgactataaaccacccatttcgaaagcgaaaatgacccaaattactaaggcagccatcaaagctattaaggtgagtaataaattttactcttctattttcaaaagaaaaaactatattaatagtttggatgggggataatttttttatggattatatgttctttttcactttacagtgttaacacatattgtggaaaaacacaaaaaagaaaatctgtcacctgtagactctcccacctagagataaacatttaatgtttattattactcttttttagagacaatgtcttattctgtcacccaggctggactgcagtgccac

SEQ ID NO: 123626 - DNA, 1079 bp, Homo sapiens
cagtcatttttcctcacctttcttagataatattttgcatatatccacattatggagaatgtgtttaacactgtcttttgccacactgtcttttgccacaaggttcttggcagaaccttgaaatttgagttggtaaaagtttctatatattgatatattcattttttcttattgattctattaatattatagatttgaaaataggccattaaggaaaacagttgtgactcattgtatcaggtatttgaactgtgggaaaaggccatagacatttaacctttgctctcataaagtaggttttgaacctatgttaactcatgaatagttctgaaaatctcaggaaaaggttggatcctctggagaaataaacatatgcgcaaaattttatagaaactttttggcaaaaggatcttttcaagctcagccatagatttttccccgagaagttcttgtcccctaggctaagattccctgaattagtaggcctcttaaaattgagaatgaatgagtacttatttctaattaagtaggtactaacctatgaatattcagtgatatgttttcctgccctgaattaaattattaaccgtaaccaaaagcaccaactatttaaattatcttttaaataacagcagtgtattaaatttaacagattcctatttactagtaattactactgggtgaaaattcagatgattcgttgattttgcagttttctagtggctaaagcttagttttcagacttgttagtatcttacatcaatagttaaaatcagtgtacttccatggcagaaaatcagagagaacgacagtaactataagcacattgaagccaggaaatgtttcaaagacatgattatttagaggatttgataggctcattgtggaataattttattctcttgtactttactctgcattatgtgatttttatgatcatgatcatttgaaagtgtggaaacgtgtatttttttctgtgaaaattagtaattgatgcacttttcataacttgttgagcagagtactttcttaatagagttaatgaggtataggtgcaaacagtattttctattttcaga

SEQ ID NO: 123627 - DNA, 1051 bp, Homo sapiens
aagtttaaaaatgttagtgattagaaaattttatttggtctaacgcttttaaaagcatttctcagagattgttctgattaaagatctttctttaaaagttttaatgtctggttttgttttgttttgttttggtttttttgtttttgtttttgagacggagtctcactctgtcgcccaagctggagtgcagtatcaagatttcggctcactgcaacctctgtctcccgagttcaagctattctcttgcctcagcctcccctgtagctgggattacagacatgcgccaccacgcccagctaatttttttgtatttttagtagagatgggggtttcaccatgttggccaggctggtcttgaactcctgacctcaaatgatccatgtgtcttggcctctcaaaagtgctgggattataggcgtgagccactgcgcccagccataaagttttaatgtcttacactatgcctcataaacttgatgaataggaatttacctagaattcttgttaaaaatgtggattctaattcaccgagtgtggagaggaacctgagattctgcatttgtaacagctcctagatgatgtttctttacaaaccacaatttgagtagtaaaggtttaaaaggtaaaagtgaatttatggataaatgcttgttgactgatttgatttgtggtagggtactttgaataaaatgtgtcagaatcttaggaagacctggaatgagcaaagttactctatcgtgagataattacagtcaatctgaagaagccaatcagtgtatggggaaaaacttaaatgctttgctattaccctgtttaaatcagagatccagcaacagatttgtgtaatggttaaaataaggtgtgtgtgtgtgtgtgtgtgtgtatatatatatatatatatacactttttttttatacttttgagctaattgtagattcacatgtcattaaatcagtaggaataaatcatgtagagatcccatgtgcccctcactcagtttccccctgtggtaacgttctgtagaattgtagtaaaatattacaatcagga

SEQ ID NO: 123628 - DNA, 1078 bp, Homo sapiens
tcagtattaaccatcatagatccctatatttgcattataaataactaacttaccttagttatcctgaatcctaaaggcaataaattttattttgagccagagacctcatgatttggtgacttttctaccatccatagctctgttctcatttgctggtttgaaatgcaaaaatgaaatcctcagctctgttccaaaaatatgtagagtttacccaactctttttgtctgtatgaaatcccttgcctttttttgcatgagtactacaagcaaatgtgtctactagattcagaataagatcgaatattatcattcagaactatttattttgataaaatctagatgctttgttacagtgaaatacattctatggtactgtggctactcttagatacggtgaggtcaggaataaatttcatctttctggctctgaaagtggtctgtagatgagttactattgccttaatctgtaagcttttggctatgattaccttcttcaaatttcctgctacatatttagtaagagcaggaaatgtggcttatttgtggtgattttcaagttacatttactttgtaaataataaatgaaaagatggtgctaaactgtctagagattatcatcatgaaagttttttgttttctagaaagttgatctggtagctgtatgtacatggttgttaatggtggttgatattttgcagtggatatgtatatatttttcaaagaagcgaaacatttattcttctctttgatatttttccagaggaaggattgagtccacattgaaagatggctgttagctaggtgcagtggctcacgcctataatcccagcactttgggaggccgaggtgggcagatcacttgagaggtcaggagtttgagaccagcctggccaaaatggtgaaatcccgtctctactaatacaaaaattaggcaggcgcggtagcacatgcctgtagtcccagctactcaggaggctgaggcaggagaattgcttgaacccacaaagcagaggttgcagtgagccgagatcatgccactgcactccagcctgggtgacagagcgagactccgtctcaa

SEQ ID NO: 123629 - DNA, 1050 bp, Homo sapiens
aaaaaacatacaggaattagctgggcatggtgctgtgcacctgtggtcacagctatttggaaggctgagatggaagatcatttgagcctgagaggtcggggttgtagtgagccatgatggcaccactgcactccaggctggatgacataggatagatccccaggattatagatgttatatttgagaaaaaaaatggaaactctggcctctgtatttaacaatgttataatttgccatttggcattgttcttttcatttgcgtaggaacccttttgttgtgtgttccagatgaagtctgaggcatgttggcagtgtgtttgctagagcccttctttcctgaatttgcttctttcttccatgtagcttttcacagtggttaaacaaattttaaaaattataatggtaccttatttatcactttgttttatgtcattgaagccagttacatagtactattttagaacttctgattgtatagagtagccaaagtagattctttaaaatgccattccagaaactgatgatattggagtagtcaatgtatgaatattcattaccatagcataggcaatgtctttgtatttacacaggatttttgatgatttttgtctatcaagaattttacctttccgtttcctttccttttcattcttctttttttcatcagtgtaaaccagaatacaaagtacctggactttatgttattgactccattgtgcgacaatcccgacatcagtttggtcaagaaaaggatgtgtttgcacccagatttagtaataacatcattagcactttccagaatttatatcgttgccctggggatgacaaggtatgctactggttttttttttttgtttttttaaaagtagatacagtagcctcttggtcttaattagtcttcagattatcttagtacagtcatgtgccacataatgatgtttcaatgacagaccgcatatacagtggtggtctcctaagattgtaataccatatttttattttaccatttctcatttatgtacagaaataccactgtgttaaaattgccta

SEQ ID NO: 123630 - DNA, 1130 bp, Homo sapiens
ttaattaccttagtactttaataattctgtgcaggcaaaagaatgcttctaatttttttttttttttttttgagacggagtcttgctctttcacccaggctggagtgcagtggtgcgaccttggctctctgcaaactctgcctcccaggttcacgccattctcctgcctcagcctcctgagtagctgggactacaggcttatgccaccctgcccagctaatttgttgtatttttattggagacagggtttcaccgtgttagccaggatggtctcgatctcctgacctcgtgatccgcctgccttggcctcccaaagtgctgggattacaggcgtgagccaccgcgcctggcctagaatgcttcttttaaatgacctgtcataattgatttttaaaataggtaccttagactaccacttgaagtaatgtactaatctgaaattttatacatgcattttttagaagtcactttactgtgatttagaaatttcactagtttggacttggatttctgtcagttctggtgattaaatctttcttgaatgtgtagatttcataatataatatctcatactagggcttatggaatagggctttcttttaaccataggaggagagagtagattaacattgtaatctcaatcataaatgaaggacatcgtatgtagatatatggaatgatagttgttaggtgctggccagttttaaagtatatgatgggtggcttggaaacggaaagatttttatataaagcagaagaacataaggcattttccaagtgctcatgttttagagtggagaaatagtcaaatcagaaagtatgaagcagtctctaattttcttgtgcttcatttgaaatacacaaatttgcacattaatgtagtttggacatagtttaaaaatatgtcagtgtaatattatgagggatttaaagttgaaccagatctttattctgaaaattgctattttactttgtaaaacatatacatttaacagaatttttttttttttttttttttttttttttttttttttttgagacggagtctcgctctgttgcccaggctggagtgcagtggtgtaatctcggctcactgcaagctccgcctcctgggttcacgccattctctt

SEQ ID NO: 123631 - DNA, 1653 bp, Homo sapiens
tgagccactgcacctggcctcttttttcgtacttgattttagcctctgtctttttttttcctaatggaataagtggcatcacgatagtagtaactaggacttagtacttgtttgcagaatagttatgtgttaaacagttgtgaatcagattgtttggtgatagtaccaagaaaatagttattacataatcactctgcttttattagtgataatatgaattcaggatattgttactctgacataagtgttctctgggtgaaatgtttatttcaagaagcaaggtataatagatggaactgctgatacttcttacaaaatactgtaggacatcttgagacattattcttcattgggcatatttttctgcctattaagtttgaagctttcaggatctgtaaaactttaatacaaccaaggaagacatataagtaggaatttttctagttaccaagttttctctaaatactgctaattatgttactagatttcagaattacccaagaaatagaagtcactaataactagtcttttcaagtttataatacacagaatataacaagagacaggcaatagttaaatagaatttcccaactaaatagattttcatatgaaatgactgagattagggtataagtaattaaatagaagtacgttatagtatcgctataagaagagctgtaacaaggcatatatctccctcccaagatgctcaaaatttgagaatggctagacatttaaaatactagctggcttaaacagtctgatacagtttggaggttcagaaaagagacccgagaatccttctggtatactgtcttattttataaatgaggatgctaaagtttttttgtttttttaaaaaatgtgttgacatagttggcctgagaccaggatcagcagcaacgttatatagatcgtaaatatttcatgaattttatagcagctgccatatgactgactggaaccttacaaaaaatacaaagaactctgactatttgagtaatccagaaagaggttgagactaaaacaaaaatgtgatttatttggtggtaagatgattagagtgtgggttgggatgggcaatgttgagactctttatgaggaatataaaattggatgcagtgctgcagttcaggggcatatcaagaagagtaaatgagatggttcacagatgtcaaaagtctgcttgccagtggcaagcaggttttttattttttattattttttttaatttacaaaatggtaaaggattcaaattttaggaaatgaaataatgtagaacattattcatacagaggatgattcatcgttctgagggccagattaagtaatgccagtatgacattgacattctgcaaggggaaagggaatagtaaagaataaagaagagggaatgaagagagaagaaatggttacgcttcagattctgtctgtacagaagtttgtccatctctggttcaaagtgtcagtagggaattagcattcatggcaggatgctcaaaaaaggaagtaatttgattaaattcttacatgaggaaatgccctctcctcaagtagattgtaaaatgaaagttttaaaatgtcacattagataaggactttgtcctacaagttacgtatttgttcaaaagatagacattgtgtgagacaaag

SEQ ID NO: 123632 - DNA, 1050 bp, Homo sapiens
acattgatacatattggtaaatctggttgtaatattttccatattaggctttaagttatttaacttaattgtaagagtggttggaatactaggaatgaagcttgcttctagtgcttagaggccacttctagaaagcatatgaaattgtggaaacacatcaacctaatgagaattaaggattggagttatgaggatttttttttttgtaaagaaatgtgttgtatgtttttattaaatcagttacttttttttccctaaacaattctgcagtgcccaaggttctgtgagggtatgtgaatggactagtagggggaagatgttggaggaggcaggggtagaagttgggagaatggaagaaggatgaatggtgaaagtctgtgggtctcttgtttcaaacagaagttattagttgtatatattggggtaataaacaaaaacataattttagaatatgttagatacaaatgtatcattttagtaaaatgattccccttgacaaaatttaaaaactagtattttagattatgaattgcaaacttgcaagcagcatttgaaatcatgttgatcagtgtcctaaacaatgtaagaatctcctttaacagtcctgatgatacagtttatttatccagtattttaatgctttctgtaatgagaagttaactaattgttattattgtgtgttcttttgttgagctgaatcctgtttcctttattttctattaatatacactgacccatgttttgctttctgaagcaaggaatcaaatttactccgctatctttagagatgtagcttttcattatttgaagacaggtatcattcttccccttaggtttatttgcttcagatgaagtacacttttttccaactgtttcaagacttctcaccatcctgtttggctcttttgggatgccctttttattgttaatgtcttaccttgtggcacccagaatcccaggtgtattccaggtgtgaatttccaagaatatagttaaactattattttttcttatttaaacagtatctgtctctgttaacatacctaataa

SEQ ID NO: 123633 - DNA, 1038 bp, Homo sapiens
atatcagatcttcagcagagcatctctgacacgttatccatctattgatgtacaattgaagaatgtatttttcttttaataattaatgttctcaagtattctactttaagtattaaaattgcaaaagaaaacatgcagtagaatatgttttattgaattgacttttttgttttctttgaatactcagttattttcatagtatctttagtgggttttaaaatatgtttccacctgtttttccttttagttctcacgtttcagaatctgtgaacaattccatttttcatcagatagcagaacaactacaacagcaaaacctagaacatctcagacagcagctcttggagcagcaacagcctcaaaaggtttataaccccatcttgtggtctttagagttattactatttatattctataaattggcatttttgtgggttggctttttttttttttaattggtcttaatagaatattttctcaactatttagcttttaccagctactttatttctttctaaagtttgttatggtgatattttttcaactcttattagtaagaccatttttttcaggacctttatggttttttctgtaatcaaattgtgttctggtaacttatgaatgcacattgtagaaattaatttcagtgtactggaagtagagaacaggatggagggggtttcagaattaccacttaaaactaaacgtgtttttctctctgttccctatcaagcaagttgatgattatgttaatggtgacaatgatgatggccatgtagattgctatctttaatttttaaaacgtatttgctgttagcatgtagcaggagctttattaggtatgtggtaggcttgtatacatttaaccctcaggcgatgggcattatgactcccattttatcccagaggaagtggaagcttggtgagattaaacatctcatgcagcagtgtacagctagtgttatatattatctgactcaagatgtgcggttattttatgcatagctaagaattttaaaacatcgataactaaatgta

SEQ ID NO: 123634 - DNA, 1061 bp, Homo sapiens
cgcataaccaaatacaggcataccttgttttattgcacttcactccattgtgctttgaagatactgcctttttttttttttttttttttttaaataggttgaagggttgtgaccaccctatgttgagtacctctcttggcactatttttccaatagcaggtgcctactttgtctctatgtcagctttttttttttttttttttttgcaaaaagtattttaaaattagggtatgtacatttttgtttttagacataatgctgttgcacacttaataggttacagtgtagtgtaaacatatcttttgtgtgcactgggaagaacaacttatgtgccttaaccttactgtgatatctgctttattgtggtggtctggaaccaaagttgcagtagctccaaggtatgcctatacagtgaaaaataatctctgattgtttacctcacaactctccttattcaaaagcagtatcaatttcctgtggtttgtattctttcttaacacattttaaacatatggtagtgttttcatacgatttattggtctttagcatggattttagaacataaggttttcgtgaatagtctaggggatataaagcaccagtgaataataacattccaggaatcaagtgtcccttctgcatgggatgacaagaatcattaatgctttctggggaaaataatggagtttcctatgggaaaaatgtgtagagagataatattgaaagagatgggaaatacagaacagagttcagggagattaaggcagctggaatatgcagaaccagtaataaagaggaaaaagagaatgccaggtgcagcggctcacacctgtaatccaagctactttgggaggcacaggccagcagattgtttgaggccaggagtttaagaccagcctgagcaacaaagtgagatgccatcactaccgccaaaaaaaaaaaaaaaattagttcggcaaggtggttcacacttctgtagtcccagctactcaagaaagaggtgggagaatcacttgtgcctaggaggttgagaagctgcagtgggatatgattgtgccact

SEQ ID NO: 123635 - DNA, 1034 bp, Homo sapiens
gaaaacaggtgacatgtaagtggttgacttggcagagatgtgaattaatacttgtgattttagttgtttttaaacataacagatgcaagtgttcattgacaattatttttaaatatattatcttaaatttaattattatgtgtattactgctttttcctcaattacttttcaaagaagtaactatgtctaaatgatttaggtcatttgtctcttgtgtcttgacagtatgtagtactactctctgggttgggcaagtggacaagaaggcaacacagcaagacttaaccaacctgtttgaagagtttggacagattgaatccattaatgcaagtatcagttcttaataatttaaggttttaaaaaaggaggtttttattaatacaaagaatcacttctgttcctaattagcccagtaatgtctgccttaaataatacacatctttaaaaggattgctttactttgataatgtctgtgtttattttggtgctgtttctctccttaattatttttattttttagtggaattctaacaaaatgttcttgagttttatagcagtgtaccatgcttgattcctgacatcatcaaatgtttgagttagcaggaaccctatgtgtggtctggtttaattcctttttttaaaaaactgtctctgaggaaatggagagttccacagaattgtagtcacttgcacatgaccacagaagcagtcgtggagacacagctggacttaggatcccagtttcttttgcctttttcttctcactctctcaccctctcgtgctcttttactctcttttttatcaaacagagcaaatgttaggtaagaaaatcagtatggccagcgaattgctagtaagttgagcataactctttcactcttgattcttgcactagttttgcaccactcagtctcctcctttgagtctgtgttttattcttcatgaggcctgatgcttttccctgagggtcagacatctttggttagctattttaattgttcttttatttaaaaattacgtgctgtctttctt

SEQ ID NO: 123636 - DNA, 1030 bp, Homo sapiens
aagaatcctctttgcattactcagtataacatttggaaaaattgaagtaatattaggaataaattgttgccttcaaatattttggccatataatactactttccttttatctggtggtattatgtatacgaagttatacattttgttttgtttttaatagttctttttctgtattcagaaaatattgccatgtgatatttaagatttcacatttatcgtggcttatgatacctaattgagttctgaattttgggattttaaaaattgagttattaattgtacatgaattgtacctactaataaacagctggaggaagaaaggggaaaataagtcagtaatctatcagaattgaagtattagtaagtagtcaatgttttgtgtcatttaaaccataaaataccagaatgagtttctgttcttataccttttcttaaaacaattttttttattagatgattcctccccggggctgtgcttatgtctgcatggttcatcgacaagatgcatttcgagctcttcagaaactcagttctggatcatataaaattgggtccaaggtcattaaggtgagatttggtggattggaacttggggtaggggggcagtatttttaatgtctgttatgttaaagtctgagtttttcacaagagggtcacaagctcttcttttattggattattagaatgtctctgtattatattctttttaaatgttatggacaaacctcatcagaaacttattgtttcagttcgttgagttatagaattagatgtaggtaaaaataagtccaataacgagaactttagtcaattacttccttgaaattacacttgcacagctttctgagtcaactagggcaccattctatgagtacaacgtgttcattttatagtattgtctttcattcacttttcctcccagtactccttaactataccttctaattatattattgatttcttttttcttgacatctttttaaaatataaaccaggcccttgtgaagagattatctatcagaatattttt

SEQ ID NO: 123637 - DNA, 1390 bp, Homo sapiens
aggttgacatttttatggtgaaaagtggatttggattttctttggaactggactgcactattagagttacaaaaagaagtggaaatcctttattgtaaatactatgtctaatgtaagttttattttaaaaaacaaaactggtgaggcacagtggctcacacctgtccagcacttaaggacaacccctgtctctactaaaaaatacaaaaattagttgggcatggtgttgcctgcctgcagtcccagctgctgcagggctaaggcaggaatatcgatggcttgagcccggaaggtcaaggcagtgaaccatgatcatgccactgcactccagcctgggtgactgagtgagaccctgtctcagacaaagggaaacaactggaaaaaaattcttttggctactgttagtttttcagctttgcttttccagctgttttctaaaaccaattttaatgtgtttacattgtttaaataaaattttgaactttttaccttgtttttatagtatgtatgtataacctttcttttttcctcttcccatttacaatagatcgcttgggctttaaacaaaggtgtaaaaacagaatacaaacaattctgggatgtggatcttggagttacatatataccatgggaaaaagttaaagtggatgacttggaaggttttgcagaaggaggcatgattgatcaggagactgtaaatactggtaagaattctaaggtctttttattgttaaaaaaaagtatgcttagaaggttgtagctgaagtgaatttgggatgacagcgttaactgtgtatcctggattcatctcccaaaaaagagaaaagatacattactatgccctagtgtacatgcttaatgggacctattttaatagatgtcaaagtatagattagaaagtatagaagtctatataaatgtagcattttaaaatatatgtgtgtttttttcaatttgatacttgagagttatgtgtgggagggatttttgaaactaaatatttctaattgcttcagtttaagtgggaacttgagaaggttttttgaaacactttgcagattattttgagtagtatccatgttgaaaatagcagcaatagaatcgtagtttagggagttcagatgcatacaatgttatatactttctgggatgccttttacaataccaaataatcatcagcctgcttttttttaatccccaaaattatctttttattttaaaagatttcaattaaaaattgacaaaatgatttgcagttataaccaataggaaatctaaacatttgaaaaagaactgaaatagatgcatacaccttttttcttcacaccttagctcttttatcagagttagctaattttcagaatatttgtttctcagaccaaggtaaaat

SEQ ID NO: 123638 - DNA, 1013 bp, Homo sapiens
gtaaagctgtggtgcagatgaatacttgcgactttacctagagtgagtaaaaggtacttatgctaggattagaaaataaattatgagaaatttaggccattctaaagctgtcattgacatgtttcctaatggtggttaggttgcataacaggtattactgagtgggagatggcagtttaaaatggagcataatattcagtgttgaactaggtgaccattagtttacatcacttgaatgtaagatcaaattcataatctccaagtaaaaactatctgttgaataacattgccttgtttttaccctaagtaggttcacttgcaagtatacaaaaagggggcataaaaccctttttagtagtatttgttaccatcctgaaagagaaatagaataatttgcctttagttgttccaagatgcaggtgaataaactgatgagtgaacttttttgtctatccacaaaagattccagtggcgccagccgtgcctacagttagtttagtcccaccagcatttcctgtgtcgatgccggttcctcctcctggattcagtccaatccctccacctccttttttaagagcaagttttaacccttcacaaccaccacctggtaaggaatttttgttttaatatttgaactctatttagattatcatttaagttgtgtttcttccagatttaagtaccatagagcagtggttctgagaccttagcatgcatagccttgttaaagcgcagattgctgggcccagcctccactgtttttgctttactcagtctgtggtaggggccagagaattttattttctaacttgttctcaggatgcagattggtgggagaagcagcactgacagagaaatattgaatttctttagaataattgaaaaccatggccgggcatggtggctcacatctgtaatcccagcacttagggaggccaaggtgggcagatcacttgaggtcaggagtttgagaccagcctggccaacatggtgaaatcccatctgtactaaaa

SEQ ID NO: 123639 - DNA, 1202 bp, Homo sapiens
cttagtttgcattttgattcactcttggtgttttgttccccttttaatgatgttaagattgatcagaacatttagtggaacagtagaacctggtcattaaaaacatttcctttcatccattgatcattgtttcttagatctactttttattagttgcagagtggtgatctttctaaatgtataattccttccatgtttcttaacttaaatgaagaaaaagttttccttaatcaggtaatggtacttagttaccttgaagtgtggttggtacagcaaagtcagggtagatgctatttttttctttaattgccatttctcagagtcatgagatctataggtatttccagtgatacccagtgaccaaagagagatttctcatttctcttcatcttctcctcccttgtccctctctcccttttttttttctccttcagtttctttagtatttatggattaatggatttttacttctagtcagttgcatttttctttttttgaagtgtagattgtttcatctttggacggtgggagacctgtgttgcctccctgtcacattagttttgagagctacttagctttttggcccagtatatcccagacaaatcttgtgttttcctccctccaatctgagaatcagccatttttccagttggggtatggtatctagagaactcagtctgggtactagattctcattttgctcttgggttttcgtcgagtctaggaatttttagtggacaaaactagaaaatgtgcattttgaacagaaaaaaatgaatatgaagtattattaaagaaattagctactttgatttttatatttgcttgtgttctcatatactgaaaacagtaacgtgattgcttttcattttcatacaatatagacatacacatagtagtttgaaagtagtgttactgccaacaaggctaccagatgacactaagatttttctgccactttttttttatcccaaaggtgtataatcataactaggggtacatgtgcaggtatctataaatatttgtttgttacatgagtaacctatataacaaacacaagtttacctatatgacaaacctgcacatgtacccctgaacataaaagtttaataaataatgtataatcaaattattgtgtatcagggttacctgaaataaatcttttctttgtagatgtggtgccagtttcataagtgattttt

SEQ ID NO: 123640 - DNA, 1058 bp, Homo sapiens
tgggaggctgaggtgggtggatcactcgaggtcaggagtttcagaccagcctggccaacatggtgaaaccccgtctccactaaaaatacagaaattagccaggtgtggtggcgcacgcctgtaatcccagctactcaggaggctgaggcaggagaatcacttgaacccaggaggtggaggttgcagtgagccgagatcacgctactgcactctagcctggcaaccgagcgagagactgtctcaaaaaaaagataggtttaaaagtctttctttttgttattgttggttcattaggaagaattgtttattctttctgaaaattagacaaagtgttcagaagtcatttctgaattcactattcacagaggcttaccctagggccaacctcccaattttttcctagtccactaattttggaaaatctgcagttaattaatggaaaaagagaaatagttgtgtgccagatgctatccaaattgcctttgctgtctcatttaattctcttaattcttgtgcatgaccacaggtgtttttatttttgtagctctgttgtatgctaacagtttgttcaggtaatctagagttacatatgaagataaaacatttcctaagttctccaagtatgattttacggcattctaagtgacatattgggctaaaaattttaattgtgtaattattttgtattcctctggttgtgttttttaatatgtgtgacaaatgcacttagggatatttatacccattctttaagatggaaagtttatagcttcatatttgtagtccaccttatgtattctcaactgatgagtttctaacttcatctgacaaaaggtaatgttaaatgaatgttaggaccctagtacattgtaattgcagggggattgggcagattttcatactcatacatttcagtctgcactagtcatttctgtatgtttagacattcactttatctggcattcctagaaaattattaatttttttgttactagaatttactttttttgagtgctggtcctaacatctttggtgaaatatttctgaaaattgttagt

SEQ ID NO: 123641 - DNA, 1028 bp, Homo sapiens
ttctatggtcccactgttggtacattaagaattatggtttagaggcacttgaccttgatgcctgtttgggtctcttctaagcatacttttctttcctttctttcctgtcctaaagccttttaaacctccactcctgttcttaaaaaaaaaaaaaaaaaaaaaaaaaaaaaaaaaaaaaaagaattatggtttagaaaggcttttattaaaggtggaaaatcagtataatacctgacatttctgtttaacttaaaaagatgtcatgtagtagctaatgtaccttgattattgggggatacaagtagctgattaagctaaaattattggaaacttttgactgttattttgagttttttctctctctctttttttttagtgattccaaatgatatttcaagtaatgctgcaattttaggaggacagccgccaaatgtgacaagcaattctggaattctgggagtccaaagaccaaatgtatcaagtaattctgaaattcttggggtccggccatctaatgtttccagtagttctgggattattgcagcccaaccaccaaatattctaaataactctggaatattgggaatacagccacccagtgtgtcaaatagttctggacttttgggagtgctacccccaaatatacctaacaattctggacttgtaggagtacagccaccaaatgttccaaatactcctggacttctgggaacacagccaccagctggacctcaaaacttaccccctttaagtatccctaatcaaaggatgcccacaatgccaatgttagacattcgtccgggactaataccacaggcacctgggccaagattccctttaatacagcctggaattccaccccaacggggaatcccacccccatcggtacttgattcagctcttcatccaccaccccgtggaccttttcctccaggagatatttttagtcaaccagaaagaccttttttagctcctggaagacaaagcgtagacaatgttactaacccagaaaaaaggataccacttgg

SEQ ID NO: 123642 - DNA, 1597 bp, Homo sapiens
gtagatataagagagaatcttgtgaggccaggtatagatcatcttggtcgaagagaccactttggctttaatccagagaagccctgggggcatagaggagattttgatgagagagagcatcgggttctaccggtctatggtggtccaaaaggcttacatgaagaaagaggtagatttcggtctggaaactatcgatttgatcctagaagtggtccttggaaccgaggatttggacaagaagttcacagagattttgatgaccgcagaagaccctgggagaggcaaagggatagggatgacagagattttgatttctgcagagaaatgaatggaaatcgtcttggacgagacagaattcaaaacacttgggttccccctcctcatgctcgggtttttgattattttgaaggggccacttctcaacgaaaaggtgataatgtgcctcaggttaatggtgaaaatacagagagacatgctcagccaccacctataccagtacagaatgatcctgaactttatgaaaaactgacatcttcaaatgaaataaacaaggagaagagtgacacagttgctgatatagaaagtgaaccagtggtagaaagcacagaaactgaggggacataatcatcactcagtaggtaaaagataccttttgtaaagttgtcatctctctgtaatagataatggctgactggaccatagttgttcacttttgtctgccagaattaagttaatctgatgttcatgttcacctttctcttaaaataattgtacaactgacttgtatagacattgttcttaatatgaacatggtaggtaaactttttttttatttttttctgataaaatacaaatgttggccccagattcttttaacgtcaaggaaatgaataacagcttgtcagagacttcctatggaagaaagaattttttagatactatcattaggttggatatggtaatagatatatttcagaatagcaagtggtggtatatcttatccatatctttaggctgctgcagaattttaaggttatagataaagctgtgatattttatgcaaagactggctctaggtatttgaggagcacaatacagagattttaaaaagtgattttgtaaaatctacactacggtctctgtttctccaaagtaagtgtttgtgatttgttcctcatactgcagtgagtaaaaaagaaacaagaaaacaacaacataaatattaaagtacgtttcaatgttgggtgaattttgtttttagatgccaataaaacttatttgtttgataacagtgttctaggaattgtatttttttaacctataaattcttaaaaccttgaattattattagcatgtgcttattttttgcaaaagctttctatcataacaacaatgaactatgtggtggaaaaagcatgtactttgatataaaaatcatgcagcctcctcagtatgtgtataatatctgtgtatgtttattgtggaagtcgtgtagtttttttctgtttctctgtatgtccgtcttcatgcacatacagagaaaatagaaagttgaaaaagtttagataataaaatattcttttaaatctggtagaat

SEQ ID NO: 123643 - DNA, 1967 bp, Homo sapiens
taaaagaaattatcatgtgctcgttctttgtccttgttttttgttgtatagaatttaagtgaaaagagattatcctcattcagaattttcaaaagtcataattgcatttgccattttttaaatgatggagagaaaagttaattatcttactttgataaatttggcataggacctatcacattttttatgcttttggtcacagttctgtcactagaatactagcaattagaaatgtgcaaggagtaacctaaccactttaatacattggtttgaagtgttgcaagcagtgataactagacaccaaatcatgtagtgttttaatttgtgacatgttagaatgatatgcctttctgcagtattagcgaacacctaatttttatctgtatttaaacatttcattaaacattagcttgtgttcttagcataaatgcatgcactgatagaaacttagtttacagcagagtaatctgcatcatatgttcctttattttaattttatttcaataaagggtagacaaataatttgaaagtattggaagatgaaaatactagaagtatgaaattacttaaaactctggaagtaactccatataatatttaatagataaaaatgcattcattatttaagctattgcattcttaccagaccagttccttttgtcctgagagtttagtttcttcattaaatttatttgccatttttcactcatataaaagattatagtttaaggagccacacatttagggttgtttgggggttaggggacgttttgtaaatttaaaaaggagaagtcatctttttaatttgaaaaagtgctttttaaataaacactgtatttcgtgggatataaggtgccattgattgtaagaaacaccattcagaaatagaaaatacttctaatatgacatgctagtgtttatagatacattcctaattcagagataaacgtgaagtttcctagtatcaaataaatacaatatttattattgaaatggactttcagtttagtgagaatatatgaacattactgttaatcagttaatttgaataaattttctaccagtctaaacattgttttttttttttttttttatttgagatggagtctcgctctgttgcctaggctggagtgcagtggcgtgatctccgctcactgcaagctctgcctcccaggttcaggccattctcctgcctcagcctcccaagtagctgggactacaggcacctgccaccacgccccgcctaattttttttgtatttttagtagagatggggtttcaccatgttggtcaggatggtcttgatctccagacctcgtgatctgcccgcctcagcctcccaaagtactgggattacaggtgtgagccacagcacccgtcccagtctaaactttcgtacgcacacacacacacacacatatcacctcaagtgatttagagaatattttgtttttcttcactattatgtctaatatatatatgatatctaataagctttctgttctgtgtatatatattagatatctaacaaatatatatctaacagattatattatatatatatatgatgggcacaacctttaatgaacaagaagattctcatattaaaactttgttataccttatgtgccttcatcatcattactttattgggtgctatattaataaaatacttggcttttaacttacaaagaaaactaacatatttctctttaaaaatattttacttacataatatatagaaaggcaagtatctttatattcattaggcaaaataaaggtctaaattattttaagtagtcatactatggtgtggcagagaattataaatcttaatattgttcatgctgtggtttcatatatgatatcttttaaactaacaaattgtagacactgaaaatttattacttctgaagagaaatattgattattataatttttaatggaagatttaaaaacaagatatc

SEQ ID NO: 123644 - DNA, 1049 bp, Homo sapiens
cctttctcagaattagcctccaaatccttctcatagagcactccaggctcctttttgaccccatcattccaggcagggaccatcaattggatttgttgtttgcattgaaagtcatttgctgccccttcactaagtgattatttctgacatcacttctagcatttaattacctcaagtctatgaaataagctttcttttctgtaaatgaccagttgaggaagaaaactaagaggaatggaaagacttaacattattggaacacttttaaaaatagcacaaattttattgcccttgggtttttaaaactgcctttaacaatagctagatgtgtggctttggacaagttactgagcctctaaacatcgtttgttattagctaatctgaaggggtaaattttcattattaaagataatattagctaatactaaatggacacatgctctgtgacaggaactggaataattgtattacctgcacaatataatccttacgacagtcctataaggtacttattacttcactatttttctgaagagaaacccaagacacagatttaagttactttgcagactcactgtagtgaagatttaaacactgtgtaccagattcaaaaattagtgtgtaccatcagataaagtgcctgacatgatagaggctcaccagatattaggcaatgtatatgcagaaaaacataacccaaccagccatatgtttatagccacagttaaccactaaattgtttccattgttacaaacatatatcgggctatctccttttcctatggctaaataattaagtttgattttcttagatctccctttcttctttttctttttcttttttgttttctttcttgagatgggatctcgctctgtcatccaggctggagtgcagtggtgcgatcatagctcactgcagccttgaactcttcctgggctcaagtgatcccttctgcctctgcctccgcctccacctcccaacatgctgggattataggtgtgagcccctataggcacctggcccgtatttgcatgattggtttttttt

SEQ ID NO: 123645 - DNA, 1009 bp, Homo sapiens
accattaaacaggatagtcagcactacctagttttttagctgaatttgtaatgtccatatgtttatgtttctttagtaatacttgaactaaaggaatttgcaaagaaaacccaataatattagtattacatcaaaaagttactgtgtatttttcttccatcaagaaataatgctgacttttaaaggtggaggagtttttagacttcagtaaacataggtaccctgaaaatgtgcactgttgtatcttttcacttttgtatgtcagtgctttgaaagaatggacaatgttatcattttgttttgtctgcttattaaaattttctccctagtgtgatgtgactatcattttgccatttcagtgtcatattagaaatggttgttttatttaccaaataaattaaccaattcgttcagtattttatatattattagacgtctaatactttttaaaattttctcacagtattaactagcaaaatctatttgattaagtaaaaaacagctttgggtctgactgaaatccaactatataagtatataggttcttactaagtaggtgccttataacaaggactccaaaagttttttttttttttttttttttttaagatggtctcactctgtctcccaggctggagtgcaatggctcaatctcggttccctgcaacctccgcctcctgggttcaagcaattcttctgcctcagtttcccaagtagctgggactacaggtgtgtgccaccatgtcccactaatatttgtatttttagtagggatgaagtttcaccatattggccaggctggtctcgaactcctgaccttgtgatctgcccacctcagcctcccaaagtgctgggattataggtgtgagctaccgcgcctggccccctataacttatatagaaatctgaatggagaattctggtttttgttttgtttttgaagagcaccaaagcaattaaaacactgcttggcacgtggaactatataggtattcactattgctttaat

SEQ ID NO: 123646 - DNA, 1039 bp, Homo sapiens
tacatctatgttattacctatggcagacacctacacatgctgacagacaattttaagtcagtcagtccatccttaaggttaccaaaagaccagaaagattatctactgactgctgctgggcagattttacactgagtttgaagtgttcagttatatataacattctggctcagttcgtcaagaactcatccataattcttcctggaagtgtcctcatgtgcaactgtcaggatctttccagagagacttttaaaaaaattctgtaaccctaaaaatgatgtttgctactttttgatttgttgcaatataaacaggtaatatttacagacaatataagtaaatactgagttccttttcatactatgaactacgttattgctatgttgacctgttgagttcactgtatactttatgaagccatattctcaacaatatatcatgatatcaatgatctttagtaattagtcttttattctgaaagattgggcaccagatcagagttgaagagaaagtgaataagcctttaatgttttaacaatatcttggagtttgaaaacaccatagagatcactggctgtattttttagaaaagaaaaaatttaaaagaaattgtgacttatagtcatgggcctacgtagcagttttcttttttaatgtatactttattccatataagttggtatataatgtttacaatttacacatctctatagaaatgcaatgaacaaatttgaattcagagagactcaaagagggccagttacttcatgtctcattgtctcagttttttttttttttaatgtaaaatgggccaattattgtgttgagcttaagtgtttgttttgaagacctaaagagtaatgcatggtactaacacatgccacagcatggttgaatcttgatgatactgtgctaagtaaaagaagccagacacaggctggacgcggtggctcacgcctgtaatcccagcactttgggaggctgaagtgggtggatcacttgaggtcaggagtttgagaccagcctgaccaacatggtg

SEQ ID NO: 123647 - DNA, 1144 bp, Homo sapiens
gttttagcttcgcttctcagctgtcatagtggtgccagtaacttatagagtagaaaatgctctggttaactcgcagaatctggaataaagagctgctatagatcttcgtgtgatgctagtagcagaaaaaagatagtttttgttttaagggcttacataaggtagttgaggacaaattgttttaagggcttacataagacagttgaggacaaagaattcactaaggatagccccagtgcctatgaatggctcttgatgtatgatggttgctcagatatttgtttaattaatttacaggtattcattgggatgcaatttgatgataattaaatgcataaattgtgataactatttgtcaagccaattttttacactagcattttgtttgagtgagagattgggtggggatggagataccaggaaattctgtaagtgttaccgccttcaaggaacttagaaaggtggtgggcgatggggaagatactaaagaatggtgtaaaaaatgcaaggttgaatatagccaagtgcttcagtacttggtgaaggtgcgaaatgctccatatgaagagaaaagaatgcagtagtgactagatttatggcggaaatgggatttggggttggcctcgaaggactatcttaaaggctgagacagggtgaaaggtatttccatgtagggatattgatcagttaggagacaaactagagcaaaggtataaagcctgagagtcagcccctcgaaagttgaagaaatgtgagctccatctgactggagctgggaaatccactttaggagaaagtgacagacttatgttatggttggattgattaagtgagatggggttatacagaatcttcagcgtcagaagcagagtagttcatagttcacatagacttcgagaggaggagtcagggtacttagtataggttctctaaccgaaaaatgaattgatgtttaaggagagattaatttggtagttttgtgtatggtgcgaaaatggggttggagagactcattaatgggtttgctccatagtgcccttgtgtggggtatacactttttttttctttgaggcacagtgcagtggcgcaatcccagctcactgcaacctccgcctcctgggctcaagcgattctcctgcctcag

SEQ ID NO: 123648 - DNA, 1007 bp, Homo sapiens
ccagcctgtggtgtatatgtttaatctgtcaaatctcattaaatttttcttctataagaatgctaatgataccaatttctagaattgaatgatttctactctgcctgttggactgcaaatttgaaatcccctataataattagacccctccttagagtatattataatgaccatcgaacctgtatctaaaaattctagtaacttaaccatccagtcttaaaaaaaaaaaattaaaacaggaattccaaaacaatttcagaagttagaataggtgaagttagcctattttagatgtgtgcagggatggcagtgggggggaaagatggattactaagtatcatttatttcttgctgggtaaaaattcaaacacaagaccttatagctgcctttttattacacttggcttccttttagctttattgggctttggttggtacatatgtgaataaacttagactattattgtatttgactgacaaacacttaaaaatgagtttgttcatattcattttaggtggagttagaaatggaacctaaattgtaaaatataatacagcatgctgcttttcgttctggttttatggtaacattgaaactaaaatgtttctttctaatgtgtccatcctgactgccatccttaaactagagcctcttgtctgctatctgaaaagagcaacagcaggaaggaagcaattgatttatacacatttgaattagtctgtaaagcccaaggcctgtgtttgttcaagaagagacagaggcagcagtaatgctctgtgcatcaggtggattagttggaaatgtgcaagctatcatctttctaagaaaagcattttaacaaggcaaatttgtgcctagctcttttttttctgtatatctgttgtgttgatttttaatttggattgttttccactggctttaaaaatgcaagtctttttcaaagaaaggagaaagcattttgtagctagtagtatttcaagattccgtcataatgtacattgattat

SEQ ID NO: 123649 - DNA, 1052 bp, Homo sapiens
cccgggttcaagtgattctcctgcctctgcctcccgagtagctgggattacaggcatgcaccaccactcctggctagtttttgtatttttagtagagttggggttttgccatgttggccaggctggtctcgaactcctgacctcaagtgatccacctgcttcgtcctcccaaaatggtgggattacaggtttgagccactatgcccggctggaatatttttactcaatattttccttctttaaaatgcttaaataatacagtaattttattgcatattaatagaagtatttgaaggcaaaaattaatttcttaaatttatgcttggggatgactggcatttcttctgggtatatggaagctctaagcttggaaaatactctgtatcattttaaaattctaaacttttaacctgattaagacttgaatgaatgtatcatccctacactgaatgcattcatttattcagcaaacacataggcaccaggcacacgctaaaagaaagcaaggtctctgcccttgaggaatccacaatgcagtcaggaaggtaattactggacagagtgattggcgccatggcagagatgtggcagcgtgctgtggaaatgcatccatgaaccgtggaaaggggtggagtagggaaggcgattagagaaattggcacttgacgggcgtcctgcagcttgctggaagtgaagtgcatttgcaggggttactggaaggcatgaaagggtatggagtgaatggagggcagggagtagctctgcttggcccctccggttgtgaggggccctcactgcccagctaagagcttgcagtttctcttgtaggcagtaggagtctatcagcagcaggtgccctggttcagattacagatacattcttacctccttaactagcagagtcatgtgaaacaggagtggtctcaggaaaaaggctgagaaagccagaaattgtctttcaattccccctctattttgggtcccagtacccctttctgcattttggaacatcatctccttaaccaccagagcctttatcacctccccagcct

SEQ ID NO: 123650 - DNA, 1057 bp, Homo sapiens
tgaaggcgttactgatcattgtggtggtgtcagtgatattgtataataattgtaataatttctacgtattgagtacttgctatactggatgctttacgtaaattaatttatccttataacaaccacatgagaataggcactattatttcacttcacagatgaggaaacaaccagtttagcccaagttacacagctaatttgggcaaaaggtgggttctaactgaggagtgtctgatggcaactcctgtgttcttaacatccgttctacatggtttggattaagagagtttgtagctgaccctatgatggaaattcattgagggcttgtgtcctttttcttcatgatctgtgatgtgaatttctcttcataaccagactgtgtgttcagatcccaggctctgccatttgtcttttcagattttgagttatttcactttgcctaaaataatacttcatcttgctaatgaagcctgtagatttcagcatgagatgcattcttaataacctggaaaagtatgtagggacgtacaaaatcctatgtgggtctggatccagcatttatctattgactatacacagattttgtaatgagttatatcaaattaaagaatggaaatccttgttgaaaaatattttatcaaccaaattatgtttaaagctatttttatgttctttcagctcactgacatgtaaccaacttctccatctgatttcacttctgccgtgttcttgaagattttaaaaaaggggacagttggttgactataaaacacagaatctatttgtattcaagatcatcgatttaagtttgacaaactaaaagaatgtaatgttctactcatttgtatggccagtgtctacccagtaagctttttcagtctggaacatttttagttttcctagtgattatagcttagatttcagctgtattgaatttctagagagatttttagtgcaactaaaactcatgttaaaactcatgtgtaccttgaccagctttcaccatgtgagccctcttctccccaaataattgtgtctcttggaccaagttcaaagc

SEQ ID NO: 123651 - DNA, 1149 bp, Homo sapiens
ctcacccaaggatagccttttgcatataaacatattctctttaattacctgcctcttctttctttctcaccaaaggaacgtaaagaacatcctgcccagccttctaggcattccttcaataattttcgggtgcctgtgcatgacactacactggttttatagtcgataaagtttggatacgacattagttctacattcataaagcttgtactctcacagacatgacaatttataaactaaaaactgtaagatgaagtagaaaatgtgtcagactataagagactttttctactcctttttttcattttcaaattaaaaatgcattcgtgtagaatttcagatgttctacattattatttgatatagtgtagaaaaaggaaatgttgaaactaaaaaatgagcacatgttggtcatcagttggggtgtaggctttgttcatttatttgttaacccagcaaataattgagtggccaagcattgtattggatgcttgagaagttaaggaaaagaccttgccctcctccagttgaaagctcgggtgcagtggtccaggaggcaggaaggcatggaaaccgcatgtgcgtggtatactgtctgcgactccctgggccccatctggtggctaagagggatccagctaaaaagcttcatcaggaaggttagtctcaaggcttttgaagatggtagggcatgtgattttacaaaaagatggctgtgaggggtggggaagcaagccaaggaaactaaatagacctctttgggagggtgaatgtttcctaagtctttgattcaaacttggctaagggcaaaggacaagggaaatcccataattttgagaaagggaatgatgtaaatataatgtgatggtagttttacatcttttaaatgactttatcttttaggctgggaaagagtaaatgcaggtcagccacctatttatgagtcccagttcatcttttttagaaagtcagataacacttttcaagacatactgcttattaatcctagacatgagagacttatgaaaggcaaaagatatggtgatgcttcacttaactaaatcccagaaaatgttggctccccttctaaaaatcttgaaatacagtgttttttggaacattaataagaagacagcttgctatcaccaa

SEQ ID NO: 123652 - DNA, 1690 bp, Homo sapiens
taattcaagaagaatgtggaagagaggtacagaactgtaaaggcaaatcaggaggctggaagttggtttgaggatgaagcttatgtaaaaacaagtgcctgtggcattatgttaataaatgacaaagccagaactccatgtcagaaggagctaaagcctaaaataggtgggaagatgatgaggttgtccctagttgttctcaaagttgctgttaccttgaaaaatgacttccctgggaaccagaacatccaggttggcctcaaacttgctgccaaacaggaactgtggcaagccggagaggattctgatgcttggaagtgggcgaatgttttgattttcaagcaaagaaaaagctagcttcctagaattacaggccagtgaacttgtcatcattcccagagagtgctgaaaagaattaattaaatgatttttcagctgttaaaaagggatcctctgccccagcagaactggcagagatccctaataacagttcctgccaaaaaaaaatgattgcagctttgaaaaagagggttacttcaatgatgaatgagaaagcgttgtagatgctgtctcaggattttggtaaggtatttgagaaaggcactacatttctttgtgaaaaggcaggagaaacagggcttggatggcagtgcagtcccacaggctcatacccaccatgctactcaaactaccgattaatggacctatgtctacctggggtggagggctgcaagggtggacctcagaccccaatctcataatgaggtagtgagtgaggcaagacacccccttacctggccatggcttaagagttgtagagcagagatcagaagccacagccttggtcagagggagggaaacaagcccagctggatgaaaaaaaaggagcatggagacaaaatggggggtggggagcaagggacactgaggacagctgagaaccaggggctgcaggtctgccctggggaggcaggcaggtgggtttcaaaggcggggcaccatcgcttgtggaggtttgtcattctcagtgcactcttgagattgtcacagatccatttaaaagggctgaaaggagacagagatttgtaacctcagacctgccctcctcaactgatttattaccagtgtgaatgaggacgtggatataagacatgttcattaagcctgcaggtgatgtgaaggtggaagagagaactaaaacgttggatgacttcggtacctaggtccaaaaaactcagttgttctgagtgtgtgataaaatgctatttagtcgtgacccgtgaggaggaggtagaggctggagagtcagtacagattaacgtggctacaaaagcgtaaggaagacttagacctctgtagcagaagaatatagttcaagctgagatgggtaacaagccttaccttaacaatatttctctgtcccccacaagtcagaccacatctgaaattttaaaatgagctccagtttccatcactgaagggcaaatcttgagtgtatccattggagaatgccgtagatactttgagatttcattcatatatatatatggattaatatgctcaccctggagagcatttgagggattttaaggccactggcttgaaataagcgacgtgcacctgagggattggatgtatctttggtaacaccatagggcgtaggtttgagcttcttagcctttggcgctgt

SEQ ID NO: 123653 - DNA, 1023 bp, Homo sapiens
gatgcttcagaagaaagcctcctttcattcattattagtgatttctccaaatccactatttctgcatctatgtatgaaaattgaagaacattccagactatggcggtggcatcaaatccaatcatttttatagcggggctttctcttggaggactctttaaaggttacagagagaggcagcttggcacagtgtgtagattggttcatagttactgttttatagatgtttactgtaccttttagtatctgtgaaaaatattccttttatttcttctgaggcacacatctctttcaaaacgttttttaatatcttagaaacatactctacctgtgagctataaggaaataaaatgatgctcattttcatccattcttatattattacaaaactaaatcatttctcaatcctataagatacaaatcaattgcctattattgtagatgacttaggaaagaagattgtaaactagaaaaaatatacatgcatttttagtccaaacttttaaaaatacaagtactgtattcagatatattttctaaaaagatatcattcataaaattaatgcaaattttaaaatccactaaaggatccatagtgctagaaataaatgtggctttcagatggctgcgactctcagcttgcacaactgggaaagaacctgaatatgcctcttttcaattttgtccacttgatcatggggtgggaacgatattattgagtggaagtaattgctactccaaagattttttcaaagctttatggagactgtggcaaatattattttgtatcttaaaggaccctgtatggagagttgcactgatatttaaaagttcccacacacggtgtcacacaggccacgagccacagcagtcagaaatggaagggggacctcactgcttcttactgcatcattcccatcctctcattacaacagaaaagaaaaaagctaatgaggaaaaggaagcaacttttgccagaaatgtccatgcaatcaagggctttcttttccctgtgtaatgtga

SEQ ID NO: 123654 - DNA, 1034 bp, Homo sapiens
tgaggtgggcggatcacgaggtcaggagttcgagaccagcctggccaacatggtgaaaccccgtctctactaaaaatacaaaacttagccaggcgtggtggcgcacgcctgtaattccagttactcggaaggctgaggcaggagaattgcttgaacttgggaggtggaggttgcagtgagccgagatgaagccattgcactccagcttgggcaacacagcaagactctgactcaaaacaaacaaacaaacaaacaaaaaaaccacacaaaacgaaagaaagaaagagagaggaagaacggaaagaaagaaagaggagaaaggaagggaagaaaagtcagtctcccagaaaatcccatctgttttctagcggcttctctaagcaaggcttagctcagcacaactttcccttccagcccccgcctcccactgtggccattggcaggggctgttgggatcaccacagagggcacatggggaaggtggtgcaagtgctggccttcttgtttctcctagacttttgctaaggcctgtgtggggaatacccctgttggttgccaagctaagcattttcataggctgagtcacatagacagagctttactttgtgaatacaaaacagggaaataaaggaacaaaacaccaatcctgaagggcaatgacatgatcattgctaagtgccattgaatgaactcaggataactctcaacctcactcttctgtggttctgttttgcatatgtataatgtgaacttctaatgagttggttaatattattccctcctccctgttttctttaaaccctgctttgaagcataatggtgtaaaccagtaagaagtttggaaagcctgtgcttgtcattggagtttaattaaaatacactaagccttgcagaaacttgtggtttcgagtaatggaaaattgggaattcagaagtatagactgatcctaggcagaagggccaaattttctctaaagcattggacttcttgccttccatttctgtgtagacaatgtagttgactcattcttaaa

SEQ ID NO: 123655 - DNA, 1046 bp, Homo sapiens
atagcgctgggcttggcagccatggacgtggataaagtgaattcctttttgtaaccatcttaggtttctcctttccggcttctgtttttgtagagaggttttttaaactagggcactgagagagaaggagggactcattttttgttctgttttttttttttttttttcccttggcaagtgaatttatttcatcttttttcttggcaaatgaatttatttcattttgaaatctgcaatcctttcctttttgttcaagatatctgagtttgacttggatttacttacagccacttcaggaaattgactttgaaggaaaatctgagccaggtgggaatctctgctctagaagttgcaggtacctggcacctggctccctttaggccaagtctcaggatgaagttaagtctagacggacaaaactctgccacgagggcggttgttgatgggtcaatgtgagagacctttgtgatttggggcaaaaagtgttcttattaaactttgcagtttaataacagagtttgtctttgcatattgaaccctggtccttttcggctgcgtctaaatttgtatgttctgtgaatgagaatgggatctagtgcctgaccgaactataccatgtctgtgcgtttgctcttgattttgcagccctgacaggttgggtagcagcctggcctggaaccagctgcaagtaaccaagcaatgatgagttatttgcagttggataaaggcagattttacccattatcctctggaggtcttctcttgcggggaaaggtcagcaataatgagatttagtcagctttccttgcaggcggagcctccaaggaaatactcattgaacttgagtatttttgtgcttttgttcatcgtatatagaagtcctaattgaaaccttaaattgtgcgctccgtaaaccacttgttgagccgcagatggttggtttgtacattacttaatttatcgggtccttactcgtctttgcctgcaagatgaagggattggagagagtatttccaagactctgttttatcatcagcaacatcatc

SEQ ID NO: 123656 - DNA, 1030 bp, Homo sapiens
aaaccctttgccctacacagaggcccctctgagatccctgctgagcacagacggagacacttggtgcccttgggggcagcggatactatcagggagaggcccgtgcattattttccacctcttgtcctctctcagagtgctgagcagatcactgcactgtgcaggagttttaacgacagtcaggccaacggcatggaaggaccgcgggagaatcaggatcctcctccgaggtctctggcccgccacctgtctgatgcagaccgcctccgcaaagtcatccaggagcttgtggacacagagaagtcctacgtgaaggtaagggaagagctggcatttatgcattcgtgcctctttgatgatggcaagtggtatgctggcagaggtccccagatcacctctgcccaggacacctgccactccccagggggggacacctgctccttgaatcagtgaattgctcaaggaagggaggggaagagtgagagggtggaagagctgaggagactcagaaaaaaattagatccttggcttattttgttaccaaggtagctttcactatggaaacagatgttctggtttgtcatttgcaatctgtgggaagggagtctgtactggtttagtataaggggagagagatcactttaggtgatgaggaacttgggaacaatctgtacatacgtgacggctgatccaggccccacagtcttggcggtggcccgggccagccctgcctggtggttgtcatcgtgtagaactgggacgcacacactggggagtggtcagcacgtgggaatatccttgcaccattatgaaggggcagttgccgagtatcttgagtacccgaagaattcatttatccatctcataagcccccagtcagtggtttgagaaagattttatgaagaatactggagcctggggagcagagttcttttgctttgtttcctggagctttggtaccatttgaagctcgcttcatttgtcagttactgaagcagcgcggcacggtgcggtgggctgagggtccagg

SEQ ID NO: 123657 - DNA, 1118 bp, Homo sapiens
gctgttgtggctcctcaggcttaagaagattaacaaggaaaaaaaaaaaaacaccatagcatgcatttctttctactcccatctagggtttggggttgcaagtttttagagaaaggaatttggcaagaaaagaatccagatgtaactgacagcaaagtgacacatggcaaagcaacatctctgctcttaggcatacttgttcccagctactaattaactgacagaaacagaaacctttccctttaatatttgccactgtcaaggtcaaggatggaccttaatacatcaaaattgtacttactctctacttgttaaatacagatttaccctttactaacagttaaaaatgcaaaaaaaaaaaaaaactataaaaggcataagcaacttacctcgctccagaaccttctgtactttgatatggttagcacagaatccactgtacagtttaaagtggtccgcgtaataaaggaaagagcctccaagggaaaacagtaatttctagaagggcagaggggaaagtcaaatcagacatggtttaatcaatgcgtgctggcttatggcatttgacggccccatggcttctgtcagattccatagcactaatgccttggagaagttcaaacctgctccatccacacaggaggtggggaacagcccaggcgctcccctggcaggtatctagcttgactgcaaagtttccagcggcagagcctactgacagtgtgcaatccaaggacaagaaacaaagaaagttctacaaaaatacagctgacaaggtgggatataaacaatctgagagaggttcactaataaagccgactctgcattgcttggggagagtgatgctgtctgtatggttccaggtccccttggaggggcttcctgccacactgcggcttacacggatgctatggagcactggtgcttcatagaagagagggcttgagcccagcaattagaaacctattctcttaatcccagatccacatgaccacggggaagaaggattgggcacagggtaggagctctggtttcagaagcaaccaccttggatatccttcacagcagctgagaaaagagcacgtacgtggtcaacaaccaggcgggaggtgctgctg

SEQ ID NO: 123658 - DNA, 1069 bp, Homo sapiens
tctgtctgtctgtcttcccctcagaatgttattccctgaagcgcagcgcttggaaagcacgggcaggctgttagagttggcagacatagaccctactcttcggccccgccagctctccatctcacactttaagagcctctgtgatgtatacagaaaaatgtgtgatgaagacccacaactctttgcatataatttcagagaagaactcaagcgaagaaaaagcaaaaatgaagaaaaagaagaggatgacgcagagaattacagactctagctgctgcctgggggcgagcagcctaccagatgtcgatttgcactacgtggagcttcttatataggtactcttttgtctttacagaatgacgatacaaatgccaatgaccagatgtgacttattttccttttactatacagcttggcagagaaaataaatatcatcaaataagatacagtacaagctttcttttaatatatactgtatagatagttatgacatgtttagtataaacagcatctattacaatctatcttacaaaaatgaagtatctgcacattttgcccctaaaccacattaaaataacttaaatatgctttaaataaagcaaaaactaacaaacagctgaaagaaaatgcccagaggattttaaaaaatggccctttgaaaactattaatcacgacttccccagccttactttttccacataacttaattattagaatgtaattttaaggatcctaaatcatttgatacctgctcaaagtggatataaactaagtaatttacagattctgaccagtttcatctaggtttctgatccacaataaattaaaataacttaaatctttacaaccattttgtgggaaaatgtatactgcacaaaacccaggaatgaacagtttttttttttttttttttttgcaatttccactttaccaccagtttaaaagtaaaatgaggaatttaacccatatctggattgaatcatactatgattttccgtggctctctgtttcataaaaacactcctcactgacaacagatgttaaactctggacactgaattctcgctc

SEQ ID NO: 123659 - DNA, 1052 bp, Homo sapiens
cattgcctatatttaaagtataaactttgcatagctacaaacattgattctctaagacattagatcctagactatctggattgtgctgttctgtttttgttcataatctgaaaatgtaaatcttaccattttagaaaaggatttccctaggattttaagttcttaagagtcagacttatctgtagacatcagtgtgcctaggattcacctgctatcatacagtttcttttctgttttccaaacttagaccaaaatagaacaaaagttaaagtttctagaaaaaaaatcaagcacatgtttacagttttgtaatagctgctttcaagtttaggttttagcatttcggactccagccagcttgctaaattactgcctctggaccattttcagcttagggattcttcaagtgtggggttgctggaacattttctaacagcatctgcttgctcacttttctctctccctctctctttctttctactttgactgaataacctttgttgtcaatctatgttcagcttaccaattataatccttttcttcccattaactgatatattttataactttcagtatatttcagacatgaagacagtttgttcatcatgattaacaagtactggcagtgatcaattacagacagccaaaatcagtgtaaacaatatgacgtgtcatttaattagcatagtgcttgcttactgttgaatattggattcaaatgcttttttttctgcatagagaacttatgtagaaagaatttgttctccaaatgaaggtcactttctgctcatacaaatatactggcattttagctgcattgcgctttaccctccagccacgagtataataccgtttgtggcctgttctctcaaaatttctatctcgtagagaataaaggcacactttgttccagcagctgtggtggtggtggtagagaaatactgtgaaggcaagcagaagcagaggggaggggtcgcatgtaaacacttacatggtctacagtgaaaactctctcatggtcccaaaacacagtgcacacagaacagaaccca

SEQ ID NO: 123660 - DNA, 1032 bp, Homo sapiens
gaactgtcagatccagaaagtttgctatgatctcctttgtgtaccacactgtcgagattaaactagagattcctgcagacatgaaacagactcctccagcaaaggaagcatggctcttggtttctctgtcccctcctaagcgagtacatttcattcctactgtggaagtgcagatccccaaagcagacagaacacacgccaggaccatggtggctctcgcagcctgcacgtggatggggagggacagaatggagtgtttcagggcacagctgaacatcccagtgctgtaccacgtacagtccatccagagcccgtgcagctgtacaatggctgttatgatgttggagtccacatccacattcaccttccagttgggcagcagagtggctgtgagcactccagagaccccagataaggccaggatgaaagcaaggagctggagtcctgctgaggccatgatgttactgttaagtctgtcctcttagaaaatcctgatgtttaacaatgatggctgtcagaattctatctatttctgtgcagtagagaaccaaataacaaagcctaaggaaaaaaggcaaaaccaggattgagcgaaagaaagtaagtaaacaaaaggcttccctttagagtaggagccaagaacacatctgagtatcccccttctccagcccccaagcagatgaggatgctgtaggctggaggagaaaagctcccaccaggccttgaagactggtctgagtgatatgcatgggtggtgttgatacagggcataaagaaagcagttgcccacttaattctttttaaaactcaacatatgctgaaactgtagcgtggacatgtacgttgttaggagatttagacatttgaaattccagctatagtatctgataaagaattttaatagcattataggtttttcaaatgattttattttttatttttattttttttgagatggagtctcactctgtcacccaggctggagtgcagtggagcgatcttggctcactgcaagctccacctcctgggttc

SEQ ID NO: 123661 - DNA, 1028 bp, Homo sapiens
gcttgctgagaatgatggtttccagcttcgtccatgtccctacaaagtagttttgtttttaaaagaacattccctctgaaatactcattaattttcttttacagtcagtgattagagattttgccaaaatgtttttcaatgtctttgctcatcattgcatattgcattccactaattgtctttcctccttccttaaatatatccttttgtaattattttggtgaagtagttacatttctgttttcttttgtttggagatatctgtattttgccttcacctttgaataataatttcactacggacaaaattctcaatggatacttatggttccccagcacttcgaagatattatttcattatcatctggtttctgtggatgcttttgagaaggcagctgccagatatacttctgtttatttgcaggtaattgaccttttcctctctggttgctttaagttcttttatttaacaatgatgcttctggatttgaaattttccttcctccccctccccactccccaccgccttgcttcctttcttttcctttctgttctttttgttttctcttctttctctcctctcttctcttcttcttttcttttccacattttttttggcatctctctttctcagatattattctagataaactttaggatatttacccttccaaaaaatctacagagaatttaaaatttgactggaatttcacttgactgttaattaattagggacaaatttgtaactttagtatgtttaatatttctatttagaaacgtgctatttctatccatttaataatgtctgcctatgaattgcatgtttatttatcaaatcgtgttgcataattcttgttaaatgaacttacaggtttgccagatttttgtttctgttttgaagaactatttcattttttaaattccacattttctatttggtcattgctgcattaaagaaacctattgacttctgtatttttttgtgtctggataggtttgattctacatagtatgcagggaagtagcat

SEQ ID NO: 123662 - DNA, 1052 bp, Homo sapiens
gtgaagagaattttttttttttttttttttttgagaatgaaatgtttcccatcgtagtgatcttatccacgttctcccacatatggggcatattagccggatgtcttttggcacaattgttacacgtttggcatagacagcacacaagttaatgtcttcagcaaggcatcgcttgactcctgcaaagcaccaatagttgcggtctggaagcgcagatctgttttaaagtcctgagcaatttctcacaccagatgctgggaaggaagtttgtgaaacaggaattcctggacttcagatgacgtctgatttcccggagtgccacagtaccggacctgggacgatgaggttccttcacccctccggtagagggcgcactctgcgagcggcttttgcagccagtggcttcctgggcgctttacatcggtggccttgtgggcagtccgctttgtgggagagcaggtgtggagacctcctggctctagccccatctccttcatggagtgcacagaggtagaggaggcactggtattagcgaaggtggggcgagagaggctccttttgcagttttaattaagcattttatatgattccattttctttcctttttctgcatatcaattataccttttttaaaaaattgggttgcctggccgggcgcggtggctcatgcttgtaatcccagcactttgggaggccgaggcgggtggatcacgaggtcaggagatggagaccacggtgaaaccccatctctactaaaaatacaaaaaaaattggtcgggcgtggtggcgggcgcctgtagtcccagctactagagaggctgaggcaggagaatggcgtgaacctgggaggtggagcttgcagtgagccgagatcgcgccactgcactccagcctgggcgacagagccagactccatgtcaaaaaaaaaaaaaaaaaatttggttgcctgagagctcacaatgtacgtatacaattaatctaagttcactttcaaataacactatattgcatcaggagtaatgcaaatatctttttaaaaatttatttatgta

SEQ ID NO: 123663 - DNA, 1025 bp, Homo sapiens
gcacccgccccaaagagaatgtttacataactctttttgaaggcaccttaaacacgtatgtaggtttgtcagtgtatttccaaaggaatatgtccacgtattcccaaaggagcatttttcttacatgcacttggatgtcctctgtggagtatgtacagtggtgttttctgcgccaactttcacatgaacatttaactcttggtgccagaacagcgacagctatgggttagctcgtatcttcataaatctatatgacacctttcatcatgtttcagagcttcgtgtgcacagttaaccctctcgatatacattcatttcaaagagatgtggaacgaaactaaaatattatagacattatatttaataaatataacttcaataataatataaaacagtcaactctagtcctaatgtagaaatgttccatactttgttctcttaaaaattggtgtctattaacattttataatgtttttaatatttgcattgttattaatgttttcaatatgtgcattgtcccctagtaacattttaaaaagcaagacttcttaaccttaggcaatgacccacttgtactagtgtggactcagttttcattgagagaaagcatttaaaacctggcagaaacaatacttacggttttggtagagtatagttttccaaaattatttcattcttcagctttccataaaaactattttagttcatttccactgcagcagtggttatttgtttgaccaagtgtaaatatgttacatgactaaatagaaaaggattgatgggaaaactggtgactaattggggtcggggggagggaatcaggtgcacacccaagggtcattatagagtgtagaaacaacaaattgcaattctacgcaaacaactggaaaacgggatatatcatcgtgtgttagagagaataacagaaccataagatgaattcgtgccaaatcattcatcagtttttgccaagagaatactacatctttgttagtgtgcctttttgacattttttcctggatttt

SEQ ID NO: 123664 - DNA, 1924 bp, Homo sapiens
ctgaatttaacaaataatcttgtgaatcctaggctgaacactgctgtccactgctttcagatctttagttattggagttttgcttttaaggataatagatttttctattcttaatagaaaacttgtgatttcaacttgtttttgattcacacgaggaaaaacattatagagaagaatcatggaaataaacccacgtaattaattttaaaaaggtttgctttgtcagcctgcttttaaaggagcagtttaaaattcacatcttcgtaaactagagacgaatgaagttagaggcagatgtaggaccatgttactttagagtatttttttcttaatggtaccaatcattttcagtattttgttttcttgtaatgagaatgaatccattatgtccctatgacccttgggaataggctttttttttttttttttttttttttttttgttgaggttgggggaaatatggacatgcgacctagattcaggaatttcttttaagtaccttaccgtgtaacatgtggaatgtgtcttttttacaatccttttttttcttttctttttggaagttagtattatttagtattagttgttgtaattatactaagaaacagtcatttgtccaaaatattaaattactgcctgactgtaggtcatgaaatgctattaaatcacattgttaaatgatgaaatattttggcttttaatatgtttttagtttcatttttgatttcaggaaatagtttctattgggtggcaaatgttttcgtaattgggacaaaacgtgtatatattataggagaagggtctttttaaaaagtgaaataagccatttgacgattcagtttattactagatttttgtaagatgagtattcagatggagcagtctcaaaaggaatattgaggtctactcacgcacataggttttatgatgtccacatttctactgaattccataaatgcagttttaacttttagttttataaaacgtagtacaatgtattaagaaaagggccttatttaccattagaagaaaagtgattagctagcatgcgaagcaggaagctacaaactggttcctgattaccttaaaatgtgtgtgagatacattatttgataaaatcactcccagttaaattttagggtgtctgatattttaaatcttgtaaacaaatttttgtggcctaaatttatatatttgccaaagtatggatggctgtgtatagttagaaaaggtggacttagtaactgtggctaatggaaagggcctatcatttaaaaaacaggaaaagaaaatataacaaatgtctgcagttttgttttctgaatcatctgggatgaaattatgcatggcttaaaatcgttttcattgggagtcctgatttttgtggtacatacttttgacaatattttggtagttttttttttttagtggtagccactctttaagacagctatcacttaggtttatgtttatattaatactacatcagtaagtatatgctagggactagcacatccttaccttgaatctataatgaggaaccttaacccctctttgctttggctctgcttgtctatatttagtcatgaatttttggcaaggctttttatacttgttccatttttctcaatgtcatagtgtatcagaagtgtgttatggatgtggaaataatgcagatcacacttggacacttttactaatatacttaacctctgaatgtcattttcctttactgaaattgaagaaaataacgtctttattctgatatttaaaaaaaaaaaacattaattctgatttgagaactgattttaaaaatgtaagacaatgtagaggaagacttaatataagctcatttgatcgttttattagacacagataccttttaaagagaataggtgtaatagaatgcggttgagttttcagt

SEQ ID NO: 123665 - DNA, 1984 bp, Homo sapiens
ttgtattttctcatgaataaggaattaaaatgagttagaggcaattctctattagttaatttaacaagttacttagcagcctatcggtctttcagagcaaataggtttatatttgaagcttagttctaatccataccatggcagttttcaaatttcctgatatgtttttaccttgtccagtgttaggaaaagtaagttattgagcaattctaaaatgtttactgtagtttgcctgttttttaagcagtcatatttttaactggtgaggaaataaattcagaagatttataattgaagaatttaattttcctaccatcagtaaacatttagtgacgttggtgtaggggcactgtaccacagaagtagatatccagaaaatatttgtaaattgttaaacattgtattaattgttgagcatagagtgatgtccttagattactgagtaaacagtggtgattaaattaattaagatagtttgtggggtgtttaaattttacttagtattccatttaattagaaatacagacaataactctggcctcataagcaatctgaattttgagttgaaggaaatgggtgtctggcagacaatttccaaattggtaaaatggatcttttgcttctactttattttcttcatgtattaaacaagtatttattattgttgactgttggaaaattttaaaaattacagtcatactttttatgactttgctgggtgtggaaatcatccctttccccccatcttagtgccaactgcctttaacctgaattggctgatgcagaacgcatttcaggaaggcgccatgcatacaggaggcagagacatgccctctgcaatcctgacttttcctctttcacccatgtctattgtatatggcaagactctgtccttcctcctccactctgatattggtcggagacacaagcacttagaagcaccagtgttttattctacaattaattactgaagagggaaattgaaaggtaagcagttttgtgttttatcttttattatgcattaagtttctgtaattttccatattgctatattattagtgagaaagagaagaatagagaaagatggagaagatgaattttatttaagacagttatatttggataacttaaaagaatatgcttttttagtctaaataccctttcccagtctaagtagtttcatgcttcatggaaaaactaatgcaaagaagttgtaatcagctgttaagatatttgagccagctggctgtcaatatgttgaagttttattcttggtgcatccacaaattccatataaatgtattttatgaagaggaaggtgtactagcatggctaaactggtaaagctgaaatctggatttgatttgcatatgtggtatttttcagggactctcaaactttcacacatgaaataaacgaggtaatgtgtatggcatcacatgatcaaaatatttttccccttgctgctgccagagctatctattgcttttcaacagtctcacttgttgggcatcatgccaagatgtttaagacaaccccttacgtgagctgttccattcttaacctctttgactgaagtgccgtgaccttcacatatgtagattagccatgtgctctgtgaattgaaacttgctgcctcaggaagaaaagggtttttctttttattccactgggaatttgacggccattcatccctgacctgggcagaggtaatgcaaggaaattggattcaaacggaacacggacagataacacagggaggcagtcagcgtgtacaggcaggcaagctttctacctggtccagggtgaaaatacccaccgtctgttcacaatgtgctgatgtgcaggatccgaagagcaactgacagatggagatagagagataaatgtaggaattctggaaccgtgtccttttaaaaaaggacattgttattatgggcattgctaattcgttttgactctcctctttctcttcctttccaaa

SEQ ID NO: 123666 - DNA, 1032 bp, Homo sapiens
gccatgttacatgatggtaccaggagtcagccctgaggcagatgaactccaaagcctgtgctgccctcgctccttgttgagggtggagaatatttcactacctttgtagactgaggggaagattatttacaaatatttccagaagattagttttgtaatatattgaactaccagtatattttggatgcctttgatctctttggtaaactggattgtcaccttgatgtagtgagtcagctggcttggtggaggcatctctgagtgtctggagaaacttcatagagattattgcatttggggagttagttttggtcattgccacttgtgtggcgaaaatcttgggttaaagcatggtcagcatgagtaaatgttgttaattgtacattttctctttaccccctctgaaaccttatgtttgagagctgtcattcaggattggatactaaaaaacttggcagttgtgaaatagttttctctctgtgtgtataggttattctctgatgttaaaatggctaatgctgcacaggtgtgtatttcctaccatatatttataaaaaaaccactctttaaatttcaactcgtgtacatgtcccatctcaagtctcaagtattacagactgtaggtcagattccctcatgatatgtggaacctcaaagggaaatcaattgttttgctgttgtagtgaaatactaagtattgaataattaataatataaaataattcatcaaataatttctaggtgccaagcactgtgctaagaactctatatgcattttctgtgaggtaggttctattactgtactcatttgaggcacacatctagcgagtggcacagctgcagtttgcactcaggcattctgaccccattgccttttcatatatgctgtattgcctctcaggagggactggaatgagtagagttggacaagtggtctgaatttacattgtgaaaggtggcgttatgatagattttttttattgcttgcttgcgcattcacatcagttgatatatatatatttggacacggag

SEQ ID NO: 123667 - DNA, 1047 bp, Homo sapiens
aattctctgcctcagccttctgagtagctaggattataggtgcccgccaccaggtctgggtaattttttgtatttttagtagggacggggtttcatcatcttggctgggctggtcttgaaactcctgacttcatgatcacccacctcgccctcccaaagtgctgggattacaggtgtgagccaccgcacccggcctcatcattgtttttgaaactatctttgatagtacaaatgtattgcagttatctaaactttaaaaataatgaaaaaccattaaaaccacattataaacaaggaaagattttttcctctgcttgaagcatctatccaggttctgccatattgtctaaggatggtaagagcagggtggggtctgtgtttttgctttttttttagtagtagagaaaaggctgtttggaaccaaacatgtggaaggctgttttacttcactttgttttatatccactgaaaataaatgtaagtttagttagtgttttttttcttccacgatgtttgaaggaaagtccttgatttctgtctgtgttgcagtttgaactttaacctgtggcctggtagttgaaatggattgtgcattttggtgtggaaaaaaaatcgaattgctttctcgaaattgactaaaatgttttaactcttcatagcaaatgaggcgtgaaacaaattgtcaaaagcatggagacaaaattattgcagtactgaatgtttaactggttggtgctgttctatcgaaggtgtgagccaagcagataaatgtgtaaacggcacctttctccttctctcctacccaatttttcacagcttgtcttcacgaggagacctccatctatgtcagaaaaatcacagcccttctgaaagtgttagattatagtgttgctatgaggaataattaggaagtcctgtaggctatggattagaagaaataaacttcctgtttgcaaacattttatttcacatcatcattagatgaagcaaaaatacattttttagtgtctctgaaagcttgatgatatgtaaaggatgttagttatt

SEQ ID NO: 123668 - DNA, 1079 bp, Homo sapiens
ttgttcgcattggttgtgctgtgtgtaaatcacctatagtgtgccgagggcacaggaggtgctcattaaatgttgtctgttgttgctgtatttgtgccttgatatttctgcatctctctctctctcttatttgaaacagggtcttcctttgtcgctcaggctggtgtgtggtggcatgatcacagctcattgcagcctcaacctcccaggctcaagtgatcctctgtcctcagcctcatgagtagctgggactacaggcatgtgccaccacacctggctaatttttgtattttttggttttgctatgttgcccaggctgatttctttttttaattattatctaccttaaatgaagaattccccatgaatccttccatttcttcaagaaagaagtggttactctcccctgaactcataggacagtggcatttataagcctctgtcctatagtatttataagcttatttttgcagtgtattatttgtatacatcttttgtttcttctgtttcttaaagtcaaggaccttcttatacctctgcttatctttttcatagtgccttgtacattaatattttttcagtttaaacaatgttgaatgaacaaataaatgaatgggcatggcctctgaggtaatgtgtttcctctttcatctaaatctttgtttctcaatcctttctaactcatgccttcttttgaaaatgtaagtttccttacaccccttccacctttcagtatctcctcccaaaagaccaggcccgcagcccccatctcccttgatgggacaagctcgacttttcctacagatcctcaacagttgagattattttatcaagctccactttcatgtggtatgttataaaaaaaaaaaaaaaagctttcctcctttcttttccaaatagaaaattataatcctgggtgtgtgtgtgtgtgtgtgtgtgtgtgtgtgtgtgtgtgtgtgtatgtatatacatacgtatgtatatacatatatatacacatacgtatgtatatacatatatatatacacatacgtatgtatatacatatatatatacacacatacgtatgtatatacata

SEQ ID NO: 123669 - DNA, 1477 bp, Homo sapiens
gcctgggtaacagtgaaaatggaatgcatttttacatttttatgtcatcctggttcatgttttcctgtgttctgctttaaaaaacattgcccaggcaggtttgagttcaaccaagttaagtaagttttttctatataggacattttagacttttctcatgttaatatatgttatgaatcttgaagaatggtgtgcgctttatacacatttaccattcttaattacaataacatctattcatatactttgggaaatactgtttttagaatactagaaatagtgacattatagtatggaaattaaaaaatgcctatgtttggagcattatagtttgaattcagaagtcacttggaataggagatggatgtctttccagcagtcacataccaaacatttattaaatgcctgttataagtcagacagcatatcgattttcataattttattacttatacttgacacagctaggaagacagtacaatattgtttagaaaaggatggcttggagagaggtaagggttaaaagatgcacttgggtttctttaattttgtttttttattaaagaaataatagcaataatggttgtccattgggtgtcagaagttggggctataaggaaaattagggtgaggaaaaaacatatctggccttaaagaacttactgtctgataaaggaggcagagataaacaatgagttgcagttgatggtgataaattgagtatctgttaaataagagagctgtggggaacggtggagccttgtgaaggcaggctgctggactcactggtatttccccaggctggaagtgcgtcttccgtttacagggcagccacagctgtgctgggtacagagtgttctagaaatgggtttggagttgtgtgctcaggcatcggcttggtggtgcataagagggctgtccaggtacagggcgggctgaggcctgataggtcgctgggcctgtcaccttgaggctaaccttgtttgtttgaatttgtccttctggagtttggatttttcggacccctttatgtcctctttcttacttttgatcttcaaggaagtttattgataagatttctgatcaaagaatggggcagaaaggagaagtgtctctaacagtccacattctttttgataccacagcataatcagaaggtctggcagggagggagaagggaagattctagaattatcgcacgttagaacaataaggaacttcatcccatttgccctttaattaaaaaaaaaaaagaaaaaaaaaggccgggcatggtgccttacacctgtaattccagcactttgggaggctgaggtgggtggatcacctgaggtcaagagttcagaccagcctgggcaaaaccctgtctctactaaaaatacaaaaaaaaattagccaggcgtggtgggcaggagaatcacttgaatccgggaggtggagattgcagtgatctgagattgcatcactgcactccagc

SEQ ID NO: 123670 - DNA, 1153 bp, Homo sapiens
tttgcggttgaaggaattgggctgaaaaaagtagtaaaatatgatatgcataaagatgtatctaataaactgtgttcttaatttgatatttaggagcaaatacaattagatatcttttactataaatgcatgtgtagggatactctgaaagcctgataacagagtatctaaatataaaaaggataaagtatatttaaagtatactaaaagtatataagcaagttgtcctttaacttggatcatcttgaaaaggacagttggattcccagcccagcctctgaaagcctatctgacatgtaatatagctgaattgtgctacccaatatgcttagaagaatctatatacaaacatttcttaaaaatagacaatgtatttcttccttagagagagagagaataactcctacttacatgtacatccaaaagtttactttgaataaggaggaggaaagtcttatcaagtaaaaaaattgcattaaaagccaagtaactaaaaccagactggttaggttaagagctctttgaaaatggtggtgtatatattgtggccttcacagcacttgtcttattttctggaattgaaactcaagctacagcagttgtggaatgccatctagaaatgaaaacatgctcggacaatctatttagagaagttgttgagggctgttttcgatgtggatgataaccctgatagagcataaactttcagtgagaaatgaaaatggtcatacccggatagatgttaaaaaaacataaaattggccaggcgcagcggctcacgcctgtaatcccagcactttgggaggtcgaggcaggcgaatcacttgaggtcaggagttcgagaccagccttgccaacaaggcaaaatcctgtctctacaaaaaatacaaaaataagctgggtgtggtggtatgtgcctgtaatcccagctacttgggaggctgagacatgagaatcacttgaacccgggaggtggaggttgcagtgagctgagattgtgccactgcactccagtctgggtgacagagcgagaccctgtctcagaaaacaaaacaaaacaaaaaacataaaattgcttcaggttagatgtgcgtatgagaagcagcttggcccttttgttttccagaagtcttagatttgatttttttttttt

SEQ ID NO: 123671 - DNA, 1061 bp, Homo sapiens
ggcagacccagtgagacaccctcttctcaccttgccttggtgctttgtcccttcaggacatctgctgtgttgcactgtgacctgtttagtctgtctccttcagtgaatctccaggacatggaggctcgttcatccttctgcttccagtgttgggcacaacgcacatagtaggtgcttagtaaatgtgtggtgaatggattcaccaaatctttaaagtgaacaccagagtattgaggaaggcagagaaggggaaggacccgtgcagccttggagtgggagtgccagtggaagagaggactggcagttctcggggtctgtgctcctgccttccatcttcacctcccctccgtccctcctcttccagcctcagccctcacctctgcagcgagactgtccttgccgagcacagcagtggcctccttgtcaagtatagcagaagcctttacccttcacctgactgcattcctgggctgcatttggcacacctgtttcgttgctacacctgactcccttccctcctgtaagagcacactctccagagtgtctacattttctggccattcttccagcttgtctgtgggttcattttcccttttcccttaagcggtgatattctctaggattctgttcgctacccattgttttcctttcatatattcctcctaaataaagttcatgggttttattgcttcctattgattaattcatcaattaatgtgctgggtacactgttcaacttatgccctggagatataatagtgaataaaatagagaaaatccctgccctctgggagtggatgtcctctctgctgacttctctacctatttttccaggtcaggccttactccccaagctgcagctcattatgtctcttccttctgggcattttcacctggatttcatatcagagcctcaagtttcctatgtaaaccactgaaggctcccactcctggggatatggtgattggcttctccctctgcacactccatctcatttggctgctggcttccatcactcatttggtctccaaatcctgccgcatttcccttctaactgtgc

SEQ ID NO: 123672 - DNA, 1014 bp, Homo sapiens
caccatgttggtcaggctggtctcaaattcctgacctcaactgatctgcccgtcttggcctcccaaagtgctgggattacaggcatgagtcaccatgcccggcctctttttttttttttttttcaagagacagggtcccactgtgttacccagactggagtggagtggtgtgatcatagctcactgcagcctcgaactcctggggtcaagtgatcttcttgccttagcctgaacagctcggactataggtgcctgccaccacgcctggctaagtttttaatttgttgtagagacagggtcttgtgatgttgccaggatggtcttgaatttaccctgctaattcttaagccttcctgaaagtccccatgtacttacctcagtgtgaacgcagcatctggcacacagttgggatcagtatgtggttttggaaggacagaggagggaaggaaggagctgctgggtgaatgctgcctgctactgtagcaccgggtgagggcctttctacctattgctttgttcctttgacgtcccaggacatgaagggctgaggctccacgcctagccctcctgtatgacctcggccctgaagcccagggcctgactcaccaaaccaaaaataaaattcaacatctacttgtgaactggttgtgtttggtaagatgctgacttacatggggagaggtgctgtgactcatagtctgagtgctcatccctacacactgctggtctctgaacaaaatctttaccctggacatatgcatgatctaaaatctatcttttcactttttaatgaacactcggttgcactaaggtttgatcaagacttgcagactcagttctaaaataaaatcattgttctaagaatactttgaaggcagaaaatgttaatcactcaataccctctgctcttattactagtaagctaaaaggaggtgggtgagcttaactatcatgctcttttcctgtacgcataatagaattttagatgcaaatgttttctctctgcttatggtc

SEQ ID NO: 123673 - DNA, 1052 bp, Homo sapiens
tttattaactggaactagatttgtggtctttcacttgccagttctcccacatcatcaggcaaatacatggctaaacagattagttttgcacggtgccctaaaaactagtctacttgggtttttgttgagttcaggggggaaatgaattttctatgcctctgtggagaatattctgcctccaggcttctggaattcagacatggggttggttaacagaagtacattggttgatttcatctattagacagctacacagaagaggcataatttttaaggttactagaatctgactctgagtttttcagattaaaaaaaaaacaaaccttaaagacaccaagatattctttgctggatcaggaatgcaggttttgtttcatttttcttatccttcgtgatcataaatgtacacctaggcctttaccaacttgttttaaataagattttaatataaaacggcacccaggagaaatagcttacagaagctgagttatttatttgtgtcaagcagatttcaattatgtagactgagatttttcctgagtttttttttgtaattgggttgatattttaactattcttgcaggtgtttgataatatgatgcctgttggaattataaaacagggcaaaaggaaaaaaagcaaaatgagagattgaagttcatgagtgcttttatgatgggaaaacatgacttttttagtttttaaaggcatacatgtattgcgaagaactttatagcaggaacatagaatatgatcattgttttgaaatagaaaatggcaaaattaaatataaactaattatttttgttaaggtgattcatctgaacttattacttcatattgaagtaaaaacaattcaaaacaggtttccttgaagagggcttgaaaaagatttgtattctaattttgctgcatgttttttgagtaaaatatttatttcagaacataagcattttatttggtaccctcttaacagccaaaacacttcttccaatgcaaatgtttattttggcagcagatgtttctaaaaaggagacaaacattacaattgt

SEQ ID NO: 123674 - DNA, 1962 bp, Homo sapiens
ccaaagaaacattaagcatggtatttatgttaaaacgttaataattcaaataaaggtaacagtcgacgtcagtaaaatgaaccaaccatatcccttcagcgctccttggaaaacaaacactgaacaacaacggaaatcccacaagataaatggaaagttaaagtgattaagtgacgtatcttagacaagtggttctcaaactttgctgaatgttagagtctcccggggcattaagaaaatccccccacggatgcccaaggatgcccatatcaatgacacctgactgtgaaggccctaatctcccgtgactgccctgtgagtcagggtattagagggaggctacgtgggcaagcgggggcagctcacaccttctggagacttggtagtgatgctggttcttggcccactcggtgaatcagaaactcaccactgacccaaaggaatgaaatgggcccagaaccaggagctgggatggttgagtccttgcctgttaaagtctaatctgtgtgtgatactgggaaaatctggatctcactgtgctcctctgccagatgagggggttggactataagacctctcagcttggatttcccctttaaagtaatattaagtgaatgtcttttcatttcagtattagatttttgtttgtttgtttgacatggggtcctgctgtgtcacccaggatggagtgcagtggcacgatcacggctcactgcagccttgacctcctgggctcaggtgattctctcacctcagcctcctgagtagctgggactacaggtacatgccaccacacccagctaatttttaatatttttgtagagacagggttttgccatgtagcccaggctggttttgaacttcaggactcaagcgatccacttgccttggcctccaaagtgctaggattacaggcatgagccaccatacccagcctcagcattagattttaaagtcttgttatttcagcagtcttgtgaaatgtatgggttgatgcttgacaaattgtattaagataactactgacccacattctttttaaaagagaaagaggtgtttctttcttcttcaaagattagcaaattgttggtatcagtctaataaattattttctaattcttaattttattgttttttaaatgaatgtattctcatgtaagtctttgttctgcaagaacctggtatgtgttagatgtgtagagtgcagtctgtcctttttgataagtagaaaatcttaaggttgacattcttggaatcacaaaaggaagcaaagagagatctagcaattactcatttttaagacattgctactttctaagtagttctgaaaacaagtatatattgaacaacattgggacagattatataaagtgaagtccggatggaaacacgtttcaagatttatgttctgtgcattaccttaactctttaactctcatgaggtaggctagatggctttgtttttgtattttaaaaaggttttttttctaaaggtaaaaagtttttcttttatgttaatagccagccaatagttaaattcttaatggcaaaaaattctttatggcagtttgattatttttacatgtaataaatttattaaagctatttgcccttattataattttgaaaaggaactttaaaagttaaatctgtagttgtgaatgaaattaagaaaactcttaagctgagagggtgcagaggaagaagatgggtgggagcatgtgaggcaagtaggggattataaagaagcagcagctttataatctggctctcctccgcagagccagagagccttgcttaatccaggcttcctcaggcctcgagagcaactctgcagttggactcaagtttagaaatgtttgggacgtcctggatttgagatctgaatgtgggtagtgtgcgtgtataacacaaacatcccttgcctgcttaaatagccccaatccaaaattttggtcacta

SEQ ID NO: 123675 - DNA, 1029 bp, Homo sapiens
ctgaaagcaagagctcttaaaacgctctaagtcaccgaagcctgtcggtgggaatgggaggatgggggagggatagcattaggagaaatacctaatgtaaatgatgagttgatgggtgcagcaaaccaacatggcacatgtatacctatgtaacaaacctgcatgttgtacacaggtaccctagaacttaaagtataataataataataataataataaacaaaaaaaaccgctctaagtaaggattagatgtttctttataatcagtatcataatcattgtttccaaagagaactgggaaaaggtaaagcccagaataattattggcctatgggatctgtgacctcagatactctcttaaaagggtcagccaacaaggaggcttccctttttttcaattagtatattaccttgagatttccagtaggatcttcaggcatcccaatagtcattttccagacatcttaaggatttacatctctggaggttctcctcagtgtcctgggcttcatggagaaatagggcctgccttcttttcttcctacttgtgggtcctgtgccattcgttaggggtcatggagatgacaaggtcttactcttcagtaattggccaaaatttgatggttagtgtcttagtttcttttctgttgctgtaaaaaaaatcacagactgggtaatttataaagaaaggaaatttatttcttatagttctgaaggctgagaagttcaaaggcatggtgttggcctctggtgagggccttttgctgcttcacaacgtggtggaaggcatcacagggtgagagggtagtagcgtgctggctcagatctctcttcctcttcttataaagccttgagtcccattgtagggaacctcattctgatgaccttatctaattaattcctgaagtccctacctccagtcaacatatgaatttggagattaaattttcaacacatgaaatttaggggatacattcaaatcactgagcagttggggagaggaggaaagactagaatccccttcagctg

SEQ ID NO: 123676 - DNA, 1052 bp, Homo sapiens
acatggttatgagcatagaatcaagctttctccccttcttgcttccaaattttcctttcatctttgttctgctttggtgcttcgatggatcagttcagaaagccacagggctgccgcttacaggctggctggatcttgtttgattttttgttttgttttgtttaagaagagaaactgtttcttcatacttggagcaagcgctcaggcttccagagtgaagaaaattcctactctgtctgtgtatccagagaggatggaagtgcagtatgtctctaaacattgttttgataagtagactttttaaaattggtatatgatttctattaaccttactttcttctgtatcagagtgcatcatgcaattatagcacctctatggcagttaagtttatatataaagaattaacattttgctttgcagtctacattgctggtgacttttgcctttggaaataggaacttgccaaaaatctaaagtaatgttcaggcaatatactcaacactctgagtgtttgttctggtgtgtttaacctggtgaaggatgatagggaaataagtaaagaagtgaagttttgaataaaaactgactgccttgccctgtatttccttttccctctatcatctttccatattataacttttggttaaatcaactttcagtgtttatgttaatgtaactataaaataactgtctgtagttgagtcatggactgcaagtatatttccttactgtacaactttctgttatccaggagttgataactgcccattattttacgttttaagaaatgtatacatcaccagtttatcctcaagctctgatagaacggtgcacttcctctcaagatggtggaacccattagttacttagactctgagtgaacaatttttcatgttcatggatgaccatcatcttttgaatagccttcccgtgtctggggagatgtccacatgtaaaaagctctgtctccgtaatttaggagacatcttcagccggggatgcattcaggtggcttaagttcttttaattagaccagccatactggactttt

SEQ ID NO: 123677 - DNA, 1051 bp, Homo sapiens
ggattaaaaatgcatgaaagcacctttttgacaccgggctttctgaaacccagtgctgtctttttttgtaatactcctgtggatgtttttgcacaaagtggcacctgttagagctggaagtgttcttgcacggctgtctttgatctagtagccctggacaactttaagcacatagttactagatgcaggcccgcccagccccgggagagcatatctggcttgcacgtatttaaggtgatgtgcagaagagaactggaccaattgacaggctgcactgtacacaattactgtgtttcccatttgaattatcacttcatttctgaaaatggaaaagatgggacggaatgataggaagttttgagaatgctacaatatatgattaaattggagactctttttgactggacaatatgaatctgtatttttattattgcattttgggtgattttggacgccagtattcttatttaggattgaattctcacatgaaattgtgtaaatatttttctttttgaggacctatttctaaaattaagcggcttttttgaatttgtattttgaattcctaattttgtaggctatgccacttttaagacataagtgcctaaaaggatgaaaagtaatagaaagtagaatggggaagtggaaacactggaatcaccccttgcactgaacgcatagtaatttttaatgatcacagagtggctcttcgttgtaattagtgtaatttctcaaacaagcatttaatgtataggcagtttaagcatttttttctttctgaaaatatgttagactaatattctttcagaatttcttctgggaagaaagaattgtctatttaaattttactaaggttaccttttgaagaccactaacctggttgaagcagttaaacttgctatccgttctttgaaaccacattgagtgagaaaattaaaaaggaaaatggcttaaatattttccccttgacaggagaaatgataagtatttactgtaaagtgtccagataatgtaaaggaatatgaaagtcacaaaaattcccccatcatct

SEQ ID NO: 123678 - DNA, 1186 bp, Homo sapiens
gataacaagtggttgtatgaagggaacgaggtgcttcattaatctttgaaccttgcgtatttgtcccgtatttattaacagcattgggcagtgtttttgaatgttctgtgtggttatattatttattaccgtgggggaatgagccaggtctggctctttgaacactgctaatttacatgaagaaaatgtccccaaggaggagacttaactagggaaagactcagttaccttggcctctctctgtgtgtgccagagcccccctgcaagcactaggggctgcttctagaaaggggacccagatcttaagacttcgaggaggaagataccctatttgttctccaagaccattcagtcgtgaagggttcaacttgttccgggttatttatttagcattctctattttctgctttgcttttgacactccaatgtttaattgtatatttaggaaataacaatgaagagtacgtttttaaaaagaagaatgttttctggaagggatttccccccacttttggacagtgagttagactccttctgaagcctctggatctaggttattacagggtttgtcttcttgaagctggaactgtccaactgttgtgctatttcagacctggcctgtctttcactttcaagctccagaaataatttatagctgtagggtgtcaggagtgggtttgaactgggcctgcccaacgtaacatggaattgtgcacagattgttaaaattactatttctgcattcaaatgactaagtacagtaaactttttactggcacagttaatttatttgaatatttattggtcgagtgcttcacgtagaagactaacataatgaaaaagcccagcacatactcagagctgatttggctttttaaaagattctaggcttgaatatagctagctaaatggtctttagcaaattgactggcagtaaattgatccctgtggactgtggcttgaatcagcctctcattctttaaaggtattatggagatattgttatctcagcgcaaggctggtctagaaaagggatgctttcagtacaaatacttgttacttacatatttccttcctaactgggtaaagttatatttctattctttacctctcgcaagagcatatagggacttcgaatcagaatattttgttcaattgtaatagccttcacaaatttagtttgttt

SEQ ID NO: 123679 - DNA, 1637 bp, Homo sapiens
tattgaaatgtgttgtgagactagatgaaagtctatgtaaaaatgaatttgaaatatttggatatattctttaaaacaatcttattgtgtgtttttattcagagccctagagttgtcctgaggatgagtattttcccaccgcgggcatgaaaatggatcctaatggtagacccagtcctctagggtggtcagtttgaggcccaagcttcctttccagggaggcagtggcttaacctgggtcaccctgtaggagcagtagctggaggctgcaggacaggtgcttttttctcctcccacgtgtgctttttgtggtggaagagggggcaaggtgtagaaatgtctgactctgattcctccatctgccagcacagcttctcttgttctctgtggtctcacctttatggcacagtactctttcctatttgtctttgagctctgaggctcagccctaacctcgaagagatggcttctgcatctgtcagatgggtctcatagtattacctgcctccatacgttttgtttttagttttgttttaagataaggccttgttctgttgcccggactggagtacagtggcacgaccacggctcactgcagcctaggactcctgtgttcaagtgatcctcccacctcagcctcctgaggagctgggaccacaggcatgtaccaccatgctggctaatttcattttttgtggagatggggtctcactatgttgcccagtctggtctcgaactcctgggctccagtgatcccccactttggcttctcacagtgctgggattacaggtatgagccacactgtgcccagccctccataaatttttgtgaggttaaatgaggtgatacttgtaaataatttaatgttttcactcactaaaaaacaaactttttttggtgagaacgttatgaatgttttcataaaacatgtcgttcttcagggagttgtgaattgtgacattaacaatttccttttatcaaccaaagctagctactagtacctgttcctaccccctcctctttctgtttttctggcagggggcactaaggaacgaacggaattgccagggtgagctggaatgagcttgaaaggctgttttccttggttttgagtgattattgacttgtacttggggactttctgtggaattcagaaaattaaggtttcttatgacccataacctgaggcagttcaggaagccctttggggctgtgaagcaggggtaggggcttgtcctggagcagagcacggaagattcaggtgtctgcttggttcctccaggctctgggatgttaagcttattaaatagcctctctagacccagggaacatgttgggtcagctttcaaaattgacaaaattgtctcaggactgaggaagtgtggcctgttccacagtgcttacagcctgctgctgtaaaccgtcgcggtgtgcccccgcacccatcccggccatcctgccacgcggaattgtgtccacctctagataccagctaacactgtgctatttgcttgttgtgtttgaatatatagggcacagatgaaacagtgaaagatttaggaaggttttattgagagttcatttcttttgcaaaaatgttacagcacattaactgctgtaattaccataaataatt

SEQ ID NO: 123680 - DNA, 1192 bp, Homo sapiens
tacttgatgtttagattttagttctttaaaaaaaaaaattctagtgtttacaggtgtgctgtagtgcacctgtgtaaaggaaacttaaagttgaattattttataatttatacaccagccttttatacagagcaatgcttatggcagcttctttctctgtgttaactggtattaaagcttttctagattaaaagccgtaggttgcaaaacatggttttttgcatgtgcagttatttctttaccactgagttgtccttccaagcctggtctaaatgtgcttgaaaatcaccatctgctccctgcagtttggagagggcacagaaagactaaggtgaaaagctgtcacttctaatgttttcattcagactttcacacccttcttgtctagttacataattgtatgcagcaggagttgtttcaaccatttggtcttgtccttattttgagagagagagagagattaattttaagagagttgggtcacagtactgaggcagatttgagaatctgataaaccatgaaagtgttcagaatggaatcttcctgctcagtcagtttgttagtggataagtccattgcataaatgacatgaatatgaacaaaagcacctatacttatgcatatatctccctttgcagaatatgctttaaattttgcagaatatgcttacaaatttttaatgccgtatgcttagattttactttttgaagtcagtatagcacagagttgatgatataatagtgctttacaattttatttgatgttcagaatttattatagataatatagaggaaggattttgaattgttcacataacttattttttcagtgtcttctttttttttttcttaaaaattgatctattttggttttgattggaatgaatggccacaataggatttgaaaatgaaacaggacagaagcctgttagtgtaaactggcaataatttctaatagtcaggaacaagaagaccattaaatcgtgggatttatgccattgaaaaggtagtaagataaaataagaatattactatactctagaactgtaaattttgatctttctgcgagttaattatctaacatccataccaagctggagacaatagctgactctttcatttacttggaggtgattgtaggagaagaaaaggatttcagtcttcagttggcaaaatgatggttctaacttgca

SEQ ID NO: 123681 - DNA, 1049 bp, Homo sapiens
tggtggtggggaggggggacaggcatgttcttgacaggggaaacagtttatccattgctttataatcctagactggcatggtgtgctgacgaagagtaacctggagaatgtgatagaagtctgggttaagaaactagaccaggccaggcgtggtggttcatgcctctaatcctagcactttgggaggctgatgccggtgaattgctggacacaggatttcgaggaattcgagagcagcctgggcaacatggcaaaaccctgtctctacaaaaaatacaaaaaaattagccaggcatggtggtgctagcctgtggtctcagctactcgggaggctgaggtaggaggattgcctgaaccctggaggcggaggttgcagtgagctgtgattgtactactgcactcaagcctgggtttcagagtgagaccctgtctcaaaaaataaaaaaataaaaaattaataaataaataagaaaccagaccagagacaggttgtgaatgtgaatggtcttatacaccttcccacggaacctgaactttatcatgctgaaatgggagccctttctctttgcttacaaagctttaataaggaggcagctatgaagtctgtactctagaaggctcattgctggtggtatggaaagtgggctagacagggagcctgaaaggaaggtgagtgacaagggagtgaccctgtagaccttgagatgtgcagaagcagtggggccaaaagggaggtaggactgacccaaagggcatttgtgagtttgaagtcaggcaaaggagggtttctgagatgattttccagtgtgcagcgtgggcatccaagtaggtgtcagtatagagttcaaggaatccaggaggaacaggtctaagggaagacagtgacgttgcttttgaacataatttgatttatggtaggtgtcttgaggaaacagaaatgttcagtggacagctggaaatatgggtcaggggagttgtggatggtgaagagagacatttgaggtttgggtctacagttactgtgtggctcagtggttctgttctgggct

SEQ ID NO: 123682 - DNA, 1027 bp, Homo sapiens
ttggttggatgaaagatgaattcttccctgtatgatgctgcacacagcttctgggcattttggatgggtgctgggcctctttgagtccttggcaaaatccatgtgcaaaattggatgtgtggagtgtggagagggaaggagagattccgttacttcttgggcctcactagttcgaacattccgtttccagacttgcaataccatcatctcaaaattgttctttgaaataactaaacaataattttcaacctataacagatgatttgttttgtatccttttttttcttcaagtagaaaatggaaaaattatgtctgtagaacacagtagactggaaatgacttgtgagaactagttttatattttcttaaaactaatcttctccctcatagcaaagccttatgtacttaaagtaattgaatggactgcagggtatactgggaattgtagttttccacttctttgtattctgaagattaataatcttgcagccctctgagtgggataaggagaggatgctctctgacaaattgttatcttgtctttcagaggtgtgcttcgggcagtgagtataccttccatgtctcccctgggctcttggcttgattctaagtaatggtaatatataggatggctttaaaattgtttttggcttatgatattttactttccactagctatctgtaatcttttcttttagcctagtttttaaaaagttgttatttgtatcaaggttatatgtgtaaatggtttacagagtccatgcttgtgtaagctgtgctgtcagtaacagtaggtactgcccgccttagcccatgcccacgtccccagaggcgtccactttcaacccttgtagctgctctttgaggataccttcatgtctagaatcacattcttacattgctccttgaagttttaggctttgtctgttgctgtccccgctggaagatgatgatttagtactcccttctcacttggccctcaccacaagcatgaccctttatcctctctcatcctcctagtgtagac

SEQ ID NO: 123683 - DNA, 1001 bp, Homo sapiens
gagcacccaccctcctgcaccctcagagagtgggcttttgactcgtggtaacaatgcaaccgcataatctcacctcacccccaattctttcatttgaaaaaaaaagaagaaacaatttcaaaggctgtatttaaaacctacacacgaatgagtaatttatatgcatttatcatgcaagtatacgatccccagggtggaaagtggcctgcagtgaatggtctcgctcctcctgttcccctacaaggctccccttccaaattggaagataccagttgcttgtctttttgttgactcttttaaaattctagtcctcttctggtaaatcctattttctgtaccctgtccccaccccatagttatctcaaagagaacagtcttttcaatcaagcattcactgcacatgtcccagtcatgcggttacaaagttgacattgcagcctcagcaaaggttatctctttaaaattttctgaaattcccctttggcacattcattttggcagctgggtttatataggaaagtggtaaagctcttggctcctctttttgtgctttataaaaatagaaatctctggccagaagggcagataagcaagaagctcctctgtaattcccatcacttctgcttcccgagtgttttctgttttacactgtagtaaatggtgtcctcaccatgtgcttgtggaccaagtgggtggtttttagaaacacgaacatactgtagcctgacacttattttaaagtcttattagaaaaccctgctgttctaacatgtgtgtgaagtactgttagactgtgttgacttttgattttgtaatccttttgcattaaaaacaatggaaaatctcaaagatgacattcacgaattcaaaattaccagttacagtctgggcaataatataacaagaaagagggaaaatccaaattgctttgtagtgagatgtactcattactaaataaatgataccacgagtgtgcttttcctgggacagcatttttggga

SEQ ID NO: 123684 - DNA, 1098 bp, Homo sapiens
actgcaaagatgcttgtgtgaaatatagtattagatatcaaatcaaacatatgggtgttgaacggaaggatgtgtgttgtagtggtatatggtattctagcatgtggagttgtattttatggaaattcgttggcttggcttatggcagggacataacattcattatgagatatcaagctgtaaaataaataaaagcaaaaaattcaactgtgctgttaaatggcttgcaatgcagacttttctgctccaacaacttaggctctgtgtgatgagaggcattgtgagccgttatggtcacatttaatctcatcctctttggtagatcttgaaaataatctggattggattgaaagaaatataggaactttaactttttcattttttccccttttaccccattgtatatgttaggaattactgtgctgatttttcttagaggctaaatgttttactcttttcatcttttaccatttcatctttttcctcattcagtatttctatagtggatttgggttttaagtgtgtatctggcactcattaatttcttaagtgtgtgtgcttatggggctcaagttcttgaagttctccagtggaccatattgtggtatgaaacaaaatgactttgccattcttgtctctagagtgctttttgctgtcctgatatcttgtttttcttttcctttcctgctctctcttgaaattacagaaaaaggcaatagatttctcattaagaaaatattcaaaaatactatccatggtatatttattgcatgaggaaggattttcctgtaaacaatgctttcaggcatttttaggctgatgtaaattagagatggagaagattgattgaggccatttttgtctatacctctggtatttgcactgtagtacaccttgctttacattgttacctgttttatcaactaagaaaatgccatccttagcaaaaatagtaaataaaattgataatttaactggtatatatgtgctgtaaatgccgttggtatattctgactttttcattctgaacttagaaacaaacatacacaagaaagcacccaaaccacaggccttctgtaaagtattagtgagttaatt

SEQ ID NO: 123685 - DNA, 1044 bp, Homo sapiens
acacacacacacagatttattataaggaattggctcatatgcttatggagttttgcatttccgaaacctgcagtatgggctggcaggtggtaagccgatggtctgatgaagtcaaagacagcttgctggagaattccttcttgcttaggtggggctggtcttttgattatagttaggacttcaaactaaatggataaggcccacccacattatggaaaacaatctgttattctcagagtctccgttgaaattgttaattccatttacagtaccttccaagatcacatgtaaaatcaaccattgcagctacctttccctgatgccactaaaatcattaactgaatttccttaggtatatggtgtttggggtcattttgggatttctgttattctccattggctcttctatgaatgcattagtattgtactgtttctctattatcttttagtatctgatggggtagtatatcctcattatccttctttttcagttgttggttttctttttccttttgctattcgtatgtgcttattttttcctataaactttttctttttttatcacgctattttctaagaattttatcttttgttattgttataatgggatcttctgtgaaacagggtacttagaaaagaataaagataagacacacagaagcactttacttgaatagctttttcctttttggagcccactgaccaaagatgagaaatatccctgtaataaaaagatgtgtttgtttagcttaggtggctgcaggccagggaggatgcagtcctgaggagccccaggagcactgtggaaagggggaggtggggctgtagtagggttggggtgtgtgttagatgactcttaagagggagtggcatcatgaggaggggtggtcctcaactggctgctctcaagaagctgggggtacttttgtgattaggtattttaatttttatctaggagacaggaggattgaagtggggcagggttgtcattggtaaagaagcaccagccacctcatgcctgtaatcccagcactttgggaggcc

SEQ ID NO: 123686 - DNA, 1032 bp, Homo sapiens
cccttttttaatttactgaaagaatttgtgttgttatctgttctctgaatgtttagtaaaactgtttataaagctataaagggttgtatagctctttatctttaccttttgtcttacccctgatttttcaacttttttagtagagatgttgaggtcttgctctactgcccaggctggtctctaactcttggcctcaagtgatcctcctaccttggcctcccaaagtgctgggattacaggcatgaactactgtgcccagccatttaaaatttttgatttcatttcttttgtcaatataggcatattcaagttaaaaatttcttcttgtgtgagtattgctatatatatattcctatgtataggaatttgtccatttcatataatttttcaactttattaacataaagttcgtaatagcctttattactttaatctctgtaccatccagagttaaggcattttaattcataatggtttttcttcttttattcttgataaaaccatttccaaagtgacttggtctttattgtctgtattgtgtgtccttgtaaacaaacttaatgaaattcttctctcaccttgattacgtcttgctttctactttattgatgtttattttgctgttcttcccccccgcccccactcaagtgaatgcttactttatttgaacattttttgtttgatgaagctaaatatgagactaaaattttttctcttaagtactgctttggctgaatctttcaacttttgatatgtatcatttttgttctcttttagttctaagaaatttcttgtttttctaaattgcttatttttttttgaagacatttttattgaggcctgggtttgcattctgtttcctcagaaggattgattggtctttgcttttgccaggtgcctatgggtaccagttatcttgaacaatgttttgtgtttgattttgtgaaagttttattacaagaagaatatacagatacacagaatgacataatgagcactcctatgccctcacgtagttttaatattaccaat

SEQ ID NO: 123687 - DNA, 1077 bp, Homo sapiens
gtttctcctccccaaaatttgtgccttgacctcttgaaaaacctgggtcaactgtcctgtggaatggctttatctgccagttttctcttgatgtggcttaacttgctcatctgtttcctgtacattgcaagttagatccacaggcttgaagataaacattttatttgcagtcgttgaaaatcatgttcccaacatcttaggcctgcccttgttcacaggatgggtctgtgatcctccttttgagcgaagagcctctaggtggttctagcccccacctttcttgtgaccatcagctacagctgaggctgaagagacattgtgatggacagataaagcttccctttgtaccctctccaaattgctcactaactacattggtgagcacaacacatgctggtgaccctaggccactgagtttggggtggttgttacccgtcatttctgactgacttggtctggatgcttcataggcgatgctgtgcgtttattgtatcagattgagcgtaatgtttggttgtcccacaacagtgaagttaagattaattagagggtttaggtgatgatggtctctggggctgttctaaatgaagtatcttcttgaggttttgtagaccacaccattaagtgttaattttgaccagataccctggtgatggttagcttgtggttgctatttcttaaaggagccacttattcctgctacctctgcatatcaagttcaagacaggtatttctcttttctgtttagtggggttgcaagctcttaaatgatgggtatagcccttcttggtccttaatttaactgagaggtgttgtcttgtattttactcccttttggcaggccctggacttcctctccttttccctgttctcgaatagttgtcaaagggaaagttagaatctatagcaaaagttggcttctattgctctcttggtttctctgttctcggtctgctctctgggtgttcttcatgttactcacatttatggcaagtctgggattcatttaaaaaggattagaaaacgcattttatccagtattttgggtttttcaatcaatagctatttagagcatct

SEQ ID NO: 123688 - DNA, 1045 bp, Homo sapiens
agatcatttagaacatacagataataccttctcattgtttgaatcaaacttttctagtgtctcctttattcttttaaaataaagttcttaggtaatatgagctctccccacacaaaattttaaacaaaattagaataaggcactaactatatatggaaaatgaaaagaaagaagtatataataaagtattgtatgcttaattaaacaaatatttaggcatactactttagaagacttgtgaaatagatgcttgatgtatatgtgtgatcactgtgaacttgacagctacaaaatgagattgatataggaatgttgcattggcaactcagatgtctccagcagggttgtcagtggtgatgtcatcttttgaaatgatgagcaactgttggcaaagttctgagcaaaacaaagtataatcttccctcaatatacgtgatggttttgtttctggaaaatttattatgtcataagatgattttaagaacaccttgttcttccttgcaaaatggagttgggttctagactcagctaaataattagtttttttttttttttttttttgctttgtttttaaatatacccaaactttggcacttttgaaagtagtgtcggctgtggcatggtgatcttttccatcagtcactcttacacattgcaggataatctagcattcctaccctatagccactgtttaaatgcatttctgtgtccttgtgacaactaactactccgttgaaattttgtcactacatgtgttatatatgtccttaattttcctgaaattcatatgtaaagtgagttccctatgtataaaatttcaaacatgagtatgattccctgaatgtaatggaaagaggtaggaaaggacagaaagctgcctataacacatttgtgtttctcttaagtaaatgctcaggcacttctccattagaaggcttgtgagagagtcagaggcttgtgcctgggtctgtgggagccatggactccacaggtgcaaacgaggctgctacagatgtgtgggatgaacagctcaaaaccacgagca

SEQ ID NO: 123689 - DNA, 1066 bp, Homo sapiens
ctgccagcgccaccccagcctgtggtgcccccattccactctactccccagctcccagcccttcccagcccgtggtgcccccattccactctccacttctgagattacctttcctagaggccacatttgagtgagatcatgcggtatgaaacagctcttttcaaagcctccagtgttctgttattcagcctgatgggtgatagtcattccttccatccttcgcctgtcattaggattccatgcagctgacggtatcttcctcctcggagcacctgtcttgcttggttcctgggacgccaccctctcctggctctcttcctactttgtggccgctccttgcctttccttgctagattttctttatctttctggcctccaaatactggcccatgaccagggctcagtgttggcccctctttttttgtggctctacccaccttacctgtatgatttcttttactttcaaagctttacgtatctggagacttgtgactttcatatgtacttttgcaacttggatctgtcttgtcctttctacatctatgtatgtccagctcctgcaggtaatcactaatttgaatgcccaacaggctttggaaaatcaacatatccaaagcgggcctctggccacccagccctttatccacaaacctgccctgtctatattttcccccatcccaacaatatgtatgtcaatccatcctttctgaccctttgaaatctttggctcttctctatcaagcccactttttttttctttttttccaaataatgtgtgtggtttcaccttaagaaaataagatttatgagtggaaggactttgttttgtcattatgtccccagcacctaggtcaatgcctgcacaaagtagaaacttagtaaacatggtgaaaattgttgatttaatcattcaaaaaatcttttttatttgctgaaacatagtaaaacatactttacagtgttgaagaaggtaaatgtttactgctgggtatttaaattttgtgatttcttttggaattgcagatagtgctttgtggaatgcttttatagctggttcctttgtgca

SEQ ID NO: 123690 - DNA, 1588 bp, Homo sapiens
gcttttcatggtatttattatgtcctattcagtaaatattttcctcaaaaatttctataaaaattattttaaaataaattatttcctcattttcagaattttcttttaattgctaagggatctgttaggtggcattgaatggctctcggggcacctgtgctctctgtgctggtgctgctgagtgattaaatgggtggatgtctgcatcgccaggtgggtgttattcttaaaatgattctattttaccaagtgacatttggatttactttggtaaccatagctttaggaaaagaagtggacactttggataattaagctaaaaataccctaaaagcattctgttcttagtaatacatcttttttacttataaaaaattaattgacagaaatggtaatcataagttcagtaattatattacagatgggtagttaataaaatattcgtaaacatgtataaagggaagtaaacatgaaaaaggaaaaagttttattttcttataaaacactatataagcactttcttatagtgcttttccctccagggatctgaagagttgttaatattcctcagtttaaaaataactaatttgttttattcttcagagaggcatgctgctagctttgtatttcagataggaggttcattattctgtttacctaagatatagaatacaatcagtttggaatacaatcagtttggcagtcatactctaagagcgtttgaaaatggactgctttgttaggactttgtgaaatatttctataaatattggctgttctagaaggctcatcaggtcattaaaaacctctttgtgaccctttcttccttaaataggaaatatctaaagaggttggcatgaaaacggtttgatctttctgagttaactaaaaatccctgaatgtgttgaatagtgcttatggcacttttgttgagtttgcaattagacggaaatattgggctttagataaaacatatgttttttggctctttgtgaaaggaaggaggtagtaaatgctggtcgttctttgaaatagagggtgttaaacaggatattggaagcctgaaagagaatggttggaaaacttttattaccaagaatattcttggggcttggctattagccgcagagcatgcagcgttctgcctttaattcaagaagaatactctgtttgtgttggtttttgtttcttaatctttaatgacacttacgttggttagtggcaaaaggtcatgtgttttggaagcatgtttgaatattgctgacattcatatggatgttctaagcatgtagatttgataatactgtgaatgattggaaactaccgggaaaagctttttaactgggttcagctttttgctagttctcagtccaacccagctagaaatgtaaattgctaagaccatctgaacctgtgagctggcaggttttggcaaaagttaaaatctaccaggtaagaattaggtgtatggctattgaatgaagtattttgaaacctttttatttgaggttgatttaaatggttgtcattaaaaggttaagagtggagctgtcttccgttgattgatccttctcaaatccttatgaac

SEQ ID NO: 123691 - DNA, 1048 bp, Homo sapiens
ggatattttcatgatattgatagtcattttgaaaatagaggataatgcttgaacttgaacaaggtaggaagcaggaaggtatgtctgtctccttctttcaaaacaatcttccatttaaatatttgttctgtaaatgaaaattcaataaaaccttaacagtttggaattcttccaggaaaaaacaggctaaatataatggaaagtctgaataaattaatattgagaaagaactatagtttgcttttaaataattcagatgtttgtgtgcaaagtgtttctaagttgacatactcagttcccgttaaaataaaattctgaattcgtcatagctgagatatttgcttagtggtaatgttttaattttaagaatttgtttaattttttaaaatacatttcaactaagcatgcccctgaaaactttttcatatagtattctgaagatttccatttaaaatatgggggaaatgaatttcaacccattttataggagtgtcaattagttcctaaaaaattaatgaaggagtatgaaggagtactataaaaaaatagacactagacaaaattggagattaagagaggctgaagcataactgatttgcaggatattggttttgataatagaaggataaggatgatctatagttgataaatgaggctcattaagtaagagatgataaatgcagatattcctggctaatagaaaagtcagcatacaaattttgccataacaagtgagggatgggcaggctttgaccagcttgcagctcttccagtgacctctgtgaggccacggagctcttctgtggtctggatgcctgggccacagaggcagcgtggaccccatgggcctcaggccagcagaagggggagccagagtgggtctcagggagtctagagccacctagagcagagcttacaaggagctccacaatggtgcagaggccagggcaggactgcagctcctgcaagtgtaactttttattttttatgctaaaaagaaaaaaaaaaaaacacatgactctaatgttctgaggtccctcttctcacc

SEQ ID NO: 123692 - DNA, 1005 bp, Homo sapiens
ttcaggaacatgccgtgcgtgcattctattttaaaatatagactgtaatttaaaacaggcattttgatgccccactgaactttgtttaagcctggaataaaagaggagaaaaaagctgtaagccacaaaaaagtgactaagctttctcaactacttttcttcataatgcattctttaaaaaaaaaaaaaaagcatgttggtacgattgtctctttccacaggaccgaaattgtacccaattttagatcatggtgtgcacatctttctacttggttcgtgattgagataccatttacatttttcagtgcacaggtttgtatttgttgctgtctgtatgcatgcatctgtgcatatggtacgtgttcattgcatgtgagaatattctaaaattacgtatatcatttttagcactcacttactaatagctaattttttagagctcttgatttaacctgattattagactgaaatgaaataaatatttaactacaattttatttaccatcgggtcattgtaaaaattgtgatttgaaagtagtttatattacttgccttttttcctcctcacaaaaatgaaaataaacagcttataatgacttgtatggaagaaacaattgctttactgtttttataaaataatatgttttggctgggagacctattctaatcgccacactgaatgccaacagggcagactctcagctaaggttctggccttgagcaatacacgtcatttctcagagcttctgtttctttgaaaaatgagtaagttagatttaggaaactctagcaccttctagctccaaaattttacattaaaagccatctttgttagtgtatgagaaaaagcactgataaaaacgggccctttgcatttgggaaaaagtcagtggagtgagtaaagtgcgggtacattgaaatcttcagaaacggctcctgtgtgctgcttggtggcctctcttccattctccgatgccatttgcttttgtagcagggacacttgaa

SEQ ID NO: 123693 - DNA, 1036 bp, Homo sapiens
agcagactgtgtataaacaactccacacatcatcccagagtgtctctaactgtaactgggactagggcaagagcacagtcccaagataaaaattgaaactctgtagttcagttgggactcaggctagtcttattttctttgcttttaggatagtgcagtaaatttctatccaaataggttcctttccttgggtaaagacaagttactttgtatttctttgtttgatatatacttttgaatgatttgggctacattcttactttagttcattttggaggaatatttcttagtttaatttgtctcattattaattcctccttctctgaaactttttggggatataggtatgtatggcatagtctacaaatttaatgcctttacttgtttttttcttttttgcagatgtagggcgtgtgagtatggggcgatggtgcagggaaccttgctttaacatgctattttgaaagatatccccttttattttgtagaaatgggttaccacgttgagcaccaggagtttcttgtacatttggatcctagcagaggaaatgggactttagaaagattactctgaactctgaagggctaatttaaaaaaaaaaaaaaaatcaagcccctccccctattttttcttcatttttaaaaaggcctgtcattttactccaggaaatgacaaagaaaagagcaaaggttttgctttagggatgaagggaaaaacttttggcttaatttgtttaaaaaattctttttgtataagctaaagatgaaacatattacagttgccaagggcaattaatgaaacaagaaaaattaaaattaatgatttcttaacatgcatgtatttttatatatttaatttgatttggattatttttgagctgtaatttccagctacgaaaacagagactccagaatggcaggacagctgaacagtggtggaatagtggtctgtctggagcttgttccagtcatgacagcagctccttcaggcacctgctcctgagcatggtgccaccatggtgtcctgtgagctttt

SEQ ID NO: 123694 - DNA, 1033 bp, Homo sapiens
tggtgttgaactcctggcctcatgtggtcctcccacctctgccgcccgcccaagtgctggaattgcagatgtgagccacagtgcccagccccatagttgctgcatttatgcctttctttagccagcatgcctaaatgttgacatcctcaattaagacacagtatcttgtcttttccacatctcaatgatgcagaaaaattcagttatgtttagtaatcatttattgtgtctaatgtctaagattttatattagatgtaaagaaaaataaataaaaaatcaaattatttcactggcttattaatgtctgttctttcccataacacattcaggaataagaaaagaaatcctcaacagaaaatatctacttttgggatactggttactgaaaatactttaacatcttttttcattttatcttcagagaaccacgtacctatagttgcagaattcatactttcagcacatataatttcacagaagtgttttgccatcttgtggaagtcttgactatttgaaagtttaagagcagcaatggctatgacacaactgtggtcagagctttttatacaagacattcaggtggcattgagtcacgtcttatcagtgctggtgatttcagaggaagagaacactgccttccaagtctcccaacccttttgtgaacacctggtgtagaagagtaatgtttatgctggctttcttgagtggcttcatgaggattttattatttttactactttttttgctgacttaattggcattttctatgttttatagggataaaaacatctttcatataattctggcctgttttaggggtatcagatatatatatctaaatatgcacgttgttgtttgacaaagaacatttcacacctaattgagcttttcagccgggatactccacctagagtactttgcacatacatgagatctaaggttcataaaccactttggcagtgcctgccacattcacaagtgtccactgaatgtcaatttcttgccttttctttgccctcctccttttgtgaa

SEQ ID NO: 123695 - DNA, 1137 bp, Homo sapiens
ggccaggtggtattttgcgggggggtaacaacctgaaagttgtcctggttttttagcgctgctctttccgagtcttatttattgaagtttaaactattcataagatctagtggtaactgctgtaaaggtaactggggaagttatagaggaaatgactatgactttaccgttgcaaatagattaatgcactttacttttccccaacatttttattgactgtcctgtcatatcccttcttaaatcatacttactgttaccagttttacctttgaatttacctacaaacctaatttctcattaaaacaataaaaatgtatgaagtataatataattgatgcaattttagcctccctaatgaattttttaaaatactctggtattttaatataaagtattacccagatactctataacttaatgatcaaaatttaagaattaatttctttataaaagtgtttaaaaatagcttggatgaggtattctttcaacatgtatccctgaaaattataaataaatggttatttttaaatataccagtggccacttttaactgaaagagtcctggtgtgacagaatgtttcatatcctatgatgtttttatatagaatttataacccttgtgcttccagaaaggatttgagctgacttacagtaaaacgtttgtataaacaaagactgctccaagcggattacaaattcttaaaaaagtttgaaaaagagagaagcaaacaaaccatgataatgcagttactgatgaataatgattaaatttaaggctacattcctgactagcaaagtaaaggggaaaaattgggattacctaattattaaagtaaaacacttcatttattttctttctttttcttttttttttgaaatggagtctcgctctgtcatccaggctggagtgcagtggtgccatctcggctcactgcaagctccacctcctgggtttacgccattcttctgcctcagcctcctgagtagctgggactacaggcgcccgccaccacgcccaactaattttttgtgtttttagtagagatggggtttcactgtattagccaggatggtctcaatctcctgacctcgtgatccgcccgcctcagccttccaaagtgttgggattacaggtgt

SEQ ID NO: 123696 - DNA, 1658 bp, Homo sapiens
ttgcaagtcccttggaacattcatgcaggtctgcagtcactcttaatttgaatgagaaagaagatggtagaaactatttttattttctcctgggagcaagagaaaaggaaggctagaactctgtactatgtaattttaaaaaaagaaaaaaatcggactccattgagattctttcttgtttactttttgttttactctctctgtctcctagtatgtttgactaatgtaagtcttcccccaggaatatgagaatatgtggtaccgtccgcctcataaccttcctggatatttttataatttatcatcagctgacactgcttgggtagaatattcttaccactccctctggctgctggaagtctgaaattacatctttgtctttgaagtcaggcatactgttagcgttgctatggtgacagggtgggtaatggcctccgcagacaggagattggtatttagcgtttaaacactgctgtacacaaggccttgatttttagagtggttactgaactatccccttttagtaaatgtttaaaaattacatttttacatggtcttactagattaatagtcatggtttatttcattttaactgcaaggataaaagcattattccattaaatgggcagcttttttttctcttttggtttatgcattattaacacaggctttcctgttttgcttgtaacattttataggctttttcaaacacgcagtcagatttgctctgttgctcctttattttttggacttagcccattatctgcttgatcttggacaatttcagaggagacaaagttctaaggaactaagcttttaaaatattaaaaatgaagttcttttttttttttaatgtatgagtgataatattgatcaagatgtctctttggtttcaagtttctagttagcccctttcctgaactataccctcacatgagatagtaaaggaaggacagtttatggttctggagaactgttggacattttgaaaatgctttagttgatgtaactttcgaagcaatatgctctgacatagtcagcctgtgtggaatgaggccgtttgcacacacatacatatgatttttttttatctgtgagtattttgtctttagaataaagatgaatcttaatagtttgtatggtatatacaagtccctgtctacctgatacataaactgctactaaaacatcatttttaatgtcttgtgatacagaatttattactttatgaggtattttatttgtggtaatttaaattgtttaggaagtttttccttacattagctcgaactgttttttttgtttgtttttttaaatcctggttctacttctgccttcttaaaccacacaaggtaaatctaaatccttcttctatatgacggctgttcacgtatttgaagatagttttcatttactaggatttcttctgggctattaatagttactttaactatttcccccactgtgtggtctcaagttcccctgcaccctattcttaattccttaatgagcttcatttttgtataagcacctctaaatgtgatatccacaaccaaagggcaggctccaaaggcatggctggcggaggccacctggcccgctttgtgttggaccgtcacgctgccgtgtatcggaggcgtcagggtctgcagggcttt

SEQ ID NO: 123697 - DNA, 1009 bp, Homo sapiens
agtccaatccatgccttctggctccatttcctgacatcaggaggttaaagactaacttgttttctcctagtcacagctccacacctaggaacagctttttcacttttaaacagtttatctctgttccccctaccccctttaaaaagaaagaaaaacactaggaatgagtaatactgatttctcagtatttgtttgattctgtggcatactgtacacttcagcagcaaaagtagatggttgagttatattgctagttcttactcagtctataaacctaattcgttttatttatgatgggagaaggagaatttatgaattcattttgttaagcaattcttgagcctttgtagtgtgctattatgatggatacactcctggtttgaagaaatacagagtccctgagatcgtgaagcacttttcagcaaatacattttgttgcagtatgcatttacccatcttgttgaagggcatttaaatgttgtccaaatgtcttaagtatttcttttgaataatcattatttttaattatagtctggatttctctttcctcttttgtgaaataatcgtcttcctccttccttttggaaaagtcagtaatctgggtaatttctgctaaaaaaaagctctattaaaaccaaggggtgattgtagtccagttaatgaagcaaagcaaaaaaagatgaggccaggaatcatacggagttagtttactaatgaagcaaggtacttttaaaaggtaaggaaaaataaaggagcccctttcttttctttcgatctggtcattacctgggattttcagttaagtgaaatcattaactactcatatgtgcctcaacctaaacaccaaaccccaaagactatttaattatcatactttggttaataagattacaggaaggttattaaatgagtctgtgggacttgcctagaaaagatgaaatgcaaaatgaaatgttttcctctattgggaagaccacttggcttgtgttctttttaatggttgagcgta

SEQ ID NO: 123698 - DNA, 1125 bp, Homo sapiens
ccacagaaaaggaaagaaatcaccctcttgggaaacaaagaaacaaaccccaaacctctaacccaaatccctgagcttttgcggagacagacacagcttactccagaaagaagggtgcagctcagcatccctaaacactcccaggtgcgtgctctgcgacagagtgcgcaggacacggagctgcttaatggaaaccaatcctgcaacactgtacgtttagtcagctttctctgtcagataacaggcctccgtgcagactgttcaaatgatattttgaaaatatggtgttattccacacaactttgaggtgtgtaattttggagagtaaaatgaaatcaccggtcaggctgttaaggaggtggggaaatgccaactttgcctcttccgggcagtgctgtggtgatgcagccttgggccccgccagcagcggcttgctggctggcgcggggtcctctcccgggtccgctgcgttgcgcgggcaggacagtcaggtgagcacaggtggctccgttcacctgatcttcagccctgtctccactcaagtgtcttcttggtggaagcctggtggtccttagcagtactgggagtatttgaagactaggccagaagggcagggtcgctgtgtgagctgcgcttaccacctgttgaatgtgaaattgatacagaggtgggatgtgctggttgtttcttgaagtacaaataaatgggcacacggggctgggagcaactcgtgtctgatcttgtttatgattagtgttttgtttactgaggaatgtatttttaaaaagaaaatttgtattctttgtatttcaaaataaacataatgttggggtggggagcagcctgccacttctaatctcttctaagtcaatttcaccataacactgaccctatttttactagggtcagtaaatggactgatttctctgatagaataattttacatatacacaaatactcttaaaaatactatagaaaggccgggcgcggtggctcacacctgtaatcctagcactttgggaggccgaggtgggtggatcacgaggtcaggagatcgagaccatcctggctaacacggtgaaacctcgtctctactaaaaatacaaaaaattagccgggcgtggt

SEQ ID NO: 123699 - DNA, 2242 bp, Homo sapiens
tacaggtgtgagccaccgcgcccggcctcaatttctttagaagtattatgtagttagttatagtttattttggtaggttctgtttgttttagagggcttaaaagtcactctgttttgcctgcaccgactgtgtttgtgttgcatttttgcatcaagtaatgaatttagatttagattagggagtaacaaagaagtctgttcagtgatgttaagttttctctttctaaaaatcgctctactggttatcctaatcacatagttaatattttcattataaagttgagaagattactattttctctttctttctctgtgtgtattcgtggataatttcttttagaagaacagtcgtattctatgtactgtttttattatctacttggaaattgtaatttcttgtcaaatacagttagttgcgtaggtcattttaaatgattgcatagtattcatatggaataagcctgtttaagaaaatattaaagaatctaaatagactgtgtaactaagtgttgcttaatttagttgtcttttttgttatattaatctttagtgttcagaatgatacttaagcgtttaaaaaattctaagtagtatttatgaaaatggatcaaatgctacataaaatcaaaaccatggaagagtttgtttgttttgtaatcaaataaatctcctgaaaccaaaacaaacttctcctctcagtatatttatttgaaattcttcttgtttacagaaattgtgtaatatttatcttgcacaacagaaattttaaatgtgcttatgaggtagcagtccgagaggcaggacatacaataatctctagcatgaactatgcccacgtggcttaagtttggattctggaaacggttttctgttcccttttctttagtatgaatatgtgcttgccaattgtggaaaggagctgattaatcgcacttgaaggagaaattcttctccactgctcgtttgtttcagtttcagaatctctctgtcacccttggaagcagtcacaaggattctgccccttggcctgcagttgtgggggatgttgtccccagccttccccaaagcctgtcatcatggactcagctgcatgccttattaactcatcttgcaacctttggcttgtcaagacgatgagctgtcaaagctcgcagtgacatcagtagtatgtgacttgaatggatataccacatatgctgaatcagctctttttcattctctttgacatcagaaaagcaggtgctaagtctcattttgaaaatttattggtatctgttgcagacactttagagaccactctgtttatcagactaatagccaaagggaagctaatagagtgttttggcatttaaagcctaaaattctgctaatttcttctggaaaaaaagtcccgtcatccctcatgtgctgtgagaccacagaaaggctaatttaatattctatgtagggaaaatcaggataggattatttgagaaatttgtggttttaaattcttttatgatggcgtaattttatgcgtatactcaaggccatagaatgttatgtatgtgtataaaagttgaaagtttggaatcattgattttacaaaaaagaatatagattttaaaaccatctttttttgacagcttaacctcagttgaagtatggattctcttaatggaaaaaatttattttcattaatattttagcatgatttaacactaaggttattatataagtcttatatatgtgatctgtaaaggttttgtttgagatatttgggggagaatcagccttggttcttttctattttagcttgtaggaaatgaaaaatatataaacagtccaagtatcaatgtagatgaggtgctaaataaattgtaatgagcaccagaggacataagaatgtgttaatctcaaagccgcatgatggtttttgtgttgtgaaaggttagcttttcaattgtaagacttaattacctttcaaatgaatatttcatagagttactttgtcattgaatatacagctacataagtattctcttccctatgtcctgtatgttgtttatcagtagtttgaaatttagttatttcctctacttttcttttgcatagagcagctgggatcaagagtttcttatttttattttttaaacacagttttttaaagcttcaaaggaataacataattctgcagtgctttccctgtcattactttgttgatgcctatctggaatgtggttgcacagtttatttcattttc

SEQ ID NO: 123700 - DNA, 1163 bp, Homo sapiens
aagatacgtgttgctgaatacaagttagtttcatacacacacatacacatggccacatacatacacatatccacacatacaaattcacatgcagtcttttcagataaaaatatttagcgatattaagacacaaatcaccataggaaatgtcattaaatagatatgaaaaagtcatgaagataaattagctgtcaccaatgaagttaatgattaatttggaaatgggtttttttcctcctgatgcttttgtcttttgactgattttcaatgctctgtaaatgatgagtgagagaagaggaggagggagagaatgtgtgtatgtttgtacatttggtacgtaagatttgtttcagtgcttttaagacagaagaatattaatttgccctatatattcaatttgaaataaaaatttccaatctgttatggtttaccttatatattatattcattgttattatcatgaaaatttaagctttagacttttctgaatgtatttaaagttatttgatcttattaatgaggtcaaattattattttttataacgtagacttatatttgaaacatagatgctgtatgaacctccttttgggggtttctgtgtatattgaaattggtgataagatttgcaaggaactttggttcattcagtagggagcccagttttaaattttacttttctttcagttaagtgaatttttgtcattgatatatgcaaagttcagatttgtgtagactttcggggtactgaatttgtttcctgttcattcagtcctaggaaggaatgtccttttctcctcttaggtcacacgtgacctttcccggtccctgtctgcagtctctttcctgcagggagctgtctccccttcatgtagccactgtccttgagctttaaccaagcatctgtaagcacctcacctggactcttaacgcctcacctgggaaatgattattgtaaactgttgttttggtaatactgtttggtagccagcattttaattttagtctattgtaaattgacacaaatatttgaatattttgttcattttgccattttacaaaaaatgagaaaggggaaattgagaggaacaatattagtgatgaaaatatctatatctgaaaaatgtaatgtaaagatatgaaacacttggggaagatgaatgca

SEQ ID NO: 123701 - DNA, 1042 bp, Homo sapiens
ttatttcatagtttctatggctcaggaatctgggcaggcatactgaattctctgcccagaatctcctaaggctgatatcggggtgtcagccggggctgtgatctcatctagggcttgtgggggttcctcttccaagctcctgtggttgctggcataattcatttccttgcagctgtggagctcatggcaccttgcttcctcaaggccagccagagagtctctctgatccctctttaaggagctctcctgcttagaacgggcctacccacgataatttccttttcgattaactaattaggggccttaattatatcctcagagtcccttgacctttgctgtataacatggtttaatggtaggattgctatcccaacacatttacgggtccttcctgcacttgaggctcgagcgccctagtgtttgtacccagagccaggaatcctgggggacatcacagaattctgcctacacacagagtgagcatgggctgggaaggacataggtttcttagttcatatagttctgtatttaaactttttaaaaatggtataatacataaaggttaaaatagttctttttattttacttggtatgagattcccccagaattctcaaatgaaaattacaagacataattctggaaggaattttagttaatgtatacttagtcacaatagtcgttctcaaacagtgtcaggagtggacaatcagaaataaagcaaatggtctaggcttgtgaccttatttagctgtggggcagggattggggccagccaaaggcccaggggtgtccagtggttgcatggtggcacctgtgctgagggctggacgagctgtccactttatcccttcccctgtgcccacagcttttgcttttctgagtgtaaaattgcacagatctactttattaagaatatttattttaattggattgtgtcacgttgatgaaggatttttctttagttaccagtggaagatgaacatttagtaagcatgtgaacataaatttggatagcatggtttgaaatcagaaccataagca

SEQ ID NO: 123702 - DNA, 1047 bp, Homo sapiens
tttcaagttccattacatccttcacatgcagtatatgaactttacagcagcacacactgtctctcccttctctgcctttttgctgttgttgtcatacattcagtatctcaatattttataaacaccactacacatatttattttatctaccatttgatggccatttgggttctttccacttttcagctattttgaatagttctgccaggaacagtcatgtgtaggtctttctgtagacatattttcagttctcttcagtagatacttagaagtggaatctgctgggggtgtgtgatttttgtgtaacatttgaagaaactgccacactgttttccaaatgactgaaccattttacattcttataagcggtgttcctctccacacctcaccagcacttatcttttgtcttttgcatcgtggccatttttgtggatgtgactggggttttaatttgcattttcctagtaatcaatgatgtgcatcttttaatgtgtgcattggccatttatacaccctttttggtgaaatgtctattcaaatattttgcccattttaaaattggaggagttttgtcttgagttttaagggttctttatatatcatggatatgcatcttttatcatatatatgatttgcagatattttctcacaggctgtggtttatcttttcacttgcttaaaaggtgtcttttgaagcaaaaaaatacctttaattttgctgaagtccaactttaccatttttaaaaatcacttgtgcttttggtgcgaaactgcctcattttcaaaagacatttttttccaccggatatagaattttagtttgactgtattttttttttctttttttttttttttttcagttccttaaagatactggtccactgtcttctggctttcattgttttggcaagaagtctttttaattttattgttcttgatgtaatgtgtttttttctgactccttttaagatttttctcctcttccccccatctttccatgccaccacagtggtgcatgtcacgagcgtccatgtgaagagaccacca

SEQ ID NO: 123703 - DNA, 1074 bp, Homo sapiens
gcagtcatggcacactgcagcctcaacctccctgggctcaggtgatcctcccacctcagcctcatgagtagttgggactacgggcatgcatgcaccaccacatctggctaattgttttgtattttttgttgagacggggttttgccctgttgcccaagctggtcttgaactcctggactcaagcaatccactcatgtcagcctcccaaagtattgggattacaagtgagagccactgcacctggccagtactttattttcatacagagactgagagtaagacttcatttccaaataaaagtaggttattaaatattgctttatatatttttaaagttcttacagaaagaaagcttccatatactctagaccattttgagattctttcaggctgtgactcttaaggtcagctacatttttattgacagcaatcctggaagaaaagtaaagagaagtgagaatataatgttgtgattctgttaaaatcactcaaaatgcttgaaattgataatactttttggcatgtttctttctaaaatcaatgtgataatatccgctgcattgataaacatagttagcaagcatttttgtacttagcgtttgtgtataaaatgtaaaggaaggttttttaattcagagaaggtgctcatgtttgaaagacaatatatggatctggaagaagtaaaagtaaatctttaaactctaattgcaaggctgtctgctcatatttaattgacacacgtttaaacattggttgtaatggattgtttgccatttaactgacattaacgacctcagttaactcatgtttttatattacattggctgtttattttttgttaatttccctttagtgttcagcttcccatacattaaaagttttgctttttataaacaactactgtgtcttgaatctctttttattattaaaactttcacacatgtattgggtttaattgcatatactttttgtagcctgaaaatgtgaaccatatgataataaaacttaaacgtctgcacattgctacaaaacacagctctgtaagggaacacatatctaaatatcatcatcctg

SEQ ID NO: 123704 - DNA, 1587 bp, Homo sapiens
gtccgctcactgcaagctctgcctcccgggttcgcgccattctcctggctcagcctcccaagtagctgagactacaggcgcccgctactgcacccggctaattttttatattttcagtagagatggggtttcaccgtgttagccaggatggtttcgatctcctgaccttgtgatccgcccgcctcggcctcccaaagtgctgggattacaggcgtgagccaccacgcccggcccagtgctagttttgtgcctgtattttctgcttttttcatttgacatcacttgaatttccttagcttgtggaatcttttgttttgttttgcaaacttaatatattctcatacttgatagttatagtaatacataagctttagtcattgacaggccccattagcccttgtttatgttatttacccttcagagtatcttgctcgaatctagaatcgtggcctgttgagactttattcctttgagttgaatagtacctttctgtactttctgtaatatgtttttgaatatacatatgaaatacaatgcaagtaattaatctatagcagataataagtgtgtgcatgatggtgatgttggggataatggaatatcgtggaaatggtcaatatcttagtctttctttcattctagatgcttactgttggtacatataggcaaaacactctaaaaaaatctgatctattggaattcagatttgtcacaactagttttagggtgaaggtagagggattattgttcaaggatttagctggagacgcacttagtagttacaaaccgggagcttgaagggtgagaagggagtttaaggggataggataaaaaacagaccagtaatatgctaaataatgtaaacttttgggccagtgacttaatttacatatgcccaatttgtgtggtgtttcaaaggaacacttctgttttaagtgaggtgactcacattttgtactgtcttcattcatgcatgtgtggtgcctgcagcctgccactgttttttgtgcttatctcaggggattcgctgcaaaccatggtgagggggaggggaggaacggctagtgcatccatggagtccttctctggcttctcctggccactccttccatagtttaaatgggggcagcacatcctcttgcttctactaggaagtgaaaagtcttactagcaaggagttaaggactgccagaggagctttcttacctgccagctctggacatctcatttcctgtttgtctgaatgcatgtgcaagcttaggaacttgcccactgcagcatccaacacagctggtttgcctgtgtttcaggagagtggggaagtgcgcttcaatcacttccgacacacttcagcatgttgagccatctgatagggagggacattggtgcgttttactgccttcttcctatgcacctggagcttttgttatctcaactgaccagttccttacctgtaacctggattagggaatggcagccagtattcatgacagttgcatatgtgcgttcttacaatcagagaaatgtgccataaaaataatttctcattttttgcctctgtgtattctgctcctgtagcttggaccc

SEQ ID NO: 123705 - DNA, 1001 bp, Homo sapiens
aggaagtggggctgtgccctcttctcccgggcttaggactccaggtgtacctgaagacagacggtaggaagcctgaggtgacgtacgaatgagcccctgaaaagtgaatttcattttcttttcttattcactgcttctcactgaaaagaactctgtttacctgaaaggtacaaaaggagccaaagagaaggtagcaattttaaatagctgacctgaaccttatttttacaaaggacctgtacagtgtcctgacttaggaacctgctgattagaattctttatggacagagattgtcttgaataagtaggagagttttggtaactcttctgagcaggctgccttccaaggattaagtatttgttgctgaaaaccatgtggtcatatagtgtattctaagtatctgttttgctccaagcccagggtactgtactaggaactgaacaatttgggactagatcctcaagcctgctacttagtaacctttttgagcttctagacttcactgacatggacaagtgcaagtgagaagatgtgcttagtgacagagtgcccaaatattcaattatcgtcagtgctgtaccagctgctattaagctatcaccagatgagatggagaatctgcagcctagtaacgtgtttcatgtcattgatgtggaagtagaattaccagataaaatacaggacgcacggttaaatttgaatttcagataaacaaggaataatttcctagcttaaatgcgtcttatatattacatggaacatattacataggacatgttactcaatctggcaaccctatagaaaaagaattcacttgagtgatgagaagagtcctctctccctgtgatataagctgcggaaaaacctcaggaccccacacaaaattggaatgcttatattttagctcccctaaatctttaaactcttcaacagtaagggctaaatcctttgactctgtagcaaattcaagcactgtgtgaataatagaaatatcttctat

SEQ ID NO: 123706 - DNA, 1002 bp, Homo sapiens
agatgggacggagtattctgaaatgtccccagtccctctgaaagggaatcttgtaaaggcatcctcaacaacctaccaccttcatggtgtgcctggttagagataggatgataacatggaaagaaattgtactgaaccagaaggtgagtcatggctctgtctctgggcctccatttgtttctcttcaaaatgggataatatataccctcaatgcattgttatggaaaccaaaaataagtaatagatcaaaatatgtaaaagtattttgtagattgtggagtactttagagacagagggtattaagcctactaatactactcttgtgctgcattttgggtttttttggaagttttatcaagttttataaaaaaagaatgtgaattttaacccatattaatacctcatattaaattagatttttgctgtataacaattaataaatgttgggaattggaattgcagttttacaattgcgttaatgtccaaattaaaatcagcagcctgactgattgaatgttttgttttttaaatcacacatttgcctgaattgttcatgttagtagatagccatgataatcttttaatctacgacttaaaagtttctgagaaaatatgatatttgatgttgagaagggaaaaaaacgtgtgttattcatagagagtatggtatgcagtctggtgaatttgtcctagtaaacctgatttttagcattacttaagacataaattctcaatctccaaggaattatttttaaacatattattttcacaagtacccgtgaatggatgtggtctatgggaaacaccaaaatagatataaaattgatggtcttaaaatttgtgatttaccatgcatgttacattagttatttgtataaacatgatgttgttcctctttgacagaatttagaggttggatacttgatgcatctgaagaaaccatagaagtttgcgattatattacagaattcctctcatgtctgtgcaaaaaccctgcactc

SEQ ID NO: 123707 - DNA, 1010 bp, Homo sapiens
ctttttactttagtattgaaataacaattctttatatcgtcactgtcatgaattcttacctttgaatagcactttatagctttcgggatgttttctcttattatcttattaaatatttacaattaccaagaggtaaacatggtaggcatgtttatcctctctatgtaagaagtaacagatgtagagaaattcttatttacaaagttcaggtgggaagtagtagagctgagatttaaacacttgcattttaacttgtttttttttttttttgctgttatttccaccataccatactgttttccacaagaaccatcatttctagaactttatatttaagtttacattagcataaaggaatgcatttgaatatctaaagattctcctattaagaattggcgtgaaactctgtatacatatattatttctgaaagatttactggaagactgcaattacacaaaataaactataagcataaagacatcattatcccagggaattgtttatctgcaaatgtgaatactagaaaagtgtttataaatgttagaagaatgggtgcaaataaattcttatgggacaataatatggggtctattttacctctttccgtttaacgcttaagaggaacctcgtcatcgtgactactccagagcatggattatgggtgctgtgcgggcttgcagtccttgcatctgtgcttcttggtatggatagaaagcaactctgaagatgttcgtgatatgacagtagagtgtgcctagatctagcttttctgttttgctcccctctcccaatcttgatctctctctcttttttttttttttttggtgggcgggggtcagagtttccactctgtcacccaggctggagtgcagtggcgcgatcttggctcactgcaacctctgcctcccaggttcaagcgattctcctgcctcagcctcctgagtagctgggactacaggtgtgtgccaccatgcccggctaattttttcttgtatttttagtagagaca

SEQ ID NO: 123708 - DNA, 1284 bp, Homo sapiens
gtagagacggggtttcaccatgttggccaggctgttttttgttgttgttgttgttgttgttgttgttgttgtttggagagatggagtctcgctctgtcgcccaggctggaattcagtggtgggatcttggctcattgctaccttcacctcctgggttcaagcagttgtcctgcctcagcctcctgagtagctgggattacaggcatgggccaccatgcctagctaatgtttttgtatttttagtagagatggggtttcaccatattggccgggctgttctcgaactcctgaccttgtgatctgcctgcctcagcctcccaaagtgctgggattacaggcgtgagtcaccgtgccaggcccttatgtagtggcatttctaacacaaaagatttatttttacctaaaatgacaatacttactgggttgccaaggagaatagttaagttgtagctaaagatgaaaagcccagagtaggcaagtaagaaaaccgaattggtaaaacttctttctccacaggacttctgttagtgatttgttcatgaactttgaaaggagcaatggcagttcctccccgatctccgttctactcaccacatcccaataccgtaaagtttatgagcagaggaatttaacataatgcattttaagttcataaactaacaaaataacttcagatcttttaaaaatgctttttagaagtttggcctgcatttctacctttttcaccatattctgtctcctcagctacctcctaactccctgaacttaaaactctctggggtcgctttccattaatagcttttgactttgtttcttatgctttggaaatgtatgccatagcgacattgctattttaagaggcttttatatattcacgttttctccctcttttctctctgtcttcccttgcccttccttctattccccttcttattcttgccaccccacaacaccccccattgagagatccaggcaagatagactcctttgcccttggtattccgtggaagttcagtgctatctgatctcactgttagggaaacagacagcacatattcttacctcagggaactaagatctagagaccatctggaaccatctctgagctctgtcattgatgggcagtttcacacaatctgttgattgataatgttatatcagagcttcagtgtattgcaagccattttatggaaatactggtgataagagtaacctgatgtgacatggtgcatgtggaatactgtgttaggtcctcccccacctccctcctggggcaacaaaatg

SEQ ID NO: 123709 - DNA, 1038 bp, Homo sapiens
caccatgcctggctaattttgtatttttagtagggacggggtttctccatgttggtcaggctggtcccgaactcctgacctcaggtggtccgcccgcctcggcctcccaaagtgctgggattacaggcgtgagccacggcgccctgccggcatgaagttttgaacttgccattttgccgctctagtgctgcctaaggcactttgaaggcagtaattgcagaggcatttcgtgccttcaaagctcagtcccaacctaagttccttaccctctgagatgatcccaggagtggcctcctctgttgcatgacatttagatccagggctctctgaagcctatggacttagtaccattcatgtgagatggagtgatggcaggaaaagaattctgtgttgcaactgctgtgccctgaagttgagacctcagttgaaggtaatgataaaaaaagaaatgctaggtgcattattactgcttcatctctacttccttgggttagttaaaaggcatttaccagattagttaacactgaaaacaggatctgtcacgagccaagtatttcagtgtgtgttttgtgttttgctcaaaataaccctggtatccaacactcacattaaacaccacaggaagattttggttgaatgtgtactgaaggttgaggggtgcctgcaacgcaatctcatggacttacctttttttctgtactgactagaaactgattgcactatagccaaattacataccagcacaaagggaattcagcggcaggcctgaacagaatagaagtgacaagcaagaatcaattaaaggagtcagccccctgggtctgttcagtaacacaggctagcactgtgggaatcttatactcggtgctttgctcaagatcagtgccttgactttgtacattgctaatgcacacacaaaacctttgggtatcatgaaatttttgatgacattattgaatatttgaatattgctgggtgttttttgttttgtttttggtgactcagcgtataaacctgctttctttgggggacaaaaga

SEQ ID NO: 123710 - DNA, 1052 bp, Homo sapiens
gtattatgccaggaataaaaaaaaaaaaaggatagcacaataatatgccactctccatcttatagaaacatgcaggctaaagtaaaaaacaaataatcagattattataactcagtattttgaagagcagctggctaatctgactcgagggcatcagactgggaaagacgagatgacatttgatgccacgtgtcttttaatccagcatttttcacacaatgccctgcacgtcgtagctactgagaaaatatttggggagtaagtttgaacggaactgtgacttgaagaataaagagttgatgagagcctgatggagatataaagaaacaccagggatatgatttctgattggagcaatacaaggagaaatggataagtcccggagttttgagcttgggcagattgggaaatagtttgtcaataactgacaatacagaagttagttagggatcagcagaatgatgagagaaaattaatttagtttttgacatgttaaattcaaggtttttgaaggacatcctcatgggactgtttagtgtgcagttggagaggtctggtcagtcctggagcttgggtggaggaaactaagacacagatttgggattcaccacaatatttgatatttgaagccatatctgatattctcctgggtgtgaatgagattgctcaagaaaagtgcgaagactgtctctgatagatccatgaggaagataatacttttaaatttgacacttctagagctgatcagagttattctaaaggggacccactgtagttagaacacttctgtagcctgtttctattgggagcagttggttctcctgacttcagagtttcccaggtgctgacttaccgtataaccctgcgtttgctgtcattctgtcttcacttcactgctttcattcctggcacgatagtaaaattgtagatgttctcctgtcctcattgtgccaatcacagcattactccgaccccactgctacatacatcccccaaccctcagaaagaaacacaaagctgtgatgtgaatcctgcatcttcattgccttcaa

SEQ ID NO: 123711 - DNA, 1053 bp, Homo sapiens
actgtatctcattaattttgtattgcttaaaggttgaaatgataaaatttggggtatgttgggtcaaataaaacatgttatcaaaataattccacctgtttccctttgcttagtgtggctgctaggaaatggtaaattacaaatgtagttggattgtatttctgttggacagggttgctctagacaaacctacaccaaacacaacttctgcgccccagggaatggaccttccctgtggacttgttatagtggtggattgcccttgtttcaaatgtcattgcccagtgtagaaacctctggtaatccatcaacaattctggtaaattttaaagccacattattgattagggagagttttgggaaggcagattgggaaataattcatactcactgagctactcaagagtaatacttccaatcagtaaaacatctattggggaccacaggaagatgttctttttgtttgtttgttgtggctaatagatgactattagattttataaaatatgtttgttttggctattaaatgactattagattttataaaatatatgtttacttactaccttgttcccaaagggatttaaggcatttagttagcatctttctttaggaattcatcagtagtaacaaatgagcagtgctagttgaaattctaaaataaaaactcatattcctctaggtaattgctttttaacctttttaggggtctttcctgagaccagactgcattcatctgaaaacaaacctgtagttaggacaatccatgagtaaagaaggcctcatatttagaatgtcatagcttctcagaatctgctttgaaattgaaagtcaacatagctccttctgctgtggtgcaaatgtctagagcctaaacatctctaaaatggaaactgggctgggtgtggtggctcatgcctgaaatcccagcactttgggaagctgaggcagacagaaggattgcttgagcccaggagttggagaccagcctgggcaacatgagacaccatctctacaaaaaaaaaaaaaaaaaaattagctgggcatggtgtc

SEQ ID NO: 123712 - DNA, 1115 bp, Homo sapiens
tggaaagagcctggtgtcaaggaaaccagtttcacagtattctaggcttaggaggagagatgcgagtctcagttaaggcattggtaatgggaatggaggctagtctgtatttcaggaatggtcagatgatgtttatagccagcatctggtaagtgctgatttcattctcataacaaccatcagagcagactgtcgtcatatacatgaagaagctgaggcccagagatgctaagaaacttgtctaacttctccaaagccactgcttggaggagttaaatttagttctgtttagtgttacctgagtccatgtttcacttcctatttctctctagatttggaggaaaaagcagttctgaaattgtaaaatttctagcctggtggcttttgctttcattaaggaaggagggaagaacttgtccattaaatgttggtactcctgaaggttctgttttaggctctatcgtcctttgtgatgcctttttatgataaaactcagtcatccacgctcactcaactgtcatctaattgcctgcgaatccatgttctttagtctcctgcaacttgtgccatgacctgtatttcctgctgccagcgggtcacctccgcggatataccacaagcatgtcaaattgccgaggacacaaccatgccattcattcttcccaccaagccaaaagaaaatctgggtgtatctggacgactcctgtcttccccttcatatgcagccattatgtttctagagctagaaccatctgaaaatcttaagtcctttagggttttttcgccccctgcctttctcttttagcaaagataaataaaaagtgaaacaaattggcacaacttggaggatgaagaagtagcaaaagacaaagctgttagagggataggagaaagtcatttcaggaaggagggaatagacataacaagcaaatttgccgttcaggaaatgttttatttaagaaaattaataatatttagaaaataaattggatggaaataaatttttaacattccttctctgatgaagaactgacctaaaatgtagttagttctttattcttgctttttaaccttgtagataacatcatgttagtcatttacccccatacaagttg

SEQ ID NO: 123713 - DNA, 1528 bp, Homo sapiens
atacagtttacataaagatctaaagggaaagcattgcttttattgaaagtactacctgttttcaaaatgtttgatacatacacatgtgttgcattggaaaggccaaatgaaataatgaatagataactatattttggtctatattgttcatgatctcatagccatgttttttgataaacgctggaagtatggaaatgatgaactttgatacatgtgatttccttaggtatagtgttcttaatgcccccaaatctacaaataatgtcatcatgtaactgacagggttacactattccactgtctcaagaaaattatttatggaaaaggtatggtactgtgaccacataagccttctgagtgccgctattcttctgtagaatttgggcctgtcagtctcctttacaatcatgccctgtagcataggcagatattcttaccatccactgtgttgtggtcagccaacctaaattggaaagctcaaaattactttttaaaattgtttggaaggattgcgaactgtatgtatttttataaaatatttactgtagtctaactggagttatttattggtatgattcaagtctagaagtcattacctcttaactcaggatggatagaaaagatctatctttgagcaacatacatactcattttattgccatcagtttataagaactaatcctttttaaggaatttaaggtctactcttggctagagagacaaatgcatcaaatgcatatatatgtattcaatatagcaaaattggtttttggtttgatttttagtaacagtcatgtgtaatgcatgcaagcatgtatcaccaaccacacatatgacttctacttatatagttatattaggtagagcatattttaaaccttgttatatccccacctgtgtcataatgagctgtgtcaaatttgggttcatacacatgtatttatatttttattgttttgttatagtctttagcgcattcattcatatacatttattcaacaaatatttagtgagctcctactctgtgtctggcactcttccaggtaagagacatgcaacagtgaatgagctagcctgctcttgtgaagttgacatttcagtaaagggagaaaggtgatacacaaatgaataaacaagaaaatctcaggtgattatacaaaagaaggagagggattctcttgaggagtgattggtacgacaggactggccatgggatgatctggtagcacagtaattcaggaggagggagcagccagtgcaaaggccctcaggtgaacagtggccatttggaggaacagaaggcaagccagtgcagcgggaacattgtgaagagcagcgggtggcaggaccgaggacctgcaaggcaggcgggagccacgtggtttagcttcttgtggaccatggtaagcagctcggcttaattttacggtcttggaagacttcgaaggttttaaggagggagtggagatgaaagaagcaattggctgcgtggatgctttcagaacttcctttagtgtcatggtgttct

SEQ ID NO: 123714 - DNA, 1048 bp, Homo sapiens
gaacgaggagaattaataagtaaaagaggaatgctggcagtggcttatggttggtttttttttttcttaagagttctatgtttttaatggattaaaatcccaaaaagttaataaaataataataaagaaaaacacggaacaacttctttgtttgataaaattaaaactttgcaacccatatgcttctcctgcagtttaaattgtcataaatcctggaacatggttttggagagcagtttatttattagtgtctacttttccttaatgtaggtaaaagtatgattaatggaataggttgtagttggtgtattggacttgttggcccaatcaagggagatacagcaaacattgtaaggagagtatttttatcccctggacaccaatgtaggcaaaaattattctttccaagagcatctaaattcttggtaatacccttgcagataaatattattgtgactggaaatttaatcaatttcttgttgattgttactagcctcctctcctcacctttattcccctttgggcagaacagctcacttgtgtaattttgcctttcccatccttgcctggaattggaggcaaaatctatatcattttaatgtttaattatggtaaaggtatgatatctataatcactggaaaaaataaaggaatattcttcatcacagttattcaaatggaaaattaaaatggagtcaccccctcctcttgttatttcacaataaattacagtttgatcaaatatttaaatgtaaaaaagtcaaatatattaaaagaaaacaaatgaaattttttttttttttgagatggtgcctcactctgttgcccaggctggatggagtgcaatggtgcgatctcacggcaacctccgcctccctggttctagctgttctcctgcctcagcctcagcctcccaagtagctgggactaccggcatgcgccaccacgctcagctaatttttgtgtctttagtagagacagggtttcaccatgttggccaggctggtctcgaactcctgacctcaggtgatcctcctgcctcggcctg

SEQ ID NO: 123715 - DNA, 1009 bp, Homo sapiens
ttctctctcccattgaagtgaaacatgggtctcatcagagtattcaaatttgtctctgtatttgttacagtgtctgtgtggaggaggagaacgttggctattatgtcctaattttacatttgattaaacctgtgactttttttttcttactgctaatttttaagtctccccacatcaaagttaaaaagaaaaataacacaatgaataatcttatcttttcatttatgaattagaatttatttttgactgtataatggatacttaaatacatttcacttagatatttatacctaagctaaactcattttcttatgacattaggcacaaaacattgcatttaataaatatctgcacagtatttattatgaatgagtgatggtctttttgagattagagcagataaatgcagattataggcaaagaattagtattttagcatcaatgctgtgtcttcccagtacagtatccagtctttccattgagaatttcccaaatttttcagttgtatattcttgttttaatcggattaacacagatctacttctaatttatgtataagaatgatgggtggttttgtcttatgaaatatagttattgacttttctgttattgttgttcaaatttatgacaaaaggaacaaaaaagcttagctgatttcggccggtaagtttaatgactactacctggaaattaagtgtgaaagttgaaatactcctttgctcccactagagggggattccttccaacttaggtaaaaatgctcttagactcagcgtgaaaaccttgtgtgacattgatattccctttgtattaaattgaggataacctcatgtttttaaaatcagctgattttctgtagttgctgatattaaaatcttacagaaatagaggatgtaaaggatacttgaactagggtacatatatatgtaaacaatagtgcttttgaacaaaacataaatacttttgtagagttgctgtaattaaattcgtttaaaggtatattaagagt

SEQ ID NO: 123716 - DNA, 1070 bp, Homo sapiens
aatttaaaaaatagttgaggttagtaacctagcattgtgaaagtcagggcttgggaaattcaaacatgtaatcttttttccttttcttaaatgaaaagtctataataaggccttgtttctaaatctaacagccttggaaattaaaatgtaaacagaaatgctgtcagtgaaacttacaatgattttttctactataattgatccaacatttcagtctttagcctaaaatcatatttggtatcagcaacatatggttttctatgaaaacgaggctgctcatctccatccctaatggtagtatctttcttttgctttccgcaccaggctctgccagtgccagggggtggtcagtgagcctggctttcagtgaagcagttggagaagacaatttgcttccttgtttcttcttttgacccttttaactttcatactggatgaaagtcttattgtcatggccttcctttctatattttctgtccacaagggaagaatacaattttgttttatagcaggatacattagataggcctatgtgccttctacttaaacacctgccacacatgcctagttttaaaaggtttaaaactgacagtgaagcctgttacagtctgatattgcccacccaccccgtcttcctctttaaaaatactcagatgtgttctgttgccttctttccttgttcttttccatcgtgtattggtactttgcaatagtcaaagttaaaagctttacacacgacactgaataattatgtttaaaaaacagtaattatcaatacacgttttgttcctcgcagctttttaaaattcatgttaatgagctctgtcttctatgcatgagactgacaggcagtcttgaagttttgccatcatttcacaacttgttgcttagacactgcctgccttttccagagtattgctttcaggaactcttgctctgcaacattccagagatccagcgctgcccactctgatctgagcaggacaagaatctactggtagcacacatgcatagtgagattgctctacaaagggcagcttcccctcactgtctgtcagtaaaagaccaaa

SEQ ID NO: 123717 - DNA, 1081 bp, Homo sapiens
ggtgagaaggatgattctactcactccctggattgtttttgaggaacttcaaccactacgtccacatgatggcagatggattcatttgataggagctcccgccgtcttatagaactgaaacccagacggtgactgggatttcagcccagctcttgaagatactcacagatctctctttcttgacaactgacataaatggaatgccagttttctcagaactctcaattctaggccatgcctgtgtctggtttctgtggctagactcaaagaggtttttgatagtgcctaaattatgtttttccttatgatttcaggttgaagtcttggcctcggaggatgcagcctttggactcaaggtgtgtagtctggtgtagttcattgtggaggtttttgtcagttcctcctaggtggatttgaaggttcaacagaggggacttattttttttttaatcataatcaaaacactgaggtttaaaaatcttcacaagtttaagatttctcttattgtgattaagattagactgtggtagtattttcattaccttctttgttgtgtagaaagaaacaatacaggaaaacaagagtttcgtttagcagtaattgacttttaaatttcaattcggcatagcacaagatttgcttaaattttgccccagtttggggctactgaaatgtaagatgttatcagagtgctgtatttagttcatagctccagtgttattcattgatttattaaacgtccccgcttcagacagaacccctaccgtccagttacaaccggattgaaaacccagctccttcccgtgaggacctcatgaccagctgacagatctaagcctataagcagataaatcatcccacagggtagctgtatccatgcaagaaacatgccagaggctgcgagtcgggtggagtggagaatgggaaggctttctaggaggtggatccctgggctgagttttgagggcttaggttatactgaggcaagaaaggagggcaggagaaatgagagctattttcgggtagaacagccaccatgaaaaatatctgaggaagctaaaagtagttaagtttctgtctg

SEQ ID NO: 123718 - DNA, 1027 bp, Homo sapiens
attgactccatgtatctctggggacattattttggcactagtttttgaggacttaattttctagtaataataaaaatgcatatattctcttatccccaccctcaaacacctgttcatttgggacatgcacatgtaattagaggcgtgtttcaggacttgcctgtaaaattcctttgcatgcagttactgtgatcatattagtaatcatcaagctacttgagattttgttgggaagaagcaaagaaaatatcctagggaagatgggggtgattttgattgcgtgtgttttaggttctctgcactgccaagttttaaagcagattctgtttcttcagatggtgaaagccctcctccttccctcctcctgccttaaatttggcttcttcccaagccatgtcaatttttgcaagtcagttgagaatgtcaacgtggctggtgttgaaagagccaatatgttggaatatgcttaaagccaagtagaacatttatgtgaattaaagaatatatcagggatgatttttaaaaatcagatttggattaagaaacctgttgaattaatacttgcataacagatgtatcactgataaatacttgtaaaagatattcccaaataagcaataaaagtaccattttacaaccgaagtaatgcatcctgtgggtccatttgcaaagatatgccaacagaaatgcatgcagagctctggaagtgataatgcaaataaaacatttcacattataacttaaaataacaagtttggaaggaataaaaagtctgggagactatttgttttgtctaaattctgcttttactctggtcttttaacagttggcttttgataatgtattactgccttagtgtgttcctgtgtattgaaggaatacattgtctgacagaattgtggttgaaaatattacaagttctaaataataagagtaataaatatcatatcttgtttgctttgttgtcatagtcgcctgatctcatgcttccctgaattcggctggtgtcttgattacgatggaatca

SEQ ID NO: 123719 - DNA, 1103 bp, Homo sapiens
aggcagcttgaggctcacagcgtcttcctgcctcactcacccgtgctgggtgctgaggacactagcggtggcagacgtggttctggccctcatcatttgcaatgcagttggagagatggggctgggtagcacctgaccagcgatatgtggttaataagacatagaagagggaaaataccacgtggtctggggtgatcaggcattgaaggagatttgacttagctctttgcagaggagggtagcctcacagacaggcaggaatgaataggcagatctagctggggctgcggattttggtaggaaagatttggaggccccaaaacaccttgcctagatgtttcaatgagatgagttatagccaaaggtacttcagcttggaaattgtgtttttgttttttttttttgataaaaatatattcatttatcgacagtgtgtggtatctgttggcatgagaaaagatttaagagacgatatattgattagttgtgtatctttagaatcaaatgagaaaatgtgaaagtgcttggaaaatagtaaattgatgtataaatgaaagttttacattatcatgtgtaacagtttgttatataatagagttgtgtgatgtcaggaataaaagaagctggtgaaattactccattcgctagaaaatggtttacagaatcagctaagcccttgctttttagagagataaagttacttatcgtgttttcctttcttacctgaaatcttcattacatagtgaattgtttgtaaatatttgatagtatactgcagaatatgaggttaaaagagtctgattcatgtaatggaaattaatctattggtaagtcaaataaatgtttattcttatattttaccaaaaggtttctgagattagagtattgacaaagaggttctgagactagtttactcaacatttattaattgttttcagtgggccaggccctgtggaaagctctggggttaaacaatgattagcaagatacaagtgaccctaaatttccttagcacgccccttctactgcctgggagacctggtgggctctaaagctcctgcctggcctgggaaacattttgtgagggagagagagcaagcttt

SEQ ID NO: 123720 - DNA, 1073 bp, Homo sapiens
actagtagtttttcttaaataatacttttcaataacaacaatttcacacacaaccacaaagtttcaatctggttaacatatagatttaaacttattttgaaagcattttaatatatgtgaagcaaaatctgaacttttttttttttttttttttttttttactattctttcattgtctcatcacattcaagagcccgaccatgctgtcttggcacagattcacaatcctgagatggtaataaatatctgctgatggtttactttacacatttttgattcagtccttaaccccctgctattttttccttctcagcttctctgagctgtccttcctttccatctcaacaaattccttgtccacaccaaggttaattttgccccatctgtggttagttaactcacaaatgatcttttacagcttcttccccctggagctgctggtgttttttattttcagcctttaaaaaaatgttacagagtggagtgctctgcccactccccaccccacaacctgctgtggcacctctggatgggcagagggtcttgtgtggtctgtctcacctcctgtggactcgtgactcaggctgtcccctcaactgatcaaccaagacaatctttttttcctgtcaaagtttaattccttctaattctttaattgtaatatatcctatttgtgtctttcttatacattttatcatatatttatttttactgcattaaattgagagcctggctgcatttgaatttacatttgttagctgtttgcataatggcaattataatagtaaaattttaaatgggagcaataatagtaaatatctcaaagcggtgaagatagagttacattacttatctgcagcacttagaatggtacggagcacatggaagtgctccacatgtcaaccctgcaaggtatggcaggtgatgtcccatttcatagagaatggaacagaagaaccaagaggtgaggtcacctgcttgacatctcgcagttgtggggaggagttcgggcagtgggcgtgggtattttaactcctggttattattgcctttaccatctcagggttgtcaga

SEQ ID NO: 123721 - DNA, 1006 bp, Homo sapiens
gttaattgctgtagacacgagtttgatttttaaattttcccttgtatattcatagaaggtatgaggacagggtaccataagaaactgatgacggtggtccgatgagcactcgctacttgccttcctcctgtgatgtttgttgtttcatacaaagtgtctgttaatctggtatgttttaaaatatatatatatatattttttttttttttgagatggagttttgtttttgttgcccaagctggaatgcaatgacgcgatctcagctcactgcaacccctgcctcctgggttcaagctattctcctgcctcagcctcccgagcagctgggattataggtgcgcaccagcacacctgcctaattttttgtatttttagtagaaatgggatttcaccatgttagctaggctggtctcggactcctgacctcaggtgatccacccgcctcagcctcccaaagtgctgggattacagccgtgagccaccgtgcccagcctaaaatatattttaaagaaataagttacatttcagaatgagaatggatgggtcctactgaccatcctcatcttggatttgaagaatgtagagaatctttaatgtggtggcttttccctttttttttttcttttaaacatttttgaatcttagattactatcaagttccaagggagagaggacagtttccaggacaggtgaatgagccaccagccattttttcatgccagtgtgaaatgttgagtaagggaagaaggggtggcagctggggggctaacatttactgagcagcaagcaaataccaggtgctttgcatttcttttaacacaccaccttaagaggcaggtgctctcatgcccctttgacaaaggaggaaacagcctcacaggttaggtagctgatactgtgaggcatgcggctaataaaaagccagtgccttttccacaccaagatgcttatcattaggggccctttcctcctctgttagatttttttttagatagttgtgctatta

SEQ ID NO: 123722 - DNA, 1010 bp, Homo sapiens
gttccagtggaagatctgggaggtaattattgcagtgggagagatttcattttccatcaaagcaaaaataatacttgttttgctaggagaggaaggagatgcacttgaattattaaatgattttaatttcagaaaaaccgtgaacctcctggaaaacactgatagagtacagttttttaaaatttctttctctggcttgtttttttttcctttggtgtgggagtagaaaggagaaaaacatgtattagaggagtggactttagaacactgaaaatgggctttgaagacagagagctggattgaaatcatggcccaaccacctcaccctctgaatctgtttcctgtgtatgaaatgcagttgtctctacttactgagtgggctgtcaggataaaaaaaacaagaagtgctatcatttattctcactgtttgccaagcagattccaagactttcttctgtctcattataaacaaagattttagcagtatttgtactagtttgtcaatgaagaaattgaggtctcagagctaagtcaagtgtttaaggctgaatggctagtaaccagtagaagtaaggagtgaaccaagttcgagtcacaaagcccatgctcctaaccacgaagctttgctcgtttttctgggaagtacaggccatctactggtgccaggcagggtcactgtgacagtgcatccagggttaatttcctgagaacaaatggggtttgaaactggcctggtgctaagacagagtctccctgctcccctcattcctgagaatggggtacagtttccttccacagaggaaccgtggttttacggggctgcatcttgcccatagggccactttttttttgcttctcgcgaaggttcctcctgctcaaatgtgcatgtatagagagtttcctatatcatttagcttagcagtgataggttaagattttcaataatatttattatttgctggatctgcccgacactttgtctgctttccttgcatttttccgcatgtgtg

SEQ ID NO: 123723 - DNA, 1038 bp, Homo sapiens
aagtccagctttacttgtttggatatataatttacttggataaagaggaattaggcaatatgatgggctagtgagtcaagttcttttggtctctcccttgttcaaaggtattacagtgcaaaggaaatgtgaattttattcttgtgcctttgggagtcccatgtcttattttatgctgtctttgagactctttatagtggagtgaagtgatcatcagaggaaactttttatcctactctagggtctgggaacgtgctccagggaacagggtaattatttataaaggtgaggtatagtaacatcatggcgtggtgtaagaatggctcttgtggagaggtagtatggttgagtgtaaaacacactgggtgtccagtgctcattcaagtccttattgatactattttctttatcatcatggttattattattggcattggaagtttctttctgagaccctgaataggttgatgaccacctccttttgagtagtttttgaagtaacatattataaagtggttatatgctcttggaaaaaattattatgtaaaattgcacttgagtgctagcacttgaggtattaagtgaccagctgcccctgtacaaaaatgaaaactcattttggaaacctcttatctaagtgagtctatgaatcataacagaaaataagaaaaatgcatggttttaagtttgacttttgcgggagtactgcatttgttgaatttgattttaaaatataaaaatagtctccataaaacatttccatctgtaatctagttaagctaatcatgtaaaaagtttctgaattctctacttttctaaagcattcagaagtcttaaaaatgattttaatgaaaatatgaaaattttctactaggatacttgcataatttcatatatatcacccaaaatgtttattcttgtctggtttttacatacatccacaaaatttttgatattcttttactaggaggtggagcttaattcccctcccatgagtgtgggctggacttagtgactcccttcatgagtagagtatgg

SEQ ID NO: 123724 - DNA, 1005 bp, Homo sapiens
tctatagtatgtagtcttcagttatcaggacaagtatcttttatgctgtaactcagccttgagaactcgttggcacattgctcggtcagtgatctgggagtccagtcattgcaacggggatgcactgagcacctgctgatgggggcctccatgggagccatggggggcacaccagtgatgcaggctgaagtaaaggctttgtctgcgtcctcttctgctgagggagcagaagacagtttcttcttcctcctctctcatcttccccttttcgtctttagcacctacagtctgtcctcagtaacgtaaccttcaacagtaacttggactctctgagcttccattgttttgtatctgtatcaatggggtttttaatcactgcctcagagagtatggtgataaaatatagatggcattgacggtgaaaaactggtattaaaaagtaagatataacattaggacccatttctgccaacataacttcaaagacatttattttcacaatatcatatataaatacacacattattattttcttttaatggcactttattgtaagaatttctcggccaggcacagtggctcatgccagtaatcccagcactttgggaggctgcggcaggcagattgcctgaggtcaggagttcgagaccagcctggccaacatggtgaaaccccgtctctattaaaaatacaaaaattagccaggtgtggtggcaggtgcctgtaatcccagctactagggaggctgaggcaggagaatcgcttgaacccaggatgcagagcttgcagtgagccaagatcgcgccattacactccagcctgggcgacaagagtgagacttcatcacctcccccccaaaaaaaaaaaaactttctcatcacaaagtttggtcaaaattgtgactgctattacattacaatatcctagtttgaaattcacgtagtccaccagtgtcaaattctgaaaaaaaggactcaaagcctgtagttttttactttatgaagt

SEQ ID NO: 123725 - DNA, 1940 bp, Homo sapiens
ccacatattaagagtataactgaattctcaccaaggcatacgagagtcccagttcctaaagatattcaacaggtgattataactacccctttaataaaatgaccaattactttgataatttcaatttgcatatttaccttaacttatgccagaaacagggtattatttatcctcttagcatatgttttgtaatgattctgttacatcagagcttctgttgatgagtgccactaaagtgagattgttgatgaggattggccttatttttttgtggttctattcaatacttgccacagcatttattttctaaaacatttctacagtctatacttatcagtgtctgatcacatgcaggcactggtcaaggtggagcatggtcgaggcgttcttactgatacaaactcgtgccttctcttggacacaaggagcccatgttctggttaactctgtgttcatttatttcacttgtcatgcatcgcctctatcttctccctttattatgttctcgaggttatttatttggttatttatttgtcagttacttcatcctcatccagctttcttatatcagacttcatccattcaagtctaccgtacaactagctttcctttatcaccaaaccagataattcattctatccttccaaaatcatgggcgttagttttggtgctttttaacgtttcacctcttttatattaaaaaaaaaaagtgtattgtggaatgtttagaatattacacatatatatctctaaataaaagaacatacatagcacactaattatgaaacatcaactatcaaataaacattcatgaattcaccatccggtttaagaattagagtatcataatgccattgtatctacctgtatatttcttccttatcccaagctctatacctcttcctcacttcaaatatccttttaatcttttttaaaatattgttcttttggtttttgggtttttttctaagaattttattacaaacattcatagagtatatattgttttattaagttcttagctttatggaaatgtattatatttggaatgactataatttatcatccaatatgagacacttttgtgcatgcaaagggctactattaacaattacagtaggatagcggcataagccagaaggtcttgggcaggtcagataatatggtcaacccacttgtagtgtaggctaaaatttgctttttttaactaaacgttacatttctaagattcatctgtaatttgatataggtatacgctcagtgcattttgattaaagcatttcgatgttatctttctttcaaagatatatgtttgtcctcatagtgtttgtaataacctggacttatctgctgcttttaactttttaatgctatgaatactctgtagtctagagtttttaagacagtttttggtgttgagatggtttgtgagatgtcacctacctaaatgttggaaagttatatgtaaaatattgcgttactcaaagagcttactctttcattctaaattgagtcaaaaggactttttctaaaaacctaaatgaaaactttcttgaggtataaagatataatgcttttaaattttaaattcctgacatgagtagttaaccatctgaagactttccacatgtctgtccttccaaatggggatttctaaacttgtatattcattgtttggatttgatgcaatacagaagataaaacccaacagaaaagctcacttcgggcatgtgatcctgggtatcaggtgttacattatatagtattttacagaggaagtagctcagcaaatttaactggcctcagagtctgtggttcagttggtttgcacagggtaaaagctggtgagtgggttatacaccatcacaaaggatgcccattcttcgcagtgactgcagatgcgtgcggacggagagcacaaggatctcactatcatttct

SEQ ID NO: 123726 - DNA, 1031 bp, Homo sapiens
ttcactttggcgttaggagggctgctgggttttggatgtgtattgaacaggtcttgggtcttacgctgggcctgattgcccctaatgcatggtggaagctgactcagcacggcatctgaatgcaccgctgttgccagaagattctgcggatgttaatttcacttgtcttgcctccagagccagccattccagtttactaacaaagcaaaaatgtaaataagccaaacttaaaaattttttattttattggccagaggcttttgtcagcttttcctccatgtgctgtaagcagcggcagtgtttaaatattgagaggagggagctcaccgtgggggtgaggaatggacaggcaggtgttaactgttcatagcctggctacttttgtttataaaactaagctcatctgttttattaatgaagatctaaggatagtaactgaaaattcctgaatagatttttccgcattcttttttaggcattaggcatttggtatttgtactaagtccagtgtaagtagagttaactcactttgatctggcagcagaaggccactgattataatagattagggtcaaaaacacaaaattaggtcttcacgctagcacataatgagtagctgtttgtttcatggctattgttcttcttgcttggtattaggtaagactaatcaaaggcaacatcatcttagctatcatagacagaaacaaaatagagttgcatcaaatatgaaagtagaaccctttttcttttcacatttcgtgcttcgctgtttgaggcgctcacctgccacctggcctctcggcagactacctgctggctggctgggcatgagggatgggtcagggtgccttcagagctgagactgtgaagccgggaggcacaggtcaggaggaatctcactcacattccaggagccaccttcactgctcccatctttttctactgatacctcccctccccttctccctctccagccagctgcgcttcaccctactccagtgatcacctctgcacgtgtgcctcctgcctgg

SEQ ID NO: 123727 - DNA, 1030 bp, Homo sapiens
tatcattggagaatacagaagtgtgcaatgatggaacttactctaattcatagtatagtgttttccagttgtatttttttccattatgcttacatcataatagacattgctgaggaaagaacacgggggctctctttatttatttttttaagctattttaatgttaaagtgccttcataaagtgggttggttcactgtgcccagcagtatgcgctttaaaaattattaccacactttgtttaagaggttttacttgtgaccaacacatgtcatataaaaatctgtaattttgaaggtgtttattgaattcggttggttcggagggctctgaattttcttctttacatgggccaaggacacaaatgagtcttctgttatcactttctcaaatgcattttctgagtcatcatctgctgtgacgatgtttaaactatgcctgtggaagatcaagttgtttcttagttactgtagttactgaatcatagtaactatgacttagtagttatgaaactatggtagaaagatagggagtaaaggaaaatgaataagatggtttgggtggatctgtatcatgataaagctcttgtatctttaacagaatgaatttggtatgtgaatattctcattgctttaaagagacatctgtcttagaattgtgccacacaaccagaagtgctgcttggctgtggcggtattttatgaatcatgggatgcattacttacagccttttttatttctacttgaaatattgtgcataagagcagtgcctcgggcgtgcactgtctaagccacggtgccctgtgttcacatagaattactgtttgtttttactgtcatgagtctatgaatccagcctgtcatgcagaagtgatcctgataatgtaagcacttactgtcttgctgcagctgattccccagtgacattttaaaaagtcagtatttggctgcagagtgctttaaatttctaaatggactatagattggaggccttagggtatttcataggaagcacatgaccctgcagtgagc

SEQ ID NO: 123728 - DNA, 1083 bp, Homo sapiens
gagtgtatttgtgtttccaatttattgaagcaaagagggagggtagaagataaaatagcatggtcctcatgtcacgagagctagttagtgccttgaggactgtgctaaattcagctgctttttaaattccgttacatttttagtcttagaaatgcatttaaacctctcagccaaaaagtgagttgagatcatcagctacctctgatgatttttaaatttcaaaatctcatctcctgccttcacatgactcattatctctcttttatcagtatagtaagaagtatcttcctttaaataatattctcagattatgacttattaagtatttgctatgttcagagagggattgaaggaatacagataagattcctgtcttaaggagtttacattatatttggaaaagacaaactgagcatacacttaaaactggaaattaaatagatgctattgctgtattagcaataaagatcaaaagagatgcagaataatagtcccttctttagtgatcatgtatactgcattttatagtagtatgttttttgtttcttaatggaggtcttctaagtttatgttaaatctctgactgactaatgatgaagatgttttagaagtctattgatattactgtactgattggatattaccatgagtaattgttggccactctgcatgcctgcccacctggagactcacgtaagagtcaggaggatgagtttggcccagctctcctacgttttcttaaatgcattgcagaagtgtgtgtcaagaaatttcagctacagattgattcatatatgagtttaggaactcattcagtaacaacttttcagcaagtgtttagctaaatatgtttattcatgtttcctctttgtttcccagggaaaagatgaactattacactctgagctatgtctttttttaatggggctataccttttgtgatcataaaaattaaatgtggctgtgtcttggttttgcatgactgcattattaatgcaaagggttcccccatctccactttccctcctgtgttttacaggtagtcagatgcctccgcagccacccgggagccagtcagaatcc

SEQ ID NO: 123729 - DNA, 1033 bp, Homo sapiens
tgaaagactgtgagagacattattatattgttatagtttgttttcacactgctataaagaactactggagactggatcatttatgaagaaaagagatttaactgactcatagtcctgcaggctgtgcagcaggcatggctggggaggcctctggaaacttccagtcatgatggaaggtgaaggcaaatttagcacatcttacatggcaggagcaagaggaagagagcgaaaggggaggtgctacaaacttttaaacaaccatatctcgtgagttctcatgaggtagcactagggggacggtgctaaaccgctagaaaccacccccatgatccaataacctcccaccaggccccacctccaacatttgggtggggacacagttcaacatgagatttgggtggggacacaaagccaagctatatcactgtacattcccttttgtgtgtgtgtgttggttaggcaacaccctgaaaaggaaaactttctattttaaaatgactgttacgttagaagatgctttgccttgcatgagtgaaatttcctccagcactgggtagcaaggctttaaagaaaatggctttattatttattaaaacttaggaagaaatgttagctcctaataacctttgatcaaatgccacctgatcaggtgtctaaatgacagtgactttagtgctttggcacaataatagaaacatctgtttgttggaccatcatttggtatgtaccagcagcatacacaatggaaagcagatctaagaaaactcttactaggaaattccccaaaattcattcccccatattggaaagtaacttaactttgtttatactcttacggttgatatatacctaccttgtttagggaagtgctgaaagaaacaggccaagaaatacattagtgagttagtatctttttttaaaacgagtatatcagactgggcacggtggctcacacctgtaatcccagtatttgggaggttgaggcgggtggatcacttgaggtcaggagttcgagtccagccttaccaacatg

SEQ ID NO: 123730 - DNA, 1063 bp, Homo sapiens
cttacctgtgtactttgtcctgattcttaaggtcctcagcctggctcttagtaggtgcttgagtcagtgtttgttgggtgaacaaatgaaggaagcataaccagtcaccgtgctgcccctatgggccaggcaccctctgaagcagcccagatgtgtacagtgttggtgacccattaacagctgggattacagttgattcacagttgaactctgttccagactccagaactctgcgagtggagggaccgtggccttgtcagtttcagaactccagggcctcatgttttacctgctgcttctcattttaatctgcagggactttggaatcagaagatctgggtttaggtacaagctttatcactaactagttttgtatctttggactatttgtgaaatgaggatcatggatatattgcacaattcaaataagattttgtatctaacagtaaaaactgcaaagcaccgtgaacatagtaaatgtaagatcaggttcagatacctcaggtgagacctgggtcgaaagccttaaaaagtagtttatttgcttctccagggcatagcgacgtacgtactttgtctttttcctcagcactgaagtggacttttgcagctaaaacttaaaggatttgtgtaaggaatgactggatcttctgtccccatctgtcatctgggtgctcagtctgacccctccccggactctcatttgcccagtgataggtggtataagttgcaggaccagtcagtagcggaaaggagtttgtggggtggatggggacagcttagaggttgctgtgcccggctccaagtatcaggctctgtggtagtggggaaggagagggagtcgttttgccagttaacctaatagcacagctggtgtggcgcggggggcctgggttaaagccttgaacgggccattagttcctgtcttcttcaaagtagttcatgttgtgaagagaggaaggcaggcaaataaacactgaacatagttaaatgtaacgagaatatttttttaaatctatttttctctccaaatggagatgtgacacctatttgtgaagagaaa

SEQ ID NO: 123731 - DNA, 1148 bp, Homo sapiens
tcacaagagaagataagggaggagcagagaactagtggaatcatgtccagcatgcaccattggccttcctccttcctggaagtggatgtaggttttgtcagatacacacagcatccttttatcaaggtttttaacctgatgtgtgtaggtatacatatatatatgttttttctaagtcacttttagcaataagacatttgaatttaccaccttccttatattttgtttatttaaattagacatgagtggataatttagagagaatgagataatctggcacaattcccagagttctctcacttctgaaaataccaggaacattccaggtgaagatgatgagtgccactgggaaactgtagtaaaatgtttaccacttctacaacaaaaccaggtttgcctggtgtagcgccttagtatttcctagaggccaggcaaatagaaggtgaggcccagtcacctttttacctgctggttctcagaaaatcgcatctttctgatgtatagtactttacagcttgaaaagcgagttattatcttgtgttctgaagatgtttttccgaaagatcttaaacagtttcagtgctaccaatggagcattgtttctttgccttagagggctttgttatatttactttccaaatatttctgttggtaggaagactatggggatacccaagaaagcaaacgtctgtatagagcctctcctgcctttgttctaggcttgtcctgagagtgagacttggtgttttgcccaattctctttatatcacatcatcaagagttttccatgttagtaattccagtaagcgttaggaatttcagtcccagttgacagtaatggtctgcttgttccctgtcagtgcccggtaactatgacatgtagcagtttgttgcagagcagaggcaggactgtgggtcacccaccatccttactgaacgtggtgggtgtcgtcaaagccaggtttctttagctgtcatggaaagaagagagcttagtggcagttggaaaaacggtttgtaacttgtggtaggcacagaaaatgcgggcttttgctcctaatgtaattggaagcaagatgcagaccttgttctcagaattgggtgtggctgaaggtctaggagttaactcttaagtccataagcccttc

SEQ ID NO: 123732 - DNA, 1015 bp, Homo sapiens
ctttgtgtaatattgtaagttttacattttaaagaattttaaaatgcatattgacctaagagaaatatggtaccttatgtatagttcagaaaacaaattctctctatttattcccacaaataggatttaatgcaacttgcggtaagtcagctttcattttgatgaacctgtatttgtgatcatctacttgatgcatttctctggctgaaagagcagcattgtgtgatagatctaagtagaaagatagaattgaaagaagctgtattgaaatagaactttatttttcacagaaaagatcttacttaaatatgataaccagcaaataaacacatggaaaatcctcaaaatttttttcattagggaaatgaaaactaaagccacgttgatttctattacatactgattcgaatggctaatttttttaagttggaatatcaagtgctggcagttagaactctcacacagtatttgatgggaatatatacaaaatagtacagccacagtttggcagtttcttataaacacgtacttaccatacagccagcaatctaatttctagggttttaccaagaaagatgaaacatattcctaccacacaaagacctgtatacaaatttttagcagctctactcgtaattgccaaaaactggaaaccatatccaagaatggactactactcagcactgaaagggaatgtacagatgcatgcaacggtgtggatggatgtcaaaggcataatgctaagaagccagccacgaaagcctatactgtgtgactccatgtgacgttgtagagaaataaaatgacatgaacggaaatcagatcagtggttgccagggggtggcatggggataaggttgacttatagaaggggaagagggaacttttccctcctttcatttcttgtgagagaaatattctgtaccttgattgtgctgtcgattacaggattatagaattttttatatctcaatatagacatgacaaagccgggcacattggctcacgcctgtaa

SEQ ID NO: 123733 - DNA, 1049 bp, Homo sapiens
gcactccagcctggatgacagagcaagactctgtctcaaaaacaacaacaataacaaaaacaacaacaaaaaaaacaatattttgtagtaactgttataaaaatggtaaacatcactggctacaaaacaagataaatgcatatttagccctaattcacaactgcctttatcatagtatgtagctaattatgcatttcttttttccacaagggtaagatttctgatttattgcattcacctccattttctcctccatcatatagggaatgacgcagaaccttgcccatagtagttgttcataactgttgagtgattggaacttagaagcaaaatttcgtatatgagtggaaacatttagtagtttacaaaaagcagtaagctctgagtatgcattgcaactatcaactttaaatattctggagtcaggtatagaaatttttgtgatctgcctgaaatgatgatggtgacttgaatagggtctagcttctgcttcctctctctggtgcttgaatggaactcctggtgggtagaaatctgaattcatttggtgaccaattttccaaagctagtgtgccaagatgaacccacttgaaaactgtgggtccttggacttggctgcaagaccagtccagctgaggtgggctggcccagcatctgccgccttcattgtgcttaatgctggatccatctgttttctgtcaaagccagtgccaacaaattactaacctattagagaaacatggaaataagattgcacttctcattcctggcttttcctctcatattttgcttggcttacatatttggtttttgtttattttgggaagaaagatacgttatcgagtagttggggggggcatgaatcatttttcaccccatgcacacatttttaaaagatggggggggtgatgttagtgatgttgttatggccattgatgacgatggcagctgtcatttgttaggcagtgcggtgcctggcgctgtacttgttactttcaacctcttactcattatcgtagtcactttacagatgacagaaccacagttca

SEQ ID NO: 123734 - DNA, 1007 bp, Homo sapiens
tgcacttttcacattgcatgctttgttttgcttttatcctttttcttgttttcacccttgctgctttactgcacacacacacacatgcatacccatacgtgcacgtgcatgcacacacacacacatacccatgtagatgtgagcttctcgagtgcaagaactggattgtatttagctttacgtcacctgtgcctagaacagcttctggaatgtagtaagtgtatagttatgttacatggatggagaaaggcttccaaaaaatagtaaggactgattgggaaacactaatccatattccacacacacttgtctttcgcatttatgtaatttcaacattcagttatcaggaggcagcacattttattggtcaaatacatgggtccccgagccagtttgcttgagcttcagtactaatcttctagctcttgatttttctcatttgtaaatggagtcctggggtatctatatttcatgtggttattggaagaaatgaatgaattcattggtgcaaagcacttaaccaagtgcccagcacacactgtggttcagcagctgttatgattgaagtagtatcatgtgtacctttgatttacttgaatctatctacacacaatcaaaaggtgtgaaaggaaagggaaaacaactgccatccctcacccccgcctccggccctgccctccgtccctcacctccgaccctgccgtccgtcccccaccccagcctccgaccctgcccgccagccctcacccccgcctccgaccctgccctccgtccctcacctccgcctccgaccctgacctccgtccctcacccccgcctccggccctgcccgccagccctcacccccgcctccgaccctgccatccgtccctcacctccgcctccgaccctgacctccgtccctcacccccgcctccggccctgacctccgtccctcacctccgcctccgaccctgacctccgtccctcacccccgcctccggccctgacctccgtccctcacctcc

SEQ ID NO: 123735 - DNA, 1011 bp, Homo sapiens
tgtggccagctccctgaagcctgtattccaggactcccggagagtttacaccctctggtttgtcatctttgtacaaccgcagggccatacaccagacagatggaaaggcatggtgcagcaggctgccaggagccaggcacttggtctcactgagtgttagcagtgttagagtcccatagagaaagaagtgtagtataccgcactgatagtaggtttggggaattctatttctgctacttactagctgtgtgactttaggcaagttacttaacctttctgatctttattgcctttattaatatatgagcataattccacctaccttcctccaggaatctaaaacattaaatgtgtatgcctagaatgtgcaccaggcatgcagtaaatactaaataaattactgtcactatcattaccagcccctccctgttctggtgtaaaaaactgaaatccaaaggaccagagctcccagagctccagtgacagagtcaagacccctggctttttaaccaaacttttaaaactacagatgtgctttaattaaggaccattgtaaccagcaactgacatccaaggcatggacctcattgttagtttaaaggtatttcttaaaacctgtagtgtgtgccttcatcatcttctggtgattaaagatggacacggatggacagtgctgtcctgggggagaaatcctagatgagggttggatgattacttcattcagtcatttgcctggtggattttctattctgattctcttttttaccttagtataaacaagtgtctcaaggaaccattagtttcatacatgttagttacactatatatgagacggaatttaatggaagcttgaaaaggcgaccatctttgtaatgccttttttcaagaataaaaatgttctgtagtaattcatccctttaacaattttttttcttttttttagtaattctcatgtgcaagggattaattaggcccagatcctcctctcaggaggcttccatacctagaaga

SEQ ID NO: 123736 - DNA, 1261 bp, Homo sapiens
gtgtcctgggggtggccacagtggggagggggcgctgatggcaatgatggggtatgcagggcctccagggtactcgctggccccactctgtgccatggagggtcctcccggtcagggctgtcagggccttgcgtatccaatgagagcagtgcgtctcccgagccgttcttagatcctgtgtgtgttaccttcacagtggactttctgtcttggcacatgtaaacatagtcatgaacatccgcggatgtacatagatcagccctctgtgttttcaaaaacaagaaatcaaatattttgcagtctggtatattaccatgaaatgaaaagaactgtgcatttctgacctatttcaccatcttctggaaatgattttgcagacttgtaaggagactgagtaaaggaagaggaagaaagcaggcatgagtgttgaagttcggtttgactcatgtcatgtgttctttacgttccttttgaatatattaaatccagtgtggaatagctgccttaggaccttgacccacacttactttaagaaatcgttctagttcttaaatttcaatggtaaagccagaggctggtgcttgaaaagtatttacagtgctcaggcagcactttctgcagttacagattctttactgcccctttttatgtctgaactttacatactggattactcgtgtcaataggagaaggaacagtgccttgatttaacacgtccttgtaatagtcgtggtccttctcttctgggaaaggagaagaaatagtgcccctggagtcccattgccttgggaggcatatggctcgtttcagtgattccttgagaattctggtaagaagtcaaaaataagcatttaaataaaaagaatagtaaaaaccacagtaaggaaagagcttctgatccatttagtaaaataaaacatacattttataaggtagaaatattaaatagaaccatttattactctaaattctatccttatttatctctcaaaataatagaacagtgccacttttgataatttttctatttgcacacccaaaatgcctgttttaaaatatataatagagaatgaagaaatttggggaatttcagaccaacaatgtgtttatattcatgtaagtctgattttcaaatcagtgtaaattgtcagtaatttccataatacatattggcctagttctgtatgcttacaagttgcgtttgtgtacgctagcacatttaatgcgtaaaatagaatcttactattcctgccttcaaaat

SEQ ID NO: 123737 - DNA, 1119 bp, Homo sapiens
gccctgttcatcaaacctcaggtttattttcatttgaaataggcctggtttctggttcttcccactcatgtataaggctcatcattctctcccgtctctctccttccctctcttcctcactctgactcttcacatctggttggtgcctcactcgcagcccctgcagcccagtgttgcgcagatggttttcacagtggggttctgtagaaattcagctgttattccctggatagctacactgattccttactctagtcttgttcttccactaaaaagaaatctaaacccatatttttaacctgaaaatgtctgctgtatctgcaatgaatgtggagaaatcagttgttctatggtgaacctttgatgctaaagcctaaatagaattgattggatttctgagcctagtgctagaaaatgtggtgttgactctggagctgctgtgggcctctgacctgggcattgagctgctgtaagggttgatgaccacaggctctcagacagactgaaaggatcccagcacaactgcaaagtaatcagaaatcctttccttccaaaatttatttttaattatattgtttttgaagccatctgctgtgattgtcttcccttattgttgactagactacgtgcaatagataaggttttcaaaagaaacactgtgaaatgtcaaataattttgcaaactatagattatttgcacttatgaaattgagaaggcactaaatcctctaggacctaggtagaaaatacgcacacccagtatttgcctccaactcctgattagtaatttaaacatttgccttatttccacttgttgcctactcttttgaaggtataataattttgaaaaaataatattgatataagttgaccttcataggtttgggtcttaagcacacagaatgactgcccttttttttagataaaaaaggattttgccagaatgcggtgctgtttgcatttcagaaattaatatgctccccattacaatttcttttttcttttcttccttcaagggaaatgcaagggcctcctgcttcactctgtaacttgtgttggcaggagtacagtctgacgaatcacacatataatcctaaactctttctcctgttttcgatt

SEQ ID NO: 123738 - DNA, 1203 bp, Homo sapiens
tttttgataattaattaattctacttgaatgcttgcttgtttatttgttttgtaagactttttcttcattatttatccatgaaagggttttctttataaataataatattagtgacaaaatgaataaagtttgcgtgcatcaaagaagttgatttctggtaatgaaaaagctgttataaagaagcacctctatacaaagcatgcgagtgtgttaactgggtccaaactccttcacacagtgactttttaaaaatgtctgatccattatgcacttatagaagattcttcaaatgcgttacttctccatttatatgggaactaatagcagccattgactgaatgataagtttggcccctgacctgtattttgcatgttctatctatttcaaaactgcctacctgaaagaagtaaatactcaatttgggtatggtttagtgtaacatcagccctgctttatttttaacccatttgtctgaaattaataaaaacgtacaagttgttagtatgtgaatgaatttttagtttaataatgtgtacctatgttagaatcagttgagatagaacaattgtattctgcacaagactgctgataatcttgaaattaagtgttgatttttgtatgatatataaattataacaaaaatgtcacggatgtatcagggaattttgtaagcctcaatgttcttctgaccctagaagtgggcctttagtttcctactaaagaaattctgtaccattagagagaaaaaaaaaatggtgctgaagcaacctttattttacattcatataaagaatcaaaagatcttaaaaaaaaaaaaacaacatgcaattacttgccaagaaggcttaattaacatgctcatttctgtaaggcgatgtattgacgagcacggctcaggaaggcaagttggaggcaagaagaccctagctgtgcagaatctggcaatctagtcaaaaccccaaaaggaggctgctattaattatccattcactggtttaaacagatagagcctgaaggcttgaagagttggttgttctagtaaatgtttgtaaaattcacatgcagctctaggataaccagcattttccctttcagaggaggaaagggcgatattcgctcttaccttctctgtagctacgtttcgattttgcagcacccgtgatgaaagagaaagcgcttctaggatgggtatagcagacag

SEQ ID NO: 123739 - DNA, 1023 bp, Homo sapiens
caaaaaacacacgagcttatagcccacaccactggttcccgtgactggaaatctaccttatatttttcagcaagcaccgtgtggttgctcatcctccagatgctgtagcattttaacgaagacaccctttagccattcttgttttgacaaggaaaagtaggagtccatttaatgttttgggctctataatatcacatgtaaaaattttaattcactatgatcattccatgagctagaacccttttatttttaaaaataacatgaggtgtcactggaattttgccttctgggattcaacgcttatatccaaaaagggctttgttcttttttgtttttgtttttaagtgtataaaagggggagtttgggccttttatttaaagtaaaagtaaattcctaactaagaaaatgtatagtttgtgcctgaactagtagccttcattcctaattgttgtgtgatagcagtagtttttaatctcttctcttcttgtatttgttagctcattacttttttctcaccttcttccctctccctctgcccacccatgccccacctccacatgctgcttctgggtactagaagtccagctcctccaccactactggggagaagatcacgaaggtgtacgagctggggaatgagccagagagaaagctctgggtcgaccgatacctcaccttcatggaagagagaggctctcctgtctcaagtctgcctgccgtgggcaagaagcccctggacctgttccgactctacgtctgcgtcaaagagatcgggggtttggcccaggtaagaatgagtgagggagggggtgaaaaaggaagcattgtggataagttcttacagtggctttctttgaatgtgtggactcattttttttctcacaaaggaaaagctaagcctgtgtgaaagtcgccttcttgcaacccacgtctgtgtgctgtcagggagcactgggggaccctggctctgccaccaactcgcagcgtgacctcagcaggtcatgttcttggacctcagtttc

SEQ ID NO: 123740 - DNA, 1050 bp, Homo sapiens
gacgtcacatttcaggagttctctttctttctcctccttttgcgactgtgttgtctccagccctttaagcctccttgagtaagagcaccgcacaggaaggtgtgcacctgccccgtcagcagggctggtggccagtggcatcgcatcatgctttttaagttgggggccgttggtccaggggctcatttgcctttgcacgaggtgctgcttttgcttttgcctgacaccccaagcagtcttggggtgaggggatgggtacggcccagaatcacaggcccacttctgagggcttgcagctgctggaatgagcactttcacatcagtgcccaaaaacctaacttggaaaatagtgccgttgttgctttttaaatgttttgagatgccctttttccttaattggaggtgcagtgggatgagcgtgaggcgttgggagatgtggcgggcagaaggacctccgagcagtgctttttctgttgccatcagcaggttccctaatggttttataactgtaaatgctgcctatgcactgctgagtgggagtaatgagcattagttaaaagaggcaaatgaagaaaagtcaaccaagacattaagtgctttttttgtctcctggctttaaacaagccactttgttgcaaaccaatgatcctgccgtgtttttcactaggttaataaaaacaagaagtggcgtgagctggcaaccaacctaaacgttggcacctcaagcagtgcagcgagctccctgaaaaagcagtatattcagtacctgtttgcctttgagtgcaagatcgaacgtggggaggagcccccgccggaagtcttcagcaccggggacaccaaaaagcagcccaagctccagccgccatctcctggtaagtggcggcgctgcagtcactggcccaggaaagcccaggcgcctggcctgggaggttccgggaaggtggtttcacagtcaggccaacagggaacttgggacttttgagaggtggggggttcctgtgtcgttttgtttatttaattggacgcccactggcagtgttaagggatgag

SEQ ID NO: 123741 - DNA, 1272 bp, Homo sapiens
ggagctgagcagatgttgggatcggtatgatcttggagtagtaagtgtagaaatggcatctgcagtgatgggattgatgagatccttgagacagagagtgcagaagtttatgactgccatcaggagacaccaggctggcccttcccttgatgcctgccgactcccaaggttgaggtggcactgaggctgtgactgtctgagccactgtccttcagttctgcccgtggtctacaagccacaagtggagacttgatattttgctcttgcgcattcttccaagtgcattcaaggcctgtgaaattgaagcatgatgtgtatattattggaaaaaaacatatagaataaatagtgaataatatttttatggaaatacttactctggaatcccttaaataatagtacctgtgttggggtacataaatttcttgataatattgtctgagtggagagaagcataaagcccaaagccttggttttcatatgtattatagaccaatgaaaaagaacaatggagagtctttaaaatttgagtatagggcatataccatttaaaaatgaaattcatagtatttcatgtacaacatttcaggtaacactcataaagcaagatcatctatgatttttttctttcaaaagtttcagggctgcttattccaagtgaggattttgtaggacatgcagtaaatccataagcttagaatttcaaaagctttgtgaatgttggggtagctgtttttcttagtggtatgagatgctagacagaacatttcgttagtgcttttggtggctttagactctgaaaatatgacaacatggaaaaaaataattagtagtatttagaatttggcctcaaaatgtattgcaaaccattcccatatcccaccgatacaccacattagacaactataggtgtatttccctcgtgtcctcatgcctagaatttcttattacaaaaataaatttgtgggggtggaatgattctgggatcaccttgctaggccctaggtagatatatgcagatacttctcaccttacagtggggttacatcagaagaaacccatcctaaattgaaaatattggtaagttgaaaacacactttcacttacgatatttttgattgacaatgagttgatccggacataaccccatcttaaattgaggagcatactgaatgcctgtcgctttcacaccatcataaggttgagccatcctactttggtgactgtctgtaatgttgttttcatcaaccatgtaaatgatccccggtggca

SEQ ID NO: 123742 - DNA, 1050 bp, Homo sapiens
tatggtacctgagacaaaaataaccataaaatcctaagaataacaaccataaaaatcccggcaagcaagtctcagataaataatagaagagaacagagtcactttgggcaaaagagtctataaaatccatgttcccactcttctaataatgagtacattgtctctaaatcaggaacagaaaggtaaagaacagcaaggcactccctcagtgataagattagagatatgagaataaaaagtaagttttcgtgtagatagtctaagcaaggaagcagcaaataaggaacatgctaaacatcggtttagtttatactgtaaaattcaggaagttcgctggacctgaagggtagtttatctttcatggtccagccaaaaagggagacaaacgtgtgacaatgatggaaaggtattgacgggtctcaggatctttaccctcctcggtcatatctgatgtcatgacattgtacctgttctttctttcttctcctcctcctcctctccagttgtctggatttctcgaacttttagtcgagtactttagaaaatgcctgattgacatttttggaattcttatggaatatgaagtgggagaccccagccaaaaagcacttgatcacaacgcagcaaggaaggatgacagccagtccttggcagacgattctgggaaagaggaggaagatgctgaatgtattgatgacgacgaggaagacgaggaggatgaggaggaagacagcgagaagacagaaagcgatgaaaagagcagcatcgctctgactgccccggacgccgctgcagacccaaaggagaagcccaagcaagccagtaagttcgacaagctgccaataaagatagtcaaaaagaacaacctgtttgttgttgaccgatctgacaagttggggcgtgtgcaggagttcaatagtggccttctgcactggcagctcggcgggggtgacaccaccgagcacattcagactcactttgagagcaagatggaaattcctcctcgcaggcgcccacctccccccttaagctccgcaggtagaaagaaag

SEQ ID NO: 123743 - DNA, 1074 bp, Homo sapiens
ggaccgtatagattaaccaggatgaatcagggagtgtgttactagtactgtccaatgtaaagatcacctaacttctgtaagttagtgttcccaccttatggggttgtacgccttaggtggacccaggtgctccaggtaaactgtaatactgtgtgacactgcatgttaagatctcttaggctgggcgcggtggtgcacgcctgtgatctcagcactttgggagaccgaggtgggaggattgcttgagttcaggagtttgagaccagcctgggcaacatagcaagaccccatctctacccaaaatgcaaaagttagcacatgcctgtagttccagctacttgggggtgctgaggtgggatgatcacttgagcccgggaggttgaggctgcagttagccatgattgtgccactgcactccagcctaggcaactgcctcaaaaaaagaaaaaaaaatctcttgttcccttgctgtgactctgattccaaatcaactgcttgtaaaactcctacctagatttaaaaaaacaaaaacaaaaaaaaaaccactgtcttgcacataagaacattccagtttatctaccattccttgatttattcttgacgaaactcctaagtttcttctgtctgccatttctgtgtctaaaattctagctttgaatgacctaattatatttatttattcagaaagaaatcccatcctcaatggcatctttatatatgaaagccaacaatacacactcttcttctgggagggaataattattatggagagttgacggtttaggacatgttgccttgcagattaagagtggtttgtttgtttgtttgtttgtttgtttgtttttaaagagatagagtcttgctgtgttgcccaggctggactcaaactcctgggctcaagcaatctacccacctcagcctcccgagtagctaggactacaggtgtgagccaccatgtccagctaagagtgaagttttatgttatttattaataaatttatactcagaagaagaaaggaagtatatttcattttctttcaagatacctaggatatatatagtccctatctttta

SEQ ID NO: 123744 - DNA, 1033 bp, Homo sapiens
taggggattggcaaagattggtgagagaatggaatatcagaactggactcccggagaggaaaaggaggatttgagagctgggtgtgagtccaggtgaaaggaatagtgacttagtggcagccattcttggcccagggacttgctggttgttttcatttcctgcttcctccctcctaagtggtacaaccgaaagtactgaggtgtaatcctgccattagctataatactgtactgcgttttgaatagataatttgagtcaggttttcaattcagaaggaataatgagccacctaggataggaagtcactagggagctgtctagctatacttggctttccacatctttgagtagacctaaatatgctctggaggtcacatacatctcttcgtctttgttagtgctttccttttttatctcaagacttattgtaaataaaaaagctgctttgtttggtatgtttttattttgaacagttttttttccccctcaagattgatttagttgtggctaaggggaaaaactgaagaggcagctattagagagattgtatttctgaagaggttcaaacgatagaaagaaaatgactatagaaagtagccatcccgcgaagagtctttatgtccttgaatttcatgttcaacaacacttatcttggaaaatgacttgactggtgaaaggaatcattataggtggatggtgggaacagtcaccaggttaaaacatttcaagttatgactgagataaaagaaatgacagctatcaaaaattgttgcttttaaaggattcctctaaaacattggccaccattaaataaagatgacccttttaaaactgcagtttttaatttgacaaatgttaaccaaaaatctgaccaccagtgctaagaggattcatgtacctagtccccttaccatttggtttgtggctctgtcatctgaacggggtatctgatccttactgatagggaaaacatggccaggaggtcaccctgaaacaggatgtcaggaactcagctgatggcacacctttccc

SEQ ID NO: 123745 - DNA, 1059 bp, Homo sapiens
tctggtgcccttgctcatcttaatattatggcaggaaaaacattcataaaataactgagttattttaataccactttaatgtcattctgtgaaaatgccaatgaatgggggatagagaaatcttgacaaaatggtctaggatttttctggaagaattaacaggcaaggtgccttgcatactcaaatatctgtgagtcagagaaggcatgcaattattaagtagcaaagccagaattagaccttgggttgatttagcttcctaatatcatgttgtttgcacagagaggaatttgcaaacacccccagaatgcttattctttctgcactgattgtttttacctcaacttttctgtttcatttcagggaagtatggccacggctgcattaccggaaagcgggtcttcccttgccttgcgagctctgggctggggctccctgtatgcatggtgtggggttggtgtgattagcttcgcagtctggaaagctttaggagttcacagtgtaagtaactactgtcttgtccctggtatctacatgtttattctgcttactgtgttctaaatttttctggttttcaaatttatttgcatgtagtttggtcactgtctagggagatgatgacagagtacgtgactaaattcttacaaataactagacaacttcttattactaataaatacaatttttgaaggtggtaaaacttcaaatataattaagtaatgactaatttatagctaatgttctatataaattgacattagggcgagtgcagtgggttatgcctgtaatcccagcaccttgggagcctgcggcaggcaaatcacttgagctctgaagtccaaaaccagcctgggcaatgtaaagaaaccctgtctctataaaaaaattagctgggtgtggtggcatgcgcctatagtcctagctactcagaaggctgagggaggaggatcacctgagcctcacaggctgaggctgcagtgtgccaagatcattgcgcttcagccttggcagcggggtaagaccctgtctcaaaaacaaagtagaataaataaacaaatt

SEQ ID NO: 123746 - DNA, 1029 bp, Homo sapiens
gcgatctcctgctttggcctcccaaagtgctgagattataggcatgagccaccgcacctggctatcatgtctagatagcttttaatattagtaaacttcattgtcaaacattagaattgcgtttccccagttacacaaaagcaaataaaatgtgtgacaaaaagagtgaataacttagtcatttagttttagccctcccctgtctgcaattcttctctcatcccagctctcattcctgaccttgaacagatggacaagaaagtttgtccaagagaaatgaacttactagaactcagcaacaggtgttgatacagtctttagcccctggagaaaggcagggtagaaatgattattcccacatcaaagacgaagtgacagaggcttggtgaggttagtcacctagggttgcacagctaattagtgggaaggcttctggctgcaaagccagtgctctttctgactaattgtgctgctcctcgttcaagtctagggtactggttaaaggcatggattttggaaggacagaccctaagattattactagcactataaccctgggcaaatgattggtcttttttaagccttagtttcccaatctgtaaactgagattaataataatctacctttaaatgatgggaagattaaatagaaaatgtatactttgcacagtatacagtatagtatatacagtacagtatacggtatactgtgtaccagtgtttggcacatagcaagggctcaataaatggttcatattgttagagtaaatcttagaagtaggcccccaaggactctggtcacccttttctgagagcattttgaggaagggaacatgtaggttaagaagcaactgtgactgtgaaaaagctcacgactgtgcagtccgctattaaagtaaaaacctggccgggcacagtggttcacgcctttaatcctagcactttgggaggccgaggcaggaggatcacttgagcccaagagttcgagaccagcctgggcaacatagtgagaccccatctctaagtttt

SEQ ID NO: 123747 - DNA, 1440 bp, Homo sapiens
cccaggctggagtgcaatggcgccatctcggctcaccacaacctctgcctcccgtgttcaagcaattgtcctgcctcagcctctcgagtagctgggattataggcgtgcaccatcacacccagctaattttgtatttttagtagagacagggtttctccatgttggtcaggctggtcttgaactcccaccctcaggtgattcgcctgcctcggcctctcaaagtgctggaattacaggcgtgagccaccgcacccagcctattttagaacaacttaagcacactttagcacactatttaaaaacagcagtataatcatttctgtacatcttcaaactagattttaaaaactgctgacttccatgctgttgagagccatgggaatgaggtggggcccagcaaggcagctgatagaggagggtgtagccaacggccctgcctgtgacttgccctgagataatcttatcagcggaggaatggcgatctaacccacttgggaaggaatttgagctcaataagtctgctatcttttggtggttttcaggcgtggctcatgaatacaaggcaacagcttattttaacactaaataccagcgtctattggagatgttacttctacttgctgagaaatgattgcccttcttgtactgatcatagaaataagtctctaaaatgtgtgttcctggcaacttccttgacataatctggtatttttctcagtcttcacttttccctttctctcataagatctctcctaagtgcaccatctctggtggtataagatactgtgtctactttttcttgttttgaaactttttcttcctttaacttctaggatgttcctctcccacttacctttaattatttcctattctcctgcatcttgtatctcttctttctttcttgcctttaagtaactttgttcctctctctcctgcctgtcttaactttcctaagcaagattgcacggtcatggtggttgctctggcctttgcaaatgtgaccttcatctctgtgtctctgtcccctgcttagagcacctgccccctgacctggcatttcctcttgcctgtagagatctctgccgaggtgtcctctgactcccagaaagcaagtcattgaaagctgaatggcctgcagtttcttctcaatagacagtctcagggccccaccactctcaggaaagaacatttcctgggttgcagaactgtggcctgggaacattctcacttccacccttcccgcctacccaccgccatcaggctgtacgcctcctttccttccttgtctcttagactgcattcttcctctctgtgtctgtactgaaggttctggttcacagtcatttcacggattctttgacacttttcccatgaaaaggtggagtctgattcctctcctctggaatatgggccagcccacatatgaaggacagaatgtg

SEQ ID NO: 123748 - DNA, 1104 bp, Homo sapiens
cctgctctcattaaagatgttagcacatcagagaaaatgtaaattgaatttctaacaagcactcttggatgggaaaggggttttaaacagaatttctttgttttgtccctttcagcaaatactattgtcatgctccacaagctggaacaataacctacgaaataacctgctaggttatgaatgaaagcatatattttgtgaaatttgtggtcatttagttgggttgaaatgaaatagtcactgatgtttattttctttattattttcttcaatgttttacccttactcaacctatgcacctgggaaaggggaaggctgccagttgctttcttcctgtaccctaccatggacccacagcccctaaactccagtacaattattccctgcactattgttctctgccttaagcattagaaaagggtttagggccggcctgagaactctgtcttcatttgtcacattgtttctttgggaagacacattcccagtttcaaacaaccaacctacaaattaactttaggggctgcctattcactaaaaaagaaggctgatttctgtagagctgattagctgagcagagctcattagcttagcttagtttagcaagtatgatctccttagctaatgtgacaccataacatagacgctgccacccaccggtgtcaggaagcgtgaaaggcagtccagaagtggcaagcctcatggacccgcctgcaggagggcagacccactgcggctgctgctaaaccaacaccagcaggtgccttggcaggtgctgagcatggtgggcacacaaacgggaggacttttcccagtggggcctgcctgcacaagccaggtgctggctaagggctggtagcttacttaacccacacacttcccccatagttggtactgttattagttccattttacagatgagaaaactcagtgccatatatctttggagtctattgtacaaaaatagaatacgttgaacatggaaagtggctttctatttatttatttatttttgagagagtctcgctctgtcacccaggctggagtgcagtggtgtgatctcggctcactgcaacctccacctcccaggttcaagtggttctc

SEQ ID NO: 123749 - DNA, 1086 bp, Homo sapiens
ttcctacatggccgctgtgtataggcagcagcgcagaggtggtctctgggtagggaaccctctgcctcctaggattcattggggatgaaagtcgcagctgttttatactcttcttaaattttgctttcctgttaagccaagatttactggacacaagaaaacttcccagcagtcccctagaaggaaaactaactcttggtagtcttcccattagcaaataaaagtccccaaatcatttttgtagactgcccaaaccaaggcacttttcatctgagaagacacagcaattgtctcagctgtaaagtaaaagagaattaaaaaaaggtggtctcttttgaaaattcctgttggtgctttggccatgtgattacaatgaaattggtgtgccttcatcttcaaagggcagaactcggtgcttatatgttcatttcattgtagtctgatgggacagacacttcttgttggcctgtcctcatgctccatatttattccaggttgattaggatggcatgtgaacttagaactaaataaaccttgcttggatgggtcacctggctaagtaaacttaccatgaacttctcagaagtaaaataagcaggaagcaggtttttaaaatgcgagtcctctatgctcttttaagtgctgccgtgttgctaggaaataagaaactctttgtcctcaagaaatgataaaggacaaatatagaagtagactcaagaaggagttagctatattaatgacgatgaatctttaagaagtcattttgtgggcaagttgtgataggtgggctatatctctgttttatacatcagttttagctaggattaggctttgctgtaaataatagaaaccgcccaaataacagaggcttaatcaagagaaaagcttatttttctctcacataaaatgtcagaggtgggcagtacaggctggcctggtggctttgtccacaagatcttcagagacccaagctcctttctgcttttttttttctttaatttataagttccggggtacatgtgcaggatgtgcaggcttgttacataggtaaacgtgtgccgtggtggtttgctggacagatcaacc

SEQ ID NO: 123750 - DNA, 1053 bp, Homo sapiens
tttcctccttcctcttcttcaccttcatcatgatcccatgaaagtgtttccgagtggtttcccatctcctccaaggcatgaggagaggttggtcttctgcctcactggcagctttattttattttattttattattttattttttggggggggggacagagtcttcttctgtcacccagactggagtgcagtggcgcgatctcggctcactgcaacctctgcctcccgggtttaagcgattcttgtgtctcagcctcccgagtagctgggactacaggcacatgccaccatcacgcccggctaatttttgtgtttttagtagagacgggtatcaccatgttggccaggctggtctcgaactcctggcctcaagtgatctgcccgcgctggcagctgttctaagaggcattccagtacctgttggtcatggagagacgctcacaggccagcttctcagcacttcccagactgtcctttccttgtggcttctgtctgtggccaggagcctgcctgtacttagtggcatttttttgttttttcatggattctctctggtcagccaagctgcagtcaaaacatgcattgtacttattttgtattcatcttccacggaaagtggaaaaaataaatagggctggaatgtgctatgtcatggtagtgctatttgggtccaggggagacataaaattggctggatttgttgcagtgcattttgtataaaaaaatgattctgaatgaaaaagtaagaattgatgtgtaaagacttgcagatctttgagccagaaataattttgaaaacaacaagaacaactcattaccaactcaattatctggcaccttagaaataataggctataagataaaagctagtgcagtttaatgaggaagtagtcactttaggctaatctggtttccttggaagctccaaggttgtggcagatgaaggaggtggtagaggtaagcttacctgccttagcaagatatttgatttcatctctcttttttatttatttatttttttgagatggagtctcactctgccgcctggctaga

SEQ ID NO: 123751 - DNA, 1215 bp, Homo sapiens
atttaaactcactttgttctgtctgaaaaatgtgttgaaaagaattctgaacagaggggaaaaaaggcaaaccttaaagggatattgctgtgataaaatggtatgccagtggtggtgagaaattttgttttgccttcaggacttatttgtttattaaagaagagtgaaggcagtatggagatgtcaagccacagctcaagtaaacgttgaatctgacgaggtcaaactcaaacacaatcactgccctattttttggtggtgcgattttgaatcaaaagggggactgacagcacagatagggagagaacaagtgtctttctgaggctttctgagcttgaagccgtcctgttctccaaagctctaagcggaacacctgattagcagagtcagagagcaaacgtggtgcttcgcttggctatgaacaaacaactggttaaaaagcctttctggaggttcttgtgaaatctgtctgggggcccagaaaccctgccccgagcagtgattttagtaacatggggataagtttgcaggagattcgattaatgattaaatgaacaaaccgggagtcctggtttgacttctctttctcacctcccctatccaatcaatcacaacggcctgggaatttctccatagaaatatctctcaaatgtgcccttcactgcgtccccaaccccaccccaggccccagagtcagctgggcccagcttcttcagcaggatccctgccaggtgtcctaggtcacccgccagcccgcccactctcactcttcagtccatagccagccacactgcagccagagggagcttttcatataaactccaaaatcaagagtgttctgatgtttaagactcccattgttatttttattggggttgcattatgtttatagattaatttaggaagcattgacattgtcttattgttgaatcttcctgtccaggaatggacatcaagttttctgcgtccctcaggttaatttaaattctcttcataaggatcttgtacaactcttgtttcatttactgttaatttcaccctcttgcttctattataaatggaggcctttccttctaatatctcttgaaactggttattgttcatatacaagcaagttattgatttctacatattaacttgcttctaccaccctactgaattctcttatggtttgagtagtttcttaatggattctttgggggtttttagctgtat

SEQ ID NO: 123752 - DNA, 1057 bp, Homo sapiens
tttgcatttgggcatgaaaccgagcacagtgctggcacgatcactctatttcttgagacttacttaggtaataagaatttataattgaattaagttggctcttataattaattgctttgattctgatgatgtggacacatgattgcaagctaaataccaaatatcattatgtatcttttctgatatcgaaagaagggtagtttaaataaaaaaaattgtagcccccttgaataatgctttccgtttgcctaaaggtggaaactcataggtattcactaaataaagaaagaaaaagattacaaaagtagtgaccaagataaaaccagaggcttagggctctgagagttcagcctgggccgtgatgttcaggagcagctgtctacctgcagagtcctgggcaaaccacttaccctccacgggactgttttgtcctggttacaacgggaggagttgactgggtgaccccagggtctctttagctctaaaaattctcagattgtgtgactgtggtactctgaagggcaggttttggtaatagcatcaggaccgagtgtgtgtgctcacacatgcacacagacacccccactcatgatccaaagcacagctggtggcctttatcggccttgacgagtgtccttttcaaatggagactttatcaaacagtgacatggcatgtgctgtgaaaatggtgactgttttgatgtcttccagttggctggctcccatctttccagagggagcactggacttctgggtaaaggaaatagcagtgaccaggaacaagagagccaccctccacacacatacttttttcctggtaattgtaccagtatgtgacttagctaagtgtacacatcataaatagctatcagcccatgtgatgccagaggcaatggctcagtacatggtttttgaccctcctgagatatatgctaaaagatttttaaaaatccagttccaagattacataaccgccaacaacaaaaagaaaatagagaagaaaaacggtattagtattagacctaacatattaattgctgatgactttttttagaga

SEQ ID NO: 123753 - DNA, 1351 bp, Homo sapiens
ttgggcctgggggtgcctgtggtgccctgtactgcagcagggactgagcttcgtgcacatgggaggcttcatcctctgcacacacccgggatccacccctgggaggcagttttgttggaggaaaggtctccacgaggaagtataggagcaagacagtttggaatgtgatttctctcatcctgctggtatctttctttgtatgtaaaaatttcctttctgagtcttagcccaaacgtgatttctttagatttttcccatgtgtttatgtggttagatttttgttttcatttttcttctggctttatggtttttctccctgtcccacttttcccacattgattttgcatttctggcagagatgggcagagccccagtgactgactcttaaaaggctaaatctttttaaaaattatataatttaaaacctacccttgtatctcccctatttctgatttttttttttttttgaagggaaaaaaatctataaagaatgcttctaaggccgggtgcagtggctcatgtctgtaatcccagcacttcgggaggccaaggcgggtggatcacttgaggtcaggaattcaacaccagcctggccaacatggtgaaactccgtctccactaaaaatacaaaaatattagctgggtgtggtagcacgtgcctgtaatcccagctactcgggaggctgaggctggagaattgcttgaacccaggaagtggaggttgcagtgagccgagatcaggccactgcactccaccctgggtgacagagtgaaactcggtgccccctcaaaagaaagaatgtttctaaagctggtatccttgtttttttccattttgcacttaggcaatgaggtgactgtgttagttctattccgtggtgtttatcattccatgctattagttcagtgagttgccctgggcctctgtatgacagtctctaggtgtgttcttggtgactgctaagagaaacaaggctctcccatatgtaagggagtcggcctgctggtatatccaatcgcgtcactacaccggtacctgtgaacttggccgtatggtagacactcagccatggcttcagtatttcaattccgttaaacttgccaagcacagcatctcctacctgtattatcttgggcagtcgacaaatttctggctgacacctcttcacataaaatgaagcaatggataagacaaatgtgaatattctttctagctatgaaattctaaaattcgaattctcacttctgtgtgtatgtttttaattgtccaagttagatcttgaatcatttatatagatatttccattctcacttccatgagcacatattgagcacctaccaagtgctaggg

SEQ ID NO: 123754 - DNA, 1049 bp, Homo sapiens
ttaggtgggcggatctcttaaggccaggagttcgagaccagcctggacaacatagtgagaccacatctcaaaaaaaaaaaaaaattcagagaagtgagaggcagatgtagacttggagagtggaaggtagagcgcagcccttacagtggatataattttgacatttgtggctgaggagagtgtccaggaagaatgaataggatgagcagaggtggaaaagtgtaaattggggaaagagaatattgatcaaattgatgagtttggctgatatggtgagttactgtgtatctttcagccggtatttggaggcaagtccaaatcagtgactcgagggatttggtgcagaacagtaggtactgttagacagatattattatcattgcactgatattattatttgtggaaggtctttgagataaacatgatctcttcagtatctttgtaaacatctgtcccattgaacagggagaaaacatatttttgaaacagatgttagcaccttattcatactgtctcttgtcctgctttatttcttttcatgtaaaaaagttaaaatagaaaacagcaaattcagataaaggtggtagtatatccagagaatagtgcaaaaacatctgtcaagctaaacttgggactttattaataggttaaagccgcctatggctgttatctgtttccattgcattgagttcagtggttgttatgctggaacagctgagcagatttttacctcctgtgcttaatattaatttgattcatatgggttcttaatagctctggtgaagtggaactgtgtttgacactacttttgtttgtggttagatgatgtattcagttctgaaacttgaagagaaaaaaaaaaagaaaatgctgataacctgcccagttttaatcccatttgccccctgtagctcataaaactcttgtagctaaacttccactggggatcagagaacacttttggtgtgtcggcactgctgtttcatcttttgctgtggagctgtgttttagtctgtttaggctggcaaaataccctagattgggtagct

SEQ ID NO: 123755 - DNA, 1087 bp, Homo sapiens
agattcaaagagattgctatttgaactgaaaaaaattccatataatcttttggcagtgctacatttctaattattacctggaatgaatttctgtacctctaatgtacaatgctttggcagtttgtgcataggtatttatcatcatatccaaaatcaaacagctcttgctgatgtatatgattggagggagagttctgtaaaggcttctcatcattttagtatccggtgctaaattagctaatttcttttatgttatgaagatgtattcttatttttccccctgtcactttccagttaatctttatgaagactaagatgcctgtagcctgtttgctacactgccctgagttgtatgtaggtcacaattcttgagacagaaataggattccatttggtgtttatatctttggcagctgcctcatcatcttgtatcagatccaggcccttggggatggagtcttcctcaacacagatggcactcagcattggagttcccatccacagttgctcagaaatatggaggagccattttcaagtcatctgagctcggactaagaatttgccatactgtgcacagtgcttccttcagctgtgaagccgtgccagtctgtgggtcaactgggatgtcccattagtctcacctccttcaggaggttaacattcacagtcatgggcagggtctgcttattgccttgtctttaccacaaggactacagatgctctatgctttttctaagcagcattttgaaggtgtctcagtagccctgacctcattgtttagggttgggaattctgccacttttataaaaagtgagttgttgaggatttctaggacaaactcagcactgtcctctgtcacacacagaggctggtggaacgggactgtcacagagcacctagcattatacagagttgtaccaacatatggtgctgcatctactagaactttagcacatggagggtcttagaggttccagcaaatgcccacagaaggtgaacatgaggcacactcggctcagcgagctgaggaatatcctgtcctctcagctgagggagcctcgcagaaggaactgggccttagcatctg

SEQ ID NO: 123756 - DNA, 1022 bp, Homo sapiens
tcctttctctgccacaccctgctcacctaatccatcaccaggctctgtacagtttgcttactaggtggatcccagcttaaaccacttcatccctttccttctgtgcactgcctcggccagctgcaagccgccatcatctctcactttaactgtgcaaaggtctctcggaggacacccaccatccactctgctcctcatctaatccagcctctatgctgacatcagagtgaccgtttccaaacagaatctcatcactatgggaaggaggccaaaatccttaacctagtatacaagacccacctctctcggcttgcaccgtagtcctgcatgccacctgggctccagccccgaggtctcctctggttcctctctgttaattcctgctcatctttcagggagatgttcaggcgtgggctcctcagggaagcctgccactgcacacacttcccatagctttctgtatgcttccttcatagctctgaccagggttgtcatggtatacactggggatgtgtggactcgagtggccgatgtctctgcccacagttgggtaagcttcaagaggccaggcctgtgtcagtttcccttactgtattcccagcagccaactccttgactggcatgcagctgctcagttagtatttactgaaggagagaagggagggaagaagaaaaagagaatttgatgctcctcttgctgtatctaccttcatgtctccatcgtagtcttctctcttagagaaaaaaaaaaaaagtatattgcttttttggccctatgatgaggttagtgttctcaactggggggaaaaaaaaagcctcgggcacccaatctaaactaaatgaaacccatatccttcaccctcaaacctaccagaagcacaaattttaaaatgtcagactccaagagaaatgatcatttaaaaaaaattaagtctgatcaagagctagtaatccttgcacagttctgggagggtggaaatgccatcactgaaaatgactcatggtgtctttaggtctgtgac

SEQ ID NO: 123757 - DNA, 1005 bp, Homo sapiens
gggtaataccggcttcatggaaggagttgagaagtgcttcttactcttctgtctcgaaaagtttgtgaagaactgctgttaattcatctttaaagatttgggacaatttgccaggaaagccatttagtcttgaactttctccatgggtattgttttgattactaattcactctacttattataggtctattcagattttttacttttcccttgggtcagtctcagtggtatgtgtctttctaggaatttatccatttcatctaagttatctaatttgttaccgttttctcatctgtcaatattgttttattatgaaaatagatgagggaagcttaaggactgaaaaagttaaattgaaaatgagaataatttgtaaaactggaggggaagagaagaagcagtcaaagacttcagtgaaagtcaagaggcacttgaagtaagccctgaaggggagaaattggtattttgtattttttaaacattctgtgaaatgcacatgccagccgagagacctgggaacctctagcagagcgagttccagcgtggtctccgggccccgcactgttgctttgctttctcccgctttgcgtcatgttagggccatgagaaatacgcgtaccaattaatttccaggaattgtcaaaacacggacaaatgagctgaaatatttcaagactgacaacagtacaaattctctggggccactgtgacattcctctcctttgatttgcttcagctgctaataacagacatcccaggcaacaaagaccatcacagactaagccagcacatcatgaccagcagtgcctggccgaaagggtcccgaagccctaacggttttccggtctctgatgcagtgatagacatccagggcacccaccctctgcgccttggaaagcctgcagcaccgtcgctaagagcaagtggtctggcaagttgccaagcaatccgtcgtcttcctttctacttatttcctgttttggatatagttagagctcaaaatca

SEQ ID NO: 123758 - DNA, 1009 bp, Homo sapiens
gcacaaataagtttcttttatcttgaaaaaccttaggtcagtttcattcaagtaatacatggtctattcagagaaatgggtatatggaggatttgaacggaatgtgctagaatgtgacagactgttgggggaggggcaggggagctttgacaaagagcacttaggtttcaggcaaagcttcctggaggagacgacatctgagaattcgccacccaaaggtggaagggatgtttcaagccaacaaagcacaggcatgtgtggggcgaaacgtcctggtgtttcaagagggggtgcaagttgggggaagttgacttaggcatgtggaatgtgggtgcccatggatacctgggggtggtggggagcagcccaacaggtagctggatggaacactcagggaaggtttgcttcctgtgttgttggagaaatggtctggttggtagaaagtcacttggaaacagtggagacgtgaatctgttttgtcagctagcctgtaaaaaacctgtaagacttactcatgtttgtcatctgagatactaatccaatttcatcttacatgctggaagattattttttgaaatcagcattcattatattttcctttctctgtgcccacctctgccagctgtgtccccaccaattcaagggaagtttcttcttggtctaattggacaccagtaagaacaacagaataagataatcctgaaagatgatggaaggaaaagctttgcaaatagcttatgcagtggggagtggcagagaacagctgtggggtcagagcacctgggctgcctctgacctttgctggccctgacactttggggctgggtgatcttgggcaagtcacttaatcccaagagccttaaattcctcaactgtaaaatgaagaaagttatactgaggttcacctccctggcctgtagtgaggattgactgagattctatttcctcttgccattaccagtttatgacctaataaactggaggagctttttttgttttatttttttga

SEQ ID NO: 123759 - DNA, 1044 bp, Homo sapiens
ctataatattgtggaccaggatggcgaccttacccagacttagccactcactggcgcttcccctggaatataaaatggaacaaagaaatctttcctattgctggactcaaaatgtgtaacttggtgctccccagaccatgttccgtgctccccaccttgcactgaggtgcgtggaagttggcctacagcaacgagagacagagccctgaaagcttctcagacttcagtcctgcccttccacaagctctgcggaggcccagtcctgcttctactggacacttctcaggtattacatttttcttgtttgcttaactctggatgattgtaccccatagaaccaaaagattcctaactactatcttggaatcccatccttctgtggggctcgggatgccagctgattggacaagccttgtggcttctctcaggcactgactctgagttctgtatgaggggcttctggacacttgggtgtgaaatctggcccattgattctaaggatgtgtaatcactgaaacctgtacccccaataaatctttgtttcctcaactgtaaaatgagagaaacttttttgaaaatgtgaatatgataaagtgcaaaatgcttggacattggggttagccttgggataaagccacgttcagggtctcagtttcctcattgggttgttttgaaaattagaaatatatataggtaaatgtacccagtatgtgacaagtactaaatgaaaggtacttttattgttactattactaattactccttcaactgttactagcgctgcttctcctccttgacctaatgaatgtgaaagctctttgtcatctataaatgtcagttccccaataaagacatactcagaggatctgccttcaatatgaagctgcctctgactgtctcatctttggtactcagctggaggtatttcgcttgctggcactttaactcccctgctctgagcggttgagctagcacaagggccatacagaagtagaaacagactttcttttctctgtctttgaataagaaaagatgaagcaaagc

SEQ ID NO: 123760 - DNA, 1483 bp, Homo sapiens
tgtataggatggcatattttttgagcccttgcctatttaagaccatccttgctacatgcacacacgaaagacaagttagtcggctcagagaagtgttgtcaagctattaaaggggccttctaattgagttgagtcagaaactaccttctctccagccatccattactgtgctggttcagggaccagggacgtatggttcacaagggtaattttcaacccaacctcctccaccccaaagcagtgaaaatttccctatattctggaacatggctttctcccctctctaatgtccaggggtgttgcaagttcatcgagttttgtgtacactcacaggtattctactggaaagttcgggggggcccaccaagcaagatccggagtctgctgccatattaacccctaaatgctggcactattttgtcagcttttcttagccctgttttcagtaggtattttagatccttttcatctgtattagtcaaactactttggttgcagataacttaaagtaacttgaattcgcacaaacacaaaaaggaactatcctataataatacaggaaagtttcttggaacccaaggttaaaaatgttattactgggtctcaatggggaagtggaaagttcttaggactctgtttcttatttctgttttgccctgtagtgctttataaagattaacagaaatagctgacatctactgagtgcttagtctatgccataacaaccctcagagaaggggattttaaagcatcacctccatcctacacacgaggaaagtcagacacagagaaatcaagttgccccattgtcacctcattaggaagctgctggcataagatttggacctcagcagcctggtcccagaggtgacaccctgaagctgttccatacacagatgggtccagattggacacctctcagagttgcccctctacagcctccagcatctgtttgaacaccttcaatagcagctgcggagggcagaggggaagatgaggatcccactgggggcagccttaagtaaacaaatcattccctatcttagtctatgccataagaaccctcagatatctgaagaacatcttgaatgaacatccgcctctctgagaatattcccattggccaagtttctgtcccctggggccaccctgagcccatccaaacctcagtgtgctcaactgcctttgaggtatttgaggactgaatattgtggatgctctgggcttggcaacctcaattccctcaactcttcccgcagggatcttttaaaaagtgtcccatcatgttgcttcctgtcttcacaacatgcctcggatggtagaagccacctttgacatgacaagcagttctttctgtcagagcacgcgttctcatcagacacaacagccaccttcttctcacaatggatattttgtgggtttttttttttttaagtttttttgagacagggtctcactctgtttcccaggctggagtacagtg

SEQ ID NO: 123761 - DNA, 1019 bp, Homo sapiens
tgggaaaggtcgatttatttaaacttctatagtttccaactttttatttgtgtcctgtgttctgtcctcatttgtggtggaccatgatggacctggcagctccattgatcacagcacattcatcagttgggtccagagtcccctacatctggaagttggagcagaccctctccacactctgggagcccacatggaggcaggtaattggcaaggctaagggcagcagtgtgtgggtggtttcttagaaagtcaagccaggaggcatgtgaaggatggtcagcgatggtagagaaggcagctgggaagaaagagcaaccaggaggttcaggtaagagtccaggtgagagacgatgagaacctgggtcaggatggcggccccagggatagaggggagagacacgggagatggagcgattggtgactgctgggacaccaatgagtcagagggagggtcaggatgaaggccagctcctagcttggttgatgagtggcttgtgatgcagtcccccaacctagccaaggccagaagtggaaagcactgggtggggatggggagctaccacttcatccagtcataaaaccatgcttacatgactcgtgcctccaaatctcaccaaggccttcctgctgaacttacaagtccttcgtaaagaaaaattattttttttggttatctgtaaatgtaattgtgccaaatgtttatctttttaaaaagctgtgtagcacctggctccctccctgcttctggggcacccccctcatgggtggtattggtggagccccgagcactgctcctccctaccgcagtaaaggcgggctcctccctccctccacgctccagctcacatcctggattcaaccaactggatgctggggtgattatgttatgtgtcaacttggctaggccatggtactcagatgtttggttaagtgctagtctagaaattactgtgaaggtatttttttaaatgagattaacatttaaatcagtaaactttaagtagagcagataaagtgtg

SEQ ID NO: 123762 - DNA, 1467 bp, Homo sapiens
ccatgtttacattgtgacaaaccatttccattttaagaaaaagaagagcaacgaagcagttattaaaagaagacccttcctttgttttctgacatgctggtgattcttgtgtcaaaccaaagtctcattttttaattgttcccagagagtcaagttggtgctttcctcccttcccccatatgcacactccttccccacacctgagtagttgtgttttttctttgtcttcttcaaggggtggggagaatgtgcttagtagtaatgactaacttttaataaaaatgtaggctccagtggcactcaggctgttgctataagtattaactgatgaaaagtaaattcagtatctggatattttaagggatgtcgatttccctttgaatttatcagagacttggctatagtatcttcagatacaattttcttgtttgttcttacgtattaaggatgtggttatcactgaactattgggatttttaaaaactccactactatattttacaataaaaaaggaaattatcttttagaagaagaactttagtttgacagtccttcactgctaaagaaagttaatcagggtcgggcgccgtctcacgcctgtaatcctagcactttgggaggccgaggcgggcggatcacgaggtcgggagatcgagaccatcctggctaacacggtgaaactccatctatactaaaaatacaaaaaaaattagctgggcgtggtggcgggcgcctgtagtcccagctactcgggaggctgaggcaggagaatagcgtgaacccgggaggcagaacttgcagtgagccgattttgcgccactgcactccagcctgggtgacagagtgagactccatctcaagaaaaaaaaaaaaaaaaggaaagttaatcagtaactgcacattttaaggggattatctattttctatttctactccttactcagtagagtgctgcattcagtttaagtgtatacactcactcagtgcaatcaagtcttgttttacaaatattaatacaaaagctgcagagcattttagtcttgacctttattggaagcctccaaaggttatatttcgacccagccaaaatataacctatttatattataggttttatatatatatgatatataaatatattatattatatatatatattatattttatatataaatatatattatattttatatatatattatattttatatataaatatatattatagtttatataatatataaatatatattatagtttatataatatataaaatatattatagtttatataatatataaaatatattatagtttatataatatatacatatatattatagtttatataatatatacatatatattatagtttatataatatatacatatatattatagtttatataatatataaacatatattatagtttatataatatataaacatatattatagtttatata

SEQ ID NO: 123763 - DNA, 1885 bp, Homo sapiens
ccctctgacctgtttccctccatttagccattggaaacttaagagtaaaaataaatgtatatcaataaagagccatagtgtgaaaattttatgtagaagtgctaaatattctgacattatgttactcatgatgtagaagaggatcatttctctagtttagggaatggtgttaaatacttgaaggcatgtttagtttgaggtctcatttaaagagctcctattttagtgactgaccttgcaggacagaaagtacattttagagaagtgtaaatgtccactttccctggttgtactctaaaattttatctggcactggttaaactaagccactcttaggaaccagtgaacattcgaggcaagtagtctgtgcccaggcttgttctaaatcctttgtggccgaggacatagcgtcttggaatggttaaaatggatctgctccttttgatttccaggtaagctgttgtttgatgtgttttgtttacctggtttgcaatacccagagcttattctagagaagggattcccagctggtgaattgtcaggggatctttaactctttaaaatgtatatagattcggttaataaaatacaggtttacttaaaaacgctggacttcatagtacctttttggtgttaggtatcaatgaattgtccttgtgtataattactgttatatgtgtgtggggatgtatatatgtaatgaattaatgttgaggtcattggcattcctctgtgattcattatagctgttacataaaagcctatttcccctattagtgttttgtttctcttgaattttatatttagaataaaagagaaattatgtcttttattagagatgcaatgaatgaataaaattagttctacctgattatgaagcatatgtattttcatgtaatggtgatatagcatagagattaggagcctgggttcaaatcccagtccagttattaatacattactttgaaaagttacttactgcttcactttccttatctgtaaaatacaaataattgaatggattcaggtgtgaattccattgcacagtccaagtgggggaaaaattataattttgcttttctgtaataatttacaacaaattacatccccgtcctgctggggaagcagacctataatattttagttcccaggccaccgcctcttgcccagggtgaagcataatttgagggtggggatggtaacctagtgccatggccttgaaggtgtgaccccatcttgccctccagtctcctctttaggcctttcctcctgcccctcagtttagtaactctctccaccacttccttgctgtgctgcttgaggacatggtaaccaccttgctggttgtgcgcagtattggggcgtgaatctctgcaaagctcagacctttctgtcttaatgtgatacatagctgtttggattctcctatcctctccggttgtttcatggtttcactagggttctgaaagcaggtgaaaaaaaacaagaaagcctcactgggaaggtgacactcaggtagagatctgagggaaggtgggggtgtctttggatctcgggaaagagcagaccctcaggctggtgcttggggtgtctttggatctcgggaaagagcagaccctcaggctggtgcttggggtgtctttggatctcgggaaagagcagaccctcaggctggtgcttggggtgtctttggatctcgggaaagagcagaccctcaggctggtgcttgcacagtgaggccagagctgagggagctcagggaagaggggctgctccccaggctgaggaggcccaggcgaccacgggggctttgacatttatttggcaataaaaccattggagggttttcaccacacccaaaatgactgacttttacaaaaaatac

SEQ ID NO: 123764 - DNA, 1091 bp, Homo sapiens
aggtcccacttatcttcaaagtgcatgctgaggcaacataaaatgataagaatttactacactgtgacttttaaactatcatctcaatggtttggcatgattcaatattttctattttaactttttatttataaaaattttaaacatggacaaaagtagaacagcacagtgacactcccctgtgtactcatcacccacctccacagtgatcctggcccgttttgtttcctctagcctcccctcccctattttcccctttcctcattattttgaagcaaattccagacatcgtttcatgataagtattttaatatatatctccaaaactgtagacttaaataactgtaattcctgttatacttaaaaattcagaatacattcttaatatcttcaaatatccagtctgttggtaggcagtgtaaacatattcataaattaagtttgctgtatctattaagttgcttgatagtattaaggtgagaacagtgccatctcttactggttgacatttgtatgagtctgcccatgttaatgtaaaacagatttgccacaggtaatgtgaccatacaggtaacataatctaacagttaaaaaatatatgcatgtcttgcttttatcttgttgactccagtgctcttatcaaaatcctcatgatgcaactgcccaatgggttcaccatcaccactgcctagacagaatcgatttatcaagacagggggattgcaatggagtaagagtaattcacgtagagctggctgtgcgggagacctgagtttgttagtcagtctccccgagcatttggggattggagtttttaaagataatttggtgtttttaaagataatttggtgggtaggggcttgggaagtggggagtgctgattggtcaggttgcagatggaatcttaaggggttgaagttaggttttcttaatgtcttctgttcctgggttggatggcagaactggttgggccaggttactggtctgagtccatcaagtgcagggtctgcaaatatcttaatcactgatcttaggttttacaatagtgatgttatccccaggagcaatttggggaggttcagactcttgga

SEQ ID NO: 123765 - DNA, 1078 bp, Homo sapiens
ctcccgcctcagttttttcagtagctggtactacaggtgctggctacaatgcccagctaatttttctttaattttttggtagagatggaatctcgctttgttgctcaggctggtctcgaacccctggcctcaagcaatcctcctgctatttagtctcccaagtagcagggattgcaggtgtgagctgctgcactcaaccaaaataggtatatttcgagtaacttttttagggttgatctctaaatgcaatgtgggcagctgccagaaaccttccctgcctccggaacagaacagggctatcaccgttggtgttattcttcctcagagtagagcagatgagtcattttggtaatgtcttcctttcttccaaaacagccacagccactatcatgtttgtaccagcatgcttagaaagtgaactgtacaccttttgtgtttttactactctgtttgtgtttgtaacatcctcttttcctctccactcctgataggctcgggttatgtatgattttgctgctgaacctggaaataatgaactgacggttaatgaaggagaaatcatcacaatcacaaatccggtaagagaactgtacattcgagtctgattgtcccatgtggacttatttttaacaaatccggtaagagaactgtacattcgagtctgattgtcccatgtggacttatttttaagattttatttttttgtaagttaatcattcaaacccacatgatttttttcctgttgcttatgaaatattgatggtgaagtaagaagctgttatataaatacaggaaaaaagttccctaaagacagttatgtatgtaattgagtttattatgtctgcttattttgtatcttcttcgatatgtttatcttacaattttttaaattacttacaaccttttaggtaccccatagttgtcctggaacatggttcagtgtgtttacccctagcatgataatactgtatctctagaataagtaaaagatgatggtgattttcctaaatgtcttaactgattgatcctatcatcatttttctaagctcttttcctaaatcagattaggttgccagaa

SEQ ID NO: 123766 - DNA, 1023 bp, Homo sapiens
tgtcatcatctagcaacccacattaattcgtatagcgacttgggtgccagaagagtcagctgaagtgtgcagaagcccttgaggcaaggttctggattccctggaggatttccacttgattctgttgaccagcgaggtggcagagggcagattccaggcctgggatgcgcatcccaccgcttcacattcagagctgcaagccacttttattatctgccgcagaccagtacacagacaagatgagggtcatctaatcatcagctgttttcaatctttgatcacttattattgaagtttgatttttcttgtttttaggttacatcattttctgaagtaaagagaaggcttaagaatttaagattttgaacggtgttctctaggaatgaaaagcttaatgttaattgctttttttatgtataacaattcctccacacaaaatttctccaggaaatctcaactgtaatctttttcttttttttttttttttggtgacttattaggatgtaggtggaggatggctggaaggaagaaacatcaaaggagaacgagggctggttcccacagactacgttgaagtaagagcttcctgtcattcattcattagagctcatctttgccaggcatctttttatgaattatcaacttacaagaagtcagcaactttttgcaaaacaaaatttccattgtaaatataataaatgttaactatataaaatatggaaactacattgaaatagaactaagaaaaatattacctgtagacccaagcttcaaagaatgactacagatatttaggttaagtttcttccagggatagcaacttttaattggtctgaataaaagttagtatttttcctttgctaatattatctatattataaatatatattataaattgtataaattcaataagatatatgaaattatatctcaatatatctgttaatatatacattttaaatatatatttatatttttataagcaaaatatataaattttataaaatgtattataaattatat

SEQ ID NO: 123767 - DNA, 1657 bp, Homo sapiens
cacaccacagccttttccatacaactgcaaccccctattcacaggcccctggcctcactccgtaggtcttatgttgaagtcttgttttacttgtatgcactttgcatccaggagcccacaaattgacaagattgagaaaaatctgagaatttaagttgatattggcagtaattggattttctaggattctgcttatataaaggaatagtgattacagatattcttgggtttgcttacctttaagaatataaaaccccctctattagaaatagatcctgcaggcagaaaatcagtaaggacgtggttgaactcagcaccatcaataaattgatgtccacttagggacatctatagactgcttcatcaaaccacagcagcatacacattcttttcaagcttacatggaacattctctaagacagaccacatattctgagccataaaacatacctcaacatgtttgaaagaaatcatacagtgtctgccctgagaccacaatggaatcacactagaaatcaaaacagaaagatagatggaaaatctgtaaatacttagagattgaacaatccacttctaaataatgcatggatcaaagaagaaatctcgagaaattaaaaaatagtttgaactaaataaaaatgaaaatacaacccattaaaatatgagtatgcggcaaaagcagtgcttacagagaaatttgtagcattgaagaatataaaccctttttgacaattcttgcttgccctcgaagactccctgaagtgaccgtaatctatgaaaataattgcggctctttctcctattcagattttacccagtgatggaaaagatcaattttcttgtggaaattcagtggctgaccaagccttccttgattctctctcagccagcacagctcaggccagttcgtcggctgccagcaacaatcaccaggtacgtctcacttcctccttctggatgtggctggctttacggaaaacagagcgtatttgtgaaggcttgtgatgcattatagctattgccattccccaaaagcaaaaacaaagtcgcttttaggttgttctgtggcatttctgttgggtactaacaaagaaatcacctgttaagcctgataatgactgtttgcaaaatttattataagagaaaaggcagggtattgagggttgcttttagaagtctgtcatgatatgaacacagaccccagaaactgcaaataccctcttagataaaggcatggaaagaagaggaagaagaggaggctcttgttgttgaggaggtcagtgtcagagcctcggcctggatcaggaaatagatgccctggccctggcatgttgcttacactctcagagctagaggccctcatcctgcgagtagaagcagtgcctgtgaaagtctaccagatccaggcactcagcacttggtactcttattgtattgcttccaggaaacttagaatagtgggataacttgagaagaatacaaggaaattttacattaattttaattaaaatttgactagtttaggtgaatttgtctagttcatttattgccaaatgatgacacagagtaagtgacaagaagaaaattgagaagacaggtatcaaaatattgttgctgctgggcacagtagctcacgcctgtaatcccagcactttgg

SEQ ID NO: 123768 - DNA, 1054 bp, Homo sapiens
gaggaaaaaacagaaatagccaagttaaaaaaaatgttaatattctgaaccttttgctttcagaggcattagacatgtatgtgagagagtccagacaaaatcagcaaagccacctggtcaacttgaagctaaccacagagccacagtgagtcctaccaatcgcagctgtgaatgacacaacagcccagctggtctgtgaacacaatgtctcccggtgtgtgctcttagggtctaactggcctacaatacagcatcttgtgagaagaggtaactgactgatgcgcttccaagaagccaattgatgggtaaactgcagcagatgtgttaagaggaccattctggagcccagcttccaggcttcaaatcccggttccacaactgtcctgtagggaagtcagtactacaaacatttatatagtggacgacagcatccttttcaggcgcaactctcctgtgaaataagcggtggtattattctcacctgagagatgaaaataaacttggagttgaaaatcagttaatacgcaaagcagacaacaaagatggagtaacagggacccagtttatgctcccaatgaaaacaaaaaatatgatgaaatataggaaaccgtgttcaaatcactggacaccagacagtgaagaagtgatcctgagatacgggagacagacagagtaagcccacaagtgcccattcactgcgtggagagactctccaggacacggagcaggcatggaaaacccacacaaagctcggcggtctctgtggtgggaggatacagagtctggggaagacagagacgcagagagagagctctggagactgcagaggacactgcagatctgcactgatcagcccatcacgtgaggggtctacccaaggtcagggaaagacacacacggaagaatcaagagtgaatcaagagtgcaacccctcacacagggctattcccaccagcctagatggaaaacttcatgattcacggggcatcgggtacaatactacaaaggatttgtttcaggaaaggggcaaaaatatccctaagctaaatgttgc

SEQ ID NO: 123769 - DNA, 1975 bp, Homo sapiens
ccactgtgcttaggcacatagcagtccacggaagaaaacagctagcctggttcttgcttttaagatgtagtacctccccctccccccaccttgccactagtagtaaaacaatgactatcaggctctggccaatctgattaatcgtttctatgagccagaacaatgctactcaaagtatggtccacagaccacttgcccatctgaaaactgcttgttcctgatccaccgtgagataggtacagtacatgagaatattttgaaaacttgaggacaatttggtattgttgaaaaatcaaaatgtgtaatgttatatttcaccaaactattagtctgtgatagattcgaaatttttaaaaactagtccttcatcacgtgtagcttgagacagctagactagaaagaaacattgtcttgtaaccagcactgtccttgggagagggaagctggtgtctcctctccatgggctgagctactcacgtgggagcagaagggtttcccacaggtgtgttctttaaacataatatctaacaggaacagaaaccattgaaccatttatgtacctttcaaagaggaacaagaatgaccctccaaaggacttctcattctgaaaagaattacttgctgattcacatcaattgtatttattatttttccatgtaacaaaattacttctttctggaacattggcataggttggagattatggcccaatgtgggtttatcctacctctacttttgactgtgtggtagcagatcccaggaaaggctccaaaatgtatggtctaaagagctacatcgaatatcagctaacacctactgtaagtatccacgttatcaaaagcagaatcatgtttggatcactgattgcagcttgcttttttcttcattttctagagttggcattggtaaccttttctctttcccttattttgtagaacactaatcgatctgtaaaccacaggtataagcactttgactggttatatgagcgtctcctggttaagtttgggtcagccattccaatcccttctcttccagacaaacaagtcacaggtgagtgtgtgtaatgctaaacccaggatgacaaatagaaagactccagtcagattatcttcctgtaagtcagtgatggcattttccatcctgtagagcagcaggatgcaggagttggaaacagtaattaaatacagctatgaagagagaaccattgcatgttgtacatctatctggaagttgcctaaacgtctcacaagaacgtttaatgtgcaaatcacaggttttggtatgtgtctggaattccagcagtcattgtcttcattgctgtaccttttctacaaaagaaatgtgtacatttaaaatatgtgaaaaatgacacctgaaaaaatagaaataattcaaatagcctaaaatggaaataaaaatgtatgacccacatgatgcaaacaggttatgcagatgagctgcattatttcattagatgagtgagcactggacagagaagccacagaactactaagtgttaatgaaggaagaagctgccaggttttctacttattttgattattaccctctcccttttcttgttttttaaaagtgccattttctatttattttgattattaccctctcccttctcttgttttttaagtgccacattccctcccctcccccagccccaagaatcttttggtaagtaacccatagtgttactagagcaccttgtaagtatgcagggcaccttgtaagtatgcaggtagaaagggtttgtttttgtgtcagggaattgtttttgtttttaatctccagcctagggtagactctgctactctatgtagtcactgagggactcagcatgtgtgtgttaaaataaaggttgtgtgccaggtgcagtggcatcccagcactttgggaggccgaggcgggcggatcacgaggtcaggagatcgagaccatccaggctaacacggtgtaaccc

SEQ ID NO: 123770 - DNA, 1052 bp, Homo sapiens
agcctggctaacacagtgaaaccccatctctacaaaaaatacaaaaattagccaggcatggtggcatgcgcctaaagtcccagctacttgggggctgaggtgggaagattgcttgaacctggaagctcaaggatacagtgagctgagatcatgccactgtactccagcctagaaggcaaagtgagactctgtctcaaaaaaaaaaaaaaaaaaaaaaaagtatagggtgtttctgtttgctgtttttatataggtagccattggaaagagaacatggctgaattggttcattctttaaagatttggtcccattaggaccattctgtggaatgacactgttcatgccctgagattacattcggagtataaaggtatttagtccatggtgcagagggagatagagtgggagctgcttcctgaaaattagaaagataaaggtgataaatgagctggtcctgtttgggaattttgaagaccagtttgactgtgctctccacttgaaccttacaacattctcatttacaggaatggaaaactggaaagaggaaggccgagagagatgagctggcgggagtcatgatattttccaccatggaaccagaggcacctgacttggacttagtagaaatgtgagagacgctgccaggttttctttcttctcaatccgcaccctcctcctttggccatcaggcttcagccagtgtagccgcagccgaaactcaaatcagactagacttttatgaaatgagtgggatttgtagtccaatgacaagggaaacatcatttgtacatagaagtactgtctttctaaccgcaacatcaaattacaatctttctttcaccttgaagccagtgatttcatagttgacacggtgctgagtagctgtttccaatagtgtgatgaaaccaagcggcatggagccacctaaaacccactcaatattcagacagcaaatctctttgaacattgccttgaggaagcagtctctaacctgctttttctgtatgcttttttaatctgttgattgattttaatcatgtagttttttaaa

SEQ ID NO: 123771 - DNA, 1930 bp, Homo sapiens
cacaaaacaataacgaaaacttaaatttttcttacctctgcttagtaattttgttgtttaccagagtctatagaaaacaaaaatctagtagcatgtctccctcagacacctgcaggtaaggtctgtaatgtagaatccagcctccgctggcggccttgctgcctacccagctcccctctggccatgggatctaagccatgttcatggggagtggtgagcaagccctctgctcagccatactggtggcatctgcgagctggacactgctgaaaacgcctgtctccagcagccagttcttaaaggagaactgtgcttgatgtacctaatgcatatttgtgaattgtgtcttggacagttggtttgggagactaacttacgggaggaactcacctaagccctgtcctcccttacaggacgtgggccctatgctctttaaatgcacacttttcccgtcagttggtgccattgtggatttgcctttcattgtatattagaatataacagattacatttgtctgtgtgagaaaataatgcaagggcaactctcaaaattttgatagtgttgatttattgattttcaagtccaggtatggtatagtgacattgtaattcagaatagaaaaccatgtatttcatcactgtctttgcataaacctaagtagctgatataacattgttaggttttagatctaagttttatggcaaagtaacccttaagttactaaaatttgtgtatgtgttcatggagcagacatatattgagtgtttcttatataccaagccctcgtgctggatgtttagcatccagggatggataagacagctgtgccttcaaggagcaagaggccctggcgcagagaccactgcagcgcctcgttagcttcacaggcaggctcgtgctgtctgcacactcagcagtgacagcagggtgtggccagggcgacacaaccttcaggggattctggaagctcatactcctccaggaaagagggggctctaggcaaacatgaaggcctgagcccccagctcatctgaggaaaagcaggtggtctggaagcgccgctagggcagaggtggggagcatgtgtagacgcctcccggcgggaagggaccaccagggccagctcgggccccagcgctgccggtgtcattcggggttaaggtctgtccagcagcaacgcggggcagggctggtgccaaaaagaccagttaaagaattggaatttgtgtcatgtttaacttgttggagttgtgaataaagaacactgtgaggtcgtaatgggagtgatatctcaacgttgttttgttttgctttcttgtcagattgcagaaaagctgaggcaggccctcagccgctttccagtgatgtaggacagaacgggccttgaagagaatgccgcgtgctttctcctgacttggggcaatgcaattcaaaactttttttcccctattattcagaaaaaaaaggaaacaaaaccaaaaagaaagagttgcaaaaaactgcatttattttattagccaccctaaatgcgtcagttatttagggatggtcttttgttcatttccgcatccattatttaaaccagtggaaattgtctctatttttggaaagtacttaaaagttaccagaattttcaatggaaaatgaggggtttctccccactgatattttacatagagtcataatttatatgtcttataaattataagtcttatataatttataagtctcccacaatcttccagttcttacccagtgtcagataattaattactaattactttcttaaaaacatgaactatgccagaataaaaaatatctatgtttgtatatttttataactcctttcagtcctctggggctcctgtcattgagggaagtcgttacgcctttcactgccacagttacagctcaagtgcttacacttca

SEQ ID NO: 123772 - DNA, 1044 bp, Homo sapiens
gtgtacagagtccccggcgctctgaggttggagagaaagaacagaccagcgcccttcccgactacatccgaaacttcacacagggtgtttctgagcaccagcacttccagcgcttcacttaacggcataaagcaaaacaggaccttggcacaccgtcagctcgaactcaacactggcagccaccgtctcacccctgcggaggagcgctcccgtctcccacaggtgccttaccgcgttccctcccgctgctttcatttttctgacctaataattacgggaaatggaaagtctgggccagcatcaataaaatgacaccaaaaataagtagatgaaatcaaatgaatatgagaacatcttgttcttcaatatcacgggtttttgttaatgtttcataagtaattctccccacttgatttttcttctataaaatcccatagaacaatgtttatgctatagccatttaatatatgtacaaattgtaaagaatatgtataaatgttttacacgaatgtaagagcatgtagaagccaacatataaataaattgtttaaaaaaactgtacagtaaattctcaaagcactttttcaaaacactttttggactttgtgtgtgatttttgttgttgttgttaagtactttttattccagctgctgaaaatggtccaggtaatgaattcttccccaaatcctatttcttctgacatgaattcatcatttcagttccgtaggtcagtgttgcggtccgggaagcgtatcataaccacctgggagttgccaagaagcagacagtctcccagtgtctgactctcggatatttggatttgactggtgtgaggcaaagtgaaaaagggatgggggaaatggagatggcacgggctcctcagagcgtggtagccgactgtgaggaaaagcagagggaatgtgaaagaaaataagagaatccacgggatttgatgcctggaagattctccttcaagtggcaacatggcatatatatccttctccggggagtcacatgcaccatttggttcttagatacgttga

SEQ ID NO: 123773 - DNA, 1014 bp, Homo sapiens
ggggatgctgacttgctggccagggtcccacactttgagaagccccgcctgaagcttacaggacagggcaggttcttgagccattgagttgggcaatgccatgggaagttgcaggtgcacagacgttgccttcctggctgcggttgaacctgggctccatttgtccccttggagctccaggcggccgggccgacttcgaccctgagctctcctgtctgatttcctttccaggtggcacgtctctgagcttcctggtgttggtgacaggctgcacatctgtgggcagaattccagatgctgaaatctacaaaatcactgccactgacttttaccctcttcaggaagaggccaaggaggaggaacgcctcatagctttgaagaaaatcctcagctcgggggtgttctatttctcatggccaaacgatgggtctcgctttgacctgactgtccgcacgcagaagcagggggatgacagctctgaatgggggaactccttcttctggtgaggccctgggtcccctgcagagggtgggccctgggtctcctgcagagggtgggccctggttggcatctgaggccttgacctccacttgcaccacccccgggttatggggcacctctggagagttaggacccaggcctgctctcagcacaatgagaggaaaactaaccctgaactccctgccaccccccacccctggcccctggaatgtgttcagtgtagatttggaaaagaaacctgcgccaggcatggtgcctcatgcctgtaatcccagcactttgggaggctgaggcaggtggatcacttgagttaaggagtttgagacaagcctggccaacatggtgaaagcccatctctactaaaaatacaaaaaaaaaaaaaaaaaaaaattagctgggcgtggtggcaggtgcctgtaatcccagctactcgggaggctgaggcaggagaatcgcttaaacccaggaaacggaggttgctgtgagccaagatggtgctactacactccaccc

SEQ ID NO: 123774 - DNA, 1036 bp, Homo sapiens
aagatcatctgcggggtggtcaccatccgcaccgtgtatgcctcccacaagcaggccaaggcctgcctcgtctctcgcgttagctgtgagcgcacaggcactcgcttccacacccgtggcgtgaacgacgacggccatgtgtccaacttcgtggagacagagcaggtgagtgcccaggcccatctgtggcaccaaatggttccgagtggctgcagctcttgcacacgcgctttccacttggggcagaagaggccctggcatatttgtggtggtctctgatcaggcttcctcctataagtggagaacagcacgtgtaattgggctccacatgaaaatgtgacctctggtttgcatggtgtatcctttctgattcacatctcatgcagggaaaatgctgcttagccgaggtatttttaactaaacggaatcaggaatttttgccttggtcgtgaaaggtgggcagtattccaagggcagctgacagatgaacaaatagggtttgaaaatccttttaggacaaaaataagtagatcaatacaatggggggatgaaagaagaaaccattattttttattctaaatcaactgaagcttctcctggaagccagtattagcaccctagagttgtgaaatctgcgtgttaagcagccgctcccatccgttcccctagaatatagccatctgcttaatttctcctggagttttttctaaattctgttctcatttccagagatgctgtcttacaacttttaaatttttgctctaacttgcaatctgtaagataaggccaccatgtggaatacagtggtgtaagccataagaaaggaaaaccccggaaggcacatgtatggtactcctgccagggcaagctgggtgccctgtgtttactgagtgaaggcgtggctgtgcgtcccccctcgctgccgctgctgggagaggaatgccttatgcggactttggccactttaatccagcagaggtttgagcacctacctttactgtgtgggactttctgcctgctccagtgttcagagggt

SEQ ID NO: 123775 - DNA, 1026 bp, Homo sapiens
aaaaaaaaaaaaaaaaacacacagtatctagaatctaaaaagtactcaaaatggcagctgctattgatactaatagaaacaaatgataacacccaggagataaaaccaatggtggcatccggagaagcatggctcttggtgccgtgagcactgaatgagagtttcctcctgtctttgtgggaacagggacaccgtgagatgtagtaacatgaagacagcttcctggtcagtcttatctctcatccctcatagactcatcgtaaatcagtaaccccagatgaagccatttattcatcccaaacattcactgagcgtctgccaggtgtagggggcaccagggatcagatacagtccctaccttcagggagcagggggcaggacagggcagtgttgtgtggacagagccgtgttggaggaagggagaggccccgggggcagctctcccaggctgagggtgtggggtgggctgcccaagggtccagactggggaggggtgaggaagaagcactcaggcaaggaaggcagcccttgcagagggaacaatgggtgcaggtgttgtaacccttgggttcacagtgatcagggagcatcactgggtagcttcttgaagtcctgggcatgaagggaatgggaggagagataggagaggtgagcagggctgggtcaagggcctgtggatgctacactgaggagtttgcatcccataccagcagctactcaagcagtactccccaaccttgctgcacagaagactctgctggggagcttgaaaaatcctgatacccaggttgataccatacacattaagtcacaatatctggggccgggagccaggcagctgtcctttttgaagacccatgggtgactccagcatgcagaaaagtatgggaaccactcggtgctgtgctggcaagccagttttattggggtcagactgggtgcagggagctttggtttgtagcatttgtccattgctgtggtgtaaattctcccatcgtggccactttcaacctacggctccacatc

SEQ ID NO: 123776 - DNA, 1029 bp, Homo sapiens
gtttgtctgattatttactgtggccctggttttaaattttccactcgttttcattggacctgctggtgtgacctgataaatgtgtgtttctcctgtgctttttctttttcttacctggtcacatttctggcaccccacacattctcaaatctcgaatttgctagaatgtcagcttggtctcatctctgttctctgctggccactctgttctctgatcctcagctgcctagttattggcttcttatttacactctttgtcccaccttttctcagcccctgtcaccggaagaacagtttgagcaacagactgtccattttacaatcgggcccccggagacaagcgttgaggcccctcctgtcgtgacagcccctcgagtccctcctgttcccaaaccaagaacatttcagcctgggaaagctgcagagaggccaagccacaggaagccagcatcagacgaagcccctcctggggcaggagcctctgtgccaccacctctggaggcgccgcctcttgtgcccaaggtacccccgaggaggaagaagtcagcccccgcagccttccacctgcaggtcctgcagagcaacagccagcttctccagggcctcacttacaatagcagtgacagcccctctgggcacccacctgccgcgggcaccgtcttcccacaaggggactttctcagcacttcatctgctacaagccccgacagcgatggcaccaaagcgatgaagccagaggcagccccacttcttggtgattatcaggaccccttctggaaccttcttcaccaccctaaactgttgaataacacttggctttctaagagctcagaccctttggactcaggaaccaggagccccaaaagagatcccatagacccagtgtcagctggcgcttcagctgccaaggcagagctgccaccagatcatgaacacaaaaccttaggtcactgggtgacaatcagtgaccaagaaaagaggacagcactgcaggtgtttgacccactggcaaaaacatgactgagcagc

SEQ ID NO: 123777 - DNA, 1041 bp, Homo sapiens
catattttaacaaaaattttattctctgtcccatttatttggtatctggaacgaagagaaaacctaaaaatgagatctatttccagcactgcaagcaactttggaggagcttacttttcccctgcttctttgactggttgttacatttatctgttttcaaatttatctcctttttggtgagaaaagaggttatagggaaaagagcatttgaatgaattcttcaatttcatttcatttatgactctggctgttaatagcgatgtgcatcttggcaaatcagcttctccaaggaacccatcttgctctctcccccaaactctgttaaggaccattctgtttatttcttgtgtttgttacagaggtaaaaatcatataaagcacgtaaatgccaccaacggcatcctgatcacctaaacaccgccttttatgactggtcaactatgcatcttatctgtctagctctgtgggtcacggattcctttttttttttatccttttccaggtattagttttcagatgaaaagagatacgtgttgtaacttttgttttgatggccatatttaagtaatctgcaatatatcttgacagtgacaatgaaaactaattatgaaattccagatgtctaattggtaacaagacagtggcatagcccaggcaagatgatccttactatcctagcagtcagcttttaggacagacatcccccagtcacgtaagggatgacacttgatcactgctgtgcgagcctctgtacgaggctcccagatacaacaggcggtacagtaagatttcactactgaacttcttattaaatagcgaaaacacggtatctgctccaaatggattccagaccttgtaacattactttaaaaatgtaaagcactatggtaatgtctttttcagttattgaataggtgagaagtgctgttggaaacgtgggaaaaatgtataggcaaaaaatatagacaaacatatagacaagcaaacccagaaacactggcctggtgattcttatatgcagggacacatagcactttccat

SEQ ID NO: 123778 - DNA, 1047 bp, Homo sapiens
ggcagtattccctgctagcagcattcaagtcataaattcttaaccagatgattacttttctggtttttgaacttaatttaatagttaaaaaaacgaaccggttgggcgcagtggctcacacctgtaatctcagcactttgagaggcctaggcaggcggatcacaaggtcaggagtttgagaccagcttggccaatatggtgaaaccccgtctctactaaaaatacaaaaaaattagccaggcatggtgggacatgcctgtaagcccagctattcaggagactgaggcaggagaattgcttgaacccgggttgctcactgcaggttgcagtgagcaagatcgcaccactgcactccaccctgggcgacagagtgagactgtctccaaaaaaaacaaaaacaaaaacaaaaaaaacaaaaaaccaaaacccgaaactcaagaggaattactaaataaccagtaattacatttgatccagaacagaaggtagccaaagatattctaaggttctcttcatatctgaaaagaaataaacccaatttaaaaaaagacaaaaacatttaataggtatcatgtacaatttcagtacaaattttcacttcaaaaatattacaggattttattaatcactagtcccccaataatctttgcagctttccttcccaatgaaatgacttcattataaagtgaacgctttgatacattactttgtttatacttacacacacatcagggagaattttattatgtgccttgaacttcaacaacgttaaaccgttacaggaattgcttaagctgatgtcctaattcaatcattaaccaaaacatattttaagaataggcaagaagtctgagaagatggtgatgtaaaagggactaggcttggggtcagagagacaatggtgagttgtgaagtacctaaaccagtctgcgtgaactgcaccatgttagagaacagcaggaacaaaataggctacaaggtcacaataagaagccctggatggtagcatcaaagacgaaacatttaaaaaaccacagaatgaaatcc

SEQ ID NO: 123779 - DNA, 1028 bp, Homo sapiens
gtgggaactgactgctcatgggtatggggttcttttggggatgatgaaatagcctgaaattaaatagcaatgatgttgcacaactcagtgaactatactaaaaaccaatgaattgagcctgggaacaatggctctggcctataatcacagcattttgggagggtggcttgagatcgggagtttgagacctgggcaacacagtgagaccctgtctctacaaaaaagtatttatttattttttaattacccaagtgtggtggcatgtgcctgtagtcctagctgcttgggaggctgaagcaaaaggatctcttgagcccaggagtttgaggttacaatgagctatgatcatgccactgcactccagcttgggcaacagagtcagaccctgtctctaaacaaacaaaacaaaacaaaaatgaattgtataatttaaaagggtgaatcttatggtatgtaaattatatctcaataatgctgttactctaaagaaaaaaaggtcatcgacatgattatctactactcacatgctatagaggtcaattaataccacttgcaaatgagcaaggaagaagaaaggtttatttagccaaagagaatctgagaatcttgatactaagaattgctaattcatataatggcttagaatagttttacttcatactgtgatcaataatggattagctactttatccttatctaggacaaattccaagcataggcagctacagtctgaaaagaattattataagctagaatttttctaagaaaaagatttgttctcaggaatacgaaaatagatacaaggaactgacccagacatgacaataagtctaacaaagttaacactagtaataatgtgtcagataaaaggtagaactgagctaaaaactcaaactttaaaaatgtacagcaaatcaatacccagaagtaaaagagtcttgaatgttctagttcattcttctctccattttaggtactctcttaatggcatttttatggtaagttgagttacctcagaacctgccgtg

SEQ ID NO: 123780 - DNA, 1002 bp, Homo sapiens
aagaacttgaagagttccaaagaacagctgccagatgtttttaaaaaggactttggaagcttgaagcaacagcatagttttttgtttttgtttttaagagacagggtctcactttgtcatccaggctggagttcagtggtataatcatagctcattgcagcctcgaactcctgggctcaagcgttcctcccacttcagcctcctgagtagctgggaccacaggcgcacaccaccacacctgtctaaatttttaaattttttgtataaatggggtcttgctgtgttgcccaggctggtctcaaattcctggcctcaagcagtcctcctgcgttggcctcccaaagtgctgggattactggtgtgagccactgtgcctcgcccaaaagcaaagttaatatcatggaccagctgcttggagtggcatagccttgccctaattctgtcaccaagaggcttttcttccttcataaccaccacctgcattcctcacctaggtggcctcactagtacctcttatcacttccgtgcgaggggactttgttagaccgaaatatctcaagcactaaatcatttttaccctgaaagtgattattgggatttaggtatagaatggatcccatgtgagacattcccattcatttcaccaggagaaaggaagtttataatagaaactctgaagtaacttagcaataacctgcaggtgtaagaaggttttgaatatgttagtgctcaatctctgcttgctctgaaataaggaagtaggccagaacacatacgaaaagttcatggaaagcataaaactatggttctactgactgagaatcccttcctgcatgtttcatcaaatgtagtttagctgcaatcaaacttcaggttcctttatcttttaagagtcccttgtcacaaccaaagcaatgtctagaactacccattcggcctctttcagtattgtcaaggggaaagcttatatttttacttaggtttattgacttttttattttc

SEQ ID NO: 123781 - DNA, 1027 bp, Homo sapiens
aaaaaacagctagatgaggagtagaagggaactcacaaaccttctacttaggatctttagaattatttgaaaagataaaggagccacaaaacaagaagaggacatgagtgcagaaccaccagggcacaggaaagaaggcacgtacggaaaacacaatctgactccacgaaaggaaagtccaacagaaggtttagaagaaatcaagagattctccataaagtagaacaaagagaaaataggagcaaaaagacacctggtatatttaggctcgagccagggaatccaaattccgattaacaggtgttccagagagaaaactgcttatcaaaccagagtactttaaaattaatactaacaatctcaaagtttcatttacattttaacagttgatgattctccactcatgggggaaaaaagccatttattggtaatttggaataatacttaaaagcaaaacattatctgattatttttctaattttaagtatttaagataatattaaaattattacaatgcttgagtaaataatggcttaagaacaaaatgagaaattatcaaagaaaaatcaagcccaacccaaaatttccatgaatagtctaaacacaattatatacaaattataaaatgagataatacattcaaggaagaaactttttcttcttctctgtgtaactgatgttaatataaccccaatttcctttatgacaaaaagtattacccttgctgagttctttgacttccaacgaggggaagagaagatagcgaatattaacagagtattcagccaaacgtgatccatgatgagggacactataaaaaattattcctctggtattgttgataacagtactcatttctggcttcgtagaggcttccaacagcatctttttgacaagaagacctagccacagacaagggaaaaaaacaatgcataagctattttccttccctttattactgtaaaaaaagaaaaggccaaacaagaaatacataaaaagagatgctttctttttaaaaaaaatggtt

SEQ ID NO: 123782 - DNA, 1073 bp, Homo sapiens
agtgcttcatcagataaactaggccacgggctgcagaaaggccttctgcaaggtgggtggtgaaaatttcaaagtggactgggggagtcgcacacaggggaggccattccataagcaaccactaggaccccaagaacagacacttgatcacacctgtacctcagcagctctgggcctggtgtgagcaggcacccagagtctgggactgtgggcactaaagcgaccatagactgcaatggtgagggggagcaggaagaataaaggggcacccctggggccacccaagaatgctgaggcatgttgacgaggtgggtgtatatgaaacgggctgcttctcatgtttattcattaccgctatgtgaaagcactacgctgtcaaacccatatccctcttagatgatttgtaacaggttgcccttttctagagaaaggaacagcatggaacaagagtagtaattttaaaagtcctagccatagctacacagattaatttagcagggggggtaagggagccgctattaagtaaaatggaaagataaaataactttaggttggccacagtggctgaaaataacatcacaatggccacttcacaaagttgaagccacacttacctcccatgctatgtgatatccaaaccactggcctatccccaacaccagcagctctgagcttcctaagaagttcgttgcttctgaatgcaatggactttctgaacaaaacaaaaacagcaggcatgacacaaggctatcgatcccctcaatttgctgtctaatttttagagttaagaactttagtctacaggaccaatgctacatactacatttagagtaagaaatacccccattctctctgcttaatataaaatacccctattctctcttattgaactcctggccccaaggaatcctcccacctcggcctcccaaagcactaggattataggcatgagccaccacgcctgggatctctctgctcaattcctgaaatcgttaattctctatttgtaacttattaacattggcctaattaggaatatctaagcccagaacaggccattcatttactgcatg

SEQ ID NO: 123783 - DNA, 1023 bp, Homo sapiens
tcatcgtgttctttctttttaacttgtccaataatgctttatatcttttgaattatattgattattagactttaagtaggctattagcagaatctggaaaataatatactgtagtgactactgggggctgaaagagatgacactagaacatcctgggcttttcttacttgttaaaagaattgtgagttagtcttcacactttcatacaaaaggacacagaggagagacttgacgaggacacaggttgcgctcttcttggaataatttgtatgttttctattctgataacccacagtttgcataaagttccttttacatttccaacatattttgaggccctacacattagtattttctaacaccatctattagtacagagatttctttttttttgtcaaacaaaaatattagtcactttttttcagtaaaaattttaattattttaatttcagggtggtttatggtgttttggaggaaatggacttccttatgctgaaagttttggagaagttccttcagcaacagtggaaatgttctgtttagaagctatagtaaaacattctgaggtaatttacattttcaaaatgtagtttactttttatgattttattgaaataattatataggttgatttttgcaagggcaataatcatttactgtaaaaggagaaaagcccttcacttatttttaaatttctgctttcctccaattttaattgttagaataatcatgatttagcaccaataaatgagattctattttgctaagtatttctaaaaatttatttaattgcctaaaagaaagcagcctatcatctaaatgtggcatttgcctttgagttatgttgtcttctactgcctttctcagatatttttacatattattttcagataatttccattaaaacaactgccaaagatgtgacaggataaaagaaaaaacaggctgggcgcggtggctcacgcctgtaatcccagcactttgggaggctgaggcgggtgggtcacctgaggtcaggagttc

SEQ ID NO: 123784 - DNA, 1086 bp, Homo sapiens
tgcctgtaatcccagctactcggaaggctgaggcaggagaatgacttgaactcaggaggcagaggttgcaatgagccaagatcatgccactgcactccagcctgggtgacagagtgagactctgtctcaaaaaaaaagcaaagtaattaacattattctcttggactgtatttaattttaagggcttaatgcttttgacaattttcttccttccttaggtaattgtgaataaatatggagataaaatataccctattctcttgataagtgttttataattttaaatttgttagaaaatcactcccatgccttcataatgagcatagtatatccaatatcatagatttcacaatcaggttaatctacagtgtggagctagatacaaaagggcttatctgatctccttaaaaagttggcatcgtgaaaataaaaggtgggaagactttctataattgaaagagactattaaatcttggttttaaaaaacagctttaaatatatttttttgaaaaattggggaagcttgaatatggaattagactgaattttagatgatttgggaagatttttgttagtgtttttgggtgtgataatagcattgtggttatttaagagaatgcaggattgttcttaggagatgcaggttgaactgtgaaaggctgaaatgtcattttgtctacatcatcctttcaaatagtttgggaaaaattacatgtgaatatagatgaagaaaatacggtaaaataataacagttattgaatctagatgtgatgtatggatgttattcttttttttttttttttttttttttttttttttgagacagagccttctctgtcacccaggctggagtgcagtggcgcgatctctgctcactgcaagctctgcctcccgggttcacgccattctcctgcctcagcctcccgagtagctgggactgcaggcgcccgccaccacacccagctaattttttttttttttttgtatttttagtagagacagggtttcaccgtgttagccaggatggtctggatctcctgacctcgtgatccgcctgcctcggcctcccaaagtgctgggattac

SEQ ID NO: 123785 - DNA, 1076 bp, Homo sapiens
ttacaggtaggtagaaggagtacactctgaaatagcaataaaagtatactatagtgaatacataaatcagtaacatttattattatcaagtattatgtactatacgtaattgtatgagctagacttttataggacgggcagcacagtagatttgtttacacagcatcaccacaaacgtgagtaatgtgttacgatggctactcagtcactaggagacaggaattttttagctccattataatcttatgagaccactatcgtatatgaggtctgtccttgaacaaaaagtcagtatgtgatacatgactgtataaatgttatatgcatattactgtatacatgttatgtttcccaacaaaaaagaagtttactatgacaagcttaatagagaagagtagctcttgtgttacattttgattgtctatttatgatgcattttttcttttctctttaagaggttctttatttcttacatatgaagttctggccctgaagaaggctgtgacattagatactcaagtggtagaacgagaaaaaatgaagtcatatatatatgtgcacacagtttctttagacaaaggagaaaatcatggtaagtttattgtaaagtaatcctctgtgaaaaatggaagctagttattgcatttaaaaatgcgtctatttaaaacacagtattagtaatacagattgagctaattctaagaatcaccaaaccccgtgaaaaccaagttcctgaagaattaattgaggaccaaagtttaggcttccgtatttaatccaggtttgcaactctcctaaaattaagtgaagactaactggcatttttagtctgaacctggaattccacatcttagtggggctgtcaatacagaggctggctctcagtttggcaagtacaaaaaacatgattttgtaatttagctcagtgatatttctactttaagggatgtattcatgcaaaccaaactcatgagatatattcataaatatgaatgccaactcatttattataattatctgtcaccaaggctagaaaacctgtctttactagttaggacactccacttctcaatatt

SEQ ID NO: 123786 - DNA, 1060 bp, Homo sapiens
tgccatgttgcccaggctagtcttgaactcctgagctcaggtgatctgcccgtcttggccttccaaagtgctgggattacaggcctgagccactgcccttggccgagggcagaggattctaaagaggcttctttgtgttcctctggtgctagctagtatctggactttgttttacctgcttgcctgagggtagaaaccaaaggtcagaagaaggtgctaagctctgaatccagagtgcaatctttgtgtcaggatttagggagtgtgtaagtcaatctgattaggaaaaaagaaatcttcattttgagattcacaacaaacaacatttaaagttaacttcaggtgttgctcttaggaaaggaaaagctttcatatgctgatgatgggagtacacattggctaatctttttgcaaaaacggtttgtcattctctagtaaaattgaatatgtatactatcagaaggtatgtaattctagatacctgtacgtgtagatagaggaacacgtactgtatgcacagtacagatgtataagatatgtcacagcattgttgtaacagactcaaactagaaacgttctcaatacccatctatgggagagtgaataagtaagttgtagtatatccatgcaatggataattgcatactatacgaaaatctaagtgcgggaactacattttacatgcaacaacatggataactcacaaatacaaggctgagcaaaagaatacatgtagtgtgattccattgatatgaatttcaaaaacaggcaaaactaagctctgttgtttaaggatgcatatataggtggtaaaactgtaaagaaaagcacattgttataataaaaatcagaatcatatatagagatgagaacagatcattatccgggagggacacattgtgggtttctggggttctgttaacattctgtttcttgcctggatatgattatgcagctatttattatttgtaagccgaaatgtgtatatacatgtatatgtatatatacagtcatgtgtcaataatggcgatacattctgagtaatgtgttgttaggtgat

SEQ ID NO: 123787 - DNA, 1089 bp, Homo sapiens
tggagaattttttttttaattggaaagttttcttcgtagtcttgaaaaagctaactctgtgggtcatccactgtgatggtaacatgttcttgtagttaaaacaagtgttttgatttagatgctaaattaaatttgttgtaattgttctacttacacagaatgtccctggctgcttattgcgtcatctgttgcagaagaataggaacctctacttccccaccaaaaagtggcacacactggagagatatcagtgagtacagcttaaacaactcttattttcttataggaacagtgatagaattgtggccatttctaagatgggccacaaaaactttttgaacccatgattaaatctcaaatttgtttatgtctttctgtactaatagttcaccccaaatttataggcccagagccatacatactcctttttcttgagaattattttccctcttctacttcttctgtcaaatttcatactcatcatcctaaacttaaatataactgcattttcattcagcagatatttattaagctcttgcaaaacaacacccatattaggttctgggaatacactggtgagcaaggaagatgttgtctttgccttacgggggctcgggatatggctccagtctactccatttggagccttgccttcgtttaggaagctttctctgacaccctaggcccggttggatctgttacttgtcatttcatagggtcagtatagaacttaattatctgtctttccccatatgctgtaaactctgtgaaggcagtattttatcttgtttaccactataacctagttatttatcatgcatggcatgtagtaggtgatcaaatagtgtttgttgaatggaagaataaaataacttaccttttctgagcattatttcctttatgtgtaaaatgagaagattggcgtagaacatcttttattcatttgacaataaacaaaatatttaattgaccatctactgtgtgccaggtacaattctaggccctaagaatacaatattgaataaaacaaagtccttttcctcatggagtttctttttgatctttaagagaaatctgtttttagggata

SEQ ID NO: 123788 - DNA, 1049 bp, Homo sapiens
caggctggtctcgaactcccaacctcaagtaatctggcctcccaaagtggtgggattacaggcgtgagccagcgcgcccggcctggacttaacttctgaagaactctttctgtttagattgcaggagcgttctctcggctcatctcttgttttctcacccagctgttcttcttctagttggccatcattcttcatccctccctccctttcctgcagttaattatttctttgaaattttaaaacttcttaatgttgcctggaatacatgagtcttcctgatctcttcaaacggggtttgttttgttttgctttggggagaattcttttgacgtttttgaataagctgttaacaactttaatacctgtcttgtttgttttcttcagaaatttgttaattctccatgattagcacctttatgtggttatctcattattttcattcctttttaattctctgttttaggaatgcttgtcaaattcgtcactaaaattgatttactttcttgaaaacctgtttctgctgctcccaacatgatttaatcttggctactgagcttttggttacgttgcactccctttaaaattactccgtttaagtacagtgttcactctttgggtaatgtgtacaatagaagcccaatccccacctatacccaatatatccatgggacaagcatgtacatgcaccccctgagtctaaaataaaaattttaaaaaaactatatctgtcacagcctgtttttatttttaattgaagttctctttttatgagcgatacacattcattgcaggcagattgaaaaagggaaacaaaagaaaatacaactcaaccataatcccaccactcaggagtagccacaattaaaatgttaataacaggctgggtatgatggttcacacctgtaatcctagcactttgggaggccaaggcaggaggatcccttgagcttaggagttccagaacagcttgggtaacatagaccttgtctccactaaaaaaatcaaaaaaattaggccaggcgtggtctcacacctgtaatcccagaact

SEQ ID NO: 123789 - DNA, 1163 bp, Homo sapiens
gtctcagctacttgggaggctgagataggagaatggcatgaacccgggaggcagagcttgcagtatgcagagatcacgccactgcactccaacccgggcaacagagcaagactgtctcaaaaaaaaaaaaaaaaaaaaagagttctactccctatcccaatgagatcacactgctttgacacttgccttttcccttaatttttcatgctcctttatgaaaaacctgaagcaggatttctatttcagaggaaagtttttttttctgattttagatggggagctttctaaaaatgttgatgcctggcctcagcccccagtcattcaaatttagttgttctgggatatgacccaagcgtcagcatctttaaaaggcctgcctggtgcttctgctgtgcattcagagctgagaactcctgggccggtgtgtgcacaatggagactctgggtaggaggttttgtttttgggtttcgttcggtttccagtaggctaatctaccagcacagctgtttccttttactgccaaggaaatgctgagtctgcccagcaaggaaccagcttttgttaaaattcactaattagataactgattccccaagtcgttgcaggatcttatttattgacagtagctagcttgagttggatcctttggttagacggaggaaagtcattgcagcactcataattggttaagttttttttttttaaacataaattcactaagatattttagtcttgtgtttatttactgtttaccatgcttttgtgtgtgtgtgtgtgtgtgtgtgtgtgtgtgtgtgtgtgtgtgtgaaacaaactcttaagctatgtcagcatatcctttctcaggcagagtctttcggaggtagatgtctaattcagtattaactggtttacctagctctcatcactcctccggctccctcaagccctcagtaacatctgcacttacataaggtatttggatgtgtgacttatattttattaaattaaggacagaagttgagtttgacacacaaaaacagggagagcagaggcaggtccgtgagagataaacaaacacaactaatttagtgacatgaagaattcacagaaatcttggaaggttttgaacttctgtggacatggaatggaagggttagtcttatgtcagttttatcaaaca

SEQ ID NO: 123790 - DNA, 1090 bp, Homo sapiens
aagtttgacccgcttggggcaattagctgggaggtgtctacttcttcctgtggcgacaccgcttcagggatgggaaggtgagggtggtctggctttgtggaaggaaacgagggtgacacagccctctccgaggttgaggtccgttagggtcctaattccttctacctgctgaactgcccttgtcatcagaaagtctcttaagactttcctgtcggggataatcagctcccctcgccaggaactgtctcctggatctctttggggtctcccccacgcccttttgttttacagtagttcagcaccttaaggatatcctttaagtcattgcaataggcaggtttatgaaaaagcacagaggaagttatttctaaggttttgaaggacgtaaaaacccgttgcaggtgtgggtgtgggtcccttcctttgtgcctcttcctccgtgtctgggttctccatttcttagttgaagttcttgcagacaaacccgctgggaatggtgcggtggtcctggaaagttctccccgggctccgcagcgccagattgctggggtgtgaggttgtgatggatgagaagtgacagggcaccttgcacatagccacactgcaatccagagaggccatgggcacactcatctcgcgttgtgcagtgatagccatattctgaatgggagagtcacaagtgtcctgtcttctagtgaagtccttgataggtaactggcatggaagtgatgatatgaataaattgtgaatagctaaatttgatgtttagttcttcagtttaaagaatagtacttaatttgtgtgaaagttgttagacgatgtggatttcctttaagaattttaagagctctatattagggctgtggaagtagcaggtttatttatttatttttggttttgttttttacatgatgtggggaggtgttggcttccggagttaaagtccgtagtgctgaattagagggaggaatatggagaaaaatgttttcaacacaatggaactttcatacatggaagatgattaggaagtcatgattgcttcctgtggttgagaaatacgaactttatgcatttactattgtttatttta

SEQ ID NO: 123791 - DNA, 1039 bp, Homo sapiens
tttaggccaggagttcgagaccagcctggccaacatggtgaaaccctgtctctactaaaaatacaaaaattaaccagttgctgtggcacacacctgtaatcccagctacctgagaggcagaggcaaaagaattgcttgaacccgggaggctgaggttgctgtaaggttgcagtgagcagaggttgcaccactgcactccagcctgggtgacacagcgaaactctgtctcaaagaaaaaaaaaaaaaacttaaattttcagtgtacagttcagtagcattaagtatattcacgttgtcatgcaactatcacttctgtccagaactttgttcagattcccaaactgaaactccagacctgttaaaccccaactctttcttttcccctccctgcagcccctggaaaccacccctctattttctatctctatgaatttgactactctaggtacctcatgtaagtgcaatcacacagtatttgccctttcatgactggcttatttcacttagcgtgatatcctcagggttcatccatgttatagcatgtgtcagcatttgcatccttttgttcttgctgttgtttctagagacaaggtctcactatgttgcccaggctggtcttgaactcctgggctcaagcagtcctcccagctaggcctcccgaagtgcttggtttacaggcatgagccaccacgcccagccgaattcctgtccttctaaaaactgaataatattccattgtatgtatataccacattttgttgataaacgttctagatttttgtatactaaatgttagtaactgtggtacttcatgatgatcaggaaccttgtatttgaccttagtgaaaagaccacgaggcaatgatcaggaactctgattagaagttatagaacacttattttattaaaacaaattaaattaattaaattagttaaaacaaattcgttattgtttaatgcatagaaactctttaaaatgaggacccatgggggataaaaccagtacgtgtgttaaatccttgctgggtcctatcacttc

SEQ ID NO: 123792 - DNA, 1043 bp, Homo sapiens
cctaagtcccaatgtgatagtatttggaagtggggtctgtaggaggtaattaaggttagatgaggtcatgagtgtggggccttcatatgggcttagtgtccttagaagaagagacaccaggaggcttgctttttttctccccatgtgagcacacagcaggatggcagctgcctacaagggaggaaaaaaagcctgagaatgaaacctaccttgctggtaccttgatcttagacttttagcctccagaacttcgagaaataaatttctgttgtggccgggcatggtggctcatgcctgtagtcctagcactttgggaggctgaggtgagacgatcacttgagcacaggagtttgagaccagcctgggcaacatagcgagactttgtctctatttatttattttttatttaaataataataaaaaaactaaaaacataaaagaaacaaaataaatttctgttgtttaagccactcagtttatggttttatcgcagcctgagcagacttaagacagcatttttcagtgattatgttggcaatataatttagacacaatttttttatttttttggagacagggtcttactttgtcacccaggctggagtgcagtggtgcgatcatgcttactgcagcctggcctcccaggttcaagcaatcctcctcccttagccttctgagtagctgggactacgggcacatatcaccacacctggtcaattaaattttttttttttttttttagggatgaagcctcactatgttgcccaggctggtcttgaactcctgggctcaagggatcctcctgccttgccctcccgaagtgttggggttacaggtgtgagccaccgcacccggcctagacccaatttagtcctttatggatttgaaatgatttggtaaagtttaatataaagtatcatgttatgatgacttctgctgttccttctcttgctgatcttattatttgggcatctcctggtgtggaaagggaatgataaggatgatggtaattctcggtgctggtgcagatgaagggaggtatg

SEQ ID NO: 123793 - DNA, 1091 bp, Homo sapiens
aaagaaaaaagaggttgggtcataggagaagcccataagatgaatgcggttgacactgaggtcaccttttccaggccttacaagtgatttgagcctttaccatttttattcttgttatattttcccatgaaatgagaaactcagtcttatgtttcatatgtagaaactacttttctgagttaattttctgttgcctgaataatgaaataaataatctaatatttgaaatgtttgggggtaatgcacaataactcttaataaaagacagaaagctcacattttgcttatcttattccattagtaattatttttaatactgggacagaagtgagaatgaaagtggcacgcattctgtttcgtctttttacccagctttgcctctgagggacttgggaataaattaggtagtgtaggattgggatgctgcccagaatctatctattgtagcttactctaatgcatcagttcccagcctttttggatttatgacattctatttgtgtttgattttgcatctccctcctcacaacttcaatggctgtgacagccgggtctgtgttatcagtggagagcaaagtcctgataggaactccacaaattttctctctcattcagttttatcttaattacattaacctttaattttaactatcactttcagactttttctggaccattaacaagctgctcaattacattgctatatggaatatgtttatttaaagtttttgaccaattaaaatgccttgaaaaattttgtgatacagtataaaaagtagtcaatgatagtgagaattgtattttatgtgcatttttgtgcaagaaatttgatagagtaatattaagtatcatttggtccctgctaggctaaaactgcttctttttttgagacggagtcttgctgtgtcacccaggctggagtacagtggcacaatcatagctcgctgcaccttgatttccctgactcaagtgatccttccaccttggcctcccaaagtgctgggattagagacatgagccaccattcctagttaaaatgcatttcttttcttttcttttttttttttttgttttgagacggagtgtcgctc

SEQ ID NO: 123794 - DNA, 1025 bp, Homo sapiens
ttttgctactggtctgagcatgaagccaacatcaggttaaggactgagccaagccaacagcagagagaactctgcagagccccagtgcaccatgcttggcacccactaaccttggacttgttctgtgaaataaattttcttattgtttacaccaatttaagttagggttatctgttatttgcaaccgaagatgtgctaactgatgcaatagctgtcattctttccctcattgcatgaagaagtacagggtataaaggcagaattgatctagtcagaaggtcagaggtggcttccctggggaaatgcagaggccttggtgggagagatcccttttcttgctgggcctcgtgtgccacatttaaggattttggtctttatcgcaagagcagagcctgttataggtttaagtactgggctatggcatgaatgcagtgaactcttactatttaaagtaactctctagttacttaagctactcctcctgaagaacaccttggcttaacattccagagttgagtttgatttgctgagcaggcaaggagcagtcagtggttaaggctttggtgattagtaggtgtgtccagaaagcacagaagagcatctttgcttggaatctgatgaagtgaacagcccagattgttttcttttttctttgccagtgcgtgcatgtgtgtatgtgtttctgtatgtatgtatatatataacttctgtgtgtgtgtgtatacgtggtatgtatactaacatgtacacacatataccacactcacacaggcagctttcatgttttctactttaagggtaacttgtgaacatcctgttgttctctaagtctttgatcacttcaataaaaaagttgcagccgagaaaccaagaaacctgttggcggttataaaaacaagattggtggtcttattgtaaataaaatgttgaggatgtattaatatgtctgaaattgaactttttagcatttccaaaagttttcctttagatttgatataagatctgctctcactcttatacatatg

SEQ ID NO: 123795 - DNA, 1177 bp, Homo sapiens
cacatagatatcttctgtgattttgagaactctatggaattcagttgggattgaatattctgtgtgaattgtgaacctgtatgcagtaatccaaggtgaattgaaagcatcatttatttatcgcagttttgaaccactattaactaaatatccgaacagtggctaagaggtcataatgctttgacaccagtgctctaacaccagcttggtgtcacttcaactcggttctgacaccaaccacctgaactgaatgtcagacatgagttctgcaaggctgctctcatggcagataccaattgcaagtcttcatgctacctggacttctgaccaactggctgtaaatttggggattccaccaccttgtcagttttgataatttgctaaaacaactcactaaactcacagaagatggttttatgataaaggatacaactcaggaacagccaaatggaagagacacatagggcaagacctgggagggtcctggatgccgagctcccatgccatggagtcaggggcatcaccctcctggcacatcaatgtattcatcagccaggaagctctttgagctcaggtgtttatcgtatcagggtcttatgacatcgttggtcatgtgattgagctcagtctccagcccctcttcttcccagaggtcaggggtgggaatggaagttctggccctctaatcatatgcttggtctttctggaatggccagcccatcccttgaaatgctctaagggcccaccctctgtcacctcattagtgcagactcagatgtggtcagaagtgactcttcacagataacaaaagacactcctgtcacccagaacattctaagagttttcggagttctgtgccaggaacaagggcaaaacccagatatattctttctaccacatccatgatttagataaaacttgggttcttgcaggaagtttctgaggatattaagatgttcatgaccatcctggctaacacggtgaaaccccgtctctactaaaaatacaaaaaattagctgggcgaggtggtgggcgcctgtagtcccagctactcgggaggctgaggcaggagagtggcatgaacccggggggcggagcttgcagtgagcagagatcacgccactgcactccaacccgggcaacagagcgagactctgtctcaaaaaaaaaaaaaaa

SEQ ID NO: 123796 - DNA, 1037 bp, Homo sapiens
agtgtggaagaatggcagttatgatttcattcagatgtgcccagctgctgacaaattgaatacaacgatcagtggcaggcagaactctcatttgttgtgtgttgtcttgagtctggtgaggtgtatcctttcactattggattttaccattcagtgcagtcagtagctccatttgatgtaagtgtaaagatgggtctctcatttcagtttcagcaattattcttaaaacctttattttccagtgttttaaagtttttaaattttatatctttttttttttttaaacagatttgtaagactccagggcctcccagccgtgaataatctgatggttcctgaaatgactggggaagcagacgcttcgtatggcagttgaagagtgtgtgtctatgtgcatttaaaaccttctttctgtacttacacattcacacgggaagacaggctcattcttgtgcacacttgagagttttacaactgatgaaaattaatttaagaatcagatggagcaacttgacaccagtgggctcaggagcccggggagaaaaatacatcactaatggccagttttccatatggtctgcacgggtaaagaaagtctgcaaaaagaagaaaaaaaaatttgcgcagattaaaccacaaaaatattctccagtttaaagaaggaactaagtgagaaggtgactgagaaagaagtgtgatttcaaacattgcagcggctcacacagtgtttgttgcactttatttttcagtgggtttggtgatttggacggattaaaattctagactgaaaagtaactcctactgtggttatggctagaggaaagcaagttcaagtatgatgggacaagtttgaataatgaactgattcctttgcctatcttaattaactgtatttgagaaattttaatttattattcccccccttttttcctgcatctataggataatattgtaaaatagcaattgaaaccaataattattaaataaatatcaaggaaaatccaagcaaagctttctttttgttggactagtggtgt

SEQ ID NO: 123797 - DNA, 2390 bp, Homo sapiens
aaaacactatcactctctagggagacagctgggggaatctgactctggcttctgcttttgttttaagggattaacttccctgtcaagtccaagaagacttgcgtatgagaagattacctgatggacttaattctaagattagcttttttcatcaagatggaaaaagatctttaggagcagaaaaggggagtgctaactgggggagcgagaagggagacgagcaaaagaaacaaaatcttgccacgtggctctgttttgtcagcaagaggatttaagactcacccagggcaaacactgggaccactgtaagagcgctggaacattctgcctcttgagtgaaggggccttctttctagcctctatggcactgaggggtgcgccggctggtggaggagcagtccgatggagccctgcgttccccggggacacagggccaagctttgaggtggaaagtttctggttctgaaacaacaaggagagagtctgtttttcttcctaaaatttggactcttgtctgcacaaactctggtctgttttgcacggtttgtgtgcctttttttccctttatgcaatctttttcagctttagcagcagaaatttgtctagttcaggaaacatgctagagggtggcttcagaaggaagatgatcctgtgtattctgtctctgcatccgaacttttgaagagaaaaattcgagctagagggattcttaaagccttaagttacttgaaatctatgtatttgcaaccctttgtctctggaatcatattacactaaactggaatctcaggctgaatgagaataaccaagtggagtaaaaagaagaaaaccgtttcttgatcaccacttaattaacgatgctctttctccaaaggatcagcacgttcttcctctgagaacttgaaaatacaaatggaccccatgtttttttaagcattaccttttcttagaagactgccatcatcttttatagaggaattttttcactatgcattcggtggatctttataaaatactgaccttctaattagattcaggtcagtcttaattaaagggggaaaaaagcaacgcaagccaaccacaaaaacacatataccaatgaaagaaattggtttaaatttcacagcattaacattactttttaagtaaaacagttcattgaagaaagtatgtatgcagcagtggaacatgggcctgtgctttgcagcgattccaacatcctgtgcctgtcctggaaggggcgtgtccccaagagtgagaaggagaagcctgtgtgcaggagacgctactatgaggaaggctggctggccacgggcaacgggcgaggagtggttggggtgactttcacctctagtcactgtcgcagggacaggagtactccacagaggataaatttcaacctccggggccacaatagcgaggtgagctgtggttttgtttcactttttggtcacttccagtggtgtttttgagccccttgtggacttgaaacttccttcatttcagtttcatagacttgctgcctagtgagacttcccatgctgtgagttctgtctcttattctctggcagaaaagatgctaagatggacatagttcacagtaggctgcgcctccccaggtgggtcagttgtccctggcacccctgctgtcctctccctgcactgtctctcttagagggtccgggcagtgggaagacgcccagcagtagggaggccagggcgctttctaaccagggtggggggttaaattagatgatcctaaccaacttttcgtgctccaagtctacatggcaaagagttacccccacccctgatgtcccactgacagtgtgaaaaatgaaagtggtgctgcctttaccttgcacggttaacatctacgttcctttggtgatggcttaacacttggcttgtatgttttcgtacttggaggtaaagaagtagttaatggacaaaaaccatagtttttcacatgtatagggtatattatattgaggctattatgccatatatttgtacatgtagattcctctgggcttctaaaatataagcagtgggattatgaaattcatgcaaccaacatttattgagcaatacttaagtgttaggcattgtgttttaaagaagagcgtgattggtaatttcttgcaaagttttgcttgtatggcaccttcgcaatattcatgttttactcttcactagcttatttgggtatttttaaaatgaggaatccatgactatttcaggcatcttaaaaatgtcattaaatggttattaaatagctactgtaaaggagcaggaattttttcaagtataggtcttagtccatttgtgctactataacaaaatatagacagggtggcttataaacagtagaaatttatttctcacag

SEQ ID NO: 123798 - DNA, 1044 bp, Homo sapiens
tgcctagttacatctcatatggctcagcaggggagaggagtgccctcatggttgctaaatgtgggaatggaatgtgaggcaggaggcaggtgagaggttagtacaggtgggaggtgtccccgctgtgtggggaggagggacttttgccactagttctgttacaggtttgggattctaggacactggacactaatgtgcctaatctgtaaggcattctagactcatcttgtgcagttcattcatcttcccgcctcgcaagccagcagagcctgacttggggcctcagctctgcatggagctacctattgggccttcaacagcgagggttttagtcagaaacacagaaatgaatccttagtgcactgggcagtgggtatcgtattttactaggaggtttttgtctagaagttggtcatttctctgggatatggtataggatgggtgggaagggtgccacaaggaaaaacgtgagaatttgtactgtgcaacagtttggtgtttccagttgggtccacccacaaccttgactccaaacttccaaaacaaacacacctgtgcattttgcccaagattctattgctgggtgtttttattgtaccttctggcaacctacatttggtttctcttcctcattgttgctgttttagggaattcttactgacatgtgttgttttttccacttggcctagttagatttggtctactaaaatacagaggagattgtctctatcttagggacttttctttatcctcctagtcaagctcacttccagcctttctttttcctccctgtatataatccctgtgacaacgtttaaggcaaaaccgagatttgtatgttttagctctgttctttctttgctgattaaatttttagagtttaaggaagagttcattaatcagaaccttaacattaaaaaaaaaaaagaagaataacctcgaaagcaccatccttgtcagaaagctctattttgtaaactccttggtagcagaaataaatgtttgatggctttgtttaaaaaggcagtatgagttaatgtttag

SEQ ID NO: 123799 - DNA, 1020 bp, Homo sapiens
gagagttaggagttaggtcagaaaccacgcagtggttttctggtaattttccccagctgtgcctagcaacatgggggtaggcacttccatttccaaaaaaatagatctctgtcacagaataatagtggctgacattttcttaaatctgctgactaggaggcttcaggatacaacctctgcccacagcccccaggccccagggagtgcccgagcgtcctccagatggggtgggcagcacggcccctagcttctcccgtctgcagcaccctctctggatatgctattgctaggagttgtatttgtggtggattttgtgactcttcgagtcaaggttttatttgtctagaaatgagagccttgtctgaggagaacatgcattttttaatgaaacgtgacaggatttgccactggtgttaccagcaggcctgggcagaggcctgtgtcaggtttaaatgtgagctgcaggcagagtcatttgtttgtggtccatcttctaacagtcattttgaaatgtcagtgttcacttctggttggaggaccaccctgagaagattctctttcccaggagtcagtattggcttgtgatgcacgtctaagatcctacataaaaatgactatagtaagccagcagccctgcggcggccagcaattccattagatgagtaggaagagagctgtgctttctgctgttgtttttactggctggtgaagctatacctttgctctgatgttatacccagaaagggaatcgtctcctgaaacttgaagtgttcctctgatgccgaggcctggccttccctgagggattgccccaaggtccctacaccagtgctggcccaggcttgccctctccagtcactctggtttgttgtcaggcagagaattttcactttcatctttgctgctgacttcgccctctcacctcttaattttttttctttgtaaaatttaggaccttagttacgtgtcgtattgagaaagcatagatgactgaagatccatcaggcttggagtcttcat

SEQ ID NO: 123800 - DNA, 1061 bp, Homo sapiens
ctctaaagattgtaacattcatcttggatttatcacaatatacttaaagttgatgtagaattgcttctgtggtgatacaggaagcttgcaacagtgtacttccatctgtccagtcctttgagctgtccttgtcaggttcagcctctgcctgtgattgggacccctggtgggttttgagcagagtgatatcaggagcagctattgctgttagctgttcctgttagcagtacctccagacccactgattattctaatagagcagtattcaattctagtttttagcaagtttttaaaaactttgagtgcatggttttcactgtttaaaaatagcaatgtgttgtcccttataattgagagagatgagctttagggtccctgaaagagaatctcaaaagcccgtttaaccaatgtgccagattgcctgactttttatgacgtttttcttaattagtggatttgtgttatattttattggctcaaaagtgaatccctagctcatagcttatttctcaaatcacttagcattttaattacttttcaatttttgagatacaagtcacatattttctttttaaaattaatatatgtactttctcattgtaaaagacctgaactatacagaactgtaagaagtaaaagtcttagttttccttccagagagaacatgttaggaaaatctcttggcatctgaggagctggctgtctatttttacttctatattgactagctctttttccttctaataaagagtgtatattggtttaaattataccaacttcctctgggttttagaggttagcttatttgtagacgagtctacctaccacatctatttctccttatggcttagagcattttctgatcatcagcataaaattttaggtgccttattcattttgccccaagaatgttcaaactcctcaacctcagaaatgtttctagtagttgaaagactgttttgcgattacttttattggattctacacagaagtacccatagcatcattgaactagctctgttgcataactgtcctgtgtctaaaaatacactgctgagtag

SEQ ID NO: 123801 - DNA, 1053 bp, Homo sapiens
aacacgcctgtagtcccagctactcagaaggctgaggcaagagaattactggaacccaggaggcagaggttgcagtgagccgagaccacgccactgcactccagcctgggcgacagagcaagactctgtctccaaaaaaaaaaaaaaaaaagaagaagaagaagaaagaggtttcaaacagccatctttgcctgaggctcttgtcctgacacggacagtggtggcatgctggttctgccaacttggaaggggagcccttccgagtcccatgatggcatatgtaagttagcaaggcttcctgaaggtgggtgggttgtaatttatttgtacatttggctctgattcttggtgattttgggagaaacgactgcaggcaagaagataggtgctttatggttgtttttttttttaacttaacactgagttttttctctcaaagtagtgtttctttgattctgacttcttctgtgcctccacaaagtaaatacagcaccataatatcatctgagcgtctgttcttgaattctcagtattttggattttagaaggtgtatgctacacataccatagagtatgaaagactccaaacagggctggggcatcaccctgtaatcaaacgtaatatttcagcaaagctcattaaatgggatgattaaaggcttaatagagccttatggcagttcaggacagattttatagccaaatgagtcagctcaagttttgtcatcaaatgaattagtgaaaaacaattggttttcagagatgtttagatttcagaattctggagaattcattatggacccatattccagtcatagggctctgcttttattttcttctcctttgcaggcttgatggtcattagaattgcggattgtgttttagagtgtggaggagaaatgactggctgtgtagggtggattttgcattatgaactatagaagtaaatggctacctagctaagaagaccaattcaggtgtatttattcttcagtaatgacaatagtttcatttatttttctaaaagctcaaattatgaatacatagcttctc

SEQ ID NO: 123802 - DNA, 1062 bp, Homo sapiens
cttccctcagactcctccggcactcacctattctcaaaagccacctagccgagttgctacctttttagataagtgatcagaatttttcaaattaaaaaacaaagttcttatactcagaaaatttgaagcttataatttcttgttatttcctctgtgataaatcgtaaacaacttagatttttcaagtatgtatttttttttccaaattaaccacatttagatgatttagatgctaaactattcagaaataagttagatacggaaaattttgcttctggaggaaaatgaacctaaatagtactcaccctttcctctttccatactaaataaataataccctgattcaaatccatagtaaatgttgttaaaatagtttccccacagcacaggactagcagatgaaggaccatctgagaggcaggtgctgggtgcggatgggccccaggtcgcctctttgtttttgtagtagtgggcatgttcgcactgtctctcattgttaggaagccgtgtcagtggggctggttccctgtggactctcgtgtgagctctgtctgttccctgccctgatccctgcattcgcccccagtcttctccctttattgactgcattctaattagttcaagtctgatcacatcacagaaataatcctggcccacagatttatttcctgtggtaaatgtcttcttggtggttttctaggttgtgctggtgaggtggaatgagccctaccagaaactggccacgtgcgatgcggacggaggcatattcgtgtggattcagtacgagggcaggtggtctgtggagctggtcaacgaccgcggggcgcaggtgagtggcaggcgcagctctgccagtgaagggctgcggggtagaggactcccagacaggcattccggagccagtgcgttagcaccacacagcgccacgtgctccagagctgggggaagagaaatcaatcaaattagaatcctacttttcatttctctcacatatgtcactggataaaaagagtacaggatcatgcccccttttcaaccatgctgctgttgtgagaactctcc

SEQ ID NO: 123803 - DNA, 1024 bp, Homo sapiens
actatgaatacacgcatctctgccaaaagagaaaatcatttcttgtttgggaacatgacagtgtggtggagcattacagactcaaacaaactagggtttgagttctggcttaccacccatgaacttccttggacaagttactcaactcctgacctggattcttctcttctattaactgagaataatgatatttttggaacagggttcctggagactgaaagatataacgcatgaaaaaatcaagcactcatttggcatttatccttgctccccttccatttccttttctgagcagtgatttcaagtcctctggccaccctaaatctgaagatatgtctcacctcatcactgggcctttctagggaagagaatcccatgctttagttaatggaagaatgacagcattttagaacctttacaggccaactcggagaggcggtcatttcacagaaaccaagaaaagctgctacctcaaggcctgaaactcatctttggtgatgacctatggctactgcttcagggcagggcagttccatgccagacaaggtggtagaacctccacatgctacaggcactgtgataagatgcaagcggtgccatgggcacttttcatatacagtcttatgtaatcctctgtgatcctgaggcacaggcaagtatctcccacacagaagtcatggggtgggatttccggcctacattgtctgattccagagctcatgctcttaatcacatgtccactcacatgaagatgtctacatctgtggctctccttcaagaaggccagttaatggtcaaggggcaggctctgaaggagcctgaaggaaactggtaaggccttatcagtcagtcaatattattacatttactctaccaaatcaactcagaaaaaaatgctgttttcacacagggtcttctgtgatgatatcttacagaaatcctcggcctgctaatagccgctgacaataatgtcttcattcattgtaattttatgtcacttgactgatctgtagcttaggaagct

SEQ ID NO: 123804 - DNA, 1014 bp, Homo sapiens
ccctcagcctcccaaagtgctgagattacaggcatgagccactgcgccttgcttattcaaggcaaatctcaagaaagatttttatttagcgtattttataattcatcaatactgagtgctctatttggtgattcatcgcctgagtccagagataacaaagggcgatttaatttctagacatcttaactgtcatgtcaatcaaccaaaacactgacaaaatgaaaaagtacaaacatagtagctgcacctgtttctgctaaagaaacatattttattccacaaagtgctcaacagaatttctcaaatacacgcaaaaagaaataactaaaaacgaaccagtaccaatcattggataaagatagccctgaagggtgggaggctgtctcccaacttctttcctgagcaattcattctcctaactgtgattcctgtgctccttgctgattttgacaagaaccattcctatatatgtttagttcagggcttaaaataaagatgggcctcccttgtgtggtattcacactactaaaaagtcatgggcagatctgatgggaaagaagaaaaaggatcactctttgcgttggcttagactaaatctcattgcaaagttgagtcctcaggagctatgagcagcagctccactcttaccagccctttaacctacttacagcacactcaccagtcaccagtaagggtttccagtgtagaagctgaccattgagattttactttagtaggtttgtggattttttttttttttttttttttttgagacagggactcactctgtcatccaggctggagtgcagtgacacaatcatggctcactgtggtctcaacctcctgggctcaagcagtcctcccacctcagcctccccagtagctgagactatatgtgtgcccccacacccggataatttttgtattttttgtagagacagggttttgtcatgttgctggtcttgaactcctggactccagtgatcctcccgcctcggtctcccaaagtgctgg

SEQ ID NO: 123805 - DNA, 1015 bp, Homo sapiens
actgcccagggtggccactcaccaagaggcctgggaaggtgcatgtgtactttgatcagaagaccgcgagtgatgctggaatctgcttggcctgttggtgtgtagtcagagcctgttgggggaacatcctatcctctgcaaagaatcgggcctgggggtcagctagtggggctcatcctactttgagtcctagtgccatagtaaggttcatcattctgcctcccaagtgtcagcctgaaatcctttcccatttcaaaattttacaactcttcaaaacacactgaaatatatttctaaacatgatgaaaatagtaatttcttcccatggctactgataaacttctcaacaaatgagctgagaggaaaggatttgctgatctgtgctaccagtggcagctggggaatagtggtgcaagcagacccaacagcacttgtgaccggtgccaaagacaagccaagctggacctgagttaatacaggaaggacaaaatttaatccataataactgctgcagtagggagaatgagggaggaggagggaggcataggcagtattcagggaagcagaaataactgaaaagcaggaagggggctgtcaacgcgattaggctctctggctttactaactggagcttaacaaaattaggcccctactctctcacaaagcctgggagatgggccctatcaaacagttgattctcttggcaggctctcaggcaggaacgtaagagagctggagcagtcatcctcgggacacagccttgagttgttagaaacggtgccagtgtttgctccagggtgtgtgtgtgggaagggaagatggtgtggatgaaataatttatgtccgagagtctgcagtatttagaggccaagattgaggtccagctgagaagagggcccagagaggcctgaccagaaggagcgagcctttgtcctggtggtgaacacatgtgaaacaatacatctcacccctcctaacacatataaggacatattcaatgccaaggtcaggggct

SEQ ID NO: 123806 - DNA, 1074 bp, Homo sapiens
atgtccctagtgtcctgcttcttactcacaaattctctgttagtgcccactgatggcccttgtgtagttcctgaatgatatagaatgtttcattcaggtagcatcccaatccagagtaggatctgcattgtcaggcaatttctaaggcaccatgcaagatttcagctttgggaacctggatttgggtggtgtgcttccctccttttcacttggcacttgtgttcctgcagatggtccggcagcatatcccatcccagtgcagaacatcaagcctctgctcaccgtcagcttcacctcgggagacatcagcttaatgaacaactacgatgacttgtctcccacggtcatccgctcagggctgaaaggtacagaatgctgcacacaccccaaacctgcagaccgggcctgtgtgtgcttgcctcaaggccggtcttgtacactctgtgcttactgattcctgtcctctgtggtgacaccttctgggcttcatggagtctgttaactaaagccactccctcttcactcctttgcttatctgataagtccatacctagtcttatctcaaagggagattcctgacattcagtctttgtcttagcctgctcttttcctcactatgacaagaatgatcctctctcaggtgtacaggtatgtttgcatctggcttacgcatgtctgcacaataaacggactgcagcacctgccatccctaaggcagcagatggtgcacaagacatcatttacacagaagcccctgtaattttaagaatctgacagtcttattaaggaactgatcatcactgtgcgataaagttaccttgaaagacttgtggaggttctgcaattactagactgaggcattgttgtgaagggcagcagtcaagtgctgataccttcctgatagatattatgagtgttgttatctcaaaagaaaatcagtgggcataggcatttggagtgttgtgaattttgcagttcaagagtactgttgatgttgttgaccccattgatgtgagttctatggaaaaacaatctgtctcttcagggttgaatggtacaaggtaaaaaggtttt

SEQ ID NO: 123807 - DNA, 1036 bp, Homo sapiens
ggactgtgaggaggaggaggtcagtactagtgaaaacagaccttttttttttttttctcgagacaggatctcactctgtcattcaggctggagtgcagtggcatgatcttagctcactgcaacctccacctcctgggttcaagcgattctcccacctctgtctcccgagtagctgggactacaggtgtgtgccaccacactggctaatttttgtattttttggtagagacagcgtctcaccatgttggccaaggctggtcttgattttctgacctcaagtgatctgtctgcctcggccttccaaagtgctgggattacaggtctgagccaccacacctggccaaaagcagaccattttagttactgttgcagccacatctctaagtgtggaaggcgtttggggatgagggactagaactgaggcaagagattggggtggagatagagatttggagtcatccacatggaggccatagttggagaaatgaaatggatttaatgtcaaaggaatgaatagaacgaggggaaatgaggaaagggccaagcatagaactttgggtagtggagtgatagccttcatttaacaagcagcagaaggaaggagatggaagaggaatgtcatagagagctgttaccaggggtccttgctcccagagctcccaagatggtggtgggctgcttccagaatggcggcgggccacttccaagatggtggcaagcctcgtgttctctgacctggggttcttggcctcacggattccaaggaatggaatcttgggccatgcagtgggtgttatagctctattagaagtcgtgggtcacggaagagaaccgtggaacccagtgactagtgttcagctcgattagggtgaacacagtcacttagccgtgcaggaacaatggcaagcctttagcctgatcgggagcggcaatgggcacctcgctggatcaggaacacagcagacaccctgccagattcggagggatgggagtcagcggcgggtctgcgacggcggcaaacagcagtggtggacag

SEQ ID NO: 123808 - DNA, 1093 bp, Homo sapiens
ccatcctggtcaacatggtgaaaccccgtccctactaaaaatacaaaaattagccaggcgtggtggcgggtgcctgtagtcccagctactcaggaggctgaggcaggagaatcacttgaatccgggaagtggaggttgcagagccgagattgtgccactgcacttcagcctggcaatagagcaagactgcacctcaaataaataaataaataataaataaatgcctgtaatgccgtaattgggaaacatcaacacatcgcatccactgtagaacctttttcttcactaagatttctagttttaattctgtgattttttttctgatgccatgaaaaactaaggtataagttacatacagatacacatctgtccaaatcgtaaacacctagctcattgtacaagggctatcccagtgtcttcccccaagttcaagataaaagacatgtcatcatcccagaaagtctgcctgtgctccctccatttgatacccattccctagaagtaatcactcttctgacttccatcatcagctttgcttgttcttaaacttcatatgatatgtcaaacgatatgttccctttgtatctggctctttttttttttttgctcagtgtaatgattttgagagtcatcatgttgttgcatgtatcagtagtttgtttttctttattgctccgtggtattccattgtaatgattatactacaattagtttactctgtttaccaatcaatggatatttgtagtttccagtttgaggctattatgaacaaatccatgataaacattcttatacaagtctttttgtggacatgtgcgctcatttctcttggatataaacttgggaaaggagttgcatggtcatgggtcagatacatgttaaagtttattagaaactgccgagcagtattccagggtagccgcacccacgtaaatccctaccagcaatttccaagagagtcccagtttcttccatcctcagcagcggctctgttgtcattttttagaaataattctaccttgttctgataggtgtagtggcatctcatttcagtttaattctgatatctccagtgatggatgctgcttcgttt

SEQ ID NO: 123809 - DNA, 1230 bp, Homo sapiens
gaagcgtggaaatgggccgcatcattcagaacccccctccactgtccctgcctcccccgccgcaggggcccatgcagctgtccacggtgggccatggagaccgagaccacgaacacctgcagaagtcagccaaggccctgcggccaacaccgcagctggcagctgagggggacgcagtggtctttagtgccccccaggaggtccaggtgacgaagataaaccctccacccccgtacccaggaaccatccccgctgcccccaccacagcagcacccccgccccctctgccgcccccacagcccccagtggatgtgtgcttgaagaagggcgacttctccctctaccccacgtcagtgcactaccagacccccctgggctatgagaggatcaccaccttcgacagcagtggcaacgtggaggaggtgtgccggccccgcacccggatgctgtgctcccagaacacgtacaccctccccggcccgggtagctctgccaccttgaggctcacggccactgagaagaaggtccctcagccctgcagcagtgccaccctgaaccgcctgaccgtccctcgctactccatccccaccggggacccacccccgtatcctgaaattgccagccagctggcccaggggcggggggctgcccagaggtccgacaatagcctcatccacgctaccctgcggaggaacaaccgtgaggctacgctcaagatggcccagctggccgacagcccgcgggcccccctgcagcccctggccaagtccaagggcgggcccgggggggtggtgacacagctcccagcgcggcccccacctgccctgtacacctgcagtcagtgcagtggcacagggcccagctcacagcccggagcctccctggcccataccgccagcgcctccccgttggcctcccagtcctcctacagcctcctgagcccacccgacagcgcccgcgaccgcaccgactacgtcaactcggccttcacggaggacgaggccctgtcccagcactgtcagcttgagaagcccttgaggcaccctcccctgcctgaagctgctgtcaccctgaaacggccacccccttaccagtgggaccccatgctgggtgaggatgtttgggttcctcaagaaaggacagcacagacttcagggcccaaccccttaaaactgtcctctctgatgctgagtcagggccagcacctggacgtgtcccgactgcccttca

SEQ ID NO: 123810 - DNA, 1056 bp, Homo sapiens
tggggaatgggatggggacagcatttgatttacactgattatgttactccccaaaaggtgacttaattaataaagggcatttgggcagacacactgtgttggaccaacaaagtaggctctttacaggggtgttctcaccaggtagaaatgcgatttgctcactgaggatgttggggaagggacgaagggtaaagaagaaactgcacgtatacacaggttcacatcactctgcagacagcaatgtgactcagcgtgtgacttgtagcagcagtacgagggctacactcctctgctgaggatgtctacattgaaagcctccactagtttcatcgtttgtcaaagttccgtaggatcagtgatggtcattcagcatgactggttctgggagaaggtgagagacaaaaatggaaagatcctggcctgtggtagtggtagcagttttctcaaataatgtggtgacagtcactagatcctcacatgctgagaaacagcctctactctctctgccccttttactttttaatctggaatgcattactgtaaacatgatctttcccatgagataccatgttctatgccttcccattctaaaagtgtggacaacgcttgatttgaaaccactccttttctcctcttggctacattaaaattcagttgactacaaatgctttctatcaaattagaaatgtaaccaaaaaaatgttaagtgttcaccagggtattaaaatacagaggagtatggtcaaatctttgacaaaattttcatgatcttctctaacaaaaaaagttgtttattaactgtacagactgtttactaaggagctaaaccactgagaaaacgttattaaaattgtaatacctaggtagttggttgatcacagtttgttaattgtataaaaaaaaattacctagaatatctcttcccacttcctcgtcctcgtgagaacctgtgggcagtattcaagccctgatgacaaaacccagtgttttttgttgttgttttttgttgttgttttttgtttttgtttttgtttttctcagtcttacctgtgatgt

SEQ ID NO: 123811 - DNA, 1011 bp, Homo sapiens
gtctccacgggtgtgccctgctcagctggatgtccatgagaacagccatgaaataagtcactacttgtccccaaaaccacaggaatatatacctaggtcacctcaaattcctgagtgtgctctgccatgttacacggtcttcaaattgaaaaggtttcttgaaaaggaaagtttggcccagcaactggagaaggagtccatggtgtcgctgtgtgcctgtatcatttggccaagtcaatggttgtaagcaaagttagtggagacaaaaatgtgtccaaaatgtcgtttgagttcctgggatttctgtaatagcacacaactcagaactcttcagcatttgtgtgattccttacctctggctgataaaactctaatgggttgtggcttactttgtttccattttctttggctttgtgcaatttttgtgtaactttacttgtacctatattttctgtttacagttctttttaaggggaggggtagggttctaagatcttgttgtttattgtagataaaaattttttcgtgttgtagaaaagcatgggttatgcgtttgactgaaaaagacactgtattatttaccaaaggggtattgtttttgcatttgtttataaatgcattattttggtactgtaaatttggacataatttctgagtttattactactggcattttctttttcccttttttttttttttaaccgtaagtgcacgatgcaggtgcataggccccagaccaaactagaccaccagcatgttcatgtccagacctcggcagtggcgtgcactgcttgtgcacctcagttcctccagtgttggtttgtttgttttttaattcagcatcctgctggttttactttccaagcaagatctgttgcgactcccaaatgcgttttaatgagctcatccttatttgcctttcttcttacgtattttgtgtattagattgtgcaggagatattctagaaggcattaatggtttgcattcaaaacgatgtggtttgtccaagt

SEQ ID NO: 123812 - DNA, 1044 bp, Homo sapiens
tcctagggcagctgagtgcttgcggactgctcgcctcccctgccgtgccctcctggccctgctttctgaacccctcgtgagccctatgtgggaggggtaggcacttagtgggcaaagttgtgttggtgccgtggtcccgaggtgctcagtgcatctagtggggacatggctttacagctggccaggcctgagcaagcattgtggcctcaaggaccaggtcccagggagaaggttttctggatggggctgccaggaactgctgtgccccagctacagaagcagagggccaaagccagagccacagacagcaggaagagacaacgctggggggagaaagttcaatgttgcaattcagtggttcgcttaccatttaccattgcagggaaaataggagaacatggaggaaaacagaaaaaaacagggaagagtgagttagtaaaaatgagaggcatcgaaagttactggacctgcaccattcctgaggctcagtgctggcctctgggggtgggaggggagctgcaggtgtggggagggtgtggtgtggatccacagtggagcccctgcaatgaaatcctgaaaactggtgcagcgtgtcctgcgggcgagtggacagttgctttcccccacagagcctcgcggtgggggcgggggtggagtgacctgtcagtggccgcaggatgggcagtgccccacagcagggatgcctgctgtcttgcgttctgaaaggacagttcccggcacctcgagacaggaggttttctatgcctatgtgactttgtatgttgcgtttccttctaaattttgttttatttctggggtgtgtgtactggtggagaactttggatttagtagaatatctgaggtgaatctaaatagattcttcccagtctcctggcttgtgtacctggacggttggagttgttgtgtcctgagatgggccaggccacaggcacaggaccaggggtttggtgtgaggcaggtcatgtgtgaggtacctgcttgatagccaaacgggcatgccaagtggttgagtaggggtctgga

SEQ ID NO: 123813 - DNA, 1057 bp, Homo sapiens
gtgtggggaggggtgttgctgcagggccgctttcctgtgacctccgggccttcccctgaccgtccctcactgctggcttctgcccccaggctggcgcccatgcggctctacacgctctccaagcgccactttgtcctcgtgtttgtcgtcttcttcatctgctttggcctgaccatcttcgttgggatcagaggtaaggttcggtttttactcattgaatcttttgccatgcgcggtggccctggcgtattgctttcggtcagcccagctgtgcccctatcttccactgctaagggccccagcgtggagggagaagtgtccacagggtggatggggtcccagccctgcgcttctagctgctctgtctcttgtgggggaggtgtgcagtaagtagccccgagtgaccctggccatgccctgtgcagcagccaggggcagccttgaccacatgccttcattggccaagcaaacgtttctaatctgctgtgcacgagacccagctgggcgctggtgtgtccagaacatgctgcctggttggggagacaggccatggaagagctctgatgcagctgatggggaggggaggagagtggggggctgatggctgtgagcatggggcggggtggctgtaggagcagtgggatcatctaggccaatcccctttctcatggatggagaacctgagaagccaagtggttttcacaaggttcccagagacccaggtgtcttcagccccgtgcagagggcaggcaaccaggagcctgacttgtttggagagaatctgttcctccattgctttgtttccctcttaaataaaatatctttttccataagggtgatttctggtagatattatttaattgattgacttaatactaaagtgtgaatggcagttaggcttaacctgtcccagaggcaatttgtgcctcaaaaggttagtttcttacccaaaactgggttggtaaatggacgaggaagctgggggagagtgctgtttatctgatggtgatggtgataatagcagctgtagccaacttcttttctttcccgttaagtc

SEQ ID NO: 123814 - DNA, 1192 bp, Homo sapiens
ggcagggccggggcagagcttgctggggaggagtggctggctctgtgtgcatggctggtgggtgcacctctgtatccctgcatgagggtttgtcctccctgccactccggaaggggataacaaagcagaagagacctggcttttaattctaaaggacaaaaggaagggctcttgtcaacagtggagcacacgtatcctcacatctgcacttggtgctgtgcacacagcctttgctttgactcggagtggagggtggagagagcaggatggagaggaaagagggctccatgtagagagtgacaggttaaaaggagagaaagaagaatgtgtaattcactctgttcattattataacaatcgcaaaattgggccagggaggacaaattaggccgcggcatctgcattgacgtgtcttagcttacgtttcccctgtgctctagtgttatatatttatggaaatgtcaggcttgcgttgcactgttaactttcttacacggtgacttattttcagtcatccaaagtagaaagattctaattggtgtaaatcatatattatgtttccaaaaatacccatttggttcattctttctaggaactgtgtttggctggcatctgactttctctgggcttttggcgagttccctggagacaatgagttctgcccatctgctgttgaaacgtgttacttcatgggttatttggcgggagcgtgagtctcgctttctttaaaggcaaatctttctgtgtatttgcagaaatgtgcggagattattgtggctcaccttggctacctgaactacactcagtatacagtgatagtgggatttgaacacctgaagctccccatcaagggaatgaacttcacagtaagtataccagctgactgcacgtttccatggctcatgttctagttcccattctttgttcaatgattgaaatacatctcagcatctaaataatgttaatttggacagtggaggacttgtaaagtttttaaaaattataggaaaactacagtttcttaagtatatagaactaagaatagcttaaatatcatagagattgggcaaaccttaggtgtctgagatttagaatagagagtatatagtgtgttcagctgcaaggcagtgaaggggttagcagacacagcacccccttctctggcccctgtgagtggtcgtcagtctctgcc

SEQ ID NO: 123815 - DNA, 1050 bp, Homo sapiens
gcctcagaggaaggcagctcccagaattctcactcatttcacttctccagaagctcgggaggaaaagaggtgaagcaaagaagaacattccaagaggagatgcctctgtgtccttgtggaggacacacatccagctccctgccaaagagccactgggagccaagcctagagcagggcttcactgatacccactgtcatttggatatgctgtattccaagttgtctttcaaagggaccttgactaagttcagaagaatttacagcagctccttctctaaggaatttcagggttgcatctctgacctctgccaccctcaccctgacaaattgcctacggggggagctgttgaaagagaatctggtctggggggcctttggctgtcaccctcattttccatgttactacaataagagtcaggaaagaaatcttttacaagccttaaggcaccccacgactgtggcatttggagaaacaggcttcaattactcctacaagtgcaccatgcctgtcccagaacatcacaaggtatttaagagacagcttgagctggctgcgtctctagagaagctttggtgatcctctgccagcaagctgacgaggatctgctggacaccatgagaaaatgtgtgttctctgactacaagatacacaagcattgcttcactgcagctacctggccatggaacccctgctgaagtactttcccaacgtcggtgggcctcatggcagtcctgacgtactcctccacctgagaagcccgggaagtgctgaggcagatcccactggagagaatcatcatggaaacggatgctccctacttcctccctagccgggttcccaaaagcctttgccagtatgcccacctgggcctggccttgcatacagtcctggagactgccagagtcaaagatctagtctcccacaccctggccactttgcgtgagaacaccagttgcctctacagtctttaagcagagagggcacagtcattgggagtctcccagaaaagggcaactagcaacctgacgtaatacaggctggcctgaagt

SEQ ID NO: 123816 - DNA, 1101 bp, Homo sapiens
gcaataaaagcttagatacattttgtaaacccaacccactaaatgagcaggttacaagacaaatgtcaccagcctcaagtattttatgaactatttactgagggtagttatgttaaatagattataatgtggtaaattatttcctgaatcctttatcacaggaaaaacacagaccctcataaaagggataattaaaacggatgtgtctgaacatttagtgaagatgagacttaaaacatgaaagtgtatttgtgtattttgagggttttagaaaccggttgccttagaggttagacttttgaagaaaaaaaaaaaaagatacagatcttttcccctggccaaagggaagttgtattagtctgtgacatcttgtgatgctgtttatcttggtttgacattggagatacgctagtaactgtgataccatactataaaacagaagaattttctgctactaaaaactgcctttttacaaaatgactgtaaatatttgtaaaataaaataacactaaactttaagcccaaaaggagagatagagccatgtgttcagttgtggacctgtccgtggggcacagtgccaccccatcacagtgttgctgtcatcaggcaaaagtgaatgtttgtttatggcaaattcgtcttttgcgaatggcttaattctgacactacctttctgggaaatgttaataaatttttaatattcacttctatgtgtcttgatttgtttgctctttgtgtgtggagttaatttggccttgcagacataaatgctttaataaagcggctttggagacaacggcagggcttttccatttcagcaggcaggcacggaggtatctttattgccatgtctaatgtggcctggggaagagcactcaagatggagacaaggcgtgggtttgggcccagctcccaacttggatgtgtgactttaaaccaatcagataacctccaaacacattttctgagatttttaaatgactgcaaattgttgaagacacagaatgaatgattgtgaaaaccattttgtaagctctgaagtactaagacaatttgtgagccctacagagaacacaggattaacagttaaggtgttacag

SEQ ID NO: 123817 - DNA, 1090 bp, Homo sapiens
ttctaaatacacagtttcacgtggaacacagcagggggcaggaaggtgggtggattacaccagaactgggaacagtggagggggcttgttgggaagtctagttctgccgcagttgttttctgccttatctttgacttggttaccagctttcaattagcaagtgcaattgaaagtacacatttccatgctgggcgcgatggctcacacctgtcatcccagcacattgggaggccgaggtgggcggatcatgaggtcaagagatcgagaccatcctgtccaacatggtgaaaccccgtctctactaaaaatacaaaaataagccaggcttggtggcgcatgcctgtagtcccagctccttgggaggctgaggcaggagaatcgcttgaacccgggagatggagggtgcagtaagccaagatcacgccactgcaatccagtctgggcgacagagcaagactctgtcttaaaaaaacaaaacaaaacaaacacatttccaatccacatggaaacatgaggtgacattgcagtgttacttgaacttgtgtcactggcctcaacagcttttttgccgccgcaataggtaattctgtactcaagtgaccctaaatattgggtagtagtcaatttgcgcaggtccaaaattggtggagggttccctcctccttgaaaaactgaatttcaaagtatgtgcggagggagagctggcggagggagaggtttaccttcaacaaagcctcccccaccctttgacgggagaggtttagcttgaacaaagccccccctaccctttgacaatgcccaggtctagtaatactgctgttctcttaaaccgggacttctggccccccagccctcttgtagcctctgagctgggagggagcacagtggccgaggacaagaagtaagccagccctatgtgtaacgtgactactcaagagtctcagggagatgatcagcaggtcagtgggtagaaatcagagtgacctagggaggttttaggtcctcaaaagcaaggtcgccagatctaagccccaggcatcagatcccagtccatcaccaccatgcacagctcagatccctggactgctgg

SEQ ID NO: 123818 - DNA, 1152 bp, Homo sapiens
aaaacactcgagagccaggtgcagtggcttacacctgtaaacctagcactttgggaggctgagacaggaggactgcttgagcccagaccagcctgcgcaacatggtgaaacccatctctacaaaattaaaacattagctaggcatggtagcccgcacctgtagtcccagctactcgggaggcggaggctaaaggattgcttgagcctgggaggccaaggctgcagtgagccatgatggtgccactgcactccagcctgggtgacagaatgaggtcctgtctcaaaataaataaatgaaaactcaagaattagacaaaccagatggctctggacccagtagtacgattagtagagtggaaataagaagacagcatgaagaactgaggggcaagttgagaagaatgggctcgtgcagttggtgacttgatggctaatttgcaccttgccacttggcacttggtcacacacagttttctattactttcctcttttccagagactcagagccttggggcactgagggatgccagttctgcctgttcatctggaacctggatctaaggagggaagaggcgttgcccctgctggcatagtcaggtaccagcccagccaggtaagaacctaaagtccttgttgctttgtgattttcccttcatctagagaggaggcctttggagaacaggtcttgtgggtgctttgtcagagactagaagccgagaacatcccttttcagagctctgggttttctgttcctcatgcaacctctgcagttgggatgaataatatattttaattttattttacaatagggaaactgacaaatattgaattcctgaactgagcaatcttggcctgtaggcccatgaacttggagaaaaaattaaatctttatttttattaacctttaactcaaatttagcattttcttaaaatatggatataggcaagaaaccacagtagaatcagcagaacttgtgactttgtcaccaacagaaatcacagatattttcataccacatgatatgttgtagctatctcaagacattgtttctattcatcactactttgaaattctgggagtccttagatcactgctagatcttaatatttcatgcatcaaggaacacatatattactatattacaattttta

SEQ ID NO: 123819 - DNA, 1054 bp, Homo sapiens
gcatttctgtacccttccctcccagacatcacaagtcatgcagtcccttcctttaaggctttgttccaagccaccttctcagggagctccccctgccccactccccccacctgctctatgttaatccatgtcctcaccaccccgacatgctatagagttggctcatctgttgggtattgtctgtgtcacctccccactagactctaattcccaagagctgtatccaacacttaaatggcctcaataaatgtttgttgagtgattgggttaatcctaatcatagttaccatttattgaaagcccaaggcaggtgcttcacagctcagtcattctcacaaagatcttgttatggaaggtgctgttatcccatttcacaaatgaggaacctgaggttcacagagtttaaagcgacttgctgaggtcctgagatgactgtagaactctgattcaaaccaggggcctggggagtccataccggggagtccaggcttttcacactatcccacaggcgttttgtactcttacattgagcagttttcctgacccatgctgcctggttcagcctcactcactcagggccagtccacacgtagaagcagggaaccaggatgctagcctagggagaggtggggtgagcaaatccatcttagtccctttgctgcttagggactttttgttggaaaacaaaaatttgtttttaacagccccatcagtggcatatgagattatgcaattccccatatactcattaactttgagtattaatcagattttacacatacacacatggatgatgttaattttataattattaactatgcctaactaaatcatagtgcaaattcagtagggctgtctattctcacccatttttctaaagttttctctgatttgtgcccttaaaatttataatcatgttactatgcattgaatcgtaacctgttccctttaggctgaagcagcatttatttgaggaaactgaactcccacaaaacaaaccactgattattgcttcttgctaaaggtgttgccttcccttctgagaaatatttac

SEQ ID NO: 123820 - DNA, 1026 bp, Homo sapiens
agctttgttggggtgggagtggtggtggcggcgtctgtcatcagtggttggccttttaatgtggacttgaggtgaaaaacttctggctggtcatcatttttaaagggatgagaggggatgaagtggtgccctccccgaccatggctaaattgtcttcctctcttacagagggagacacagctgttggcggggatgcatgctcactatcgaagctccagtggcagaaagtcctttccagccccaatctatggacagacatgactcttgtcctgcactgacatgaaggcctcaaggttccaggttgcagcaggcgtgaggcactgtgcgtctgcagaggggctacgaaccaggtgcagggtcccagctggagacccctttgaccttgagcagtctccatctgcggccctgtcccatggcttaaccgcctattggtatctgtgtatatttacgttaaacacaattatgttacctaagcctctggtgggttatctcctctttgagatgtagaaaatggccagattttaataaacgttgttacccatgtcctccagtgcttatcaaatgaggtaaaaggccggctggtgggcatggtaactcccccctgtaatcccagcaactttgggaggctgcagtggatggcttgagctcagaagtgtgagatcagcccaggcaacatagataccctgtctacaaaaaaaccaaaaaattatccaggtgtggtggtacacacctgtagtcccagttactcaggaggctgaaccgggaggattgagcccaggaggttgaggctgcagtaagccccgatcatgcaactgtgctccagcctgggccaaagtaagaccctgtctcaaggcgggggggggagtcacagcttcgctgtgagaagcactttattttttgagacggagtctccccgtcaccaggctggagtgcagtggcacgatcttggcttgctgcaagctccgcctcccgggttctagcaattctcctgccccagcctcccaagtagctgggattataggtatg

SEQ ID NO: 123821 - DNA, 2455 bp, Homo sapiens
ttggagaaagtacctgttaagtgaggagagctggctacaaagcagatccacactaagctcaactctagggctggctgggatggaggcgggcgggactgggtgtgtgtgaagctgttggaaggactgcaagtggcgagcaggagagcacttgataatgactgtggcatgaagggaggctaggaacagagcccgttactcatgctaacaggattttttttctaaaaattatataatgtctagagttacaggtaaaaaaagaaatggtagttttaaaactgcccaggttccggcatcacagttcctcttcctgtcttggacgcagagggttgtaaaccccccatgcaccctgagggtgctcctcttcgaagccacagcccagcacagttcagtgctgccttagcctgccaggacagagggaggtgacagtctgttctcatagccaggaggataggacttctgggtgagaagtcctcttattaatttgctttccaaaggccaaagaagcccaggatgacctggtgaagaccaaggaggagctgcacctggtgatgacagcacccccgcccccaccaccccccgtgtacgagccggtgagctaccatgtccaggagagcttgcaggatgagggcgcagagcccacgggctacagcgcggagctgtctagtgagggcatccgggatgaccgcaatgaggagaagcgcatcactgaggcagagaagaacgagcgtgtgcagcggcagctgctggtgaggcccaaggggctctgtctccagggagcctgcctcgcttttggagcagacaggcttggggagggcagtgatgtgagccagccccacccagcacccctcttgcccttcctgttttcctaggggacgggccgggccatatggggaggaagggactagaccaatgctgcttaatgttacagacgctgagcagcgagctgtcccaggcccgagatgagaataagaggacccacaatgacatcatccacaacgagaacatgaggcaaggccgggacaagtacaagacgctgcggcagatccggcagggcaacaccaagcagcgcatcgacgagttcgaggccctgtaacagccaggccaggaccaagggcagaggggtgctcatagcgggcgctgccagccccgccacgcttgtgtctttagtgctccaagtctaggaactccctcagatcccagttcctttagaaagcagttacccaacagaaacattctgggctgggaaccagggaggcgccctggtttgttttccccagttgtaatagtgccaagcaggcctgattctcgcgattattctcgaatcacctcctgtgttgtgctgggagcaggactgattgaattacggaaaatgcctgtaaagtctgagtaagaaacttcatgctggcctgtgtgatacaagagtcagcatcattaaaggaaacgtggcaggacttccatctgtgccatacttgttctgtattcgaaatgagctcaaattgattttttaatttctatgaaggatccatctttgtatatttacatgcttagaggggtgaaaattattttggaaattgagtctgaagcactctcgcacacacagtgattccctcctcccgtcactccacgcagctggcagagagcacagtgatcaccagcgtgagtggtggaggaggacacttggatttttttttttgttttttttttttttgcttaacagttttagaatacattgtacttatacaccttattaatgatcagctatatactatttatatacaagtgataatacagatttgtaacattagttttaaaaagggaaagttttgttctgtatattttgttaccttttacagaataaaagaattacatatgaaaaaccctctaaaccatggcacttgatgtgatgtggcaggagggcagtggtggagctggacctgcctgctgcagtcacgtgtaaacaggattattattagtgttttatgcatgtaatggactatgcacacttttaattttgtcagattcacacatgccactatgagctttcagactccagctgtgaagagactctgtttgcttgtgtttgtttgtttgcagtctctctctgccatggccttggcaggctgctggaaggcagcttgtggaggccgttggttccgcccactcattccttctcgtgcactgctttctccttcacagctaagatgccatgtgcaggtggattccatgccgcagacatgaaataaaagctttgcaaaggcacgaagcagcacgggtgtgtgcttgtgtgtggggtgggagggctaccgccgactcgtctgggctctatgctgtcctctggccaggtttcgtgaggggccgtggtgtccctgggggtacactggtaagttggagctgaccaacccaagacatggtgctccatgggtcacctaacctcctcgagatggtttccacagga

SEQ ID NO: 123822 - DNA, 3047 bp, Homo sapiens
ccaggcaagcatcggggatggggagcagcagtgaggctggagaggacatcatgaaaggtggctacctggaagagcaggcagctctgagacttgaaaggtttcccaaggctgagagttctcaccttggaaaagctttgcagttaacgtgcagtggcatttcagtgtgcatgcaggatgtccctacccacacacaactgcacacacacgcggcacctgcccttcctccacccgtcccagagaatgcactttcccagtgctacatacccacacataaccgcacacacacgcggcacgtgcccttcctccatctgtcctggagaatgcacattcctagtgccgagatgctgccatccctgttctgctacatttgttcttttagaaaagttctggacctttgtgaaggatggtttggagaagaaaaccaaacgaaggagcttgagtccaggtggccctgttctgttttgtaggactttgtgttttatgccccacgtctgagaatcaacaagcggatcctgcagctctgcatgggcaaccatgagttgtatatgcgccgcaggaagcctgacaccatcgaggtgcagcagatgaaggcccaggcccgggaggagaagcatcagaagcagctggagcggtgagcgcgtgaggccagagtggggggggcctgtgttctcccaactcagccactggcagccagtgcctgtcaggtgactgtggagctgatggggagagtgtggtggaatggaacccagtcaccacgctgggatcttcgaggcctttgtctctgggcggttgctgtggtgctgagcctgttgtcagccctggagcggctgctccgtcaggcagctcaggctggcagcaggctagggtggccctcaggataccaagtccatcctggagcttcaagtacccgtgaagtgtgttgacccctcactttcctgccagagtctaaatctccctgtgcctctttttccctgcaccaggcaacagctggaaacagagaagaaaaggagagaaaccgtggagagagagaaagagcagatgatgcgcgagaaggaggagttgatgctgcggctgcaggactatgaggagaagacaaagaaggcagagagaggtcaggcgccctggggctggcactctacactgggtcatgcatttccacagagtagcaggggccacacccacccacccactcaccaggaaggaaaccaagaacgtgtcccacagcgcagactcacagccgaaatgataaaatggttatttggtttggaaaacagttctgtacttatttaactttgatgctagttgttctaagactttgtattttaaaatttccctagtcttttgcggtaagtgctcaatcacccagtttccccgatgaggacagtaaggtttggtgcggtacagtgatttgcccacagtcccccagcccatgactgacagggccatgctgcactgccctcgacctctagactaaaacccaaaggcgtgttcagagccagacttcccagcacagctccagtcaacaaccccagcagctgggccgattacacaaggcgccacagatgctgtattcactggcagcccttacagcacacatgggaagggtgttctgtgttctgagtggagtgtggaccaccagcacagcgggcggctgacctggggagagtagcgccaagagggttgagtcaggcatgccagagagagggcgcctggctggcgttggacgggtttctagccatcttgaggaagttgtcatggatacagcagcaatgagctctgtgaagtgctttcctccagggtcactggaagacatcccctcaacctgtgacttggtctagggctctgtggctttgggggtgggaatggaaagcgagggctcctaggtccctgggctgagggtttgaatggctctggctttgtgtctttgcagagctctcggagcagattcagagggccctgcagctggaggaggagaggaagcgggcacaggaggaggccgagcgcctagaggctgaccgtatggctgcactgcgggctaaggaggagctggagagacaggcggtggatcagataaagagccaggagcagctggtaggaatggcctgagtttcaagatgctgaattatagagaggctgcttctgaggatggaaaatgtgacacctgccttgtaataattgtcatgactggaagctgtaaactgatctgctggggggctgaaggcagctggtggggaaggggctgggctgttgccagggtcacccattgaaggtgggtgtgggcatccaggaagagatgccgggggtgcacaatggaccctgctggccatggagtgggggtggcggggactcaggtgtcacgttggagactgcttgccaacacacatgaacactcattcacaactggactccgttgaaaggatatcagaactgacgtgagcttggcattcccttcccaggctgcggagcttgcagaatacactgccaagattgccctcctggaagaggcgcggaggcgcaaggaggatgaagttgaagagtggcagcacagggtgagtctgcacgggggacacctccgcacggccacagcacctgttgcccaattgcctgcggtggggcccttctgcaggtgggtgggttgggggagaggtctggctcaagctgccacatcccactggaagcttctgggatgtctcatgatcctctgccaataccagctgtactactgaagtagacatccccaaagagatgggtttgactttgtacacgagtcagtgcagctgctggattcatagagggaggacctctgattgactttcacccactttgctccctccaccccgaactgttcagtgctgatctgacagcccccggtcaggaactggttttaaatctaattatatatgtgccccttgcaatggggtcgcagtgcctgaaacacgacctcctgcagctagtatatacagcgggcaccatggaaagatccagctccttggacgtctccaggctggagtgagagctgggctctgctgctcatcagctatttgggg

SEQ ID NO: 123823 - DNA, 1106 bp, Homo sapiens
gtcttgcgagtctgcattatttcagcctctgaagtttgtttgaggtttgagcctcagattttgtgcttcagggtttcctgtctggcccaaacatcctttatggaaggaaaacaactcaaagcctatgaggagggttgtgggaagacatgtgtgggcaagagaaaaaggaggattgtgctgagtgataaaacttaaaaacctgttagagaaaccagtgtgaatcagttcttcttcaaagtgtggggtttggtggtgaggctccagggcagcacggaccccaccccaggcatagcttctgggctgtatgggtcccctcctcaccggtcggctgcccggcccctgcctgcctgcacgcagcacacagcattgagcccatcctacacaaggcgccttaatttaaaaatactggaaaggttttactgttctagatattgagtgctaccagtgactctgcctgtttcactctccccaattagagataatgctatgttggaatacctgaagattgctcaggacctggaaatgtatggaatcaactatttcgagataaaaaacaagaaaggaacagacctttggcttggagttgatgcccttggactgaatatttatgagaaagatgataagtgagttgaagttcacagttatcttcagtaggtagggtggtgggcctggaaacaatggcaaaatggcaaatttgtgggttatttttgaagtatttatttagcaacttactatcccaaagtaggaaactttttaaagggcttttggactgctgtggccctctcaaagggtggtccagaggtgtgggttatcctctctcatggtgggcggggccgatagtgggctcagtcctggtagaggaaggcagaatagagcagaggctgcctctcctccccgctgcctctgagattccaccccagctgcctgcaggtaccagcacatccatccatagctacttcgcaggcagcccagccagtgctcgactcctggctcgaggtttgtgctaatccaaccaagaatattgatggtgtgatgagagacttgaaaagctgtaaacaatagcctgtacgtgtagacacttgagctaaatgctgggagtctgcagg

SEQ ID NO: 123824 - DNA, 1048 bp, Homo sapiens
ggaaggagaatcccctccagttcaagttccgggccaagttctaccctgaagatgtggctgaggagctcatccaggacatcacccagaaacttttcttcctccaagtgaaggaaggaatccttagcgatgagatctactgcccccctgagactgccgtgctcttggggtcctacgctgtgcaggccaagtttggggactacaacaaagaagtgcacaagtctgggtacctcagctctgagcggctgatccctcaaaggtgagcacaggatgacccggcctgggcaggagcagtcatgccgtcctcggcagggagaagtgattgccttagaagcacagtttaaaaacacaaggacttcgccagtgtcaagtgctccttcatgctagtcattaagtcactgaccagcgacctgaaacatagccagggaaggcgagctgccattcctcatggaaactaaagcgtggccgtgtcctgtgggacatggcatagcaaacttctcgacctgactgctcagctcctcctggggtatgataggttgcccctgtgaaatctgtttttatttagtaatggtcacaaaaattaccccatttggaagaagaggccacttaaaatacctcttagtttttccagcagaactgagttcttgttcaaaatgctaagtcttccagattaactgtcataaatagaaatgctgcacatcaggaaatagaaaccaaagctctttgggattgattgatttgaatggaaagtaagggtttgaatgtgggtggtaagtgggcctccttccttgcctgtcacattccttaaggatgacagtgctgtttccttttgcattccagagtgatggaccagcacaaacttaccagggaccagtgggaggaccggatccaggtgtggcatgcggaacaccgtgggatgctcaagtgagtgctgtgccctgctgttgggatcttgccatctccgtgcgctccagcatgtcttttcctgtgactctagttagtgctttaaagggctctgtgtcaggccttgtgaagaccttgagggaaccga

SEQ ID NO: 123825 - DNA, 1081 bp, Homo sapiens
ctgagaggcagaggcaggcagccagaggaggctcaggtgtggcactggatgctttagtcttctgcatgagcacacctgaccggcagcgatgcacccaccgcactgttccctggggggctgtgggctcccatggttctgtgtgtgctggccataacccgccctgctgagtttcatgcaggagagcatcctggagtacaaaggagtaggagtgagattttctaagatttgaaggtagaaccctgaatctgctcaaatttatattaaaaataagtcgttcatggctttgagataatagcctcagttagtaacaagttatttgagtgcaaaaaaagatgttgcccagtggttggactgagcagatgtcctggtttcctggggactctgctagaccatgtgatgaacgacagccaaaagctgttgcccttttgagtgagtttctcatgagtgttgagcctctctctctctcacgcaggtggtaaagactatcggcctccgggaagtgtggtactttggcctccactatgtggataataaaggatttcctacctggctgaagctggataagaaggcaagtcaggattaactatttacaggctgtggattgggtgttggtctgcttcatcgataaggaaactggagcaactcaccctgtcttttgttttctgttcctttttgtttgtgtaaaagtttttacagacaaaaaggttgcaggtttccagtaaatggagatatcgattggaaatcagatctggcatttctccatagtgctcactcattggagcatatgatggttaattgcatagcttttagttgaccttagttttttcaatgagattgttaatcttataaactgtgaatcatccaccatcttgtaagaacctgttattgctttgtttgaacctgtgacagattatcttccaactttaaagagtggataattccattaaccaaccaaaaagaaaagtagtaagataaacattttcttcaaactctgaaaattatccttttttttttttttgaaacccccactgtcctcccaagtcacagcaacaagttaaaaagatgatgggaggtggggaag

SEQ ID NO: 123826 - DNA, 1044 bp, Homo sapiens
gctgagatcacgccactgcactccagcctgggcaacagagcgagagaccctttctcaaaaaaaaaaaaaaaaaaaaaaaaagcggagcagcaaactaagtcccttttccatcgagggaggtctctgaagcagagctgagccagcctctcagctctgccctggtggggcaccccatagcgcccagaagcagtgagggctaaggcggcagagtgcagcatggccatgcatgattggagcgccgctactgtgttggtgtcagtttggcagccagcaacttctaagaacatagaatattttcatttagaacttaaaaacagtaaacccaaaaagtttagtttttaaaaattcattttgtttctccctaaagatttttattcttttgaaaatgaccacagtctagtttgaatgccattgtttttcagctgtttcttatttgcaattgctaaaagcaacaaggagcaagttaaatgtccatcacctgaatgggtagacagaagtgacagccacacaatggaatattcctgggcagtaaaaaaagaatgaagtgctggtacatgctacaacatgaataacccttttaaacattatgctaagtcatgggattcagtcatgaaagactgcatattacaaaattctgtctctctgaaatgtccagaataggccattccttagagacagaaagtagattggtggtttccaggggctgagggatcaggaggaatgcagagtgactgccagtggccatggagtttctttttgggctgacaaactattccaaaactagatagcagtgtcagttgcataactctgaatatactaaaaaccactgaattatacattttccatgggtaaattttatggtaagttacatttcaatagctgctatttaaagtacatagtgactcaacatgaaaggaaaaatatacagttttgtctctataattacccaattaagtgaaccaaaatagctgcaaagtttttaattcatttatcattggttgtaagaattttccctatcatactcccatttgtgggagaaaattt

SEQ ID NO: 123827 - DNA, 1022 bp, Homo sapiens
ttctaaccatatgcttgctggaaaccataataatgtaaaaagtcgtcattgggttttcaattgcaattacattgatataattttgtatataaaacagtctgttactgggagcagcattgttcatgtaagaaagatgttcgcttcatataatacatggaaacaaagttatattttcaatgttagccattactgtgacactccaaaaaaggctggtgatggggagaaagaagagctttaaaaaaacctacagacaattcacttgcctctcgggcttttctgctttgcctgccttgaccgaattagagtatctgcatttctgcactaagctggttgaggtttgctaagtcaatggtaatgttttacagagcttggctgttagccagcatttgtggaaaacgaccaatgtctgtcatagctagtgctataatttattcagttggcatattgtttatggagacagtgagataaggggattaggatccagagagactattaaaatatgtgagtccatctgttgtgatctgaggtttcattagagaaaacctgtctgctagtacaacaaatggagacttagtaaggatgtttttatataaaggattataaatcagcagaggtaaatacattaatcttggccaaacaggtcatgtccttttgcgttttcctgatggcaggttctgccccctgccgcccgggcactgttggtcatagcgtgaccttggcatcagctgtgagccggtaaacatggaaatgtaggcccctcccaacctgagtcagacccttagcctggggtccaggaaactgttttaacaagcccctgggtgattttttttcacatgttcaagtttgagcgcctcgagggcctgtgaatggctgcatataaggtacagctggccatatgtcttaaatgacttcaaaggggtgtgagccaggcctcttcccacaccagacttcatgaaccatgcctggtattgtcatgtttttgtgagcagccgtgaatagggctgggggagagagatgttcag

SEQ ID NO: 123828 - DNA, 1065 bp, Homo sapiens
ttccatagagttaagttggctccttagatgctgaagtctgtagttatgaccttgctttcattagtaattagcacctgggcaggtactaaccaatgaatgccctttacacctggcaagaaggaatgggtggggaggccagattgtttcaatctaaagggcactacgttgtggtgggttacgttttttggtagacagacactgcctacaggcaactaagtcattccattaactgtcattatcaatccatgtgtggccaagcttgaattgtcctgctggtttagcttcctgatggggaacaacagctgtcgcaacgcacagtgtctgcagctccatcatgggccccaggacgtcccacagcagctaacactggtctgtactcggaactctgccacctggccagtgacttttgtgcgtcatgttcctgggaatagtatgactgtccatgattcctaggaaagctagaggaataactgaggatgaggagctagcactttgacccctgtggggagtgctggttatagtggttatcagggttgtgacaagtggactcttgtgagttccaacactggatgattttattattcctattactcaggcagtaaaagactagtacatatcctggtgttatataattatatgaaaacttatcagaatgagttttataactagcgtacccatgtttttgttattgtgctgcagataaaatggcgcactgaaatgttactgaattatgtgacaatttttgttacaattctgtgcactttttacaagatttgtggagcttagatagatggctggcctttggcatctgaacattttcctgagcccgatagacaagcagattttttttgtttgtttttggagacagggttctcatgcctgtaatcccagcaccctgcctagttcaagaccagcctggctggcaacatggtgaaaccccgtctctaccaaaaatacaaaagttagctgggcatggtgatgcacgcctgtaatcccagatactctggagactgaggcaggagaatcgcttgaacccgggaggtggaggctacagtgagccgagat

SEQ ID NO: 123829 - DNA, 1888 bp, Homo sapiens
ttagagacttttgactgaaatgcttgatatagttaatacacataatttttttcaaaatgaaaccacaaagagctataaagagaatttcatagctaatttactgcttacctgtatttggggaagccatttagcatctgtgaacctaaatttcgtcagccgtaaaatgggagttagtttttaagtggaaagaatgttacataagataaacggagacaaagtttttatcagtgaaatccaaacaactcatcttaagatgctgtaagctttatgtgtttcttttgtgtttccctaccccgcaaatgtttttcaaacttaaccctgttaggtaaaaactctgggttcctataaacgggtaaagtttgtccattggtcttctcaaggaaaaagcaatatgaacagtttgggttatcttagtaaaagggaggactctgattttgtctcatgtccatcctctctctgtgtgttctagtcggaattcccttatcagtcacatgggtaccaccttcatgttttgaagcgctattatatcccattatgtgcttggtgcagggacaataaaaataagattggttttgcctttaaggagttctcagtctcctagtgaaagcagatatgtaagcaattacaatgcagtgtagtgcatgatagaggtcttcacagaagagaagtgtgccctggagaccagggagggcctcccggctggtaagatcctttgggtaagtgtggagggatgtgggcttcccagtcagcagtggtcagttctgttttcctttattcattaacccgttcttaacacttacaggcaaacagtaatgctgtttcaaaggaaatgtaaaacttcattaagttatccttttaatctaatatacttgaaaacaaaaccttaaaagcaaaataaaaaatatctcaccatgacccaccttttattgataggagaggaaccagtatcacctgaggatcaaactctagtagtcagtatatcagattttgctcatatttttaagttagaagtcacttctgcaacctaattttgttttccatttttgcctgagagatcaattttaaactgcctgtgtggacagttgtcatttcagatactgtaaataattgtttttactttaggatggggtaggtaaactatcatcttagggccgagtctggctgtggcctgtttttatttggtctcccagctaaaaatggtttttatatttttgaaggattttaaaaacaacaatatgcaacggactccaagtaagaccctcaaagcctaaaatacttactggctggctctttagagaaacaaatggaccaactcctgcttctagcataaaaataattattgttaagcatttattctaaccttgtatatattttatggctggactaatatttggaagcagatccaccccattggttccagtttttaaaaaattgttctcaaagaacagaatgtgttttgttagccaatgttgagcacatcatggactctgagcatggactcagaaactactgaggagaggcatcgtggtgctgaggtaatgttttaaacaaagctggtgtttgggtgggtctttgtgtagagaaagtggcagtatcttgtgtcacacttgctaagctattgtgtaatgacagatttctggcatatgctaaaagaaagcaatttgtacctgatgtttgagttggaaagagaatgttatgtaaatgaattgcttttttcctcattgatagtttaaaatgagcttttgatctactatagtctgtatgtgaatttctgactgcagatgttttgtaagtccattcctgattcagaacaccctgtctaaagtacagctccatctctgtgccgtgccccactttactgcactcatagaactcggtctccacctat

SEQ ID NO: 123830 - DNA, 1002 bp, Homo sapiens
ctgagatctctttaagctgtcatgagaaccatagagctgaactgcctttaagtggctccaacacatcttacctgttcatttctgaagtgttatagacatttctaatacaaaagcaggtttacctttcattaggaaaactctgaaagtgtgttcacatttctactgtgccaaaattttaaggtaatttctgagattaccttgcctctttgggaatacataaccttttctattaaatattttaacagggacagtttactgaatgtactcccccctcacaatcccctcgcaattgaggaggatgcgtagcatctgtttccacccctcctcctccacgaggggcagtggtgaattaggtagctaacattttgccatgtggcagtgagaggtgctggtaggatgagtgatttgccatgatcacgctgtaaggcacaatgaatgtatttggatgttcacagacacagtccctgtcagtggatttacagtctggtttcggggacagacagcaatcccagagtaaatgtaaaactgcagcttcagagagtatgcctgaagaggggtacatgaggcctgagagtagatgaagtgtgtatgtgctggtgggggtgcaaataggggaggtcaggaaggcatccttgaggacgtgacctccctgggcagaggtaacaacgtgtgcaaaggccctgtggtgggaggaagtagtgtgagtttggggtttcacatgaagcccaatgtggctagagaggaagacaggtcaggccatgccttgtaagccattcttgggtgttttttagtttaacttggggttttgactgggaggtgacatgatcagatttgccttttgaaaagttgactgtgatctgtaataggaaaatcacaggaggcaggagacagcaagggtagttatggtagaccattgagggagctcatagcttggaccaaggtggtggtggtgggaacagaagtggatgcatttgagagttctttgggaggtagaattgatag

SEQ ID NO: 123831 - DNA, 1021 bp, Homo sapiens
ttctgggtgtggttttctttatttcactaaaagaagaggtgcagagctcagctaagatagcactcaggaaaaagttaacctgttctccgtcactacttttctttctcatttctcataatgaatggtaatttatttttatggtttcttttttgtattttggtaaaatatacagtttatcctcttacttttaggtttacatttcaaggtattaagtacatttacattgttacatagccatcaccaaggtccatctccagaactttatcttcccagattgaaactctgtacctattaaactctccctccccatccccaccaccagcccttggcaaccaccattctactttctgtctctatgaattcgacaactttagatacctcatgcaggtggaatcgtgatagcatttgtccttttgtgacagtctcatttcctgtagcataatgtcttcaaggttcatccatgttgcaatgtcagaactcccttctctctcttatttcttatggcaggtatgttttcatttcattttgttttagaggtcttttatgatagatcagaacttaaaagatgtttctgacatttgataaagtgaagatagttgtgaaactgttaaggaaagacagtagccatcaccttgtgtattagagccagagttactctttgaaagactgtattctgtataatatctacaattaaaatttttaaactttttttgaggccaggcgaggtggcctgattacaggcacgagcctgtaatcccagcactttgggaggctgaggcaggcagatcacatgagcccaggagttcgagacttgcctggccaacatagactctgtttctacaaaaaatagaaaaattatctgggtgtggtggctggcgctctgactgaggctgaagtgggaggattgcttgatgagccctggaggtcaaggctgcagtgaactaagatcaagccactgcattccagcctgggcagcagagtgagatgttgtctgaaaacaaacaaaaccccttttttgaga

SEQ ID NO: 123832 - DNA, 1035 bp, Homo sapiens
ccgggcccgggctggccggttcttaagcggcagcgcgctgcgggcgccgagtgtcgggcgcggcaggaggacgaggcagggcgggcgggcgctctaagggttctgctctgactccaggttgggacagcgtcttcgctgctgctggatagtcgtgttttcggggatcgaggatactcaccagaaaccgaaaatgccgaaaccagtaagttgcccagtttctgggccgggcggacgggagaggcttcattggagaggggaggcacctgctcgaggtgttggggcagttcctggggaacagggttcttctcacacgcagaagacgataggaataggaggaggttttcgccgctctttgttacttgttgacccttttgtggagcgttaggaaaacaccattttgatgcttttctctgcagtctttttctttgtgagccccctccccagtagttacggtcttttctaaaaactagaggcctttttacactgcttccgtctgtttttaaagggtatagtaatacaacttagaagtttcttaaaaagtccaaatcacagggagactcagatggcttccgaccacacacaccagttctcagagctcctaagggtccgaaaccacaggcgccccagatccaactggggagatattaaagggcgtttgggagaggagactggctttcggaagttgcctttcagcttcgcttcctactaggcccatgaagcggtgccctgtacaccagcaaacttgctggctgcagcagaatttctgtctctaacagaaggttagccatggacttgaattgtagatgcaggcagccggtggagtttgataagaggttcctggcaggccgggccgagcactcctggtcagctgatgaaagggctgtgcctgcgcctctgtctccttgaatctgattgtgttgagattgctggcgagacctgggggttgtaggcacaaggcaggttctctgggactgacgcttcttagaaagttgtatgtattctacctgcttttaacactggggaactggtgactag

SEQ ID NO: 123833 - DNA, 1067 bp, Homo sapiens
agtaactaggactacaggcatgcgccaccaccagctaatttttgtattatttgtagacacaaggttttgccatgttgcccaggctggcctcgaactcatgagctcaagcaatctgcccgccttggcctccaaagtgctgggattaaaggcatgagccacccagcttggcctctttccccgttttttgaaaaaaaagtatgtggcataatggggtagttggaagcttaaacctcctctattcggatactctcatttgacagaggaaccgggccccaaaagattaaactgattgtcctcattcctgcacttaaacttctcttgtcaatattaacattacctccatcttgctgaatccagaggccaaacctcttggcctcatctgacccttctcctaagcagctttccacatgtccaaccattccctgagcatattttgtgcttaggatttctgtgctttctcttctcttcccctctgggtccttcccagcccttatctatgtacgaattcttcccctaggtcatgtagcctgatcccaaggcttcagtcacgtccccagccctgccttttcccccagcaacaaccgtctattggtgtctccagggttcttgtttgttcaagaacttcctccctcctagcctccctgttctcagcaaagagctccaccacacacgctgttacatggccccaaacctagaggtaacctgcattctctttttgcctcaaccccattttatccttcacccctgtgcctccagtccagcagaccaaacagccacatttcccggctaggtcagatggtgcacgcctgggtttggggataaaattcaaactcctccttggccgggagtgcatcggcatctccagctgcgtcttctttccctcactctcactcgccctgagcttgagctcagctggctctgctcccgctgctgatttttttatctgtgatcactcagccccgttgctgccttagaggtcttgtgcttcatattcccacggcctggaaggcatgtcccccatctgtgccagcctggccttttctcatcctccaggtctttgcagcagt

SEQ ID NO: 123834 - DNA, 1056 bp, Homo sapiens
caatttattgagtcttaaaaaatacaaaggcatagttccccttaatctatcaggcttccagctctaaagaatgtctctagtattgcggggtggggctgcgcttaaaaacgcagacgctttggttttagtaccagcaacgttaaaaatcttctatcttgtatgagtgaatgtgtatcccttgtgatcagttatttgcatttgcagttacaccttcattcagctaattgctgtcttgatttgaatccaggttctagaatgtactagctccgaaacctcaggcaagttaaatgtttttgtgcttcattttcctaatccacaaagtggcaatagaagaatttatctctttaggttttgtcttgaggattaaaaccgttaatacttagagctgtgcctggtaaatggcaagcctttatattaagatctggaccgttctgtgctttgaagtgtatgacctaaagcagatgtaggcattctataagtaacactagcataaaggtgtatggtaaattctagaggtgaaaacactcccaacatattttaggtctgatcatttaattttgaggtaatttctgaaagggctagaggagaaagtgacatttaagttgtgtttgataaatgatagtattttaactggccagcctcttgggggaagtgcattcggaatggcttgatcaaaggctcaagaagcccaaggtgcatttggaaaactgtaagcaaggtttgtgtagatgagttgtagaaatatatatagacaggctgacaccacatcgtggaaacagtaaacactagcatattaattagaatattttttccctcaagtaacaaaaaaccaattccaagtggctgaaataataaggaattcattattttacactccccaggttggttaacctggagggtaacttgggggctcagcacattatcaacaacacgttttttcccctacctttccactctgtcacctgggttgttggcttcaacaaagtagtaatagaagtatctgctcttttgtctttattggaagagcaaaaccccctcgtaaactcccaactgacc

SEQ ID NO: 123835 - DNA, 1074 bp, Homo sapiens
attatcaatgagttgagaagctgaaataaattattctaaactattaatgttggaaagaactccaaattttagccaaattaaaggaaaaacaacttttattctcactagagaaaataattttaaatctttattttttaggaaaaaagtgttttaaaagagcatgcaactaaaaaagataggaaagggagcactaccgaaatgtcccaggcagttagtaaaaatgttatttcatattttggtgaaaaattttgtttgctgtatttgtcagcgttattaaatttatgctttatgtttttttgttctagatacatatttgtgtttatgattaaatttgcatttgtaagtttgccttctttttcttgtagagagcctccaaaattataaaaacacagagcccctcaaaatctgagtctgacctgaaggagcccagctttcaaatcgatccttgttttcccacaaagttgttatttgagtctgatgctactatttagaattgtaggttctctgtttttccatttcctacagaagaactcagattgagaaaagctatttaccaatcatttccttttaacctaaaaggtttcagtgactctctctagcaagagtttgagggtgcatgctatttacctagtcagagcaaaaccatgattcagagtgtgagaaaatggctctcattttcctaggaagttttcaatataaaaacatgctgtgcttttgaatgaaaagtaaaatttaaagccaatggatggaaatttcttgtaagaagatgtaaaaaacccctagctgtttctattcttgaaaataagagttgttttttcacagggtctaagacttgaatacattttttcgaaatgaatttggcctgttgtattaaggcctgtgataatacgatttcattccttggtgcagctccttaagtaccttccttctgtagccactgtgctttggtgttttaaagttaaaaaactcaggaaaaaatagtcttgggtcataaaattacatttgcatatatggggttttaatttgaagccaggggtttctttgcctttatctctgatcaaagataagcttcac

SEQ ID NO: 123836 - DNA, 1211 bp, Homo sapiens
cttggggagcagagctggttcctcgtaaacccctgtgagtgcccagaccctttggaggaggttctcagtgggcttttgcctgctcccacagatgtaacccacccttcctgctgctcctaagaccaccatgaggaaggctgggaattggctcttgaattaatttgttggtatttttaagaatagctattaaagtactgttgttaattttcccaagtctattttattgttagtatttgtcacattttctttgtaaacagtgaattaaaaatattttataggaatattcattcttatctagatttcctacttatataaaaaaacaagtgaatgagattgttacaaagggtaattttgtgtgagtagaataataaaagttgaaattgagaagatgcaatgttttagactgaaactgatggttggtttgttttccccttctttctaacaggccttattccactgctggggattgatgtgtgggagcacgcttactaccttcagtataaaaatgtcaggcctgattatctaaaagctatttggaatgtaatcaactgggagaatgtaactgaaagatacatggcttgcaaaaagtaaaccacgatcgttatgctgagtatgttaagctctttatgactgtttttgtagtggtatagagtactgcagaatacagtaagctgctctattgtagcatttcttgatgttgcttagtcacttatttcataaacaacttaatgttctgaataatttcttactaaacattttgttattgggcaagtgattgaaaatagtaaatgctttgtgtgattgaatctgattggacattttcttcagagagctaaattacaattgtcatttataaaaccatcaaaaatattccatccatatactttggggacttgtagggatgcctttctagtcctattctattgcagttatagaaaatctagtcttttgccccagttacttaaaaataaaatattaacactttcccaagggaaacactcggctttctatagaaaattgcactttttgtcgagtaatcctctgcagtgatacttctggtagatgtcacccagtggtttttgttaggtcaaatgttcctgtatagtttttgcaaatagagctgtatactgtttaaatgtagcaggtgaactgaactggggtttgctcacctgcacagtaaaggcaaacttcaacagcaaaactgcaaaaag

SEQ ID NO: 123837 - DNA, 1101 bp, Homo sapiens
gtgaaactccgtctcaaaaggtaaaaaatgaaaaaaaaaaaaaaaaaaaaaaaaagttgaagttataaaaaacaaaaacgtgaattaaaattgtgaaacttagatccaggtgtcgcattctgatgttgtctaatttcttgggccctatgacaaaaatattttaatacatgtaatataacattttactgtaattattgaaatctgttcatttgtgggtggttttggattttttttttaataggggagttgctggaagccatcaaacgtgactttggttcctttgacaagtttaaggagaagctgacggctgcatctgttggtgtccaaggctcaggttggggttggcttggtttcaataaggaacggggacacttacaaattgctgcttgtccaaatcaggatccactgcaaggaacaacaggttagatttaaaaattgtgatttcatttgggagagatgctctactgtaaagcattcaactagaaataaggaaaactaacagtgttttaagaacatgtaataatttgcaaatcttaacagataacacccagagtcttgtgtaagtaaaaatgttttagaagtcctgatatttcataaaattaagtacacgtaattttataggtacattaacaaacatgttttatttttatttattttttttgagacagatctcactgttgcccaggctggagtgcagtggtgcgatctcggttcactgcaacctccgcctcctgggttcaagtgattctcctgcctcagcctcccaaatagctgggattacaggcacataccaccatgcccagctaatttttgtgtttttagtacagacagggtttcaccatgttggccaggctggtcttgaactcctgacctcaggtatctgcctgcctcggcctcctgaagtgctgggattacaggcatgagccaccatgcccagccaaatgttttacttattaaccctgcttcattctacagagaattaatatcagcttagataattatatgtactaaaataaaaaaaaaattagctatagaacaagagtgaggaaaagaaatacaagcagagactgatttcagagcttgtactgttacctcctctgc

SEQ ID NO: 123838 - DNA, 1020 bp, Homo sapiens
tgtgtatgggaatgttatgttttaacgttttttacaaaatagtattgtctttttaatttattcgttagtggtttgcacaaggaagataatcgatagtcatgttttttagactctctgtattgcttggtaagctacgtagtaaaaaatgtttacttttccttaaatgttttgaatttcggggttatgaaatttgttgagtaatttttagacagtcacatcttgttgactggaggcatctagtggaaaaatgcagtatttcagcctgattgtgtttgaagtaaatgattaaaagaggaggaagttaccacattctggaagatttacttgagacagacgaaccttgaattacgggaaaaggccccgtgatttaggaaataacaaatttgggaaacatgtaatggggagagactggggaataccccagttgtgaaagtacttcctgtaaggcaacatctgacaccaggaacctttctcttcagtattttaaaaacaacttaatttcagtcctttacttgtggaatcagagccttacttatgtaatacaacccactggaaaaaagctttttattgtattgtactatattgtttataagtgattgagtacctgcagagctttcttttacttaaacatattttaaaaattattaaaaagattttcatgtttgaaaacttggggaaaaaagataaaacaatgtcataatctcatcacatttaactgactaatatgaatatttttcaacaaaaagcatttgacttttattattatttgaggcaaaaactaaactgaaaccaaataaaatgttgaatttcagaaaagtgttcttaaaagcagatattaagccctcaatttttattaattttaaaatgagtaagcaaactgtaagatgttaagattattaaattatctctcattaagcatgtatctttcccattttaaaaattcagttactattgatttattaaaaaacaatagaaaagttacatctatttttagagtgactctcaagaaaatttaataag

SEQ ID NO: 123839 - DNA, 1860 bp, Homo sapiens
gacctccgacctcgctggcccgcccctcccctcggccgcttcccttactgagcttgctgagctccggggcccgcggagctcgcgccaggctcctgggaaaggacggggagtgttaccggggagcagctgctccattgtgcctcgaggccccgatcgggctaggccgacggcctccctcccttcacctttcctctcctggcggggttcggcggcgggcgagtgactgcggccacgcctgaaaggcgactctcctgtgagtgggccagaaggcgaacatggcggagcggggaggctggcgggaggcgggaggcgggaggcgggaggcagtggcgctggcctgcggcgcgttcggaccggctgtggggcggggcagggcggagcggagccgtgcggcggggcggggccgggcggcggggcctggtttcctccctcagcgccattttgtggcagcgagacccacaaataaaggggagcgcaggggttgcggcgggactaggagcgcggcggggccggcggcagagctgtccggctgcgcggtggcccggggggcccgggcggcagggcaagcagcgcggcctcggcctatgcgaccggtggcgccggcgcggcttctgcctggagaggtaggcgcgggccggctggcgggagcggacgcgggggacctccggggcctgagggctgatgcgcagccgcccccggcgggtaaggggcgggcagggcccgaaaggccacacgggcctggtgcggcaccggtctctcgtgagccgctctaccttcccgcctgcggggaacacttccgccgcttcgaggccattttatctctgtcctccgtccccaaggcccgggttgagaggggtgctctggcggccggagagaccggccactcacggaggccggaggatgccctccccgggctgagcggcggcgctcgttttttcctcgcctcggggtcgcccccttcacctcccttgggcctctcctgaggacctggcggcactaacgagttcagcaaggaaaaaaagaaacattcgttccctacatttcatgtcacgcagtaggatgttactacgttctcttgtagacttccatttttaaatgagtataagcattctgaggaaagaaactgaattattgcagatttttgtgaaatccaagtcttaccttggatccctgtgagacagttactagatttttttttcaccgtttttcataagtctgtgtacacgtaatggaaaagcccgagttcttgttttgataagaaagtcacttggttgtttgatcccaaaggattagcttaacattatcaaggactagcataactgtgattatgtaaaaaaaacaaaacaaaacaaaaaaactattatttagtctggtagggaaatacttctatgagtatgttacaattggaagttgtatttgtgcctattttatctagttttagttaattccattgcttcggaagataagtggacgtcatagatccatcgcaagttctcgttttttggattttaaaattttgaccattaagttttctacgatagataaacatgttgtggacatttaaaaccgtaatttaaaactatgagcgaaaaatcttttcaagatggatacattttaattcattcaagtagcatctgattagccaagtcggggaaagattgcagtccgcaaagctggcttgtgataaggttgaggttacattttaagggtttgggtaggtgtgtttcttacagtgcttttatatgttaaggtatcttaagcagacacatggtttaaaagttcagtatttttagtactttttcattggcagaatttggacaagctaccagaattgctaactcctaaaggataaaagtaata

SEQ ID NO: 123840 - DNA, 1073 bp, Homo sapiens
agtaatctaagatcaatttatgatttttcctctaaattctgctttcttcaacacaatttacttaatctgaaaaccagggtttaataacagtatgattagaatgtttcatttataaagtggagttgagattgtacgtagtataaaacatgctgttggaagattatctccttttgaggaatctcaaaatcaagtgggagaaatcaagtagtcttggtgtgtgtgtgttttgtttgtttgttttaatgagagacagggtcttaccacattgcccgggctcggttcaaactcctaggctcaagcagctctcctgcctcagcctcccaaagtgctgggattacaagtgtgagccaccacaccagcctcaagtagctttcgagatgatgccacagcactccagcctggcaacagagtgagactccatctcaaaaaaaaaaaaaaaaattcagtttaacataccaagcttttggtcaaatttctagtagtttagaatttataataagtatgggtaattaaaataaaccataaacactttaaagtaagggaagattcatgagtatactattagaaataataactagggctgggcgtgatccttccacaggtagttctagctacttgggaggctgagatgagagtatgacttgagcccaagagttcaagactagcctgggcactatggtgggtccccatctcttaagaaagaaagaataggaaaaactaaattagtataagaactaattacttaatttgtataagttatgaatatgccaaatgcaatttagatgctttttcaaaagagcactggtactcagaaccctgattcaattttttaatcctcatagaatttttatataaagattttatgtttgtcaggttagctcttcatgtcgtatacttttttttccaaccttgtattttaatgtggtgtttatgtttattacacattttttctttgtcttttttttgtgtgtggatttgtagtttaatgaataatacctgctattagcattcgttctaaaaaacagcataataaagtgttccctacttgaattcattaacctatctttgaaaca

SEQ ID NO: 123841 - DNA, 1079 bp, Homo sapiens
tggcgacatcaaatgatttgaatggctgatcagcttttttacgagggaatttgtaaaaactacccaataactctaatgatggaagatgttaacaaaggaagatctgggtacagagtatataggaactctgtaatatctttgccacttttttgtaaatctaaaactattttaaaattgtttatttaaattctaattattcaacagtaatttagttcactaataaattgatttgaaagagtcagtattttttattcctactttcactggaagaaaataaattgaacttgttttccgcaacttttttttttaggattcaagatgaccaacgaagaacctcttcccaagaaggtatgggttttggttttgggtttttttgttttgttttgggttttttgggggcttttttaagcactttaaaaaaaaatagacttgaagggattatcgttgtttgcttatttttcatttctttgcctttataacaataatagcattggagttgtacagtgtgccagatattgtatcttatatccagtatattttttagaatattttcagattttggaaaactttagttataataatattcccatggtctactcttaatgttcattatgtgaatatttccaggtctactcttaatgttcattatgtaaatatttccaggtacatatatacaaataatgtcaaaaatggacattatgagtatattattattcttttcctagtgtaaatccctttgattgtaattaaaaactactttattaaaaaaatggttatagctaattttcaaattctacctttttctctgaagttttgttgtctagtctcaaatctccccctgttgtgcattcctaccttgagtttaattactcttacatacacacacatacacacacacagtggctgttataaaagaggtaacatcgtctctaggaggaatttgtgattcaattgggaaagcttactaaacttaatatttaagtgaataatttagatattacagaagtttcctattgtggagtcagattactcattaaatgaataaaggattgtattatgctttcataatctgagaatta

SEQ ID NO: 123842 - DNA, 1137 bp, Homo sapiens
tttaaggttatttcaactataatggaacctaaccttttccagcttttttttttttttaaaacagctgtcacctgcatacgccagctgaacaacttcctgttcttccaattataatacaagtgaggttttgcagacagggcagggcagcaggagcaaaatcacaaggaaaggtcaagattatatatggcagatgaggataaagtttcaggtgagagtgaaaaaagatgaggtcagcctggaatcttgggtattctagaagagaggggactactgaagaattcttcagcaagagatgtatgtgatggatcagatttagatttacattttaggtagatcactctgacttgagtatgaaagatagatttgagaggaacaggactttaagcaggaaaaccaattgtgaggctgttaaaatagttcagatgaaatacatgaagccactggtggtagcagacaggacagaataggtgttttggaggcacaatcaataggacttgtttagtttggatgctgttgtggaaggaatgaaaaaaatctagggaggaatcacagcttcaggtttgtcttgtttgactgagtaacgatgctactaggatagatcctacaaagatcaaattttaaaagaagagtagagtgtggtgttaggaaaacaggaaatccagcattccctcctccttccccaaaatacaaagtgattaaaacaaaggcatacataaagttctgtacaatacgaatttaaaattgttcgttagatttggcagttaagaggttgttggccaaggaagccaaaagattggatacccctgctctagaggaactgtcaagtgggaagtgagagaaactaaatttaaagagtagaaagaatgggagtgatgtactataggagtttggagggaataggttaagcgaatggttgaaaggattggccctgagaaggagggtttcttaccctcttgagtgaaaaatagtggaaaggtttgtattaggtacctgtcctttaaaacagagctgctgcatttacccttggtgtttcaaattaagctaagcttagaaaaaataaaatatacatccttaggaatctatttgtgtagatcttttgtttgtccagcatactaactcatccatttgatcttttaa

SEQ ID NO: 123843 - DNA, 2210 bp, Homo sapiens
taaacaaatcatactccccagtcaagacttccctgacagtcccactacgagaaagctgtggtgggacagccaagtactcgtttccacaccaagactcagactttttgagccaaaaaaaagccacattcttacactgtccagcttgtaatggttaatgtaaaacttaccagatgaaccttgtgtttcagcttttttcttttccccttccccttgcttcagaggcctgatggcgtcggactattccgaagaagtggccacctccgaaaaattccccttctagaacatgtagacacttgagaaatgtttctgtttgaagaaaatagagggagaaacagaagtcttaagtctgtggcacactgtgtcttcagacagtttgaaggaatgaaaacctagagattttaaatcatgaattgaacatgtaaaattccagtaaaatgtaaaaacggaatatgcatcgctcttaaccttgagcatagtgacttagagacactgtgtatcagttttgccaataagactgtggacttcatgattgttgttgaacttctgggtcaaaactcaaatgaggtgaattttgcctttaaagggtttatttgctgagaaccaactttcaatagtcatgagagaatcaaataatagatgtccgtacaagtagcgcatatatttaaccatttagtttggggctctatattacttgcttgagccttaatcaatgtggttttattcaatggtttgttctttgaatggttgcaaaaactgtagataatcttactgaggactgtacaaacatgaaggtgtggtatcaaacttcaggttgaaactgtttgaagcattataaacattcatttcacaactagattgtataaggatattagctgtgatgagactcactgcattattttttttagtgaattttatgaaatccccgttccattcaacaggcacatgtttaaaagagctttgtcgttggtgttaatgggggaatgtgttccttcattgtatttgggccttttgtattgcactcttgatattaaattaaatgtgccttgaaatagttggtttttttttttttttaagttcaaagaatattatgatgattttgttgtactctttaacattttaatttggggcggggagggcctgttgagagcagattcattttggaaatactgttgctgtgctcttcaaagtgaaggaaaaggcgctgtgcctcatttttaaaagacctacataaaagacaaggagacttgacacttgttacttttatgacactttgtcccagggtattgcagtagaaagtaatgtgggacagcttcacagggtgtctgccagaagataatgtgttggaactgtgggctggcctaagtaagacattttgtgaattgaaaaaaggtatagtgatcatttctagcaaattcatttaatcatttagataaatgaggcattattttcttcatgcttccatccaatcctggaggtgaattttttccgtcagatcattctataagtcaccaattcaaattttcgcttggtgataatggagtctaagatgagtggaagataaatgttccagcttgtcccaacgtttaagtgcagttttaacaagggtgacttaagttctctcttaatcattcaaatcaattgtaagtatcatatgtttgtgctttagggaactgattgtggggcagagggtgggttgaagaagtggtttgtgtgacttttcagcaagaaatctgcttctaaaattctcactatttgtgagggttggagggtaagtaaccagatctgtttgaaattagcttatgtgcttgcattaaggcttttgtaaatattttatgccatttaagttcacagtagaaatggcctaagtatctttttagtagattttagtagaagagtaatccataaaatgtattattaacatgtactcaaattgagcaggcatctttctttgacacttagataacagtcatgagttctatggtttttttcttgtcattgttaaaattttctcttttaataagataatacatgcttatgtataaaattgaaatactgtagagaaagggggagatgaaaagtgagtgtcactcccggatgtgaccttgacatcctcattctcttctccaagagcagtaactgctattactttttcttgggtatcatcaagataatttctatgcatatacagttattttatgtatattgtttta

SEQ ID NO: 123844 - DNA, 2003 bp, Homo sapiens
tttagagtgtttagaggtatatctttcaaagtgctttctattatgtttgtgggttaatcgattttaggaatgggttgatttttttgtttgtaattttaaaaaattatttcaaaaacaactacttgtaattaaattattttttcaaaactgtgattttgttaaaatttattttactaatcactagttttaaacgtgatatgactatcttagcttagacatttatttattaaaaggtatgactttttaaacgaaaccttttttgcattagaatttgtgacatttttatatggggttaagtcaggtcacagattaatgtatcttacagttgtctttttctactctttaaaattcatatagtaagaaggttagttgtaaacaccaatgaaatatatatactttgcaagaagacagttttgagagcataggcagtaaagtggaaggaattccattgtttttgacaatcttgcatatctctcattttcccattgtttaatttctaagtggatgttcagtggaggctaacgcctgagagtgctgatgggaaatggtggaaatctggagctacagtagcagtgaacaagaacaccagctaataaagttatcatatcaaagaataaagcctttaccacatgctcactggtggctttcaccctcgggctcctctgagcagtagtaacccaggttgaactcttcaggtattttctggaagaaagcttaattacaaacttttccttgaattacattaggttagaaaacatgcagccaggcacggtggctcatgcctgtaatcccaacactttggaaggctgaggtaggcagatcacttgagcttaggagtttgagaccagcctgggcaacaaggcgaaaccccatctctactaaaaatccaaaattagctgggggtgctcgtgcacacctatagtccccaggtactccggaggctgaggtgggaggatcacctgagcctggggacgtcaaggctccagtgagctgagatcacgccactgcactccagcctggcaacacagtgagacccccatctcaaaaaaaaaaaaaaaatgctgtaggtgaaagaaccatgcaacacttcaaagattgataaaatatttacaaaatgctctcatttttaaacttataaggcatactgaagtagtgtatcaggcaagtgaaagcctcactagaagaaggaaagactagaatttaaaaaatgttttaacccataaggtcatcctggacttaccccaaggacaagaatgtcacactgtctttatccaagtctcaaaggtaaatatcacaattatttacttagatccctttaaaagtgatcatttctttttttttcttttttcataaataattacaagaacaagcaaataatttctccttttattgctgaggctaaagaaaagcagtaaaattttattgggaaacatttgagcttttcattacatatttgcaattgctatgtatgtgcacataggttcagtagtatgttgcactagcatttggaaactataatctgtggaaagtgtgacactcctagattggcagatatttgcgtgtttgaattgtgatacgtgaccactggtcttatttttgtgtcaaaaggatgatcttttccaataaagtcttaagtctttaaaaaaaaaaccttaactgctgaatgtgcctcaattaatataatagataatattcttgagagttatggaagatggatgtaccagaaaacttccctctctcctcctcttttttgagacagggtccctgtttccgaagctggaatgcagtggcatggtcacagcgtcaaccacttgggcttaagcagtcctctcacctcagcctttccagaggctggcactacaagcatgtgtgcctggctactttttaaaaaattttttgtagagttggagtctatgttgcccatgctggaggacttcctgttaaggaaaatccttattaaatgtttttctagcaagaataaatactctcattcatttttattt

SEQ ID NO: 123845 - DNA, 1834 bp, Homo sapiens
gtagtgtgattttagaattgtatttgtttacttgagcgtttattgactcccttgctttgtggcaggcactaaagaaacatttttcaatgttataaacgatattaaagttggtctgactctcctttgcacagaactgaatgacttcatcatccagcttgatgaagaagtagagggtatgcagagtaccattctagttctgcagcagcagctgaaggagacacgccagcagttggctcagtaccagcagcagcagtctcaggcctctgccccaagtaccagcaggactacagcttctgaacctgtagaacagtcagaggccacaagtaaagactgcagtcgtctgacaaacggaccaagtaatggtagctcctcccgccagaggacgtctgggtctggatttcacagggagggcaacacaaccgaagatgactttccttcttctccagggaatggtaataagtcctccaacagctcagaggagagaactggcagaggaggtagtggttacgtaaatcaactcagtgcggggtatgaaagtgtagactctcccacgggcagtgaaaactctctcacacaccaatcaaatgacacagactccagtcatgaccctcaagaggagaaagcagtgagtgggaaaggtaatcgaactgtgggttcccgccacgttcagaatggcttggactcaagtgtaaatgtacagggttcagttttgtaatattttttcagcaaatttttatacagtgtcatttaatttgggagaggatactgtccagaaaattaatgcatacttttgtcacaatttgcctttttgtgggtgtacgttttggtttttttttgttgttttttttctttgttttttttttcttttctttttttttttttttttttttttttgcttcaatacttctgccgctttggaaattgtaacagttaattactttgaatgttgctaaaaggacattttgtgtagggtcaagttatttttatatgagttaatgtgaaattgtaaatggaaatttttccttaaaatacaacacaatgatgtctgtataaatctgtctgtttagaatctgtgctgtgtaagggcattcgtactcatgctgttactgtacttatgcaccattcagacttgttagagtagatgtgggtttatgactgccaagtttgcccagtacagtagttttttatcactaaaagttggactcattgatggagtcctgtagtagtttcagtgttagatacagttttttccaccatacatctgtgcattttctctttaggtgactgtttaagaaatttgtgtgcatagttactcagtttttatgaactgttgtatcctgttaatgcatattgctctgtgactccagtatatcttacctgtactgaccaaacctaaataaagatttttattgtaactccttaattagcttttttgttttgttttgggtgtatgtttagcatttgtcattttcattgagtcattgaatttctactcattatccttcaagtaccacaacagtcaaacttaagaccaagcatcgattacgattttgcacacaatttttaatttatgccttattttgcaaaacggagctggagtttagggctacacttaaaattttttcttgacttataattgttacaaaatattttaaaatacagaaaagtataaagaaaatagtcatctatttcttaggctttttttttttttttttttttaattgagacagggtcttgctttgtcacttaggctcaagtgcagtggtgcagtcatggctcactgcagcctcaaagtcctcgactcaagtgatcctcccacttcaggcttccgagt

SEQ ID NO: 123846 - DNA, 1029 bp, Homo sapiens
gaaatataggtgaaatttgaatgtggaccaaggattagataatagtgtttgattcatgttaaatttcctgatttttgttttgttttgtgagacagggtcacccaggctggagtgcagaggcacaatcatggctcactgcagccttgaactcctaggctcaagtgatccttctgcctcagcctcccaagcagctaggactactagctacatggcacacacaccatgcccggctaaatttatttttaatggagacagggtctcgctgtgcccaggctggtctcaaactcctgggctcaagtgatcctcccacctcggcctcccaaaatgctgggattacaggtgtgagccgccacacttggcccaatttcttgagttttataactgtgcttatgtaagaaagtggccttgttttggggaagtatacactgaaattaaaatttaagagtaagaaggcattgtatctccaactttctctcagatggttcagaaagaaaatattaaagcaaatggagggaaaatataaatggtgactctgggtgaaggaaatttctgtaagtttacaattatatagaaagggaaggagagaagtatgactcctgagagtcactgcaacatttccaaaccaactgccagtggcaggcagggccaccccacacagagcattgcacaggccaccatgagcctgctagcatatgtggtcagtcagtgcttggtcaaatgtggacgacttgagctatcaaatgccagttcatgaaaatgttagttttttgctgtttttctcctttcccagctgaaaatgtagccaaaaaatggcaagtgagtagagaagatcaggacaaggttgcagttctgtcccagaacaggacagagaatgcacagaaagctggccattttgacaaagagattgtaccagttttggtgtcaactagaaaaggtgagtatatcatagtggtttaaacatcaacctatttataggtaagagtaacatctaaaagagtaatacataggaatctttagaaattatatctt

SEQ ID NO: 123847 - DNA, 3494 bp, Homo sapiens
ttacaggcgtgagccactgcacttggcctggactcatcttcattgtccacctcctaggctaaatttatgtcttttatgtgcttgtaatctctgcataccactttagtgacacttgccctggagtgtgattggtaatccctctccccactagatccttgaaggcaggacctgtgttccctgtttaaccatagttctcaattagtaattcaaatttgggttggggagagctaagtggtaatttttaattccttcaaattttccatgaattggactaatttaaattctggtcagagataacaaaggataatacaatttgatctatgattatcttgtgataaatacttaatggaagttaaattatttttaaaaatcacagaaggtaactcaggttacaaaaatactttgcagagaatcagatatcaccaaggagagaattcagaagatcctggcaactggtgccaatgttattctaaccactggtggaattgatgatatgtgtctgaagtattttgtggaggctggtgctatggcagttagaagagttttaaaaagggaccttaaacgcattgccaaagcttctggaggtatgtcttgtgctggctgtcacataaaatacttttattatccctgatcctatcaaaggtctttttacattggaatattgacagaaaacagctcaaaaacatttatattctcttaatgctttgtgctaccaacacatttatagagccatttttcatgtaactggagaaattttgttggaaatttgtgaactgaatttgttcatttctaaaatgacagttccatcttaggataaaaggagttaccgtgtgctgcctaactaaattctaaacttgtaatatagcacttttaccacaaatgctactgagtccaaggatattaaaatcatgaaagagcaatattcacagatcctttgtaactctcttattagcaactattctgtcaaccctggccaatttggaaggtgaagaaacttttgaagctgcaatgttgggacaggcagaagaagtggtacaggagagaatttgtgatgatgagctgatcttaatcaaaaagtaagagccactttctaaaattgtaaagttataccgattttgttaagtaaaagtaggttttcttcccatttatttgctgcttgtagtctcacagtgatacgagcagttatacgcatgggataaaataacattgggccactgtaaattgagatgaagtaaccattttcatctcttctgcagggactagacattgtttctgtatagtatatctaaatatcctgtgtaggcaggacttaagggaactttatgtagacttattttattaaaatgccattttttttgagaaattgatggtcttggcaaaaaaaaatttttaaaaatgctattacaagaattgtacttttgttttgaacagtactaaggctcgtacgtctgcatcgattatcttacgtggggcaaatgatttcatgtgtgatgagatggagcgctctttacatgatgcactttgtgtagtgaagagagttttggagtcaaaatctgtggttcccggtgggggtgctgtagaagcagccctttccatataccttgaaaactatgcaaccagcatggtaagaacagtcatttcttgtcttagaggcctgagagcagtagctgtggacttcaattttttttttcccttttgtgaagtcacctaattttcttcttttcctaggggtctcgggaacagcttgcgattgcagagtttgcaagatcacttcttgttattcccaatacactagcagttaatgctgcccaggactccacagatctggttgcaaaattaagagcttttcataatgaggcccaggttaacccagaacgtaaaaatctaaaatggtaagcatggtttcccgctctttgttaacctctgcagaacaggttgcattaaaaaggatagtagtcaattacatgtcagcaaacataagtaacagacttgtcaaatacttaacatgaaaaacttcacagcaagcatttgttgttcagtcactgtaattcaagggataatgactaattattagcactggtgtgtcttcgttaactgtgattgctaatctctccctgcttcttttggtagaaagactacctacaagatctctagtctgatttaaaaatcaaccttaatacttgaatgaaatgctggagttaataggccacctaatgaaattgtaagcggccgttaaataattctttcttaattgcaggattggtcttgatttgagcaatggtaaacctcgagacaacaaacaagcaggggtgtttgaaccaaccatagttaaagttaagagtttgaaatttgcaacagaagctgcaatcaccattcttcgaattgatgatcttattaaattacatccagaaagtaaagatgataaacatggaagttatgaagatgctgttcactctggagcccttaatgattgatctgatgttccttttatttataacaatgttaaatgcaattgtcttgtaccttgagttgagtattacacattaaagtaaagtacaagctgtaaacttgggtttttgtgatgtaggaaatggtttccatctgtactttggtcctctgatttcacatattgcaacctagtactttattagtttaaaaagaaattgaggttgttcaaagtttaagcaattcattctctctgaacacacattgctattcccatcccacccccaatgcacagggctgcaacaccacgacttctgcccattctctccagtgtgtgtaacagggtcacaagaattcgacagccagatgctccaagagggtggcccaaggctatagcccctccttcaatattgacctaacgggggagaaaagatttagattgtttattcttctgtggacacagtttaaaatcttaaacttgtctttttcctcttaatgtatcagcatgctaccctttcaaactcaaattttcattttaactgcttaggaataaatttacacctttgtgaaaattcatccctgcctatcttacctcgttccttttatgccaagtaagccaatgtctttttttttttttttttttttttttaaaccttgggaagtaatgaactcagtcctagtaactagtatttctttaactattacccacatggccaacacctagaagatactatcttaaaattggattgtgaaattcactggtaagctctcagggttacttgtgcatctttaccttctctgggtttaatccaagttctttaactattgcagcagagacagctgcaaaggcttcattgatttcaaatatgtcaacatcttccagtgaccaacctgcttttgtaacctagaggaaagattcatagaaaagaggtctaaacttgggtggaaaggctaaagttaaaccattctttgtcaacataaatatatgctgcatgatactggtaactgctactttggtttgttcttaggttaatacagtgacattctca

SEQ ID NO: 123848 - DNA, 4874 bp, Homo sapiens
tgtgagccacagtgtctggccccatttacactcttagtaggtggtttttaaataattaacacagatttgtagatttgggaaatacgggggctgttggatgtcatttacctttaggctgaaattactgtctttcagagttgtggcttatcctcatttcttttttatttttaattgattgtctacagttatggctgcagcttcgattgccaatattgtaaaaagttctcttggtccagttggcttggataaaatgttggtggatgatattggtgtaagtacacataactgttgtgttagtttccttaaagtaaaactatcttcagtgttttgctatgttctttctttgactttatcagaatccacgtactggaaggtgatattaaaggtgaacgtgtattataatggggctgtgttgatttctataagtggttcatattttttcctgcgaatttcttaggatgtaaccattactaacgatggtgcaaccatcctgaagttactggaggtagaacatcctgcagctaaagttctttgtgagctggctgatctgcaagacaaagaagttggagatggaactacttcagtggtaggtagactggctaaagaatgatcatttttctaaaaacgaccgactttcagaaagttgaagccataagtgggtcatttgtgctgtgtcagaaataagttacatattctgaatgcccagaagattgagcaagaagaaaaaacaaaagaagttacacatttaagaggggaaataagcttcttaggtacagattcagaaacaaaatttgtaagttgatagttacagctagtttgtacagtttaagtaggaaagaatttgagttcatttgacatagccccattgttttaaatgttggtattcacaagttttgagggcttatttttccttttatggcagtattcagacatcacacagatttttttatggtctctcaaaagtcttgtttcctcccccatcaccccttgagacttggaaagctctcaacttttctgattatttggaggataaaatgttaccaatctgggggagaaacaatgtttttatattattatttttaagagaccatctgtagcacagtctgaagtgctgcagtgctgtcatatctcactgcagcctggaactcctgggttcaagcaatcctcctgccttagcctcccagagtgcttgggattgcaggcatgtgccaccacaagcaactaattaaaaacctcttttttttttttttaagagacagggtctcgctatgttgcccaggctggtcttgaactcctggcctcaagtgatcctcccttctcggcctctgtagtgctgggattacacgcatgagctgcactcagcctgttctattttttaaatcctgacaggtaatctcaggaattcaaaatgggagtgtgagaaattaataaatacatcatgatatgacagtgtgatcttaccgagtcagtaaatgtgatacacagtataaactcttcatagatcatccagcatgctggtatagtagaaacactattgtttggtgagaaagatgttaattctggagaaactagatagtttgtggggaaaatgtatttctagattaaactttagccatgaaagaatggaatctactcctaaaatatgaatatgatctttgtctaacttacgataatgtgatttaacaaatgtagttttccttccataagaagctgacagtctttttgctttaaaaatatttcttagtgttttatcaacttgaagaactatcttttttaaataaaataatagcttaatataggtcatatgaatagtcacactcggtttagcttctgttgagcattttttctaaaggtaatagatgtgttgtcttttacggttgtattgatgaactagtttcttattgctgaactagtttcttagaacatttttctggctcctacccagttttggccatttgcatttataatacaataagacctcactgaacatccacagtggcttcatggaaactgactttaagaggaaagatgatgtataaaaaaacaagttttcctccccccatcagcgttacaataaacaactgtatttgagaaattgctgtccattgttttgcttaaagtggcagtttccaagaatttatgagtaacgtggaggacttggagtgttttgtagcgttcttctcccttcacgcccaggtttctaataaccagttaattcatttcatcactaccattttggttaataatatatggccattttagtgtcattccatatgtattgcacatgttgaatatccggcacactcagaccagtgaatgttttctcaacaggttattattgcagcagaactcctaaaaaatgcagatgaattagtcaaacagaaaattcatcccacatcagttattagtggctatcgacttgcttgcaagtaagattgtttgcattcagagaaattttttttgatgtaatagttgtaaactgtgttgtcttaacgttttgattaataactaaattttaatttgaaaaccttcaatttaaatgttttagcatttaagtagtaatatttgaagttaaaaacttggaccagtatcttttttctcatttgactaccacattttctcctaataatagattttagtggctatgcttatgggatagattaaacttgccatgatctgaagagggagggttttttcatgtcctcctcctatatgaaatggctgaacggatattattacttacgacattttggctctgtgttaagcatgatgaatgcaaagagtttgagtagtgactttataagcgtttttctcccccacacttttaaacagggaagcagtgcgttatatcaatgaaaacctaattgttaacacagatgaactgggaagagattgcctgattaatgctgctaagacatccatgtcttccaaaatcattggaatgtatccttgtggttgtcagataaaatttagactttttaaagcataagactttgagatgggcatggtggtatgtgcctgtagtcccagctactaaggaggctgaggtaggagtattaattgaacccaggagtgccagtccaatgtgggcaacatagcaagaccctgtctcgggagtgggtgcgtgtgtgcgcatgtgttgcgcgcacgcgtgcgtagtagcagcagtatcaattttgtgcaataaaattttgaataaccaattttatgcaaattgatatcaatagagaggagtaatgctgtattgaaattacctgttgccttccctgcttttttagggtgaaaaggtaataaaaagcatgtctaaaagtgatatgaattgcagatagtgataatgttgtaacattttggtgacaagtaatgcttgctgctttaatagattagattactaaaaggaagtcccttgaaattacccttgatttttcacgtgtgtaccctttgtccattccaaacctgttactgtccttaacttttggcgtagaaatggtgatttctttgctaacatggtagtagatgctgtacttgctattaaatacacagacataagaggccagccacgctatccagtcaactctgttaatattttgaaagcccatgggagaagtcaaatggagagtatgctcatcagtggctatgcactcaactgtgtggtgggatcccagggtaaggtttgggatttggtttatagaatgagattgctacagattaaaactagcttttcttttggctgggcgcggtggctcatgcctgtaatcccagcactttgggaggctgagtcaggtggatcacgagggcaggagtttgagagcagcctgtccaatatggtgaaacctcatctctactaaaaaatacaaaaattagctgggcatggtggcacctgcctgtagtcccagctacttgggaggctgaggaaggagaatcactggaacctgggaggcggagattgcagtgagccaagatcacaccactgcactccagcctgggctacagagtgagactccgtctcaaaaaaaaaaaaaaataaaaaatgtttttttgtggattatgtgcagtacatctttttgtaatttaaagcacatacaacatggtagaaggaatgtgaattaaaagaaattacgtgcatttaatgccataaaatttttctaagataaaatgcaatgaattagtctaaatttgtgtgtttacatacaatcgattataggtactctttattatgcttttaaggatagacgtattaacttaatcttatgttcaattgtaggcatgcccaagagaatcgtaaatgcaaaaattgcttgccttgacttcagcctgcaaaaaacaaaaatgaagcttggtgtacaggtggtcattacagaccctgaaaaactggaccaaattagacagaggtatgttgagagattatttttggccttttaagtgtgagtgtcttggaggactttaacatttttagccaagtcaaactattttacttccagaaaaattagcctggtggtgtttttagagggatttggggttatacaacctatatgaaaatcggcctttttgtggaattttgattgtatgagtctattaatattaaagatgtaaaagacaggaatctaatttcctcaaagcagtacagaactcagcagtatagtattgactgtaacctactgtttgctagatactggaggtgcaggtgatattagtggttggcatgccagaagagctaatggtggaggtagtgtgaccattgctatagatttgactgcctgacagtcacttaaaacaataaattgtttaggctgggcacagtggctcatgcctgtaatcgcaacactttgagaggctgaggtggcaagaatctgaagcccaggaggttgaggctgcag

SEQ ID NO: 123849 - DNA, 1040 bp, Homo sapiens
cgagatcgtctcagcgatggcgcttcggtcgcggttttgggggttgttctcggtttgcaggaaccctggtaattagtcttgccccccttctcccagctcactcgcctgggcttgcacagtacattggaacgtgcgggttctattttgtattcgacgtgccggatcgaaatagagctcgcggcactgcgaagaccacagtaggaagttaaggacggggtcagtgctgactccaccctgtgggcatacgtatttttcgtcccctcgggcctaaagattgggggtgtaaaagcggatagacgttagagcgggttcgtgcgctgtccatatccgtcatttttaagccctgtgcggtttttcccgttgcccagggtgcaggttcgcagccctgtcaaccagctccgagccggcagcgaaacctgaagtggaccctgtggaaaatgaagctgtcgccccagaattcaccaaccggaacccccggaacctggagcttttatctgtagccaggaaagagcggggctggcggacggtgtttccctcccgtgagttctggcacaggtaattaaatctgcttgtgattgacaagggcagtgcaccctacagactattttcattcattcaactccaggcactctcccaggtagctgccatgcggcgggtagaggcagggttcgcggaggggctggaacaaacaacaaataggtgtgatgggggctatttaaagaggatgttacagtagcggacaggatacctgcctgtctgaggtgacatttaagaaggtgagatctgaaagaggaagaagcctagtcatctgccagaaagagcagtcctagcaaaggaaactgctggggtgaggaactgaagggcttgtggatctgaagctcaatgggcagaggatgaatggcccaagatgaacatggaggggtaaggaggcgacagatgattagctttgtaagtcaagatgagcactttagactttcttttcattatagtgggaaactacgagaggatttaaagcttgagcccgaattggtttttcaaga

SEQ ID NO: 123850 - DNA, 1504 bp, Homo sapiens
tgtatttcctgttcatatattgacatcttgtccatataatattttgaaatgctgctgaaccttgacatctctacatttcctttttacttacatcattattaagatcactttctgaaaaaccgttgtaggctgggaagttagcaagaacaaatcaatttatttctgtcttttggaaggtgaaagtattttcagcctactcgtgctgctgacttaatcttttccttttttttctgattttcaaaaccagatgaaacgactacaaagtgccatgacagaaggtggtgtggttctacgggaacctcagagaatctatgaataaatggaagcattaattgttttgaacatgtaaatataaatctgtcagccactacagccatcaaaagagagcatctggaagaacagccagcttggaagttttacagcaataatgttgcagtggaatattatttgtagttaaggtcatcctcctcccctttctgtttttttaaatcaagaactacgttctgcccctctcttgggcttcagaagcatctaagaaaagcagtcatcaattataattaactttcaaagggcaagtcagaagttgtttataaattacaaaataaaggcatattatgaactcttattttctggttatatgacattgtctgagctcactgtggcagtggagcacatatgaggttgatgtaaagcacttattactgtgtctagttcatggcgagtgatctcagtgaatgacagttgtttgctgctcggagtgtgggttgttttttaaaataggaaatgtcagtatcaatctaatactatagaacagtcagtatgtgaaaatgaaaggaccaaatgccaacctcacttggactcttggttcccaacagtaagagaaacaaatttgaaagaggaaggaggtggcatcaggagctgaaagcagaggtggaaatggttggggttagtgggcgctcaatttgccatgaagtgaacattttattagataggagatgaaacttgaaatgcatgcaagttaatctaaaatttgagcttgggtagatgggaatcatggcagttctctgaaaggagctgattaaggtgttaatttttggctatttgataaatgtgagaaaaaacctgtaggcagttaaggtggcttctagagcattgttttccagtttttttaatgtataccccaattaaatgtttgtttagaagtgaaatatgttacttctgccaatttgagtattcaatgtgttattttaaatggaacacatctgtatgaagtatgatttgttctgagaggtcttcagaatcaaatggcttaatagtccccttttgcttaattaatgtcccggagaggcatttaaaagtataattgaagatcggatgcagtgcctcacacctctaatcccaccactttaggaggctgaagcaggtggatcacttgtggccaggaattcgagaccagcctggccaatacggtttaaccctatctctactaaaaacaaaaatgagt

SEQ ID NO: 123851 - DNA, 1062 bp, Homo sapiens
ccgaggactgctattttttgccttcctggcaggtctggacatagagttcacgggccttcgttctaacctgtctgggccccagcagatcaggtaaaactaaagctgtgtcccctctgtataagagcctggccagaccagcactgtttctggccagcagcctgttggcatttggggggcaggacgttttgtgtggcttgctcctacgtgttggaggaccttgcttttttctgtccactaaatgatggtagtgctccctagttgttgtaacaaggaaaaaatcctccccggttgcgagtggtggtcctgccgcggaggccatagtgccgggatgggatgtcattgctcgtggaatgagatgcctgtttgttcacagtctttttgatttgccatcggagtggtatctaaagacccgtcagagtgttcagcaatttacagtctgtcagattggtgagtttaatatcagctgttagagtttttcaagaaggtatttttattgtccttggatttcctactgtaaaaacagctctgagatttttcaaggatattgagtatcgttttgtatgcttgttttgtgttgggccattgtatacatatggaaatcaacacttcggagcaaaccaaatttagcagcattgtttccgtgcttaaataagtcagtattaaggaacactcactgttactctttcaagtaaaactgtgtgtgtgcgatttttattttattttttgagacagggtcttgctctgtcaccaagactggagtgcagtagcatagtcttagctcactgcagcctagacttcctgggctcaagtgatactagcacgtcagcctcctgagtaaactgggactacaggctcaccaccacacctagctaatttttaaattttttgttcagatgggttttcgtcatgttggccaggctgttcttgacttcctgggctcgagcaatctttctgcctctgcctctcaaagtgatggaattataagcgtgagcaaccacacctggcctgtgatttttttttcttaagaaaatttacacacaaaaataattttttttaaggtca

SEQ ID NO: 123852 - DNA, 1119 bp, Homo sapiens
agtgatccacctgcctaggtctcccaaagtgttgggattacaggcataagccaccgcacctggcctgaagtcttttttttttttaactttgcatatggttttctttgaggggggaggaatagacattttaaatgagttaaatatataaatcttaatggtttttggtattttctgtggatagttttaaaactatgagaatgtcattttaatatttacttctgtatttgaagaacaggccacaattagattttagcaaattcagtgtgaattacaatttgacatttctcatgcttccagtctgtcttttcttttttgtcattaaagatgttatcctgttgtacagcccacatagtatctgtgggcgcaaagtactgtttgagttgtttttgtctttgtagtgaaattcaggttgcttttccttggcattcattccctctacggtcattcttccaggattgtctgtgttttccgctattgaaggagaggcaaacaagtatgtatcaagagcttctgcaaacataggtgcttcccacctatgttccacagctgccaccttcaaattctgcctcaggtgccccgatcacttttgccctggatcttccgtattctctcctgtgtctgttcctccactcactctgccctctgcggattccagcttgtctttgatgtctctctggaagcagtacctttcccgccagccttgctctgtaccttaagtgctcctttccccatttccattgtctccagtgtgcacctatattaataaaagcgcctgacacagtgtggtgtaatgaaagtgatgtttaaactacctgacacagtaggcagaaaggatgccccaactatcaggatgcctccccaccccccatgagcagttgagggtgccagcctgcacgccctaacctggcatccctgggcagcttgtggaggggctgtctctgtggtatacgctggccctgaaggcaggctctctgcctttttcatttagcacccccagtgccaatcatagctcctgaaacacagcagacactcgggcacactcagattcttcttgcctaaaagaaagagcccaccctgaagccagccctgggagccagagttttttaaatggttgtggct

SEQ ID NO: 123853 - DNA, 1513 bp, Homo sapiens
aagcttggcaaaatcagaaatgcatgaagtcagaagtcacctttaatcagctagtatcctgaatttttacatatttgattacactatttgatttttgtttggctttttttccacttacccaaagcattattttatgttgttaaaaacctaataaatgctgcttcagtgtcatgtgacactgtcttctggctgtcccctactgtttcatggttgattccattattggacattcagtggtgcagcctagtgggtaaagtggggcctcgagccttggtgatctcatccatcccacactcactacgtgcgtagtctccagcgagttgacattaccttaattgtaagattgggataatagtgccaatatcagagttgtgagattaaatgaattaataaacgtacaaagaacactagtctagattacgaggggtaagaaagttttaggagccatttccccaagaaacaatgaaacacctgagtttgggcatattgagagagttggagaattagcagtgaaattaataatacacattcaccaaaaaactaagtacaacaaaataagcgctgggagaacaaaagctgtgcaagaaaggagaagtcattgtagccaccacagagccttttgtgaatgacgcgcgtggggcgatacgggcatgtgtgtggaggtggaatgagaggggtcatcaccctctcagccggtgggaggtcgggagtgaggtgtctaacaccacaccatgcatgtgcgagagagatgggaataaataccaaaaggaaaagaactgcgagtggttgcctttggggagtaggaaatgggagagtagcgggaagagatcacagggttttgtttttagtgtgtgtgttttgcaataaacctctttaggtgcaggtataactgataactttaccaactgagttcttgcataaattttcttttatcaggacactttactagttataatttttgattttttttcttggatttttctctgagcaattatttacaaatgatatcatgtctgcctttctgataatacttctatttttaagtcttatcccatcggctagagcttcgcaaactacattaactacggttggcaatagaatgcatcctgaatttaatagaaaaccgttcggcctttactattaaaagtggtgatggcagcttgatctgagtttagaaatccttagtggctaggattaatggtgttttcaattcctgttttgtttcagtttgctttattaatcagtgccagtggcaagctaggttcaagaatgttccttcccatttttgccaacaaacaaattcactcttgactacctgggtttttcccctcagaaagctacgatcaatttaagcagaatatccacagcctatttcctgttctcattgataccaagagtgtaacaaaggatatctggaaggtaatgaatagaactgctttgggttaagaactgctttttccataccagtaacacttagctttctcttgtggggtttttttcttgtgtttttttg

SEQ ID NO: 123854 - DNA, 1039 bp, Homo sapiens
agtgaattatccagcaaggatgccgcacagatgggagtggggtctgtggtctgtctttgcccagaggctgttattatttgtagttggtgtatttccagctactatgaacttttaggatttagtaaccaggcattgccccaaagccctctaggccttagaatgcctgtatgctccatgtatgtccctggcctttgtcctcgtgccttgctttcctgtgtttatgggtaatctgttgaacacattttctaagggagatagtgtgtgtagagtttttttctagcctaggtttttgagagtccttctaggaaacccaggaatactgcgtaccctgacatcctaactaaggaataaggatggttgcaccatttgaagagaaagaggaggttgtaggagtgagcattttccaggccattttaatgaccatttggtactgcctgaaacagagaataaacaaaagcgcaaatgttttcctctggtttgttttccatgattgtaggagatgaatttcccgagggtgtcgaatctttcggaagtctatgaagtcctgaacaggtgaggacggcgattcctggagctactgctggagcggccttggtggcctccctgtgctccgcaggcctttgggctctctaggcgtgcccaccattcacagtgatgcctgcttgggacttggtctcctccagctcctcctgcttcatggcccccttcctccgatgaccctcttgcctccgtttccaaagagagagaagccagagacaggaaatctctcaacccctgcccctcaaacagttgcgcgattactgtcccctttttcattgtctcgcccctgtcaccagcaaatggagcaccttccctgtgcaaggccaggcaggaggagctgccacctactcgtcaccttcacccctgctcagcaactccccacccctacctgccccttcccggggtgtctccacctctttctgtctccctctcatttccttccacatcaacaagtgttctcccaacttaacgacaaagcctcctgaactctctatgctcc

SEQ ID NO: 123855 - DNA, 2078 bp, Homo sapiens
acaggagtagcccttcctaccacccctgtgcctgcctgtatgggtcctggccccctcatccccgcagatgtcaggaggccaaggcagtggggttaggcttaggttctgacacctgtctcagtccttcccagcctggtgtgtgcttgattgtctctcacttgctttcttatagccatgtaagcaacagtgaggtatgaggagaaagtgttcaggtcaatgaatgacatatcctttgttgggggcacataggctagggagagattagtggaaccccacattggaatcttcagtgcatttccccatggcaacaccatctttgatgcctgcagccctgggcacgtaggcaccagaaacacattagcagcgtgcacgctacagcaccgtccttggcatgcacgttagttaagtaggacttagccagccaggtgaaggagcccatcaaaattctaatgtgtgctttgggattgatgtagaaatatctttttggactatgatctattaacttgggtactgcctatatttgtccattttagcagtggatgttataaatacaaaagttctgtgacacacggatgggaagcttatttcttaaatgtgccagcctaaccccctctcttgtggtttgactgttaaagggccccctggtaagtacgtgtgtgctggacagtgaaggagctagcagtggtggggcacctcagtgcctggtgtcacacatcttttatttcttttaatcctcatggcctaaaagccctccctgcctgtctgtgtggcccgtggttttgccggggccctgcgctcaggtgtgtgtgctccctggacagagggggcactggcagtgggaggaggctgtgggatgagggatgcccttttggaatcaaaggtgatgtcttaccaaggggggacagcatggggctttctctgaatagtggcctcgcactgattctctgagcctattgctgtttgtcaccagtgggaccctcaccaaaccatcaccagcagatggtgactgtctggaagctcttcttctatgtggccacggagaatgcttttagacttgccagctggggaagcacccaaccagagccccaagacttgtgagggcaggagggagggagagccgtccgagggagtgtccttctgttctgtcaccggattcttggctgtggccgaggaagtggatgaacttctgtgcgcccgacagctttggggttttctgtccttgcagcatcgaccccgtgcccgagtcatcctttcctcagtaccttgacgtgctggctccttacgtgaaccaagtgaacctcatccgagcgggggtcccaaagatcgtgagtagatctcatttggccccctcgccccattcagagttcagaggctttgctgggaagcggccagtgctctctgggactcgtgagagggatttcggtggtcggtgagatgagagctgggtttttctttcctctcatgtttctccactaaagccaacatggactcatccttccttctcttcccctccctgccccaagcagagcctttcctagtttcttttgagatcttcagactggataagaagtcaggaagaactgtggaaaatctcttgtgttctgcatgttttctagaatttttctggtccagattatcccagtatccgacctcccatcctcatcctcagcgtcaaaaggtggcctggggtcagcgagcagcaagtctaccataagtttcagaatctctgcaagtttgatgtcaggcgactcacaagaagccagttcttactcctgaccaataagtttaaggagtaggtgcctctaagtccgcgtcccccacccctcgtgcgttcatccctgtatctctctgactccacccgcctgatcacagcaggcggcgccatcctgctgcctggctgaccacagcaaacttgttttggcagtgcgcggaacatcctgaaggagtaccgggaccacccgaccctgtgcatctccctgtaccgctactggaggcactccccaaacgtcaactgcctgctccagtaagtgacaggctgaggccacctgcctgtcctggggtcctggagtgcccggggt

SEQ ID NO: 123856 - DNA, 1135 bp, Homo sapiens
ttatgtttcttttctggaaaatagcaattggtaaagttcggttcgaggaatgtgggcctggaatcaaaaataggtcttctgtgactttccaacttctgcttctgagtaaatcattgcatactgggtattactagtcctcataagtaatattccgcagtatcaagaaaggtataaataaggatttgtgattacttatgaaaatcgaaaagtgtctaaaaccttgtaaagttacagcactcatagtctttttctctttctcttattttctcttcttggggaggtttagtaggatcagtagtatttgtttttctatttcttttttatctttccatgatgacccagttctgtggtgatttaaaatttgaaacaaataaatcagttaatccaatattatatttcataacttgtgttgcttgcaactatgttgtatgtacagcctaccagagatggatgatgaattgcagctctaacttgaaagtccccactttggactgtgtcttggattgagagattgacaatcaactctccccacaacgctgtaaggtattattcccttaatttcacacataaacaaattgaggttccaagcagctaagcaacttgcctaaggttatagaacaaggaagtagaggggcctggactgagatccaggtccgcaagacatcaaaggcctttacagagaggaccactcagtgtggaaacaatgggaagtgtgtatctgtcaggagtttgtgcttatccagtgctaatggccgcggcattgagttcaagggtgggacatgccactcttggggaggtatgcagggccctggggaggtacacattggaccatgagtgagcaaagagacagcaagccgtctgccagggagaggggtgaactcaagctaggatcagcaacctggaaatgtcacagctgcttttgcacccggggaagtcataatgggctccagttcacacgtttgattaatgacagaactgggacccaggggaatcctagtttctgatgccaattccattctttcccataaaccaactatctttccttcaagcccagcacaaaactgtccttctccaagacacctggcttgccccacttaggccctagggactgctattccaaatgccagggatacac

SEQ ID NO: 123857 - DNA, 1057 bp, Homo sapiens
ccaaaaataagaaattaactcgcctgggcgcggtggctcatgcccggaatccagcactttggaaggccgaggtgggcgggtcacttgagtccaggagttggaggccagcttcagcaacatggcgaaaccccgtctctacaaaaaatatgaaaattagagccgggcgcggtggcacactcctgtcctcccagttaagggaggctgaggtggtaggataacgttagccccgcaggtcgaggttgcagtgagttgtgatcgagtcgagttgcactctagtctgggcgacagagcaaggccctgtctcaaaaataaataaataaatacaataagaaattaacccagctggcctagtgtggttgaagtcttggtcttgttaacaaattgaagtttgttttcttcacagttaagattaaggtggcttcaagggcagactgatactttggctgattgatgggacccttacttttgcattaggttagtcatggcagtgtcttgaacctgtgttcacgaacttcatctccaggtggaacacggcctcttggtctagtaggaatggcctttgtatctttacgtttttctggccactgtcacacgtgggcatacttagcaaatgctgaagaggtttctgaggttgatatgcattgtgaatataataagatctgccctttgtagtcttagaatatcttaaaagttgtgtttaatttttctgccagattttcttaggatgacaaatctgccaatcatttcagagacggattttcacccacctctttccctgttacttccctgtagttgcacatgcagacttctccagaaccacttgcaatctctactttaaacccaacatgtgccaagtgaacttcctgtctgttcctgttttataattttttgaggcagggtctcaccgcgttgcccaggcagaagtgcagtggtgcagtcatagctcactacagtcgtgaactcctgggctcaggcagtccttccacctcacccttctgtgtagctgggattacaggtgtgtgccaccccacttggcttattatatattttttaaaat

SEQ ID NO: 123858 - DNA, 1040 bp, Homo sapiens
tactactggcctgcaattaataaagcaagataaaggcaggatgggatcagtaataataaaagtaggcacgtgtgaatctgtaatttggtttccttaaaagacagaaacccagttggtgacacataagtgaaattcacataacaagatacatggtcactagctagagaaatgtttctctgagtctacagcaagcaacaaatctaacatgttggagacaaagagaatgtgaagtgtttccaacctgaacatccaaaaaagattctcctactttcgacatgcacgcaagtcctctaacagagtattcaagaaatcacctggctcactactgtccctcaacagtatcagacagtgtttcagctcatacatatccagcacagtcaccttcagaaatccagaccagtctccttaactaaggagaaagggaaaaaacagcaaggaagaggagcaaggaggcagggttcccacactggaccttgggagcagaatgtcaagagcctaaggtaaccactgtcgtcaacaacttgctgttgcctacactaaaagagaaacaatctgatttgcatgaagactcctaccccgagctgaaggctggggaagcacgtgagtttgacacagcatggccagagcttatataggaagtacttcacttcctattctaacaaacccacaaagctgtggacaaagatacagggccgacaaatacaaataaatagaagcagggaaatgccaaacgtcagcctttggttttccctgagaggtatgcagggtctggaaggaagcccggtgtatggagagggatccggctggaagccctaagtcaaacacgacatctaagttgatgtcagagcccagggaaccagggcaggcaatggggactgcgtaacagaggtcacctggaatagagagggggcacgctaccctaagaaaggtgccatgaagggcctgggccagattcctgccccagcgctgactaacaagctgtgtgagccagtctctcccagctcaacttcctcgacaaaactcagctagcctacaaggtc

SEQ ID NO: 123859 - DNA, 1036 bp, Homo sapiens
aggctgaggcatgcagatcacgaggtcaggagatcaagatcagcctgaccagtatggtgaaactccgtctctactaaaaatacaaaaattagccgggcgtggtggtgcacgcctatagtcccagctactagggaggctgaggcaggagtatcgcttgaacctgggaggtagaggttgcagtgagctgagattgtgccactgcactccagcctgggcaacacagcgagactctgtctcaaaaagaaaaaacgaatatgcctagcccctagtatcaacaggagctcagaaacagtcatgtggtttaaataatctctctgaaaatttatgaagaatattccaaaaactattatgtactctggtatgcaccctggttaaactatcactagatatgtttccactaaagtaaatattttttaaagactatttcataataaacttgaaaatcgtataaataactgacaacaagttttaagaaatcacatgtttgaaactaaaggattctaaatttcttttcagattaaaggccaagcccctagaatggcctaagctaaaatcattcttaaaattaacttgatattaaagtttaaaagcaccatgatcacattatagaactagaaaatggtttcagaagcaataaaattattacagactaaataaaatgtaatgatatctttgaggaataataaattttttgtctgaaagtttgtctgttagaaaattctctacctgaagtgaacatgtacagccagaattaggaaactattccaaacagtatggttcatttaacagccaagcaaatgaaaccattcagctgagattcccagaaaaagcctacattctagactaagttatctgagcttacacaagtaaagacttaagaaaaaagccaacagaaaaaaaaaaaaagagatcaatatattcaatcaaagagaaaactaagctgtaacagtaagatgttaaatgttagcaacaaacaagcttctggaagaaagtatctgcaagctgtgtggaaacaccgtcttcactcaaacacaca

SEQ ID NO: 123860 - DNA, 1087 bp, Homo sapiens
ctccacaactcctggatgggcctagcctaagcaattctgatttaacttattgcccctccttttagcaatactgttgagttaaataacagtttttgcattgaaaataaaaaaattttatttttgtagagatgggatcttggtatgttgcccaggctggcctgaaactgctggcttcaagtgatcctctggccttcgcctcccaaagtgctgggatacaggcacgagccactggccaggtctttattttttgcattttgcaaggacattttaagtcactttcttccttttctgtttttactcctgctgaggagatgatccccattttacaaaatggacaaaacattctccccagggaagggaagagtagacatttgagaataattgttttcacagaaccgggaaaccacctattttgtcccaagtatactgattgatgcattagcaataactcactatctgctttgccagaggtttgaacaatgagtgttaatgcttggtgtagtgaattttgtgtgatttcgaatctgatagctgactcattgcacagctctgtcttgcgagttcagatctgaactgtagctctaagaggtaaaagcagaagtggagctgcctttcatgccatagctagttttttaataaaatagagttaaaaaatcctttggcttttcagcattttggtgtgattggaaaggctattactatcttatattcagcatgagtcttgagcaattactgattaatatgatttggctgtgtctccacccaaatctcagcttgtagttcccataatccccatgtgttgtgggagggacctggtgggaggcaattgaatcatgggggcggttacccttatgctgttctcgtggtcatgagtgagttctcacgagatctgatggttttataaggggctttttccccttttgctccgcacttctccttgctgaaaaagaatgtgtttgcttccccttctgtcacgattgtaagtttcttgaggcctccctagccatgcttaactatgagtcaattaaacctctttcctttataaattacccagtcttgagtatgtctttattagcagtgtgagaac

SEQ ID NO: 123861 - DNA, 1050 bp, Homo sapiens
cagaaacactgtctgggaactacagccaaagctggaaggtacaaaggaatgggagtcgggggagcactaaaaggaaatgtgggctgggggagaatgtaaaaacagggtttaagaaaagtgtgggtgagaagggagagccatctaggagacagctttcaatatcaaatacacatctacataattcttcataacagctgtctgtatagtatccactagacagaaccaacctagttttagctcatactagacattcaaaccgttagcatttttaactactaacaaatgtgtattatgtattataaacacttatgatttctaaacattcaaaatttttgtatcgctatatacgtatagctatacacagtcatttttgcaaaattggggaatcatattgccaatccagtaatttcaggtagttctacttacccactgaatgataagtgcgtgtcttcaagtcgtgcatacaaacagcacttgatggcccgcactggacaatatccacacttccacagatgttgattttataaagtacattatttttggtatcaacagcttcccatgtataactggaaaggaagaaaaacaacttgtcaatgtcactgatttatcaaaaattaaacttctctctagttttattcaagccacatttgcttaaaactgccacaaactagaaaatacactttccttagccaaaaacactaaaaagtcaagtatgttaagttgcaaagaagccagggcagaaactactaacaccatctgtctgtggttcaatccattctgaagctacctcaggactcaaagattatcaaaatagaagtatctggctgggcatggtggctcacgtctgtaatcccagcactttgggaggccgaggtgggtggatcacgaggtcaggcgttcaagaccagcctggccaacataatgaaaccccatctctactaaaaatacaaaaattagctgggcgtggtggcacacgcctataattacagctacctaggagggtgaggcaggagaactgcttcaacctgggagacggaggttgcagtgagc

SEQ ID NO: 123862 - DNA, 1073 bp, Homo sapiens
gcagttctcctgcctcaccctcctaggtagctgtaattataggcgtgtgccaccacgcccagctaatttttgtatttttagtagagatggggtttcattatgttggccaggctggtcttgaacgcctgacctcgtgatccacccacctcggcctcccaaagtgctgggattacagacgtgagccaccatgcccagccagatacttctattttgataatctttgagtcctgaggtagcttcagaatggattgaaccacagacagatggtgttagtagtttctgccctggcttctttgcaacttaacatacttgactttttagtgtttttggctaaggaaagtgtattttctagtttgtggcagttttaagcaaatgtggcttgaataaaactagagagaagtttaatttttgataaatcagtgacattgacaagttgtttttcttcctttccagttatacatgggaagctgttgataccaaaaataatgtactttataaaatcaacatctgtggaagtgtggatattgtccagtgcgggccatcaagtgctgtttgtatgcacgacttgaagacacgcacttatcattcagtgggtaagtagaactacctgaaattactggattggcaatatgattccccaattttgcaaaaatgactgtgtatagctatacgtatatagcgatacaaaaattttgaatgtttagaaatcataagtgtttataatacataatacacatttgttagtagttaaaaatgctaacggtttgaatgtctagtatgagctaaaactaggttggttctgtctagtggatactatacagacagctgttatgaagaattatgtagatgtgtatttgatattgaaagctgtctcctagatggctctcccttctcacccacacttttcttaaaccctgtttttacattctcccccagcccacatttccttttagtgctcccccgactcccattcctttgtaccttccagctttggctgtagttcccagacagtgtttctgctgtcaaagatggtcactggagttaggcttacattaaaggttaaataaatagtc

SEQ ID NO: 123863 - DNA, 1105 bp, Homo sapiens
ctggtaagcggggttttgctggagtgggaggcagcaagctgatgggactgtgttcaagagagaatggaaggcaggaagaggagaagacgtgtagggacaattgaagaaattttgctctaagttgcagagacatgagatgatagctaggggaatgtagggaccaggaaggacgtttgtgaggtggtagatctcatggcatgctgacggaaacgatccagtggagagggaaaacctggtgatgtaaagtgagaggagatgattgcacaacagtcctcatgtaagagagaagagataccgaaaagaacgcagaggagccaagacgtttattgacctttgcctgagttcgttattaggggacaccatagcatgatagtccctaaggaatggagagcagtgttgtgtgacattggtcataagcttttctgattgaccaagatgtatactgaagactcacttttttcttcctcccttccaggtgccatgctatgtgtttgatgaagagttgaggaagcatgatctcaatcctctgatcaagcttagtggtgcctacttggtggatgactccgatccggacacttctctattcatcaatgtttgtagagacataggtatgaatctttgtggggctgagggggtggtggtgagggatttcttctatggcttcaatatctttgcctttctacctttatttctgttttcacatccatgtttctgattaggccctctaataaagcttttgtccccaaaaatgttctatttgcacaacccacctcttctcccccagtagattccatgcctcctccccaacccctgtagattccatcctaactgttgatccattccatgtgggtgttctctcggccagacaccttgggtttcgggattctacagaagtgagggtcggtcttgttctctgtgtgtgcctgaatcccttggctctgagttacgggctgggtgaaaaagaaaaagggatgatcaaggacttgggtacttggtcgggatgcatatttggcccaagctgacttgttcctttctctgtacttgccaaaactggtgtgagaagctttagcttaagctttagaatctttgataaattaactaaaga

SEQ ID NO: 123864 - DNA, 1079 bp, Homo sapiens
acaccttgttgtgcttgctctagtctggagctcgtggcatgtctgggtggttgtagggagcatgtgcaattataatggcactctgtccaaagaaaaaacttgagcgtaacctgaggggaaaagtgtttggaattttctatgtgtgtgtctgtattagtttgctcaggctgccataagaaaatacgataggctgggtagcttaaaccacagaaatgtatttcctacacagtctaaaggctgcatgtctgaagaaggcgtcaccggggctggtttgttctgaggcctctctccttggctcgttagatggccgttttctttctgtgtcttcacgtggccttccctctgcgggggtctgtgtccgaatctcctcttctgataaggacaccagtgattttttggattaaggcccactcacatgatctcctttttccttgttcacctctttaaaggccctgtctccaaatatagtcacatgctgagctatggcttaggccttcaacatacaaattttgaggggaaacagttcagtccataacagagtctttaagtgacacattggtaattcttaatatgaatgagtttgtgtgacgatttagtaacatgtgggacactgagcaagtgtgagcttctcttgtgggaaaaggcaggtcatctgtgatcagctattctctagcaggcagccaggggcactgggccctttccacactgagtgcagtaaaccctggtggtgggggccatgttggatggtggtttgggtggtggaagagaaccccagttcagtaactgctgtaactgctgggcaggtgctgtggggttaagacaaaacaaaacttttggctggcacttagaatttgttgtataaagaggaaatgattgactagccttgtgggcaaaaatgcacctggcctgcttgtctgcctttttttttttttaattttgttatctcatttacaaccgttttttgcttgttttagtcaaatggtgtttcttcctttttttaaaaaaaataatttttttgttccttttctctttccttattctaggacatgaagcagatcaaacaggttttgtttttgttt

SEQ ID NO: 123865 - DNA, 1050 bp, Homo sapiens
ggtctttgagctttttaaaagcatggaatatctgccgagaagctgcattttaaacattttatttttgcttctttcaaattgttcaggatcagtatagtccaaggcccctcaggcacggctgtgttcatggcggctgttaagaaggctgtctaattcttgggcgttatttattttgtacgaaatctaaaagtgagaacaagagaagtcttcatgctcacagcaaaaccttcggcactttcttccagccagttactactttgaagcgagaggatgtcaagtccatacatttggaactcatttcctgtagatatttttccctagctggctagagagcttgctgttttagatccgtagtgatttgttgatgctacgcaaaaggcttaatgtagacatttaaaaagattcaagtttttttcttggttctcccaaacacatttgtctgtgtattcacaaaaatctagatattcggatggagacctcaccttgatatattttggaggtgatgaatgcagctcagggtttcagcggatgagcgtcataaactttgagtgcaataaaaccgcaggtaagtgtgcgctggagttcagcccctcctctttgcattcatgggcatgtgcttgtgtgtgtgcacaggcgtgttcttggaagtgaacactgaatggaggagtcagatgccctcctttggactggccagctctagcccccagactgggttttttctgttggagtaacactttccccacccccactgccccagtggacacacacacatcctgtttgtgttttcctcggttttctctgtttgttttgggaatgggcccagcaatgagcttgttgggaaagttttcatcttgaattttggtgcacactaaactacagcaaggacagattcggcaggggcgggatggcttgtcaattttgattgagtgacctcttcttttatgtaatgagtatcaagataatcctttttgcaaagtggtgaccctatggtagagtttggatctggggattgcagaatgtcactgggtgcattgaagctgaaggcgtgca

SEQ ID NO: 123866 - DNA, 1139 bp, Homo sapiens
gatgagtcccagagaacttgtcttgttcacagtcgcatcactaagtcagcagtgcacagggaactagagctccatttctgtcctcctttctgtgagtccccagtgtcacccagagatgttcaggagcctctgggagctgaccacagcccgggagcagaggatcccactcactgctcttgcgttcctcctgcctgcccttttaatcttatctttggagatgctgtacacagccttctgtcaatgtctcccaaggtgaaaggcatgctggcctgccatcgaggacttagggttaagcatctgaagcttaatagaagcctgtgtcaactcagatccccatggtctctaaaaaaacctggacctgaattttttaacggagcagttggcattggtcctgttcagtttcttccttgctccttagctgttcctcaattttggtcacgtatggagtttaaatttctcctcttgaattgtgcaggtaacgatgggaaaggaactcctgtattcacaggggaggttgactgcacctacttcttcacatgggacacggaatacgcctgtgttaaggagaaggaagacctcctctgcggtgccaccgacgggaagaagcgctatgacctgtccgcgctggtccgccatgcaggtactgccctccttgccatgcgggtcttagtccacatgctcatggaacattttcccatgagtacttttggaaatgcggttactattttctttgtcagtgggttgcgtcacagccctcccccagttttttcatgtggctgtgtgaattattagaaggagcattggactgggaggtgaaataactgaatttgagaccagcatttttgaccttgtgttttcacccttttacacactgcctctcttccatctctgaggtgggatctgcagcctctgccccctggggttcttctgtttggatcctctaggcagatggatgtgcaccttgggctgctgttcaccgctgcctcagcgtgcagtgggcttgtactcgaggctgagcttgctgttgcacggcaggcaccggatgaggtgccaaggaggcagcagcgccccccacagcacaacccctgtccttgggggcctggaatttagcaggaaacagagcaggtggaataataaga

SEQ ID NO: 123867 - DNA, 1115 bp, Homo sapiens
accttgcttgtcttctgtggtagcatgcattgcatcctgcactcagtctgcagatgtgtaagaggttgctggtttcttttagcttcacaggccttcacaggggccgagcggggtgtattagcaatggtgttaagcggggtgtactagcaatgatgtaccactctactgcgtcccaagacacaggctggcttcttgatttgggttttcagtttctaatttcatactgtggggcttgggagaattttgccgttcagttctctgtcccccagttgggcctactcttctgaagaagtattgggatgtagtttgtttctgtcacattaaatgagaaacctgagaatctcggtgaatttttgtgctttcagtctgcccgggttccagaaacagcgctggggattgagtgacgaagtggtttgggaactttgagcccttgacttttggcttaatcactatttattctgtgactcagagaaatcagcattgcttttggctaaaatacacttttgttttgttacagaaccagagcagaattgggaagctgtggatggcagtcagacggaaacagagaagaagcattttttcattaatatttgtcacagagtgctgcaggaaggcaaggcacgagggtgtcccgaggacgcggcagtgtgtgcagtgggtgagttgtgcctggatggaagatctaggtgatgcttttctagggcatccagtttggaatgagttagaagatctttctgtggttcatctaagcctcctctttctataatcacatgaaggatggtaaaaatttttcattcataactcaaatgtcagtaattgcttgatgcactctggaatcctgaagttggctagagctccctgacatgggctaaagccataactgggaacagaaggaaccacgtggaaaatactacatcatctttttagtttgtaacctgaagaataacattgccagtgtttgtgtacaagtgattttattttattttttaacaactttattgcctagaatcgttcaaaagttatggcttgagtgaagtgtaatctcagctgtagccctagtgtaagaggggcttgcatgcttcgcttccttttgctgtcattgttttggtcccgta

SEQ ID NO: 123868 - DNA, 1527 bp, Homo sapiens
tcctgcttgggttgctaaacaggtttcgttaatttctgctttggatatgagacacattctcaccctttggctgtgtggctgtgctttcaaaagactttgtgtcttggggtagctgaagccctgacagtaggggacaatgtcagtttacagttggtgctgatgcatgttgcaagccatttggtctttcttgccctggaagggcattgtgcatccttcatggcgctttctggctgaacctatggatgaccctggaggaccccaatgtggctgttaatgtctagccaaacgtggcactctagggaaacccatccgctgccttggtgggttcagggggctggagaagggctgcacgtgctgggtttgggctgatttctttctttctttctctttctttcttttttttttaagtcacttctttgtctgcgtgatgatcatttttaaccacatcttctgttttctccccctttctcttccagataaaaatggaagtaaaaatctgggaaaatttatttcctctcccatgaaagagaaaggaaacattcaactctcttattcagatggtgatgattgtggtcatggcaagaaaattaaaactaatatcacacttgtatgcaagccaggtaaaaattttaaaaaagatgaaatcttttctggcttctgccagaggtcctgcattcttcatatctctgttcctcatcagtcactgcaaagctgatcagacagattggcatggtgttcagcattttgagttccagactctggcgatgggagataggtcatttggaatttttccctcatcccctcctcaaaaccaaatcagaaatggagaaaccagatggtgtcagaagggagttgtgggtctcagcgctgtatcctcttcctcgggactgatactcggccagtcatgtggttacttaacttccttcaaaggggaaaaaaatcataaatggtttaaaacattgcccgtgatctcaccacttaaacacaatgttaattttcattacctttatttatagatgtatgttgtttttaccaagtcaaaatttttatggtaacaaatcttaatgtttctcaaagtgtagtattttgtaaatacttttctatgtttcacagttccattaataatttttaggaacttccttgttgacatggtgtggttttactatttttgaacattttccttattgttggattaatagcgcgtttccagtgttgctaattgtgctattatgtatcctctctctacctcccattgaaatatttcctttggataagttcccagctgtgggataaagtcagaagctagggtcattttgtttgtttgttttatatggtaaaatatacaacataacgtaaaatgtaccatcctaactgcttttaagtgtgtagcttggtgacattgttgtgtaataccaccaccatccatctccagaactttttgatcctcccagactgaaactcagttcccattaaacacgagctctccattccctctcttctactttttgtctctacggatttgactgt

SEQ ID NO: 123869 - DNA, 1046 bp, Homo sapiens
aggtgtgttctcacttaatgtcattgctttatgacaagcatttaaatactgatgagacctggtctgaaaactgaaggatgttaggagtttaatttcccagagaaaggagcaggcccatccttgggaaagaagggtggattgaggttatgcctcactattgcgcattttgtgcttctcagtgcctagatatctctgtgcgtatttctgcattctgcgtaactgcagttcaaatgaagtgagttgtctaaaccagcggtgccaagaggagatttgggtcccagtgttcctgctgccgttggagaccttgtgtgggttcctgtggtctgcagcccgggcctggttctggtgactcctcacgtcgctcacgggccctcccttcagtgtggcagccttggagtgcttctgcccctcaggtctttgctgagagaaacgtgtgtttatttcagtgatgagaagacttggaacttgggtctgagtaatgcgaagctttcatattatgatgggatgatccaactgaactacagaggcggcacaccctataacaatgaaagacacacaccgagagctacgctcatcacctttctctgtgatcgagacgcgggagtgggcttccctgaatatcaggtaggaatgtttgttcctcatcgcgctccctgaggatactcatgcctgtggtgggcctttcatttaagcagagcttgtatcagtctgggtttccagccaaatcatcaccgtcattagatttgccagggtgcctgggcagtattagtattttaagctgtttatttagtgggttgtgcaccttaataacagcccacaagcctgtcagttttgggtacaaaacatacaaaagcataaaaaaaaatcctgaattaacccccacttagcagaggctaaattttcatcctgatttgttactggacagtcttctttttaataaaatgaagggagatgggcagactaagcttttcttcacagtttctcattgggaacattgctctcgtccttttttgaatcctggttttatgtcacgtgtctttctcttt

SEQ ID NO: 123870 - DNA, 1072 bp, Homo sapiens
tgcaagtgttgctggtgagcgtgtgactgagctgatgatggggagtgatgctggctgtggggctgcaggaccaaggtggggcattttcagcagagtgaattctaataactgtctggtcgcctttgggatagcaaccagtcttggccacagcagagcctcggcctttagcttcatcatttaaaacaatgactgtcagtgcagaggcacgggggacagttaaggtccactgcatactgagttcagcgaaggtggagtgtaatcctggtgcgtcatgcgcccagacaagccaactcctggtagtgtgattggtggagcatgttttatttggtagctttacttccccaactacatagaaataaatgagactgaaatgtgtaagctctttaaaagcatatacattttgctttgaaattttagtctggcaaaatctgaaggtggccttggaggaaactggtatgccatggacaactcaggggaacatgtcacgtggaggaaatactacattaacgtgtgtcggcctctgaatccagtgccgggctgcaaccgatatgcatcggcttgccagatgaagtatgaaaaagatcaggtgaatctgttttcactgcttgtctcctttgccctcctaattccatgacttagtgggaggaggtggttattctgggacatccagatcaaaggcagcacagctgctcgagagaaaccctctgagtaggagtggggcctccatgtgaactcatctgcctcctgtaggagcagaagtgtgtcacacaggaatcattgttcacatggagaatgctgtgttgcagacttttgatcacacaaagggcagaggaagcaccgaatggttatgtctagcctgaattcaaaagtgtctttaggtgctttcagcagacacctgtgaaaaagagagttttgcttccaaaagctcttgtttctggattgattagggggaaaaaccgatttgggagagttgctgtggatgaaccagattcaagcacacgctctcattcgctgcagttcgtccctgggttgaatgcagtcaccgccagaacatttacccgtctcctgtggt

SEQ ID NO: 123871 - DNA, 1134 bp, Homo sapiens
attgtccattggtctctccttactgtatcttcacaccagagagcataattgacttcatttttacaactataatataataatttttaatggaataacaaatttaagaaatgtagggtaccactttatatttacttgtaattaacatgatttcaatgatacatactttctcataattgaaaatattataacattatgacttctgtgtcttccctctcttatatatggtacattattacatgcagtagatcttacacatttatagatacggggatgtatgaatttaaatgatgtatagatactaaaccttaaaggcagtttatagatactgccctttggacttatgtactaactgtactaacatgccagaaagtggaaagttggcaagttaactaacaaataagaaatgtttaacctagtgggatttggagttgctagggttcttgtctgtggtgagatacgaggcataaatttgtttgtatggctcttaccgtctgacctgcagtttaatgtctgcggcacaatgcctgtctgtgggaccatcctgggaaaacctgcttctggctgtgaggcagaaacccaaactgaagagctcaagaattggaagccagcaaggccagtcggaattgagaaaagcctccagctgtccacagagggcttcatcactctgacctacaaagggcctctctctgccaaaggtgagctcagagccatgttgttttgtagctaaaaagggccctggtggctctgtggctggccatgcaccttcctgagtgtaggatgtgcacatcccccgccaccatgggctgtgctgtccaccttgctgcaggagccatcacggtggtcttcctgcgtttgacctcgcagaatacaggggtcccgttatccgtggcttcacttttgtggtatcacatggtccgaaaataataaggtattttgtgagaaagaatgagagaaaccacattcacgtaactgtcattacagatattgttacagttgttctgttttattgttgatctcttgctgtgcctagcttacaaattgagcttcatcctctgtatgtgtgtataggaaacagcatagtatatatagggttctcaatttcaggcattcactgtgggtctcggaacatatccc

SEQ ID NO: 123872 - DNA, 1931 bp, Homo sapiens
ttgcagtgagtgtgtaaacctgtcatcacataggccaccattggagcgagtgtgtaaacctgtcataacacaggccaccgttgcagtgagtgtgtaaacctgtcatcacataggccaccattggagcgagtgtgtaaacctgtcataacacaggccaccgttgcagtgtgtaaacctgttgtaacacaggccactgttgcagtgagtgtgtaaacctgtcataggccactgttgtagcgagtgtgaccactttgttcatgtcgagtccctcgatacacacttggtgccctggtgtcattgctcccacgaacggctgtgaagcttgttgccagtggcagccttgtcctgttgctgcactgtgcttgtgggctgcgccatgaatactgttctgtctcttaaaatctgggccttcttgctttacaggtaccgctgatgcttttatcgtccgctttgtttgcaatgatgatgtttactcagggcccctcaaattcctgcatcaagatatcgactctgggcaagggatccgaaacacttactttgagtttgaaaccgcgttggcctgtgttccttctccagtggactgccaagtcaccggtaaggccgtgcggcctaagaactgagaggccggtcaagagtcagtgtgtgtgtgagtggatatgaaggtgtgtttctgtgtgtatgtatatttgtgtgtgtgtggtgtgtatgcttggttatgcaggcagcgtgacatttctgttatatattctctttgaatgatgcctagagttgtaatgtttttcttgaagagaatctgactatatagttaatggttttaagctatcttttgggatcagatacatcttaagaacagagaagaaaatgcagaggaaacacatttcacatgtactgtcagagcttcttatttgagggtgaaaaaaaaagaaaaagatgttaaactccctaagctgtgccctggaagctgacagtgtatacaggagaccttgacctctgggattgaccctgcctgctctgcaacagtggtacttccttgtcaagggcagtgggggtttggcttttttctttaaagagtctttagggactcactatgttgcccaggctggccttgaactcctggtcctaagtgatcctcctgcctcagcctccaaagtagctgactacaggcgcatgccaccaggcccggctgtgaagggcagttttgagggacagagtgggtgtgttttgtaggcaaagcctctcagcctcccgtggatttccttatcctcacagttaggaatgccaggttcacgcctcctcagggcttatttagggtgaaaggcagttcttgagtgctcacaaggaggcagagttctccagcgtggttttttgttgtgtttcagacctggctggaaatgagtacgacctgactggcctaagcacagtcaggaaaccttggacggctgttgacacctctgtcgatgggagaaagaggactttctatttgagcgtttgcaatcctctcccttacattcctggatgccagggtgagttctccttggtctcttgattggcgtctgttcattttattagagcatttgactcaaggtcatcgccttcctcatgcccaaaccacttattctgttcttccaggcagcgcagtggggtcttgcttagtgtcagaaggcaatagctggaatctgggtgtggtgcagatgagtccccaagccgcggcgaatggatctttgagcatcatgtatgtcaacggtgacaagtgtgggaaccagcgcttctccaccaggatcacgtttgagtgtgctcagatatcggtgtgtgttcagaccagcaatgagatgttgtccccgggtgactccatttcccatttcccttgaacctctgaatcttctatcttgtttaaaacttgcctgtgttttcgtggagtttcagccattgct

SEQ ID NO: 123873 - DNA, 2092 bp, Homo sapiens
tagaaagctgtttgccaggcgatttgtattatatataaacaaaatcatgtggaaatggcttttaatgcccatttatagctggtatttacctaaccaaaaattgtaaaagtttttttttttttttttgagaccgagttttgctctgttgccaggctggagtgtaatggcgccatctcggctcactgcaacctctgcctcttgggttcaagtgattctcctgcctcagcctcctgagtagctgggactacagggtgcctgccaccatgcccagctaatttttgtatttttagtagagacggggtttcaccatgttggccaggatggtctagatctcttgacctagtaatccacccgcctcagcctcccaaagtgctgggattacaggcgtgagccactgcgcccggccatttgtaaagctttttgcttgaaaatgtgaatgcgtgtgtggttgcagttgcccttcacttcttccatgttcttgaaggggacaactgtgaggtgaaagacccaaggcatggcaacttgtatgacctgaagcccctgggcctcaacgacaccatcgtgagcgctggcgaatacacttattacttccgggtctgtgggaagctttcctcagacgtctgccccacaagtgacaagtccaaggtggtctcctcatgtcaggaaaagcgggaaccgcagggatttcacaaagtggcaggtaccattgtttgtcgttttccttttgttgcaaaggaatggaattaaaatattaaaatattttgctgaagatgaattttcccttgagtcagaaacatgagtgttctactgtaaaaaaaaaaaaaagcatattaatgatatttcggattttgcttgattttcttaaacagagtacatactgaaggatgttggtagagcatgtctattttattcttagttagccatgccagttactgactctaaggtcatatttctcttctttattacaacgttgggacacagtgagctagccagtgttggatgttctggggtagtacttgatagcattgagtcacagggaatgcatttagtacgaggtttggctgtagaaattacagggcacgctgttggtcattcatgctgtttcagcagttgggcaagatttaaatacatttaggaacttgtaaaaatgaagtcaaagtagctggtggtgagtacgtggacagccctcaggcacagtggagaaagtgacattcccttaggtgatgaggctaaggaatgcctcatgtcatcatacacgggtcagtctgtgacgttgcagcagccttggacaaggggaagcctgattttattcccaaagtgtaatgtgacaggagtgcatggtatggtgctgggaggccagggatactttgtctcacactcttcagggtgtgtggtgtcacatgtcttaggctaagtttgacagcctagggacccgaaccaaaccttgtttaatgttctccttctttacaggtctcctgactcagaagctaacttatgaaaatggcttgttaaaaatgaacttcacggggggggacacttgccataaggtttatcagcgctccacagccatcttcttctactgtgaccgcggcacccagcgggtgagcatgtaccgacggccctcagcggggtcttctccccaccctcaggctgctgggatcatattagaaagaatctgtcctcagatctcatcaaatctcctggttaactgagtttaaaataaccatttacagaaaatatgttgaaactttcatcagttagtattgattttcatgaacgtaaccattctttactattttcattcttaaaactcaaagtataaactaaagttttgcattctcacttttatatatgtgcctcttaacttttttagccagtatttctaaaggagacttcagattgttcctacttgtttgagtggcgaacgcagtatgcctgcccacctttcgatctgactgaatgttcattcaagtaagtccatggatgtgttgtctcttttggacagactaacttggtatgattttgctttaataattagtggtcttgggtgcaggggattagattagtcagttaatttacctaggactcggtt

SEQ ID NO: 123874 - DNA, 2754 bp, Homo sapiens
agctagcccctggctgcctttcagcatcagtgtagtggattgccaggagtctctcacctgcccttgtgctgggcacccagaaaggcacaggcacagtccattggcagcaagaggtgtgctgggcaggctctccccatgcccaccagactcttagtggctgctgtggtatggcccagcagagggtgctgtgagccacgatcttttcagctaaggatgggacatctcatggatcaagggactgacagtctcatgatacagcctggctgttggtggaggatttaggacaggggtcgtggtgagaagtcagaagtcccgatgctgacataatctgtgtgtgagctcgccgatgatgagcctcccaagtctcagctccctggagtcactgtgtccccatcttcttccaccctacaggacacctgtttgatctgagctccttaagtggcagggcgggattcacagctgcttacagcgagaaggggttggtttacatgagcatctgtggggagaatgaaaactgccctcctggcgtgggtgagtgctgtggtctctcgtgtgttgtctgactctcccgtcctctggggttgtcctcagtctctttgcatgctaatggcaaaaaggatgagcagagccaggaagctgagacgcttttgtctcctgcagcagtcaccccatgtgggggacacatggtcatgtgatggaatgaacattcaatgtaaaacaatggttaaagccggattggacacttgaagttataagtgttggctatgaaattgatggtcctgacttgcgaaagttctcatcagaaaattggccatcgagtctgtgattgtgttttctccgcctttcccttgtggtgcaggggcctgctttggacagaccaggattagcgtgggcaaggccaacaagaggctgagatacgtggaccaggtcctgcagctggtgtacaaggatgggtccccttgtccctccaaatccggcctgagctataagagtgtgatcagtttcgtgtgcaggcctgaggccaggccaaccaataggcccatgctcatctccctggacaagcagacatgcactctcttcttctcctggcacacgccgctggcctgcgagcaagcggtgagttttcagatgggcacgggagaagtgcatgtccagtgcctggctgcacccgggccccttcgtcaggttcacttgcccactagtagatgcccagctgaactgtccactcctgatcaccccaataataaagttgactggaagtgcccagtgctatgtaatgaagcattttgacacctttctactttttttgttgttgttattcagcttttaaattcttatggatgacctagtggtgattaggaaaatttttttgtagactcaaagcagtctttcctacttaacagaccgaatgttccgtgaggaatggaagctctattgttgacttgtctccccttattcatcgcactggtggttatgaggcttatgatgagagtgaggatgatgcctccgataccaaccctgatttctacatcaatatttgtcagccactaaatcccatgcacggagtgccctgtcctgccggagccgctgtgtgcaaagttcctattgatggtccccccatagtaagtatgacaaatccaagggtggagataatttttgcaagacttttagtgataacctttgcgttgtttcttgccttcagtggggagttgctcaagcataaaaaaaatggagaaagtaagtgggactgtgtatgttctgggtccgctactggaagattaaaggtttgcacattgaactgttcgctgatgatggtagccagccagtctttgagcatgggaggtaacacgaatatgtgtgtagggactctacttgtcatgagcctcagggttgacccaaatcaagaagtttttaggtgaagtgacaggaaagcacattgccctagcctggtttctttgtgtgaaatgccttgtcttctgtagttaaaacgcttgcgaaatgcaaacagtttctttggcaaggagttataattaagggcaagagtacgtttgctaatagctaaatattttgccttaaaagctttggttttatgcattaaaaaattattttgtagagatgggagtattgctatgtcacccagccaggctggcctcaggctcctggccttaagtgatcctcctgaagttctgggattacaggcatgagccacagtgcctggcttactagcatgttttaatagaaatttggatctttaaaaattgtctccatgagttatattcatattttgtcaaatccttggtatgttttaatatttgaatgtatctcacaagtcgtctgtatttctgtctgtatcatctattatgctttaaagatggatcctcttgtaacatatctagatgtcctttagaaagatggccattatatgtggcagtgatatggggagatgtcaggagtgtgtaaggagatcggccacagcctgaattagcacagctccagctctgtgtgagatggaggcctggacaagctgagtctccccaggaagctctttggtagcgtcctttctgacagcgcagaccggggatcctcgatcgggaatcattgcctggccacccattgtcaaatgttaaaagatgtagaaagttatttaactggagaaggtgtggtgccacgtggtctgaacgtgccccacagtggtgaatgaagagcactgtagctgagaacaaaatcatggggaagctgcttatacacacactc

SEQ ID NO: 123875 - DNA, 1042 bp, Homo sapiens
cctgtcaggtggtgggaggaccgtgtagcatccttagaggtttttcaggttccgggcttccctcatcagctgatgggaggactctgtagtctccttgatgtgactggagagattcctattgcttaggatctttgaaaattgaagatacctagaaatagaaccaaccttagaactaacgttaggatcaaaacgataaccactgacatacggaggttacacagcatctgtcaagccttccaactggagttggtataaacccagtttctttagatgctgctcattctcagaacctatgaggtctggtttttgcaattctgtatcaattcttaattccactaaccttgggaatggttaatttcctgaaatactgtttgccctcgctctttgtttaggatatcggccgggtagcaggaccaccaatactcaatccaatagcaaatgagatttacttgaattttgaaagcagtactccttgcttagcggacaagcatttcaactacacctcgctcatcgcgtttcactgtaagagaggtgtgagcatggtaagtgtgggcctgtgacgatctagatgctcaactgcgggttagtgagccaaggctagacaaccagaaagtgcgtgtcaggtccaaggatactcttattcaaaatgtctgccttgggtaagatggtacgctagtagtgtgtctgaataatttaaaccactgattgagggctgagtgagctcccccgcagttaacagcatatagaaacttgctgtaatttaaaaacatagaacacaagtatagaaatgacattcagctttgactgctgatgcataaaagtgtcataacttttgtttttactttaacaattactgattttattctaactgggaagtcagaaagacatttgggcagctatagtcactcaggacatagcccagaagttaacaagtaacaaaagacccctggaatcagaatagctacaacaaagtggcaccttttacttataatgaggtattgacttccattttatgtgcattaaaaaaagaataccagcttcc

SEQ ID NO: 123876 - DNA, 1081 bp, Homo sapiens
aattcctgagagctgcctcatctttttttgttgctgttgaatgagggagggaataaataaagtgattctacaatacttggcctatggaatatctggccatgtggcatcttgccccttgaataaatgtctcccgtgtctagagacagtagattggagcacttgtgaggcagggtctcagtttcacagacctctctcatgacatataagccctccccctttcttcctttgaacccgtagcacagaacattgaggctttctctctaagtagaagacaagacctggattcagccagggagctcacaggatgtgtagggggcaagggcagggtgatgtctgtgccttgaagatggcattgggtctttcagctgctgttgtctagcatcccttccctctgagaggccgctgtgggttatgcacagcccctgtagggacgtggtgtgtcactgctatctatccctatgccatggggtttttaagacccgtgctcttcctggcaacagggaacgcctaagctgttaaggaccagcgagtgcgactttgtgttcgaatgggagactcctgtcgtctgtcctgatgaagtgaggatggatggctgtaccctgacagatgagcagctcctctacagcttcaacttgtccagcctttccacgagcacctttaaggtaatgcgttcaccctgggcgttgctggtgcaggtgtaccaggtgccaggtgctgtgaggctgctgggagtgttttggataatgtggtacctgtgagctgagagggtgtatgtggccactgggcagcatcttggtgctctcgtagggcatgccaggtctcaggaaggttcttggattgcgtggccaactcagcgcagctgacacttgcgttgtacctcatggctctgcacttaacgctttttgatgataagtaacctcatgaggcgggtagtgggaccctttgtatcagacagagggcaggtggggcagcccggagacatgaatgtaaggtatccatggggacagggccagctcctgggtggctgaaatctacagggatttaattcctccaacctggttgaagatgatcaaggcagttg

SEQ ID NO: 123877 - DNA, 1881 bp, Homo sapiens
cagagggtggttctgaggtcagagtgggggcaggagctttggtgactggaaacggagcctctggagctggaagaacctgggcggactgagttaggctgggtttgatttgcgtttgtgtgtagctcaggttgtgggaggcgtgtgggttttctcgggtctttggcaggagctccttaggctttgctggctggggtcagcccatggtcctgaccactctgcgtggggagcgcccgcttggccaggtgctcctgcaagacatcaccgaggagcaggggcatggactcacagggtttaagtggttctaagtgaggtgggaaacttgccgagattctagccactgcctctcccagccccggagcccttctttctactgtaccacgctgtgtccagggtggccgcaggtgtggacattccactccgcgtgtgtctggttggtgagctcccttcttcagtgaagacttcttttgccctttttttttttaattggaaaagctattttagtgctacattcagtgatggaatggagcccttagttatcagaacctttctctgaaagtaaagtgaagagccctcctgtgtcagggcagagacgtcacttgcatgccttttacctgcccctttgtgtcgttttctaggtactatataaatctgtgccagaaaatatataaagggcccctgggctgctctgaaagggccagcatttgcagaaggaccacaactggtgacgtccaggtcctgggactcgttcacacgcagaagctgggtgtcataggtaaggcctgtgggtcctggtccttggttcaaggagcagcatctgaaccgggaaggtgagggtgttctcaggatggcaaggagagtgagcatgtgctttggtggaaacctccagatatgattgcctgtcactgtctcacaggcattttggctctcctggcacattaaaataagtgctgctttgtattatatgagactgcaggtcctagtctgtgtgtttagaggggttgggctatctcggggaagtgcgtctatccaggaggaagtctcagaatgttcagagttcctctgaagttcacgttctagctgtagatcaagtgcctaaattggcataaacacacgtgtttgtttaggaaagccaaacagttgcatgaggacttggtacaggtagttcagaggtacatctttgtaaaatgtcttaacaatttttcacgggaaattgatcttgtacttggttgctgagtgaaagttgttttctttcattatttaaaggaggaaaatagaggtttcttagtaagagcaattaggatttgttggagggaccagtaaaggaaaatattcacctttgcctcttaggctggagtggggtttcccgagttgtcctgattcagccacagggctacttcagattagcttgagatgttgagatggagaaagagaattccgagaaaactactgccacccttgataaaaatcacacacagactctgcaggttggtaggtggagggagagctgccatacaggaagtggcgcccagaccgccagcctgagacccgccctccctgggaggttcttactgctttagaggtcagttattgctgccactcccacactgccccagaagggggaaggagggaaggtcgtggagggttgctttttcccctgtaatcttgcagtatatatggatattcgactagtctttccccaacttcagccaactgaaatgactaaaacacttaaggcttcctaaaagtttgaggcaggaggagcaaaagagagtagtgaacacagggggtgacatggaactagatcatctgacttcttagcggtgacctgcaggccacctccatttggagagcaccattttgcaagtccagcctcgcctggcg

SEQ ID NO: 123878 - DNA, 1023 bp, Homo sapiens
ggccccgtcctggcctgtttctaaggccccctgggcccctttcgtgtggagatggtgtctcatggtgggctgcgctcactgcttccagaagaaattctgagaggaaagagctctgaccctggagagaagtgtggtgcttcgggacagcctctgccccagcctagtcctgccgtggattgggccacctagagggggccgcgtccctcctgcctgtctcctctgtgtttgggtgaatgatagttcatggagctggaagcagtgccttcttgtctgctttctgacaaccctgccacaaactcatcatcaggaactttttgcagccctcttccatgtggagtgggacttgtggccttgttttctgggcaggagtaagaatcacatggtgttgggaaagtcagagctgctcttgccttggggactcaggtctcaggttgtggctgtggcagcaggaccaccctgtgacacggctccttttctgtgacgtccttgcagggtgggctttgacagcgagaatcccggggacgacgggcagatgcacaaggggctgtcagaacggagccaggcagtcggcgcggtgctcagcctgctgctggtggcgctcacctgctgcctgctggccctgttgctctacaagaaggagaggaggtaagcgggtggcagggcgaggtggggcgggtggatgcatgcctcccatagctaatcttggggtcagttttgtggggttttatttatttgtttttaagccctacagcagcgaaggctcgaggttcttagtccaaaactctctggaagcagtccccagcgttgtggtttttaaatgcctgcatttctgtctgaccaaggccgaggccctcgcacatcacccgtgcctgcggcttctaggaccgtggtcctttgtgtccaaagatgagtagaacattaaacggcacctttcatgggtgccttttcccactgagcagctgacccctctgccctcctcacatcataaatgcaggagtttattaagcgcctgctatgtaccag

SEQ ID NO: 123879 - DNA, 2774 bp, Homo sapiens
actggagtccctcctttgacattcctcccctgccatgcagtgggcacctttcagtctatgagtagcccggaagagccccttctcccccagctgcgctgggggatcactggtctgcttttcggtccaggccatcccgaacgccttctgcttggtcccacccttggctgtgagactcctgccaaatgaccccactgccaccctcccaaaccctcctgccttggtgcagtctcattaggaacaggaaggtgttgccagccctcgtcttcctttccctgggaactggagatgcagtgactgtgaggacagtgggccagttcttccccagctcgtgccagcagagagcatccctgatgtggtggatggtggagcagaatggggtctcttagggggctcacgtggtctctgctgttgatccctggcaggtgaataaggaagaagagacagatgagaatgaaacagagtggctgatggaagagatccagctgcctcctccacggcagggaaaggaagggcaggagaacggccatattaccaccaagtcagtgaaagccctcagctccctgcatggggatgaccaggacagtgaggatgaggttctgaccatcccagaggtgaaagttcactcgggcaggggagctggggcagagagctcccacccagtgagaaacgcacagagcaatgcccttcaggagcgtgaggacgatagggtggggctggtcaggggtgagaaggcgaggaaagggaagtccagctctgcacagcagaagacagtgagctccaccaagctggtgtccttccatgacgacagcgacgaggacctcttacacatctgactccgcagtgcctgcaggggagcacggagccgcgggacagccaagcacctccaaccaaataagacttccactcgatgatgcttctataattttgcctttaacagaaactttcaaaagggaagagtttttgtgatgggggagagggtgaaggaggtcaggccccactccttcctgattgtttacagtcattggaataaggcatggctcagatcggccacagggcggtaccttgtgcccagggttttgccccaagtcctcatttaaaagcataaggccggacgcatctcaaaacagagggctgcattcgaagaaacccttgctgctttagtcccgatagggtatttgaccccgatatattttagcattttaattctctccccctatttattgactttgacaattactcaggtttgagaaaaaggaaaaaaaaacagccaccgtttcttcctgccagcaggggtgtgatgtaccagtttgtccatcttgagatggtgaggctgtcagtgtatggggcagcttccggcgggatgttgaactggtcattaatgtgtcccctgagttggagctcattctgtctcttttctcttttgctttctgtttcttaagggcacacacacgtgcgtgcgagcacacacacacatacgtgcacagggtccccgagtgcctaggttttggagagtttgcctgttctatgcctttagtcaggaatggctgcacctttttgcatgatatcttcaagcctgggcgtacagagcacatttgtcagtatttttgccggctggtgaattcaaacaacctgcccaaagattgatttgtgtgtttgtgtgtgtgtgtgtgtgtgtgtgtgtgtgtgtgagtggagttgaggtgtcagagaaaatgaattttttccagatttggggtataggtctcatctcttcaggttctcatgataccacctttactgtgcttatttttttaagaaaaaagtgttgatcaaccattcgacctataagaagccttaatttgcacagtgtgtgacttacagaaactgcatgaaaaatcatgggccagagcctcggccctagcattgcacttggcctcatgctggagggaggctgggcgggtacagcgcggaggaggagggaggccaggcgggcatggcgtggaggaggagggaggccgggcggtcacagcatggaggaggagggaggcgctgctggtgttcttattctggcggcagcgcctttcctgccatgtttagtgaatgacttttctcgcattgtagaattgtatatagactctggtgttctattgctgagaagcaaaccgccctgcagcatccctcagcctgtaccggtttggctggcttgtttgatttcaacatgagtgtattttttaaaattgatttttctcttcatttttttttcaatcaactttactgtaatataaagtattcaacaatttcaataaaagataaattattaattgggtgttaccattttttccttgatagtgagacgttcccgagcgagttacccatctgcctgcctgtcttttctttctgttaagtgactgaatttgggttttaactctggtgttctcgttgaccctttatgaggcagcactttcatttttctccagagtctcctggtcgtaggtgttaactttgggtccaatctgccttcccttggctctttctagatccgatttctttaccttctccaggccaacctcggggtgtggtcctgttcatcaaaacaatgaacatggagtttagagtccagtgagtcaataaagcttttttttgtgcaacctgatctaacatggagatgttttctcttgagtaaactcactgagttttccatcttaaattactcagcagtgactgagagctacctgcatggaagcaggaagttactccagtgttataaacaaacttcttagactcaacatcctatt

SEQ ID NO: 123880 - DNA, 1020 bp, Homo sapiens
tcctgcttaaagaaaattcacacctgtaactgtagttagaactgaacacaggagccatattcttgcttgtcatcattcagttggcccaaacaaatttgttttatttttataagctgtgaagaaattagttgcctcttttaattctgagatagttctgggtacttctaaggaacaacttctctgaataatggtacagggtgtaatgagaattcctttggttccttttgaatacatctagtatttttagaaattttgtcagaaagtttattataaatttgttaacggatcagttttcgagcaattttgatacctttttctttaaaattaatagtgaacacttaacggttaaaataggccattgtctttatttctattaacccatttaatcttttcaacaactctatgaggtaggtcctgttatactctctttttgacagatgaggaaactgaggcacacagtttaagtatcttgtccagggtttcacagctggtaatgaagaaaggtctggctgcacagcccatgtctttaaccaccatgaagaattcattatccaaatgggcggatcagaaattagaattctgtataaccctactccggaaagaaatggacatgagcattcttaggtaaaagcgagaagggcagagaaatgaaaatgtgctgcaaaaatgactgctgcttcagtggtaaaaaaaaaaaaaaacttgacttttcagtcaggcttctgtctgtgttataataaaaataggtcaggataatgggtttcatccaactgtaagtgaacagcagtgtacggaacaagaagatctcaatatttttcttagcaacattgcagttaattttacaatagaaaaatctgtaaaacagattacttgacaaagctgttgttttctcttttttatgtcctcgttgtcaccacctgctcttcaatacatagaactgacctctgacagaattactgtagatctttggtaaaagatgtagggggtctatccagttgttcatttgaactttttttttta

SEQ ID NO: 123881 - DNA, 1143 bp, Homo sapiens
ctttcttgaaaataagagttaatctttactgggaaataaaagtatataaatataattactgagaaaaagaagtttagatataacatatgatagttctgatatatgccaacaatataccaagcatatagttaaaatataccaagaatatcagagaaagagattctgtaagtccggaatatgtcctgaacatctatctgtgcttattaatgaaacatcataggtaagtaatgtgaatatccagttgaaaaccactggcctggaagatactagattcaaattaagttgggaccaagtcaacatttaaaaacaaagctgaaattatgacccataatgctgtgttgtctaatatcgaacaaagtagcaccaggactctgataaatagcagtgtatcattgtcagtgagagcactgacaattttctgttaacttctatagcaagcagagtctgaaatatttacaacattttacctatacacatttaacctagagaaggctaagcatttcttctgacttgacaactcatcaataacaacatgacagataaacctaattattttctagcacttctttttttaaaaggtgaaagaacaaatctttgtgattgtttcggggaccaccatctgggaaatctcaaagacagttttaggtgcaaatgatatttatgatttgattttggtaaggtaaaatattaaaagttgccaggagatttgaaaacttcaattaagataggatcgtgggttaccaagaaataatagatgactttatatttaacccaagtgacaataaatattttgaaagtaaacataagtggtaacatgatcgtcaagaaactttcctgaaggagaaacttgttccttaaataatcaaggacataataagttggcagaaaccataggttttcatagtaaaacagagaatcttgctgtttgtgcagataatgtagaaaagtaaagaataacttttacagtctattaagagcaaaccagtaatctgataaacatttgacgttgaaacagagaaaacacgattttagttttgtatcagtataacatttgatactaaaggtctttttaaaaaccttatttaaaaccaccaaacttatccagtcttgaccatgacaaataaaattccctttccatgaacc

SEQ ID NO: 123882 - DNA, 1073 bp, Homo sapiens
agtatttaaatgaaaacatgaatattagagaaaaaagatgtaaaaaagatccaaatggaacttctgaaaatgaaaaatacgttacgtgaaatgatagatatgctgggtgggatatcaacagattagacactgcagaaaaacatcagtgaatttagggatatagcagtagaaactatgcaaaatgcaatgcagagagaacaaagactggaaaagtgtaccagaataccagtgacatgtggaatagtgtcaggcggttagcgtgtgtattgagttttaggagaaaagaaagaggagaaccgaaaaaatttttttaagaagtagtggttgtaaatgtttcaaatttgataaatgctgtcaaccatagattcaaaaagttcagtgagtttaaagtagggtcaacacagaagaaaccctgtcactggaagatcactgcttaaatctcttgttcctctatagtttttacctttgttgcctgtcttaaaaatagttttgttcttgtagtggtttttttccttctacttttacatctctggtgttacattttggaaacattcttcctttctctcatttaccacagtttcttccatgtttgcttaacatctctttctttctatttttgagacggagtctctctcgcccaggctggagtgcagtggcgcgagctcagctcactgcaacctccgcctcccagttcaagcaattctcctgcgtcagtctcccgagtagctggaattacaggcgtgtgctaccacacccagctaatttttgtatttttctagtagagacagggtttcaccatgttggcttggccggtcttgaactcctgacctcaagtgatccacccgcattggccttccttagtgttgggattacaggcgtgagctgtggaccacgcccagcctttctttcagaaggcttttttattgtgtttagtcgtaaccttgattatgaaccatttaaggagttttctaattattcttattaactgttactagataaaatgttaatttatgttaaccatttaaaaaaaatttttttaaactcaaatttgtccgaataattaaccatttttg

SEQ ID NO: 123883 - DNA, 1042 bp, Homo sapiens
acgtagtctgttcctgctcctgcctgctgcttctgggactcggattcactccgcctgccccaccctgggttgtcatgggctcctttcactctcagatgagccctgctctctcctgtctcagatcctctgcacatgctgtaccttctgtcttagcagccccccactttctgcctcctttttctgtgcaatttcttcggaacttttatgtgtcagttgaaatgctccttcttcagagaagccttctttgttaccatcttcctagttctccaggttaggtcctatctgctggtgggctttgtcccagcactttgttccctgtaatcttcctccatagcataattcataagtatacttgaaatacacttgtgtatgtaattctgtgctaactctccagttctctgtagattgaaagctccatgagggcaggaacagtaatgtgttttttcctctactcctagcacacctcttgtctggtggggtcattgttgaatgaaataaagacatgactgtgatttcccttgaggtgctaatagtgtaatttgacacacaatgtggtatgaaacagataatgtgtattttcacctgtaagtaaatcaatcaaattattagaataaagacccaagaaaacaaaaaaaaacaaaagtgaataaaagaaaatggtgtacatttaacacatttatatcttctttgtctcatcccttatagaatcctgttttcaatgaaaaagaaaaaagaagagttgttgttaattcaaaattaccgttccctagtttgaaaggctgttttctatttcaacacacgcacaccggcacacacccaggctcatgtgaaaggaacggagactcaagcctgatctgatgaggctgtgttagaagtgctgcacattgaccttcctggaacgcagagtgtaatccctgcatttggtacggaagataaatagctatctgaaggagacgatttcagttagaccttttatttgacatatacagataaataaaccaggcagaatccccactttttctctcatttaacttgtagccaa

SEQ ID NO: 123884 - DNA, 1008 bp, Homo sapiens
ttctataaggttctggtaaagatgaaatgagactgtatgatatcgagcatagtacttaccaagcatggtaagtactccgtgcctaacggtagcaattatactgttacagtgaaaattcttcataacttaatgggtaacaaattacagagctgattgaaaacataaacaagtataaatgttttattcccatttaacataattttattgttttttgaccattgtcttaattttgagtcttcgttcatctgtctttttccagctttatatgaaaaggtagcactggagtttaactagtacagaatttttcaatcttccaccatctgtgtaacaccttataatttttgctgtatccttgtaccacctatcctattattttcctttttttaaaatttattctctttttaggcagtctattttagaaggaaactttatcatgatagtaaacatggaaaacctaaataattttgccataaatagaaaataattgtaacaataaatgactgtaagcacattatacatgtgcctccagaagtcttttaaataccacattatgaaaaacattgcatgtggtcttccatcatgctaacctaaagccgttaatcagtatgtttaggttatgcttcttcactcagcctcctggaggaggaatgctaacttctccatgaggatggaagagcagaatttgccgttaaaataggaagaaaagacatgatttatggcagttgatcagactctgtttatggcactggtgcatggatcagatgctgctatgatgattgttacaataaatatttccaagccctgtttcagactctctggtcagaatttcttgtggaagatactgaaatctgtatttttaacaggaaggtcaaaaattctgatgcacataccagttttggcagtcactgttttaaatggcattttttcagcctatcattttgaagttgtttacaaccacaattaccagtgtatctgtaaagaattgcttaattttataattttacattt

SEQ ID NO: 123885 - DNA, 1028 bp, Homo sapiens
attttctcatccaggtgtccgtcagatctcccatgctgtttcttcctccttaaattgaaggtgattacttacggaaatttggttaaatgatttgataactatgctttgtagcatagagagaaataaacagctagtttaggtaattagttgtgaatataagagaatacagcaaatactggaaaaatggataattttttttaaaatatagaaaatgtcatatatattttttgattcctttaatttttaggatatggtatgcttttttttcttccattagcagtctgaaaatataaatatgtgtgaataccagttttattgaaaatattgagagtagcttcatattttagagttatataatgttctgtttatttttttttttaatagaaaaaatgaatgcaccaaatcagcctccacataaagacactggaaaaacagtggagaatgtggaagaatacagctataagcaggagaaaaagatccgagcagctcttagaacaacagagcgtgatcgtaaaaaaaatgtacagtgctcattcatgttagactcagtgggtggatctttgccaaaaaaatcaattccagatgtggatctcaataagccttacctcagccttggctgtagcaatgctaagcttccagtatctgtgcccatgcctatagccagacctgcacgccagacttctaggactgactgtccagcagatcgtttaaagttttttgaaactttacgacttttgctaaagcttacctcagtctcaaagaaaaaagacagggagcaaagaggacaagaaaatacgtctggtttctggcttaaccgatctaacgaactgatctggttagagctacaagcctggcatgcaggacggacaattaacgaccaggacttctttttatatacagcccgtcaagccatcccagatattattaatgaaatccttactttcaaagtcgactatgggagcttcgcctttgttagagatagagctggttttaatggtacttcagtagaagggcagtgcaaagccact

SEQ ID NO: 123886 - DNA, 1031 bp, Homo sapiens
catgagcatctccaacgccagagggtctcatttgagcaggtaaaacggataatggagctgctagagtacatagaagcactttatccatcattgcaggctcttcagaaggactatgaaaaatatgctgcaaaagacttccaggacagggtgcaggcactctgtttgtggttaaacatcacaaaagacttaaatcagaaattaaggattatgggcactgttttgggcatcaagaatttatcagacattggctggccagtgtttgaaatcccttcccctcgaccatccaaaggtaatgagccggagtatgagggtgatgacacagaaggagaattaaaggagttggaaagtagtacggatgagagtgaagaagaacaaatctctgatcctagggtaccggaaatcagacagcccatagataacagcttcgacatccagtcgcgggactgcatatccaagaagcttgagaggctcgaatctgaggatgattctcttggctggggagcaccagactggagcacagaagcaggctttagtagacattgtctgacttctatttatagaccatttgtagacaaagcactgaagcagatggggttaagaaagttaattttaagacttcacaagctaatggatggttccttgcaaagggcacgtatagcattggtaaagaacgatcgtccagtggaggtaggtttccagtaggtattaatacaatgatatccttagttccatttatttattgcaaattataatgttggtgttatgtactttcatattctaatatttttgaacacaaatggcagttataaattgcacatttaagcatttctgtaaagtactatgattaaatagatctatgaaaactgcatgaaatttagtgaattaagtgcagggtggtatgtggagggaataagttcaaccacgtaaatacaggatggcaaaggacaggctgggtataaacaaaaatggaaggaagaaagccatagtcatggatgaccacaagctgcatgtgagtcaggaaaaaagtccac

SEQ ID NO: 123887 - DNA, 1025 bp, Homo sapiens
tccagatcccctactttatggggaaaggtgtaaggaatttgagaggaacagctaaaagaacgggggtgggggcggacaacgcaacactagggttcccgggaagcatcacaaaacggataactgagtcatgccaaccaggttgatcttaacgattttttaatttttctgtcagcatcgttcattacagctcaggggaacaaatggacagaagaattagtggaactgattagtttttatgttttcataaatggctacttaggatgagctgttatttgattttgtaatgttttctctaatttcagtaattctctggtttttttcccagtctagagatagttgtcgatagtactgtatataacctgaaaaataaagtgttctgatcattttaagtgtgaggcaaaaatgttaaagatgaacctgattctttttctaatatacttctttgatcaaagtattgcaatttggttttggttctcattatggtttccagcattcttagaactttttggatctatgttgaaaatgttgaagttattaaattcattaaattattaaatattcttttccctgtaaaattagaatttttgtagatttgttagcacattgtagagaataagagtttataaccacaaccgtagaacgttgtctcgtatgctcttttaatctgtgcctgttgaatttttgttatagttttctgaatttccagatcccatgtggggttcagattatgtgcagttgtcaaggacaccaccttcatctgaggagaaatgcagtgctgtgtcgtgggaggagctgaaggccatggatttaccttcattcgaacctgccttcctagttctctgccgagtccttctgaatgtcatacatgagtgtctgaagttaagattggagcagagacctgctggagaaccatctctcttgagtattaagcaggtttgcttcaaagactctttaaaatatttagcaattattatattatcctacaggcttatcatttttattttgagagttcctttttttttctt

SEQ ID NO: 123888 - DNA, 1054 bp, Homo sapiens
ttctcactctcacaccatttactcactgattctctcctatgtgtttgtatgtttagttacatgaaaattgcagttatccatatctcatatgtgcaccctcttccaagttttgagtggtgtttctcagtcaggggtgattttttccccttggggacattgggcagtatctggagacacttgatggtcatgactgggaagatgctcctggcagcgagtgggcggggggagggaggctgccgcacattcacggcacacagaacagccccacaacagaattatccactcagatgtcagctttgaacttgagaacttctgccctagaataaactctttttccccctaataaaaggaaggagattgtaagtccttcaagagtagaatatacccgcgtatatcagtcttggtggggacatgcagaacttaagaagtattttaagcatttttactgccactgtttggggaatgtagtgctcatcacagactctctttatgaattgggtgtatatagggtgaaggaatagaagtgtaaacaagggggaatcatgaagagagcagtgcagagtcgcagggctggtctgtcagttctaggaaatgaacatcttgcatgcaagcttgggatcgctgggcacaggccgcgtctccgtggtctttgctggtggccactgcacctcggacttgctttggctcagatgaggatcagtgtccttctgtgctttagattctgctgctgtcttttggcaccaccttctcccacttgtctcatcaggcattttattttttctgtatcccttttataaagtctcattcataagagcatgcctattctagtcctagaccccattgcattttgtctcttgtattagagcagcagcttctgctgcctaccctgtctcctggtcccgtcagcgtgacttctgcaggactctagctttagctttgttcttgactctgccgatttctcctatgttcagtctcggaatctcgtatccacttctctgttctaatggccagttctttttacatcctctctctttatttggagtggacagtgaac

SEQ ID NO: 123889 - DNA, 1082 bp, Homo sapiens
ccatgccttcaatgggtctgaaactgtgccttcggggttggtctttctcctcctccgacaagcctagcacttacctcctgctgcatctgatattagttctgtgcttacctgctctctgttactagatcctaagtttttttccttgaacatcctaagtcagtaaactgtggttgaattttacttcactcatttagattcattttatatactggggtgtacattttaacactagtatttagaattgtgtactcaatgagaaggatcagccagatagagtgtttcatgtttattgactatacaaagctaattgtgggggaaatttgtaaaaacagttgaatttaaggaattccctttccctcttatcctatcatttagtttgaggccattttatggaaaatttccatttagatggaaataacatttgtgtactaattccatagctactatgaatacagtttaagattttaaggtttatattgagatactgtggtagtagaacaaaggtaggtacatgtcataatccagattcctatttttccacgtccagggttttatattaaaagaagagaaatttttcatttttgatttttaaaccattagagcagtagctgagcctttcaagtttctcagtcaagaattaggctatgagtagggacagttttcttctctgttttatttttatttttgttcccttagtgacattgcaggaatgctgctgaaatctacaggaagttttttagaatttggcttacaggagagctgtgctgaattttggactagtgcggatgacagcagtgcttccgacgaaatcaggttggagttgtgcttcctttccccttccacttcttatctcgtagtttccttcctcatggtgagatcctagaaggagccttgttcaaaccaaattgtgttggcctggaagaatttgggcagtagatgtaaagggatttatttataactgccttgtcttttcatgtgatttcttagttatggttttatgtgaaattttctttgaaggggaacttagaatttatttagtgtgataaaaatagtgccaactggctgggcgcggtggctcacgc

SEQ ID NO: 123890 - DNA, 1198 bp, Homo sapiens
gtactcaggtttactggttatttaattttaattttttgtagtgaaggctatcccctccctacctaacagggacctcgtgacagtttctataactcattagttataaactatgagaagctttctcatttatctgtgttcagcttaggaacagtcatggtgagtgttcatatgcaccttgagctcagcctcaccagaactgagtatacactggcctgctgtatccctcaccccaacaactctgcttttatattccgtctcagtgaatggttccgcgttcactcacatgtttaaaccagaagtgtgacagctaatataaattcagcctcccatctttccagttaataccttgccctggaaagccagaagcatttccagtaaatgatcctttccctgcatccccagagcagctgctgtagtcagcactttaccatccctctcctgaactattgcagtttctgactttgagtttccctgcttcaaacctcaccttctgtctctccaattctgtgtttgtttttgtgcttctagaatgatcattataatacatctgattgcatcacagatctacttaaaatactgcaaagattcttcatctcttaagaacaaaagtaataaagtcttgatttcttaatgttttatataaggcccctcatcttatttctgtcttattcctacattttccttcttcatatgctgctccaatacacacacacatgcacacatacacacacacactcacacacactctgcactggcagtactgaactacttgaagttctaggatatctcaaagatgtcatgcctgcagtcccaaagggttcttctccgtggtgctgaatatcccagctgtcaatgcccactgaagcgtgttgctgtgtaggagaagctttgcttaaaaatgactttctgattagatggttgttggcctggtatccctgagattggcattgtttttggactggtgttgaactagaataacaactagtaactgggttggtttttatgtcctgtgcttgattttcctcccaggtggataatcttttactagttgtcatgcagtctgcgcatctcacaattcagagaaaagctttccagcagtccattgagggacttatgactctgtgccaggagcagacatccagtcagccggtcatcgccaaagctttgcagcagctgaaggtattacactgtcctctac

SEQ ID NO: 123891 - DNA, 1079 bp, Homo sapiens
ttaagcaatttctccaagttagagaaaacacatttgctgcatctgagattcaaagtaggaactttgtgttacaaaactcataaatacttgttgaattacaaataaataattgttgaattacagatggcacctatcatgtctaaaatcctcttccatgcttcccattggtttcaaaacaaaattaaattttaaaaaattattctcctttccaaaaggtcacgctgtaaacttactgaacccaagcaaaaaaaagtgtcttgtcctaaatagtaattataattatgttacttttcagtattgtacagtctaaaactgctacagcgttttcttggttgttatgtgattactgaactttttcgtgtaccaggtgggcgactcaaggatttgattttctacaagcaattgaacctgcctttatttcagctttaccagaagatgacttcttggtatggattattctaaagtttttttcattataaaataagccagtcactccttattttctggttgtatatgttttatatgtaatagtggtttttttcatgagatattaatctcagcatatcatgtaatgataatgctgagaaattaaagtactcctcatagcagagtaagattttttttctttttgtaacattagtgttcaactaagtcaatgtctggtttgtaaaccctggcccttctaaaatatttgtgagatttatatttttactgccatcatagctgctgctttggggcagaacaaggattagctcttttacctcagtgtgcatcattttgagagcatcatgctcgtgttaaatattatcactgttagtctgataagtgtcatcagattagcatgatattgctcaaagtgtgaattcatttattttattctcccagtagtagagacgattacatgaaaagttctttgcttgtacacgttattgtgttatgggaaattgacagctaatttgcttttacttataaaaatgaaatacactgtattattttaaattacatacaatttgtgtttatacctattttcttttaaactaactgaaaatattttgggtagcatgtttttaaaaatatac

SEQ ID NO: 123892 - DNA, 1027 bp, Homo sapiens
ttttcccccttaccatcttttctgatggggaggaaagactggaagagggcgttgtctgccaagcaacaggaactgcccctgctgcaggtggctgcagatcacttccctgtcccccgttcctcacctttgaggagagcagtgtccatttctccacagctttcccaagtacccatcttcccaccagctgtagtaaattctgatttggttttactgtttaaaaaatcaagttaagttatgctgctatatatattacttcaattacaatttttggttacagtttatgtacaattttacagtaacaatgaatgattaacacttttatagtatatgttgaaatgttgaaaacaaaatatatgtcaaaaaaagctgtgtcttatgccgttcttgagatagtttgtaaataaaacaaaactgtatttgtaagtaataaacacccaagaaagaaacttagaaattttatgcaatttaaattacacaaaatataattcataaatggtaaatttattgaacactaactgtatttcatatagggtacttgctggctgcagaaaattcagtagaatgggttttaattgttggttttttaatcttcagtttatacctctttttctcccaaggttgtcgtgaaaatgaaagttaacatttgtaagactatttgagcattttatataaagcatgctattgtcttatcaggttattgcttaagctgtgaataattttgattttctgatatcctaaaacacttctctaagaacacatgatcgataattcagtaagaattactttaaaatattttattagataaggaatcattttcattgtggaaaaatcacaacatagaaaaagtatctagaaaaatatggaagatgttcatttagaaaatttatcaatgtagaaaaagattacaaaagacaaaataaaaatgactcatacttcctgaatccaaaggtagtcccgggtaacatctgagtcgctcatctttcaatatgcctgccactccaaactgcagtgggacagttaattaata

SEQ ID NO: 123893 - DNA, 1046 bp, Homo sapiens
ttgttgccatttttgctggcagccattcatcggaacagcccccgtcctatgaaggtacctcgatgccatagtgaccctcctaacccacacctcattatccccactccagagggattcaggtatttggtgcttatctagtcatttgctttacagagtgccctccgatatgcatgctcatacttttgaaactactagatgcttgctctgagagctaaataccttttctgcattgttcgtacgtaaaagctcttacttgcattatcttgaaacctttagtcgcaaaagaaaaagacatgcaaatttaaaacagacctgtgcctttcaagataacttcgtttctcagcttatttataacctcaagctactacatgctttctggctgtggagtcattttttcctttcctgcctttgaaaaataaccttcagaaaacaaatttgaatatggatagtgtagtcaacatttgaaaacatactaaatatcactaaaagtggagaaaaactggaatgagctttccagattcaatttttatctgcatatgtaattacaaagcaacttaaacactaagtgaattcagaaactatagtacattcacgataactgccttgaatgtggtggcatttctgcatcttgaggtagtgagcaccttctctcgcctgtataatcagtttttaaaagtttaattttatttgacaatatttgctagataaggaccacagttttttgttttttttttaaagctttgaggggaccggggtgcggtgactcacgcctgtaattccagcactttaggaggacgaggcgggaggatcacttgagcccaggagaacagcctgggcaacgtagcaaaacatcatctctacaaaaaatacaacaaagataatagctgggtatggtggccgtgcctgtagtcccagctactcaggaggctgaggcaaggaggatcacttgagcccaggaggtcaaggctgcagtgagctatgattgcgccactgcactccagcctggacaacagggtgcgatgctgtctcaaaaaaaagaaaagctt

SEQ ID NO: 123894 - DNA, 1036 bp, Homo sapiens
ctagatttgagggcttagggaaataccagaaaaaaatgcatattttataatttgtaaatgtctgtgcaatagatcatgttgccttcaacctatcaatgtataataagagcataaatgctaccatacttcattataccattcacttaaaaatatatactaaatgactttaataaactaatgccatatttatttgaggttctttgattattcgaattacaattttaacacattccctatttagttttaatttttactctttatgggttcattctggttgctgaacatttcactttattctggaaaagcacctcattaactttgttctttaatatattaagcttcctgctcttttgcacttttgcttggctactgcttgagaaacctttaggtattcccttccattttcttactgagagatttggaatcttttggaccatgaaatgattttagtactttaaatgtaattaagtacataaatataatttgatggtaactttaaagatcagcaagatttggttaataacagttttattcaccctgggcttaagttatggagcttttcacatgtcagtaacatttcaatagtgttgtgtttttatttctgttgttaatataagacaaggttttatgcaggcaggtgctctcaggctcgggtgttggctatggagagatgaaaatggagccctccttccagactctagagctctaacagactccagaggacggtctccacagcagcgctgttcacttagggggctgattctggtgggtctgtcctgtgcgttttccgctgcccactagatgccagtagcaccctcccaaaagtgtctaatacattgctggaggcagagttgttcctggcaggcagagttgcccccagttgagaattattgctctagaaaaatctcgcagatctttcattttaagttctattgaattgatagctcaattattaaaaatattaaaacaggggttccagcgttcctgaaaatgatcgattggcttccatagctgctgaattgcagtttaggtccct

SEQ ID NO: 123895 - DNA, 1256 bp, Homo sapiens
ctcagcctcccaagtagctgggactacaggcacacaccaccacacctggctaacttttgtatttttttgtagagatggggttttgccattttgcccagtctggtcttgaactcctaggctcaagtgatctgcccacctcacctcccaaagtgctgggattacaagaatgagtcactgctccaggcctcgtgaattaaatttatgtaggacagtaacatgatcacattttatgttttaataatatggcaaacaagagtgtggaatggagagaggagaaactagagacatgtatattactgcaagattttagccaacgttcttgggaaaggaaatcatttttgtgtgactagcttatattttatgtgtgtactgtataaggggtggcatatgctggaatgagtagcgtttgaagaactttaattcacctgctgtttatctgaatagataataagctttgctgtaatggagtgctaatatatattgctctatttttattggtttgtcttttggaaactgacttgataacagtgattgggactaatgaggttttggttctctctgcagatactgcttctaaactaggacccatagaagctatccagaagtcagtccgattgtttgaagaaaagaggtaccgagaaatgaggagaaagaatatcattggtcaagtttgtgatacgcctaagtcctatgataatgttatgcacgttggcttgaggaaggtgaccttcaaatggcaaagaggaaacaaaattggtaaggaaattaaggagcatgatgtcaagatagtccctgttagaagtagcaatagttatacttctttaggttgaatcctatagagttggcccttttttcttgtagacatagcaagtatgcattgttatctttttgcaaagtggtctggattttttttggttgtttaatttgtaaaatgtattctaagagcaatacaaaatgagattttagaatgagaaagagatttctaaatgattcattgcattggattcttttgcttaataaccctggaatttgccagtggagaggtaccaaaatttgacccatttgttctagtttctctctctctctctacacacgcgcgcgcacacacacacacacacacacacacacacgcagaacgtgatttgaagagagactggatacaaatgagggcaagacagtcttcttttctaaaacattgcctcattaattaatttccaggtggaattgcttcatgtaaaatagtcgtaaattatgtg

SEQ ID NO: 123896 - DNA, 1877 bp, Homo sapiens
gattaattattgttatcagtcttgtccaggcacatatcctcttgctttaatgtcccagaaggtatgttaggggaatgtttgctcccacacactcctggacatgtgccagtgaggaagacaatggtcaggcttagtcctggctgttttctgctgctcccagccccagccaagatctccttgaggggtgtgagggctcagaggtgtgcaccaaggctgcttttattggtcattttcatgcttctcctggaatttaccaaagtcggttctgctctatttaaagatacttgtaggtaagacatattaaagagattgcctaaaactttagttatcagggaacatttagaaaaattttggatcttgcaatagtaaactgcagtaaacataattatagatatataaatatacgtccaaaataattggacagtattattacaagtttaaggaatgtaagacagccccctgcagtggctggaagtgcagcttgtttgcattgttcacaggagaaggccagtatgggaaggtgtacacctgcatcagcgtcgacaccggggagctgatggccatgaaagaggtgagtcacctggctccgtggggcctttgggcctggcggctctgggtgatagaaattccgtatagacgctggtcgtgattcagttctctgtgcgtagagctgtcttcagcaccagcactgcgacagtcaggaccaaccaggcagatgcactgagataacacacacagacagtgaaggggcttacgattccagagaggataataagtcacagacagttctaacagcacaggtgtgagaagggcctatgagggtggcagagctgagtctgatgaaggcttagaggagaggattaacagtagtgtcttatggggacacattgggggagaagataacatttatgataagcttcagaaacaagtggcattgaaaccgctggaggtaggatggggaaagggccagggaacctgaagtagaaacaggactcactgctgtctgtggagacatccggtttgacgtggaaggaggagaggagtggagaggggaggctccagcgtcttgcacttgccgtggagccgcgtcctcctccacatggcgctcctcactccctctcggagcagggcctcttcctcctctgtgcccgggacctacccgcacttctatgacttcactctagcttggctaaaaacttcctttttacttaattttttgttgtttttaattgacaaatcatgattacatatatttatggggtgcaaaatgatgtttcagtgtatgtgtataatgtagagtgattaaatcaagccagttaacatttttgtcacctcactttacagattcgatttcaacctaatgaccataagactatcaaggaaactgcagacgaattgaaaatattcgaaggcatcaaacaccccaatctggttcggtattttggtgtggagctccatagagtaagccgaccctaatgccactctttgtgtgaggaatcagtgagggcacagaatggagtcctgttctacatcacaggtcttctcatttcagagcacagtaactttgcctaattctcaggaaatctccatgagttacatcatttctgccttctctctgaaactagaggagttcctcctaaaatgtaagttgtagactgtagtcattaacccgacatcataaagcactgaaacccatcctgccattcagaagattcttctaaaacgccccttacaccacttcttgtgactttttttccgtttttttgctgaaccactgttgagtacactgttaagtaatactggtttttttcttgtatgtatttagggagccattgtgaaatgagagaaaattcaaacctcaaattgagtttcctcct

SEQ ID NO: 123897 - DNA, 1072 bp, Homo sapiens
ctgcccctcgtagtcaattgtggggagcatcaactctaggagcactgagttatgaggattcgctgttgacctcagctcatcagatggctgcttgtctaactccattggctctgtgttgttgcttttcgaaggaggtaccatagaacacaatgccagagatgtgtgacttagttggagcaataatatcttgcagcctagagcaaaaggccaagctgtcctgagagatgaacagtattcccaaattctaactagactacaagttaagcatatatgttgcttgtaggaatatttgaaaattgcagaacagttttcagtcacgtcatataaatgcaagggcctcagctgggactctgaagaactgcagtgcgtgtgcagctctcatctacatgtcgcttcctgtttcagacgctgctgattgtacacatctctcattctccagactgccaccacaacaagcacttgtgttttgtatgcagtttctttttaagtatctctgtgggttattaatgttagaatgtatgcatgtatttcagttcagaatttattggtcaaggctacctgcactggtgttaaaattttgttgctttttattaaaatttgtgaataaggcttacaaatcttcctatgattacactttgtaagtcaagtttcataagcctttcgattgtttagcttgtgaatgaagttcctggtcgtttagattaccatgtaaccttgcccacattgtgtttcagaggctgcgtaacaactacttcttttctttttaggtgccaatatcttccttacctcatctggattaatcaaactgggagattttggatgttcagtaaagctcaaaaacaatgcccagaccatgcctggtgaagtgaacagcaccctggggacagcaggtagggaccagcctggttgttctttgcactctgacttcatgcagcctgcttggggcctgcatgttcccttcacctttgtttgtcagtagagatgggagagcaggtaaaggttttcagtcgtgagaaggaccacttcctcacacacttgggctcccacgcaagagcagctgtcacattggtga

SEQ ID NO: 123898 - DNA, 1160 bp, Homo sapiens
gctctgtcgccaggcaggagtgcaagtggcatgatctcggctcactgcaacctccgcctcccgggttcaagcaattcttctgcctcagcctcccaagtagctgggattacaggcacctgccaccatgcctggctaagttttgtactttggtagagacagggtttcactgtgttggccaggctggtctcgaactcctgacctcatgatccgcctgcctcagcctcccgaagtgctgagtgacatttttaaagattgagaatactatcttttagagagtatataaagaaacacacatgttttggacagaaattccatgtggtagggctgctccggagacatttccaatctctatcaaaattttaaatgtgcatagcacttaaaccaagaagttttctgcttctgaaaatgtatcttatgatgataatattaatgagcagttatacaaatgtaaaaagacacgcatgaactgcacatggtagcttaccgtacacatacagtattatagcaaaaaagttagaaaccttcatttctaagttaaaagttagtgttaagttactagtaggaaatcagttaattataatgtagctatgccttgcagctgctgaaacagatcacatataagtgctcagtaaatattagctagcattatttctattagcattaaaatagaaaggcagttgtgatatctgtgttattccagtaaagccacacataaaagaacaggttctcatattgaagaatacatattggcaatgacgaaacaatagtttagaaattagaatgccatacacacttagttccttcccctgtgaatctcatttttcataggatcataatgaaataagctttgcactaatgcaatttttatttttcaataaggtagcatattaaccatccctataagagaattgggttttatagacttttttatgtcattttatatattttttagttgcatgatgatggcttctagatactgttggactaaatagtgcaccccaaatggagtaggcaaactatgctggccacctgttttataaataaagttttgttggaacagtcatattcatttatgtgttgtccatagctgctaccatgctgccatgagattagtgaatagttgtgatagagatcatatggcctgtcaacctaaaatattg

SEQ ID NO: 123899 - DNA, 1019 bp, Homo sapiens
gaacagcggcatttaagagttagagtgccgtggctgacccctgattggatgtgaaaggtgagtgaggggaggagtctagagtggctcccaggtttctggtttgtgtcatcaggtcacagactctatttgccagggtagggaaagaagcagctgggtgaggggtgggtcgggaggtggtgggtcctctttggtggatgaagcttggggtacatttggagcatctgcttggagatttcacatgggcatttggatacctggggctggcactcaagagggattttgggtagggcacaggtgtgggagacagaagtattgctgggagggtccacagaggacaaggggatgagaacagagccctggagaaaagagccttgcaagggccctgcaggagagagtccctgggaaaggaaaggaaggggcagaagagtggggtgatgctcttattggtaagtgggagtaaggggcaagcagcaggatcagctatggagacattagggatttgtaattaaataacaatttatgtcttagttatgaagtgcataacaatttatattgacctgagagtgcatataggcgttttagaaaatgctttcattagtcagttcccaggcttaactttagagcagtaacttacctctgccattgttcattacatttcttaagccttgccctctgtgcccagtacagtgctgggagcatcaggatgagtggatggggccttccccgtaagactcatactgcgcgtatgcacaagcacacacctggctctgcaagagctcagctctctcctgcttcctcacaggtttgcacagatgaagaatgaagcctagtagaatatggacttggaaaattctcttaatcactactgtatgtaatatttacataaagactgtgctgagaagcagtataagcctttttaaccttccaagactgaagactgcacaggtgacaagcgtcacttctcctgctgctcctgtttgtctgatgtggcaaaaggccctctggagggctggtggcca

SEQ ID NO: 123900 - DNA, 1133 bp, Homo sapiens
ctggcgcttgtgatttgcggccacgggccttctcacttgctctgtgggaaaacggccctgtagtctgtttgggctactcctaactctgctctccttgtctctgcagcctccgtgggagttcgatggatgattggtgtgacggaaattgacaagggctctgcctacggcaactctgacagcaagcagaaactgaatgactgactcagggaggtgtcaccatccgaagggaaccttggggaactggtggcctctgcatatcctccttagtgggacacggtgacaaaggctgggtgagcccctgctgggcacggcggaagtcacgacctctccagccagggagtctggtctcaaggccggatggggaggaagatgttttgtaatctttttttccccatgtgctttagtgggctttggttttctttttgtgcgagtgtgtgtgagaatggctgtgtggtgagtgtgaactttgttctgtgatcatagaaagggtattttaggctgcaggggagggcagggctggggaccgaaggggacaagttcccctttcatcctttggtgctgagttttctgtaacccttggttgccagagataaagtgaaaagtgctttaggtgagatgactaaattatgcctccaagaaaaaaaaattaaagtgcttttctgggtcatctgtggtgtatgttgacatggaccgctgcccctccatcctgcccttgcccgtggctttggtgtttcagatcctactcacgggaggcagctgccgcggaggtgtgggcagctgagaggggtgggcaggccagcacagctcctggcaggagacacaggtccaggagcccgtgagcatttgtgagagcagagatggcaagcacgtgcgtggagaccaacgaagcgtgtccctggcacacagcaagggagagtttcgctcggtctctgcagtgcagtctcctggcgtaagtcttgaagatggacccaactccctgaagaaatggatcttgaaattgaacacaaacatcatgaacgtacagcctgggcattctgcagtgatttgtgagatgagcttgcatcgactgttcctctcagcagtgacagccaaagtcacccctgataaaatgcagtttcactttataaaatgcc

SEQ ID NO: 123901 - DNA, 1002 bp, Homo sapiens
gcaccaaaggatgaaaggggaacttgtccccttcggtccccagccctgccctcccctgcagcctaaaataccctttctatgatcacagaacaaagttcacactcaccacacagccattctcacacacactcgcacaaaaagaaaaccaaagcccactaaagcacatggggaaaaaaagattacaaaacatcttcctccccatccggccttgagaccagactccctggctggagaggtcgtgacttccgccgtgcccagcaggggctcacccagcctttgtcaccgtgtcccactaaggaggatatgcagaggccaccagttccccaaggttcccttcggatggtgacacctccctgagtcagtcattcagtttctgcttgctgtcagagttgccgtaggcagagcccttgtcaatttccgtcacaccaatcatccatcgaactcccacggaggctgcagagacaaggagagcagagttaggagtagcccaaacagactacagggccgttttcccacagagcaagtgagaaggcccgtggccgcaaatcacaagcgccagctcagagctggctggcgggtttgaggtgccatcatcctgccggctttacaatcatccttgagtgtggacatccatgtgacattaagacaaagcaaggctgctctggtgggggttttcctccttggaccctgaaggtgaatgatttggcaagccatgcacagccgttcgcagggactcagagaaatccctggcttcctctgctgacccccaggtaaagaggattcttttgtgaataagggacaggaagttaacagggcatgttcagcgaagttttataaagaacagaccaggagcctggaagacgcaagagctcgagtatcgagtgcccaacacgtttcagcactgcttttggtgcaagcgttagagcagtgagaaaatccccgccctctcctctgacggcaggatttgcctacaccagagaatgggcaggaccctcgtgggag

SEQ ID NO: 123902 - DNA, 1034 bp, Homo sapiens
cctcaaggctaaccaagaggccagaggaatcatttgatgggagataatctgccattaccagtaagttggttacttggctaagaagaaattactaggttattgtctctgatgcatcgattctgtgtatattggattgtctcgtgtggaaactgaggcagtgttgtcctctttggaagaggcaaatatcaggttttgggggcctttttgtgaggtgggagggaagacggaatgaggcaggtgtcccctgttctcacagcatctgtctgtgccattgaattggcccctgggttgttccttcgtgggtcataattgcatttttgcctgtttctccagtgtggatgtggaacgccccttctttctatcacttgcattactctcttcagttccacattatttaggtgacccagataaaaacaaaaaacggcagcaccgttactggaaactgtatgttgtaggggggcatcacctcctctctgctagctgctctctgcctttgcaggaggatcccactggaagacatccctgaagacgatgacgagtgctcggcctggctgcacaagctctaccaggagaaggtcagtgcactgggtgccaggggtcccttcacgttgcagctgtgggtgcgccgtgtggctgtgttgtgtggtagcaggcctttctccggtgggcgagatctcacagagccagttattagtgagtctggagctgaccctctcttggcaatgaagaacatgacaaaatattttttaaggagggttcacacacacacaatgaagctattctctaggtgtagtggaccaagggagaagtaatggccccaatcgcccctgctcgtattttcctgcctctggtcctaaggcaggatgtgcttgtggggtggatgttctccgcagcaatggacatggtcttgattgcttctggatcaacaatttggttgtcaatctgatctcaaagcatctccagaataagcaggataaagccctacaaggatccaccttggtcttggctgggttcgaacctgctgtggtgccccc

SEQ ID NO: 123903 - DNA, 1096 bp, Homo sapiens
cacctaggaatgctacattttctagcgtttgacattttcagcgatcaagaattactatattttgtaatatcacaaaactcagtgagatctgcagaaaagaggtgcacaaattagtgtcacacagctgcacggtgggcttagcgagtatgtgacggtgataacctagaaaccgtttggatggtggtgggagcatcgtcaggaccctgaatacctgtgactgctcgctgctgccttcttgactcctgccgtctgcgctgagaaccagggtgcccctgccccctgctcccacactggcagggcaagcacaacctggacctctagctgaaaggtggggagggcaccagggtccatggcctcgacagcatgtgttctgggactgtcccgaggcgtctggtgtgaacgtcccctcctctttttctacttcagtctccaacagccccggcaggtggctctgacgtctccttcatgggcacctgggctccttcttctgtttcagggctccaaggtcctggccaagaaagagctggcctatgtcccaattatcggctggatgtggtacttcaccgagatggtcttctgttcgcgcaagtgggagcaggatcgcaagacggttgccaccagtttgcagcacctccgggactaccccgagaagtattttgtatgtaggcaccagagcagctgtgtcccaagggctcctgcaggactgtgaccgtgggacccccatgtgacttccacaggacacgtgactgtgtggtcctgtgcgactccagggctgtgtgtgaccatagggctgtgtataacctcagggatgtatgtgaccatggggccgtgtgtgaccgtggggccacgtatgactgtggggccgtgtatgaccatggggccgtgtgtgaccccagggctgtgtgtgaccccagggctgtgtgtgaccatggggccgtgtgtgatcatgtggccatatgtgaccctggggctatgtgtgaccccagggctgtgtgtgaccccagggctatgtgtgacctcagggctgtatgtaaccatggggccctgtgtgatcgtgtggccatatgtgcccctggggctgtgtgtgaccccaggg

SEQ ID NO: 123904 - DNA, 1050 bp, Homo sapiens
tttgatggagtttataagtatcccaattagtcattttccaggatattaagaattctatacctcatctcacgctgcctttcagagctctgtaaacacaagggcatgaattcttgacggattctggctttctgatttattttcccccaagatacttaatcaaggagtaagtcatttaccttctccaagtatccttctcttcttccctggagaatgttgtgaagtctttctcgtgtttccttccgcttctgaaccctttcaaggaccaaggtctgtgctgcaacgatccagaactttgcccgtagaagttgctttctcccctagctgggagggcagagccctgctctcagcagggctcccaggacaaggctgcatgtagtaaacatctgtctgttgtggtttgttccagagctggtgatgctgctggagtggtggtcgggcacggaatgcaccatcttcacggacccgcgcgcctacctcaagtatgggaaggaaaatgccatcgtggttctcaaccacaagtttgaaattgactttctgtgtggctggagcctgtccgaacgctttgggctgttaggggtaagtcagaagtgcattcccccctgcctcacacatttctctggttcagccccaccacttgtctttttgctcctggtcattcagaacttgcagaagaatcaacagagtttctacttgatgaaatggtcctaataaactgctttttattcttgctgggagtcagtcttaacagcttcttatgggcaatcataagaggtactcaacaattgctacctgccggccattttacatatgattcatttatttaatccttacagcaacatgaatagatgatgtgccacactccattttttaaaaactaagttatatagagcttaatattcggctcagagtcacacagctgtaattagatttggatttcactcccatccatatttcttaattccatgctctactgcctccttggctaacaggcagacatcacctctgcattttgatcgttgaaggcttaagaactttgagtccataagtgag

SEQ ID NO: 123905 - DNA, 1033 bp, Homo sapiens
gtgtacaatacatgtgggttctctcttcaccccgattcctcaatgccttcctcctcttccctgctcctccatcctgttcgtgccccttccctggaccccacccatcacctgagctgtgacctcagggcaccctgctggtcttggcacactcattagacttcaccacaagagccagatggggaggaggcaggacagtccgcagatgggaaagcctcctaattcctggccttggtcttcccagggctgccagacaatccgggtttagcaacactgttgcatgcccactcaccagcctcatagcttgattagataaagctcacctggtagatgaaaccctggcaaaatgatttatcagggatgttttaaagatggggatataaaataggcacagatttattacttcaaaattactaagattctaagaaacacgtgttctgcacgtgcacgaggccagcaaagcaagaggactgagccctcagcatcagggtcagcagcagctggtacaggaattctgcccccagaatgggcatgaccttgggaaagccatctctcttccatttgccattggtgaaatgagatagcgatgccgatctcaccaggtggctctcgggattctagggaatgatgtttacggaagccccattcgacggccgctggctgctcaacccagaggtgccctgttcagttcctccccaagctgccctcccagaggcacggccgtgcttgttaccatggtgactgctgggttaacaaggactggaatcgccagatttaacaaataaaaattcagcacacccagctaaatttaaatttcatatacacatgattttttagtatgtgtcccagatattgcatgcctcataatgtcgtttagtattgcgtgggacatacttatgctaaaaaataaagtgtaatttatctgaaattcaaatgtaatggggtaccttgtattttacctggtcatcttaatagggacagaatattacgttgttggaaacactgggaagtttcacttgaaacaagtgatgtaagg

SEQ ID NO: 123906 - DNA, 1051 bp, Homo sapiens
gtctcgaactcttgacctcaagtgatccgcctgactcggcctcccaaaatgctgggattacaggcattgagtcaccacgcgtgaccctctccttgcttcttaacacattagattgaactgtgacttgtaactctagtctttgccctaactctgttgcttcagacctatttcagaccctggataggaccacagtcctacccctcactgacttaatcatccccaacccaggcactaggtgttatttgatgtgacttatctgttgggtttgccctgactgcctcttttttttccttttcaaacactttcatagtttccaggacaccttttctgcagatttccctccagcccctagcctctccagttcctggctttttcttaacattgctgttctttggtaaagtgtcaccactcagtgtctgatgccttaacttactaggtcccatttcttttctcctagaaagacagtgctcttaagatggcgaaccacaccattctagaaagaggtcagggttatatttctgtcttgggatggtgggtcattaagcctcattaagttatgcaaatcctaaagtcctggcaccttcaggggctctagaatatccagcacgtgaatcacagagccttgtgggtgtgagctgcctctgcacacggtggggagagcctgatcaatgtcaggaagctttgggaaaagataggatcggagcggaccttgagaacattcacattcaagacttgccctaatgccaacgctagacaatcagcctgcctgctggccctgacacctgccccagagagcagtgtagagccatgcctgtgtgacgagccccgagggtgtggcatgcctccctaaatgtctccaggttctctgcatgtgtagttttggatctgagagacagagggtggccttcttagagttctttcctcttcggagtagtcaaaggtgactgaggcatgacacagcctgatgcaaggtctctttctccttctgcagctttgatcacatgatgaagttctgcaacatttgcttttatactacaggcatcatgggctt

SEQ ID NO: 123907 - DNA, 1142 bp, Homo sapiens
tctgcattgtaacaagttgcaatgatgcaaatgcacattagagtttgagaagccctgctgaagaagacagaggctctgtattgcaggagagttcctgggacatcgcagatagagctcatggtggggaaatttggatgacagccttgaaaaccagaagtaactaattaaagaacagaaaaccatttctcctggtttttacaaatgactttcttacttctaggttctatttttaacctcaagtgctctttgaataaaaataagactgaaaaaaaaggtaaattggttcctgtaatttccttttcttctggtactttaacctctctcttgggactgtagagctcattaatccagtcccagagaaaattgtcatttttcattaatggcttcttaaccttcaccttatctgattaggtacagaattaagtctctcttgaacagcctccaatccccactcccctgccagctcattttctccagaaaggacctggaggatcaatattgcagaggaacctgagttgatcaatgggacaagatttcctttgcaacaccgcacggctcatgatgacttcctcggctgagctgtaatcgtggtggcaggctagagagcaagatgatgcatttgcaggaagctgtcgttctgcctgttgctctgatggaaaggatcacaggctggcccagctttgcagtgaccccaggctgaaatgtgttgttttagctccagccaaaatgcaaagtgtgattgggatctgccattctaaaatgaggcaatagagggtatctgtgtttatgagtttggatggatcagaaattgtggccaaatagaataaccttctcagagacaagagccatcctgcgggggcagtgtaacacatggaccgtatggcttcaggaacagatggagcctcatttgaattccaatatgtcacttgtttgtccccgattctttacaaagagcagaggagggacctatggtgtccctagtcaacatagtaaatatgattattgaagaaaagaagaggtgccaataattctttctagagtaatcctgagcaatcaaaaaatgagattacgctaccctgtggttatgcccaagcacacacactgtttttccccttgtccagaccaactatgattagatactg

SEQ ID NO: 123908 - DNA, 1013 bp, Homo sapiens
cctcatagaggagtggtaatgaagcccttttatccagctccatggctcatacagtgtcacagctgttggtgaaattgataggtgcccatggattaattcaagcccagtagagaagaaagcagccatcacctccaagcaagcctttgggattcctcattgtggctttctgctcagctcttctccagagggtgctggagtgggggaactcatgtcactcatcaaagttccacttcgatgaggaatgcctcattctagcaccaaagtgatgtctgcccacttatcaccaggtttcaagctgatttatgggcaacccaacttctttcatttggtttacacttttttttccttgaaagtcagcctttcctgttcgatgtgcgttttcttccccagtaattaacacaaggtcatgattgccgttttagggactctttctggtgtgggtttgcttgtgttccccaatggtagttctgattacattgtttcacctgattattaatgatttttttcctgttaggcagctgtgcatttcatcctggccttcggcttgaattgttacaaattatgaattgatagacttcaaatcaaattttattgtgccttatgtaaatacttgggaaataattttttatttaaataaatcagcaccaaatagttttcttttgaacacatagacttcttttgcatttcttttttctgaattgtttttctgttgctgtgaatcttgaagatctaagtgatgaatgatagttacctttttttaaccaagttgttcattgcaagtatttttttgctatcgttgttttaagtgaattcaaatttgacctaaggagacagtggttatcatatgcgttattgggttttgtcttaaactttgtgaacattatggaaaaaaaaaatgcttaaacctgcagatgttgggggtgggtgtgtgtgcgtgcatttgtatacataagtgtgtacatgagtttaattgagctgttaagaacaagaagccttcaaggtgggaacaaaag

SEQ ID NO: 123909 - DNA, 1007 bp, Homo sapiens
gttgggaaagaatgaggaaagaacgattgcccggaagcgtttcactgtcctgaggagagtgagcctgaagattgtagaaggcagttgcagaggttgtctgtcatcctggacaagagacgcacttgttgcagacgtttgcttgaggacagaagagactggggctgctgttgcctattctgtttcatggctttactctgagagccctgaaagcattgaccctttgcttcagtcatccattgagttattcccacccaaccccaacgtgggttcagaaccctttcagagacatctccaacttgtatttgtgtctaagagtgttagtctcctttgtcagactatgaagaagccttgtcaaggcaggagggaaaagtgctcttggcagcctcacaaatctggctttagctgaaaggtattttttgtttgttttctttaatcctcgtcaactggacatggtgcggttaagagaggcaagtatgtgtgagcctggacagctttccagctctaggggcagaggaggtttgatagcccttcatggcagggtgcatgcgaagagttttgcttgccggcatagataaacttgactatgtctgctctactcaatttgatgtatagtttgaaaggtaatgctgtattacgaataaaataatgggtatatctacctaaaaaggagaaattacaatgggttggtggctggtaggacttttagagtttgagctatcaacaggaaacttggatcttgtgtttttgtgttttctttttttttttttttatggtaagggaggttattctactgtgtggttcaagcagatatacccctcagccactgcaaggatatcagtgtttcaagcatgtgctaggcttcagaatataaagactagaatgttttaggttcaaaaagagcttgttatacatttaaaatatgggttttgcctgtaatgtgtgccagagagacagacctgagaaccacactcatgctgaaggaccaggatatctgaacctgattaccg

SEQ ID NO: 123910 - DNA, 1085 bp, Homo sapiens
atatagatagcttggcactgacatttgtgggaatatttgcaccatagaaatcggcagaactataaatcagggctttttttcctcccacctactgcctcccctgccacacaagagctggttgttaaccattttccagcacagcaccattggcaccgtcactgtggacgggggtagagagctacagtcatcttgtgcaggttgtatgtccaccccagggcatgtggttctcttgccagaagaacaaggcaccaactcatcagacacagacaccagccatcacagggcattcccggtgaatgcatacgtgttcaattggtctttgcaggcatcacatagaacatgctctacgctacaaggtgagttgggagatgaggaagagaccttgtccttcaacccagtcacagtctagtgatggtgagttctgcatgttatccaaacaagaacaaacccagagctggtgtgtgcagggccccgcgggagcagaggcaccagctgtgctgcctgtgagtcctgtcccagggcagtggcctgggcaggcggggtcaggggaggaggtttctggctggactccctgatccaattccagggctttgaggatttctgaatatgccatgcctctcccagccagtcctttcaccagggtaattatgatgttcataaatgagattgttcatgtacaatttctacaccagtagccaatttctttaaatggaaaggaacagattatatatacctatgtctccaactagagctgaacatgattagtgagagaaaatgcaggcataacgccaatgccttcatactggattaccatgcacctgatggactcccccagggacacacagggagaagcatgtcttttgggcttggatatcgcctgcaacgttgtgacaggctgttaacacaggtctccaccacagcctctcccaatgcgtcctccatctgacacaccataaggctttttaaagcacgctcaaacagtgagatgccctttcattcaacttggtagacatctattgagcaccttctgttaccatgtaccaggcattgatgggagcccagttctgacccaaggctaggttttc

SEQ ID NO: 123911 - DNA, 1184 bp, Homo sapiens
tagcaagccttgtgtattttgagtaataatccatttattttttaaatgtatctatctgcctgcctgtctgtctgtctgtctgtctgcctgcctgcctgcctgcctgcctgcctgccgcctgcctgcctgcctgcctgcctgcctgcctgcctgcctgcctatctatctatctatctatctatctatctatctatctatctatctatctctgtctatcttttttactgtgaatctgtgtccctggtacaagaaatgaccttacgttttaaatagggaatttagtcactctaaatttcaaacaggtggccctaaagaatcagcaagtttaggaatacacatgtgatactgaattgtatgaatggatgcttggcttaagtcaagttgtcttagctattcatatggtttataaataaattaattcgcaaagtgcccatttgtttttggaagcattaaatttcacttctgacttaagttacggcttttaaattaggttgtgagtttgactttggtgtcttgtaaggttataaggcgatcgtgtgtggtcttcatggtgcagtggatatttccaggaggtaaacaagacaagccattggggtatagaaaaaacaaacctgagagcttctatttatgttccttttatctcatctcgtatcatgccatcatattctatcatatcataaatgtctggataggacattttatatattttttaaattatataaaatacaaattttacatatataaaagttgtatatgctaatggtgcatatttaattttttttttaaggaatcaaaaacattgaaagaccactgccttagctatgggttttggtttcaccatactggagatagaatttatatagcacacttaaagtaagggggaaatagttttatgaaaacaagctctaaagcaaggaaatcctaatggcaaaaaatatttttgtatttttctctatttcagtttatcttgggcccagatgggatctgaggcattgtcaaacattttgagaactcccttctctggtcctattctggttctcctgaaaggagggaaaatattagattaaaagtattctccaattccacagtctgttttgaaggaaaaatcctagaaacgctttggtagatacagtgttttatcatactgtttggtagatacagtgttttatcatactgtttggtag

SEQ ID NO: 123912 - DNA, 1027 bp, Homo sapiens
gttgactgagatttaaaagatgtttataattttaaatgtctttttaccctctagcagttggtctctatttaagcagaatttaaatttaacaaagcaatactgattacgctttttcattgaaacctgcatttatgtgacttgcatacacctatggagattccaaaatctgttagtttgcagtgtgaaatcctgtatgtttctactgtcataacccctacccaaatttcaagtggatggttacgaattggatttctcatttggagttaagaaataagaaacaggatttggaatcagagtccacaagagtactatatttttttttgattgatggtaaagacttgctaagtttatggcaggattgtggagatatttttctcaggatgcattagtgtatttgtttctggtggaaattaagatgggcaacaaattcagaaagcaaggcagatttttatccatcacaaattaattaaattatttagaacaaactccaaatgaaactcaagaattaaccatctaagacaactggcatctcaatgccgggtgcaatgaagggtaggtagtctaatgtcactgaaggacctagaagcacctccatccaggtatacccagtgatgctctgtgccttcttccccagaggaagcacctccatccagatgcaccccagcaatgacctttgcctatgtccccggaggaaggcttcctagggctttgggccaagcgatagtggaagcatttttaaacaatccgaagcgggaagggaagattcctccctctagaggaggagtcctggctactggaaaaagagaatacagtagaaagggagggtgatgatcctgggtggctcgtgggcacctcatggtgataagccagtgcaaactatccccaggtttgagagaatcctcgccaggattctccgtttctggtatccccataggtgttagcagggctgttcgcttttcctggttccttttccttgctctaaataattgacagacttcctctgtcaattatttcacagtaaccaagg

SEQ ID NO: 123913 - DNA, 1087 bp, Homo sapiens
atttggaaatccatttaaatcttcacagaggactgtaaccaaaaataagtgtaagatggattgagtagctaaaaacaaaattaactatagaaaaactagataaaatgagtgaacatttatcagttttctgcaggataagaaataagcgtagaaggaagccctaagtttaaacattatgaaagaaattacagttcttacttcatcgtaatttaaacctccaataagctaagaataaaaataaacaaactgaaaaagttggtcactctaaatggaataggcgagatgttattctatttaagaaagcaatatgcaagggataaaggcacaatcaataaaaaagtcatggaggggaaacagcatttaataaatactttaaaacatgcagcttcatggccattcagaaatgcagtttaatgtaagactgtataaagatttaattttgcttttcattgtttttaaatgagaattcttattgctgacaaacatgtagtgaaatgggtatttatatatattgctagtaagaatataaacagctacaaatattttggcaatatttggcaatacaagcaatttgtcaatattcactaggtaccttaaaatgtttgtttctggaatgcagaaatgttgtttctgggaatatattgcaaagaaataacccaaaattcaggaaaaaaaaaggtttgtgcccagaattgctaaacattgcactatttattcttgaaaaaacacaaagaagcctaaatataataatgaggcaattaggtaataattatgatatgtctagtataattatgagaaggatatttatattctaatatggcaactgaatatgatttcacattaaaggctagaaaagagcatataaaatagatttaaaataaaatctcaactactgtatatttatttttaacttttattttaagttcagggatacatgtgcaggtttgttatataggtaaacttgtgtcatggggcttcttgtacagattattttgtcaccaggtattaaagctactacctcttagttatttttcctgatcctctccctactcccaccctccgccatctgataggcctcagtgtgtat

SEQ ID NO: 123914 - DNA, 1147 bp, Homo sapiens
tcccaacatatataggtggtgaagtccaaagctgaagttgccccagataagagaactctcctgttttctaggactgtgagaggttattgctctcttgtgtcaattttagttgtgttttttctttctgtattttgcttgtcttatgattcaagacatgaacataaatatacatttgaaaatttccaccaagaggtggaaaagtttatagattcagagaagataactttgtacaaaacaaaagtctaaaaatggttgttggatactctcaggtatttggagaatctgccaacccgtttgcaggaaatttgttttcaaatgggaaaggatagaacagcctgaagatgggagtgcagtcattttgagttacttccgttattgcagccaagggaagtcactttttagggaagacaatggacgtagagttttcatctctgaactgccactctcagtctttgaggtctcatggaggaaaaaaagtgtcataagactggagataagtaaaattccttgtttttaaaagttgagaagtgtaaatactagaactttcattctggcacgcaggagttttttccttccaagtgttttaacgtaggaagtaataaatgatcccatggagccaggatgtgtgcgccaaaactaaatcatgttgagttaacctcacttatttcattggtaccgttactgggtgagtcagttgagaaagtgccagagcaagggtgatcctgtaaagtaaacatttgacagactgcgtcaccacatccttgtgtatatgatggtgacctggggattgggaccagatgggttcatagctaatggaacaacagaataagcttgtattcacttccatatgaaatagaaggtgggactaacgctgtctttcctttttttttcttctctttctccttcttgtccacattcctttttaatttccatgaagaaaattaatttaaattgacttctcatatttcaagaaccctttgatcatttttttgatgttggatttcagcagttttaaaaacttctgtcttcatttaattttttaatggcattactaagatataatttacataccataaattcacccattttaagtgtatagttcaatgagttttggtaaatttggcgttgtgtaaccatcaccaaaatc

SEQ ID NO: 123915 - DNA, 1033 bp, Homo sapiens
tgtcctgcgtcccaggagtaagtcatcaggctcatttcttttcttgtctcttttctgctgggggaagggcaggttgcaaggcggatggtgagcagattcttcggccttttgtgtgggtagcctgcataggaaccatttctatgcctgtgagtccatttctagcatctgcctccagcctctgctttcctgacgctctcccatcaccccattcacccttcataaaacagtcactctttctagatgcataattacatgccatgacaatgattacagtcctctcttcataactgcactgggtgctcattcatggcatggaggtatgatcgcatcgtttgtagcatagagcagagtacccagcactgaatatgtgttgtggcctagagaagagatgggcacaagaagtcaggtcatcagggttgcctcatcgctggcctcctggccagggcctcaagggtgacattccttgagggcgaggtgtttctcaatctcgatgttgagattttgggcccattaatcctttattgtggaagaggccaacctgtgcagaatcggatgctcagccacattcctggcctctaactgttacatgccaggagtagtcaccccactcctacttgtgacagccaaaaatcccctagagggacaaacttgcccacagctgagaaccactgcttgagggggaattcccggctctgtcaggtacactcaggaatccggttggtccgatcaaagcaaacccatttctgaggactaatagggtcctaaccaaagtggcaattcattaatttaaatgaagaaatactttacatgggaattgaaaaataatagtaaaccaacttaaaagtagacacgtggccgtaaagtattcaaatatttagtgctttctgccctgataagtctgcgtgggggtcatgctggcaccaaggcagcccggtgcagtgaggaaatgggccaggctcggtggcctgataggaccccttccacacccagatctgtgcagacaggccctcctcgttcccctccccacccacca

SEQ ID NO: 123916 - DNA, 1004 bp, Homo sapiens
tgggggtatgactttttttggggggtgggcagggtctcgctctgtcacccaggctggagggcagtggcgccatcatggctcactgcaacctctaactcctaagctcaagcatcctcctgcctcagcccccctcccccagcagctgggactgcaggcgtgagccaccgcgcctgccctggcggtatcacttctaatagaagcatttattggccaatgaaacaggatacttctttcattgaacaattttataaattgttcacacacagcataaactgtgctgggcagggagggatcaagtggttagctgttgactgttgtccattttatatattttttgtaccttccatgctggttgagcataaggatggtaaacatttgttaattaactaaatgggaagagtggaatttctaacgcaggagacacagaggaagagaaggcttgtgtattctctttctgaaagaacaatctgagagagagaatctctcaaggttcccattcatagtgaattactcatagatttccaggtgacaacagctccccccacatcgactcaaagtatagcattttaaaaaagaaaaactacctgcgtccaattacatacccattagttcactgaatatcctcatgtcctttggagctgatttcccataatacactgcaagtctctgtcttgttctgataaaaacaagtgggtttcaaccccctacagctttcttaatagtaacagcagtgcatccagaaactagtggtggctctagagacccaacacgaacagtgttgagacctcgttgcagcactttctctgtgttttctgatgtcatgaaactcttcttagtagaattattttcccccacttaagttccaccgtcagcctggaaattatatggacaacatgacaaagttcctctggaaaaccacactcctctgcttggctgaccttgggagaaaacatttagcaagttcttctttttcttggttattttaaactcagatgatatcagca

SEQ ID NO: 123917 - DNA, 1621 bp, Homo sapiens
gaccgaggagaggtgaggggagagttttgagggtgggcatattgatcctacgcttgctgaattaaaaatgagccaactgaggacaatttccaggttgcaacacagacggagccggagtctgggttgaggttagaggagccgttagggcgcagggatgcaacaggatttgggagaaaggggagagaaagcaaggccacttccagggggctttcattttttttttatcctggcagcttcccgagccagatttcaaaagcgatttcaaacgtgaagccaactgaagcactgccttacactaattggaaggggaagggagtgactcatattacaccagctcgctcttccctctcggcaactgctaacttgtagctttaaaaggaagtgacatgggtggggagagacgtcagctgaggaccactttttttttttttttcttcctgaagggtccaccccatgggtggagtctcgctttttctttccagtgttggctgacttacagctcttataaactagtggcaatttctgaacccagccggctccatctcagcttctggtttctaagtccatgtgccaaaggctgccaggaaggaggtatgtggtcctggtgccgttcgcaggcaccttccccgctgggtgtggctgatgtttgcattcctcttcccagcatatttttctctcctgggctggatttccttaggacctctggaaggggtaggctccgggggcggggggggagtgcaaggcgggcgggggaaaggtgcagggggcgcctggagggaggcgaagagaggctctgctggtacaaaaggaccctcgctttgtgctgggccgggtgagcgtccctttctgggctgtgatttcaagctgctgttcctggcttcatttacccacccacccagccccctcccggggctaaagcattttctctgctatagacgaagctgggcggggggtggtggtggggggaatgttcctattacatattgctctcttttgtgtcatgcaacatgttcttccgtcgctgacgtttctatggcaaccacaaaaatactacacaatatgcagccccgatatacattgatttatttgtattttgtgtctagtttgcagctttctgctctgcttcttgctttggtttgctaaaatccagcatggcttgtggctacccctcctcactttcattttggtttttccctatcacaggaggggtgggggaggggagttgtcaaggaaacaggcattggtaattacctctctatttacctaattttcggcctatgaatttctccatatcgaggaattaaaaaaagaatgctttgatgtttatgtaagtcttcagtgtctggtctttttttagaaaacctaaacacttcttaagataagatattgatcctgtggtcaagctaagggggaattaattccttacaggaggtgagatcattgaaataaagttttagagagcattggagaattcgcactgataaatgtgatattgcctgcccaggtttgcctaaaagcttaaatatttaaaagatgggtctttgctctcatctgcacttatttagctccaaatcttaagttcaacaagtatgagtaacaaattaactgccgggcaggattc

SEQ ID NO: 123918 - DNA, 1038 bp, Homo sapiens
ctattttgccccagcatctcaccgcagagccgtctctcagccattgactgccttcacacacaaatgcagtcccagtattgggagatgggtgtaatttattattcccggagatctagatccccggttatttgggagtgtattttctgaactgcttgttggtttaagtaaagcaggtttgatgccacttctcttgaatccatgaccctggacccgccgcctaagtggatgtgcagatgggatggaacggctgcgacagatctccattaaagccagcgcgtcgttcgggctcggccttgcgctgtgaaaagctgagtcagtgccaggacagcacccgcccctctgcagtgcgtttccaaggcactcagcttgtgtgcgaaggtttgctctggggcagcagaaatggcccttggcaggtcgtcaaaggcccggtttcatttcctcctcttccaggcaagttgctcaaaggctcacagccttttcgtcgcctgccacacagagccagtaagatctaccaagctataaataatgaaatgagtgtgtgtttcgccgtttgtaagttgcaaagtattacaaaatggtgaaacttgggggtttgggtttttaaggctgaatgctaaaactgtcaggcactgtggagagaggaaaggaaagataagattgactgggattgaaagacaagtgaaggcatgcttgcgtgggtacacacacagtgacaccacacgcctgcccctggaggccgatcctgaccatgcagacctggggctggggctctccaagcgctctcctgcactgcagaaacccttcttctcttctggactgtcactccagcacggcagagcaccaaggctctgcaacgcacttccctggggtgcagcttccggccaggggcgtcctccctctgcaggagcctcagcacccccggggggttccctccacccccaggagttctgccttgaggggcatggcctgcgggtcccctgagctcgctcacctgtgggggtcacggcctgcgggtcccctgagctcactcacctgtag

SEQ ID NO: 123919 - DNA, 1224 bp, Homo sapiens
agaatctttacatgtcgtttattttgcatttcaaatgctttgaaaaaagccttcccgtggttttggccagaggtatttgttatcagtttaatagatttattcctgttttgctaaggtatgtaatagttatttatttttaaaaaaagccagtacctctccagtcttcattttcatttatccttagcatggtcttttctaaaaagggcatttggcacaatatctttttttgtttttttaatctctaggtaaccaacccctgcctacattttactctggattccaagagtagactgggcttcagggaccagatgccagggctggcacatctgcctaaaacccataattcttgaacttgacgtgctcagcctctccaaagccgcggcgctgacacagctccccctgcacgagtgtacagcagtcagacaggaacggggagagggggctcaactttctgacggccacttagaggctgcctgaccacaaagacaggactgtaaaacatagaccgcatgtgacctgctggtgctcggcactgacccaggggaggagggccacttgggctggaatgcagttgctgggggctcatgaggggctcagtggtgcccctggccaccgagtcaagcagcgtagattgatcagaggagctgagagctgaggcccaccctcccctttctcctacacatggacacctctgagtggaataagggaagactgtcctttctccaagcttgaaggaagatgactgtgactcttttcctggacttcaaggcatcgaagtgtcagctggctgccatcccagcgtctgacagggcagcaggagaaagaggccacctgtatcatccacccgtgctgcagctgaatgggatcggtgcagcatgatagaggccagctgccccgcaccaggtctgcgtgtcacagggcagagtgcatggtctcccttcacgtgcggggccaggtgactgcacagagtgatgagctgggcccactttcctgctattggccgccagcaaagaatacaaggggtttcccttcccttcccttcccttcccttcccttcccttccctatcgacagccttgcagggtggtggtttcctttgcccggagagttcagaggccttagttctggaaagcctcctgtggggagatggagtggcggggatagggaccagagcagagagggcagcagcataaacaaagaggagaggcaaactgtttgagcccag

SEQ ID NO: 123920 - DNA, 1041 bp, Homo sapiens
agcccctagtcactgggtcccctttccctggacctagtctctttacaatgaggtcccagataccagcctctaatcatcaggacaaacggctatcccccaactccagtttcctccccacccatcacctccctcctaagccagcgtgagtcacagacgcagatccttaaccctctcttgctttttgtcaccttgtccctcgcgttcagatctgttcaagctcatcctcaaaatagctggccttggttttattctgttttaaaaccttgccttcttcaccctttttccccataacccctatcactcctcaaaataaaactttacccccaaaaaactgttcagagtcccagtcccagccttatatggtctgaccctgtcctgcagctcagacccggtttgtttctcaagatcatgaccacattcaccatccaactcctgtctgtgcaacctgcctaaagagtccttgcccagttggataaataaatatctttcatttgcagaaatcttgagaaagcaaggactctggggttttgttttgtttttttccactctctctactcctttttctttggttctctcattcattcagtcatttgttctttaaatctattgtttatttacagttcctgagatcctagttgcaccaggaaatatactagataataaggttacaaagaaatacatttctgctttgagaagatcgtaattcctggggtcctaaaatacagctgttacagttacacaaccaccaacttttcatagaccttaatgattcccaaaatgctggcacgttggttgtctcaattagtcctctctacaaccctgtcaggaaggtattctatttgtcaccattttatagaggagggaacaaaaggtcaggaaagttaaataatttccccaagatagcccagctttcagtgatggatctgggagataagcccacctcccatgctcgttgtaaagtagtgctttccccgccttctcatgagatgtcttacaggggaaagtcattcttaagttaaaaacaacagcagcagcaaggcc

SEQ ID NO: 123921 - DNA, 1025 bp, Homo sapiens
ctcttgctaacagaacagattttttttttttttcaagtgtggaccagtttgggaaatgacctcattttccgggtcagtagtgagttctgagtagtctaaaccagtcttgctaatcccttgacccttactagtgatcaggtttcagaagatccaggcccttctagagttcattgccctactgagttcatcagctctgaagccactccatggttggactgcctgtcatgggatatgatacatttcctttctatttaagccagttaaattggggctttctgtttctccaatcaaaatctcttaatgggcacacaggcatttatttctcttaataatgaccaaaggaattcatttactaaggactttgggcagatattggggaaaaaaaagaagtatttgatgagagcgttttagtagcaaacaaaatcacctccagattattatattccataatatggttgtgtccactgtaactgtaatcagcaataaaaaaaaaaaatctttttgttcctctctggctaaatggattgtagtaggctccattatattattctgacgttagttccgtggtgtgtggccagttcctaagactgcagtggcttaaggggatgggagtttatttctctctctcataaaatgtctggagctgggatgctccactccaccaagcctttagttgccctcatctacatggtgcaaggtggctcagccccaggtccacttttcaaccagaaacaaaggggaaagagaagaggacattcccagtctctttaaaggtcaaatctggaagtagcacacaacatcgtactcgtattccgacagagaaaagttacttgtgaggctacatggccagcccccaaagcagttgggaaatatctgtattcggggtgcgatgtgcccagctagaaactgttcctatgaagaaaagggcaaatggatgatgagcggacaaatgtcagcctctgcctcatctggtgtcttttctgtctccttttatcattactcaaataccattcacttgtgtgcag

SEQ ID NO: 123922 - DNA, 1048 bp, Homo sapiens
tgatttggatctcttttccagaagattccacaactactagaagatgagatgctttttggcattgggtcacctgaaatatctggaaaaaaaaaaaccaaaaacttcttaaactgtgcttccggatatgatctgttgcttgttttttttgtttactggtttttttttttttttttaggtcttgtttgatgttgcctctttgcatttgatttcagccatcttgatagttttttctatgcaattaacaaggtccagccctttctctagccaattcacttcatcagtagctgacagatgttcagggatgaagaaaacattattagcaacagaatagagaagaaaaacagcagggtcatgggggccaccacttaggctgtcacagatgctctcaggctaactacctgcaaatgaaaaaaaaaggaagatgaagattactgacaatctaaggagtgcttcttttttgaaaaaaatttctaatgcgtatagaaaatgggacattatctgcatagcaaggagaaatggctaaatcataagctgatgttcctctctgacgttattatagtttttttaatccaaagaggaagttctataataaactatttttcattagtttctaaaagatggcagaggaatagtgagctgaattttcttttttttttttttgagaaagtctcattctgttgcccaagctagagtgcagtggtgtgatcacagctcactgaagccttgaacttctaggctcaaatgatcctctcacctcagcctcctgagtagctgggactacaggtacatgccaccatgcccaggtaatttttttttaattttttgtcgaaatggggtcttgctgtgttgcctaggctggcctcaaactcctggtctcaaacgatcctcccacgtcagcctcccaaagtgcttggattacagacatgagtcactatacctgactgaattttttttaatagaagggaataagagaaagaggcagctgggtattgtggaaagcgtggtcttgaaagtttcagccttagttctaatgcagcactgtgggttc

SEQ ID NO: 123923 - DNA, 1036 bp, Homo sapiens
cttaatcaactgaatatccaataattctgtacagcctattctatgttagttttctctaactataagatattctaatggagaacaaggaaaggaataatgccatttttacccggccctttagaagacaaggtaaactcatcttttctaacaggatattgaatatgcattttttttttaagaatccaagccttacctgtacggttgtcccttggcgtccaaggagtattgattccactactcctttgggatgccaaagtgacaattgctcaagtctctgatatacaatgatgtagtatttctatataacctatgcacatcctcccatatacttaaaatcatccctagattatgtatatctaatacaaagtcaatgctatgtaaatagttgttatattgcaattttatttgtattatttttatcgttgtgtcattttttatgttcattttttccaaatattttctatctgcagttgggtgactcctcagttgtggaacccatagatacagggggttgacagacactaggttgaggtaatgcttcatgattgttgaatgtaggattttggatatgcagaaacgaatttctaccttaaagactgaggagcaaaatataaggagacaatgcattaagcccatctgttaattttgattagttttaatattctctttaatatactcttctgtttatataatgtggggctagtagacgaaagaatatcaatatcatttgatgatattaatgttctgattatgcctatattccttctacaaatatatatggcacaaaatccaaatgccaggaactggtctagataagaggaatacagacgattagacacagttcctatgctcaggggatttacactccactagatgatacttaagtacacaaactaaagagagaaaaccctaagggctatggagaaagatgaagcagggaaactgttggagggagagggaggatctggaacatcagcaaagtcttcactagggaggtcccttgtgcagaccaagggacagccaggaccagcactag

SEQ ID NO: 123924 - DNA, 1030 bp, Homo sapiens
atatatataaataaaacccaagataaaggaaggcaggggattcagtaagaaaattccagaaagacagcttggaagcggatctgaaaaggaaggagtcaacttagagcagtcagttaacgagacactgaatgagctgggagagctgagcactcccgtggggaatccctgtgttgcttctgtcaacaagaagaaggaaaggcagctttgacactcaggaaaagcaaaagtctacaccagaaacctgtccatagacatacagcaaaaagatttttcaaagttagtgtaaggaataattattcgtttgatctgaatttcagaaaattcctcctggggtgacccaggtttaggaacacaagaatgagactgtaccttcaggctccagccagcaaacgtagttagttagtgtcacgagtgtgtctatttcacttccagcatccactcagaggcaaggcatgtaatcatggttgttaacagaataaaacgtaaatgtaacaaatcttgaaaatgtaacaataatggtatagttgaaaaaaagctgggaagtggagggagacgaggtgaaaataccgcccaggctcctgtttctttattttacgtggtggatattcaaggtggggaccaaacttcgcagatggagatgtagctaagcattaaacaaaatttaagtccgtgtaagagttaaaaattagaatgtcaatcagaaattgggaggggaagaatgcagcagcagagccatccacaccttgacctccacggctgcagtcctatcctgactccccccacatcagacctcccattcccttgccttttgtcctctgcatctcaaggtctgtctctgcagctcggcctctgcacaaccccatcttgctggccacacgctcttcttgacccacacccccatccccagtccctgtttcccaagaggatacagagatggtgttggctgaatctgcgacttggcacatcccaagttcaggctttcacagaggcccaccccctgcggtcttacctcacagggaatgtgttttta

SEQ ID NO: 123925 - DNA, 1030 bp, Homo sapiens
ctgggcaattctcctgcctcagcctccctgggaggattacaggtgcctgctaccatgccaggctaattttttgtatttttagtagagatggggtttcaccatgttggccaggctggtctcaaagtcctgacttcaggtgatccacccgcctcgtccacccaaactgctgggattataggcatgagccaccgcacccggcctatcccatgtctttaaaacaaaataacatattactttttaaaattctgagggttatgaatttggaaagggccccatgaggacagtgtggtgctcttcctgtatgagttctgctggagatgtggtgtctcagagacctcatctgcttaggtgtctggagctcagctaggaggtgaggatggctggcagccaactggaatggcttgactggggctgtagtcctggggcctcagttcttgggtcagctgggttctgtgctcttctccatgtagcctccagggctctctatctccacgtggcccctccataccacctctccacgtgctgtgttcttcttgcagctgtacttcttagttcaggggtgtccaggagtgcaaatgcaggacctaccagcactcctgaggccaagttctgaagcgtccgtcacattctcttggtgaaggccagtcacaggcccagctcagattcacgagggtgggggggtacaggggcatgccttttgccaagaatggtttactggtgaccaccagtagagcagactacaagaagattatttctgcttttgttacgttgccatagaaatagtttaaacattttattggtagtcagaggtttgcacctactactttatggcttctggttttaacgtccgctcaaggaagatatcaccagtgcaatcttagaaaatttttcatcatccaactttttttttttttttttaggacagattctcctctgtcgtccaggctggagtgcagtggtgtgatctccactcactgcaactgctgcctcctgggttcaagcaattctcctgcctcagcctcccaagtag

SEQ ID NO: 123926 - DNA, 1073 bp, Homo sapiens
aaattgttaaaagtataattttttaaaacaaagtcatgactctcaggcaaatataaatgaacacatcaaagattttatttaaattttgaggaaactagtcagatgttaaaaaccagttcaaaggaattgcaaagggaagtcatctctaggcaatcacaaatgctgaaacgtatctgacaataaatgcaaagtggtttttgttgaggaggaaagaatcactcacatttctaaaacatagacaaaatctatttgtgtctctacagacacaaataatttgcattaattttaaagttatacagtggctcaaacactgtaagtggcacatacccataaatcagatgacaggattggcatttcataacacacccactcatcttgtttctttcgtttcaacgtccttcaaaatttcttcttactttctatcccaatttatgattataataatctcaaaatttaataatcacaaaaaatattggactcatttgtttgggcctaattagttatatggtggtggtaggactgttaatttactatataggcctccttgactttacttcttccatctagaaccatacaatgtaactactaaaaccacaaatgtttttataaggaatttcaaattgtgttttaaaattgctcttatttattattctgtgactataaaactaagctcaaggctgtctttactaggttatacctgtataacatgtaaatttgggtaaactctcttgaagtcctgaaaatgtattaatgcttctaatgtgccaggattttacctgtcttcccatctgtatcgctggagcctggtaagccagtttccctgagagtgttctgtggacccatgcaaaatcaacagttgttccttaagagcagaatgtcagatctgatgaaataagaaccattctcaaatgtgatgctttatattgacctagattgcccaatttattttatattgacctaggttgcccaatttattttatattgacctaggttgtccaattatttttctggtaaaaagtaggacagatttttactgatttctgtgcagactattacattgccatgaaaagtaa

SEQ ID NO: 123927 - DNA, 1045 bp, Homo sapiens
tcttcatgagcattacggtggctccgccgcctcggatgctgtcaggctttcattctggtgcctgtgcactggcattccattcagactcactgacaatgttatgtgctttcttacgtgctggttagtgattcatatttttcttttcgtgatgtctcttcttgtattttgttcactttcaaattaggttcattaggaaatgtatatattgttctggaagctttgatctatttattacatatcagtactttatcaggtgtatgttttggaactattttcttatagtctggagtttggtaattcattttcttcatattttttatgaacagatgttttaatttctaagtttattactttttaatgatattgtggtctctaacctgtcaaagaaacctttgcctaatcccaactcatgaaatattctcctatttttttttccagaagctccatagttttggcattcacatttaggtttaggatccaacatatgtaaattttatgatagtgtgaggtatggatatctatatggatatgcagttgttacttttttatttggatgactatgatacatttgttgaaaatcaaatgaccatgtcatgtatgtgtaggtctatttctgagccctaaattccaaataagcctgtttctatataaagacagagtaaagataccattagtagcaatacccacttaggtttagacatggtacatttggcagattttctaggttttttgacataaagatttggaatttccagagtaattgtacattcctggaaaatgtttagtttctaatatatgtaaaaattagtattaccattttttctggagaaataggcctctagtgtcctagtaaacttggtagaaaattttagatttagagatgattaagcttggtgagatcattttaatttaaaaaataaaagaaaattttagatggcacataggcttctgatattgttctgtaactcactagcctttctgctatacttcattataataaatatttcaatataaatacaattactggattccaaatggtagcagt

SEQ ID NO: 123928 - DNA, 1026 bp, Homo sapiens
tatccagctacctgcgtaaatgcatcagtaaagccgggtgggaaacggagaggttaattgactttacttgggtcacccggcgagaaagaaaccaaactgagagtttaatctggggaacttgagctcagattcttgctgaaagcactcacattgagtcacattagttttcttataaggttgagggagagttgacacttactctgcaggctttccctgaaaagagtaaaattcactggactctgttttctaaagtggggattaagattctagaactggattagaagtgaaacatggagttttcccttgctgaaaagaaaatggaagagtattgcgtactgggaaaaaggaaattatgaaaattaaaagggaaatgctcatagaatatgatttgtaaagtgactagttagccaagtgggtttgttgtagggcacgatactcactgatgccagagtctatggcatgcactgggcatggtccacttgaatctctgagtatgattaaaacccttcagtcatttgttggtatgattgaactacgggttctcccacggctagtttcaaagaattatatttctgtctagtgtcagaatgaccctattttttttaatgtgttatgaatcttcagttgtgcatacagaatttcatattaatttagaatgccatgctaataagcgtacactcagagatggccataatttaaagctagcagtagtatctcatggagaaatgaactctactcctcccataatgtgctacaaacaaatgagaaccatgctctttgtctttgtctctgaataggatatttttatttaaagtactttaggtaaaggtcagtataaaccaatatgacataatatgtctattgttcaatgttatcataaaaatataaactttgcataaacagagttcatgaaataaatggagtatgaccaaaaaattaagtcttgattatttgggtccccctgttctgggctcccttattagattcatttccttggggcagggaccatactttggtgcttagcat

SEQ ID NO: 123929 - DNA, 1140 bp, Homo sapiens
ccaaaggcatacctaactgactacctaatgttgagtgtttacattagttgaaaaataagcatgctgatgaattatttacaatgaatttttgtgtatttgtgtatgtattatgtatttacaatgcaatatcttgcaatttgtctctcttaatttcctctaatttatattaggcaaatgttagtatattagtgattggaattggatgctaaagagcaaactgtgtaagcatcccaagcctattttcatttgaaataatgtattttccttattggtttgttaggacaatttaatgagataatgaatgttacgcacttgtattgtgcctaacacacaataagcccttattggggaaaattttaagtgagttaataatttgttgttgtgtaagtaaccacatcagaacttagagcattaaaacagctattatagtttgcacatggttttgtgggtcaacaatttaggctggttgagtggttcatctttaatcaactgcagcaacggacgatgaagagaacacttccaaagggcctaattcattcttattttccacaacagtagttctcaactttctttgtgtattaatattacagatgcttgggctcctccacccccaaagattctgatctttgatgaagagaagtaccacacatttatattattttaaaagctccctagacaattctaatgtacagcagaaccaatttactagtttactttatttttccttttaaaacaaatatgtttgtttcttatttcgtaattacacactattataaaaaaatcaatttgtgacttaatcaggaaatatttcttgagtgccaaggatgaagactgtgtaaagaataaaacaaagcttacttatgaaacacacttaaaaataaccaccttaaacattttggtgtattacctaccagtcttcctacttttataacttagtgttcttttgtgacaagtgcttcgtaatacacttaaccgtttattctatatttggatttttaagtttctttttcagtatttaagtactaaatgtagcatgctgatcaatggcattgaaaagtcacctgtttgtgttttttcaattcgtttttgctttcacaaatgttatatctttggcctgcctggattgatgctatgtttata

SEQ ID NO: 123930 - DNA, 1076 bp, Homo sapiens
tctctttacttaggatgatattcattgtcagttgttgttttcataaaccccaagcaagtcagtacattgattcattgcatattgcatagaaaactatttaaatctatgctagtgttattttcttcctaagttcagtaaattagtgttgtgacagatatgtggcactgtagctttttcaattctgagattggtttttaatctatgatgcaaaccttgggcagttcaggggagtatcattgatttatgaatctcttctgcctcagtgtttaacaaagcttgtttgattttaatgggcaaaaagaaaactcttcttaagtaagatgtttctaatctcttgaagtattagtaccagagaccccaggcaaaagcaattctcaaaagctctctaggaggtagttttatatgagattatagcacatctaatattgtgcaaatattaaagaggtttaaaactcttaaattcattgattttttttcatcctaaggcaaatgataaaagtgcaaacatactgctttaggataagcctgtgggtaaatgtatcatgcaaaatatttacattaaaatgctgcatgacttaattttgcctgacttataatccctgggaacgctgaatatcatttcttcaaaaattctttctactttatgattcgtgtatttaatttgtcttctaacataactattatttttgtcttaatttgttgtaacttcaacaatagaggacatcaaaggatgcaagcttccttttgcttctaagcttcgtctcctccctactcagcattcattcagaggattagaatgtgaatgttaggattttacaagttattcatcctgcagtaaaggaatttggactccttctatgagcggcctctgatttgctggcttatgttttactgagctctgattggctattatgtgtgccgtcaccattagacatgaccacggatgtttgcaaagatctccattgctttacagtctctaagaataaggttttcaacaaatttataaaatgtatacaatttgtttgacttactctttttcaaatatgactctttacctaaagaaaataatattttaa

SEQ ID NO: 123931 - DNA, 1021 bp, Homo sapiens
atcattgcttcaaaaattctattagcatattttgtagtgtgcaccctagtatagtaatacttttgtgtaacttaaaaataaataaataaatgaatctatatttggggtccctgctcaagtcgactttttaattaacttccattttaaattgtggacacagagaacaaggtatttacatcatttagaaaagacagggattctgccttggggagataattgaatgcaatgttaccttattgacgtagtctatatttatttgagagtgacttctgcgtctgcttagtcataaaacattaccctgcaaaaaaggtttagattgagtttgaaactataaaatcatattttagattttgattggaatctcaatacaacctaccaatttttctttctccatctgtgttcatctgtctgtctctgtcccttatacctgcgcacacacatgcatacacgcacatatgtgcacacgtacgtacacgcatatttcacagacaggctggggcggaacccagcacaggcacggggatgtgcagggcagcctcctgagggccagcccagtgctggacccaaaccattctgggagtccagggaacaccaagctcagccttaccagacccaccagaggaatcagcaagatgaagagaacccacctctgacaagtacgagtggactttctcatgtttctgttttgtggcaggagcagagacaagatttcacattaggtgaaaatatttcagttacataacatatagtttcacataaactatagggttaaaaatgagtttaatttttagtataaatatacttttaaacttgacataaaattatatgtttttattatataccacgtgctgttttgaagtagacagacactgtggcacggttaaatttagcaaattatcaaatgtattacctcacttagttagcattttgctgggagaacacaccatccagtctctcagcattttccacaatacatcgtcattaactgtagtccccatgcatgcagtgtaatttaagtcag

SEQ ID NO: 123932 - DNA, 1047 bp, Homo sapiens
agtgtccacatctgtccatttggaataacaatggcaacgatcttacatggttgcagtgaaggttgagtaagtgaatgcatgaaaagtgttgagtttggtgcctggcacataaaaagcccttgctaaatggtagctgtcattaatcaaagtgaattggataaaaatcatacctagggaaaaatgatgctccttgtgtaaagctggttctaaatccctgtcttgatgttcagcccagcaggagggtccattccattgcttgcttgttgttgccatctttttatttgttgctttgtagttgtatatttacattcaggtgagttagtttgctagggccgccataccacagactgcgtggtttatatgttctcccaggtctggagtctagaactctgagatcactcggggtttactctgagtgcacagtgccagcaggtggtttttcctgaggcctgtctccttggcttgcggatggcacattctcactacacccccgcgtagcgtttcttctgggctcctgcaacgccagtatctctcctgtcctaatcttgccttcctataaggacaccattcagattagattcgggtccaccctaatgggttcattttaacttgatcacctctttaaaggccgtgtcccccaaaacattctgaggtatctgagtttagagctttagcatgtaaatgttgggggtgacacggttcacttcatagcacctggcatctgcattcccatcaccacacaccgtggactagatgatgagttccttggaggcagaatgtatcttattcttctctcgaagtcttgtccataagagaccctcaaaggagtatttactgtgcattgaattcatacagatgtccaagcatgtgtgagggcgacttagagaaacccctgcaggtgattttgatgcttggtctctgtgactggacataggcatgttttcgggaagttgtttctcttttgtaagatctgccattacagaaatagtctattccatgttctcactagagatttaggatgtttagaaaaataatactgaaagtctg

SEQ ID NO: 123933 - DNA, 1039 bp, Homo sapiens
agacatcaatgactttagagattgttttctgtatagtgagaatgacacgtgacagatacttggacagatatgtccagaaattctaaggtctttagtatcatttttaatttttttttttttttttgagccagagtttcactcttgtcacccaggctggagtgcaatggcgcaatctcggctcactgcaacctctgcctcctgggttcaagtgattctcgtgcctcagcctccagagtagctgggattacaggcacccaccaccatgcccagctaatttttatatttttagtagaggcggggtttaaccatgttggccaggctggtctcgaactcctgacctcaggtgatcacctgcctcagcctccctgagtgctgggcttacggacatgagccaccacgcccagccagttaatatactcttataattttaacttggggaaactgagttgacttacattgtttcaacttttggcacctttttcaggattgtattctgcctacctatattattggggttgtaataaacattaatgggatctttgaatttatttaaattcatggccgggcatggtggcttaggaggctgaggcaggagaattgcttgaacccgtgaggcagagattgcagcgagctgagatcacaccattgcacttcagcctgtgtgacagagcaagactctatctcaaaaaataaaaaataaaaaataaaataaattcagctgggtgcagtggctcacgcctgtaatcccagcactttgggaggccaaggcgggtggatcacctgaggtcaggagttcgagagcagcttggccaacctggtgaaaccccgtctgtactaaaaatacaaaaattagctgggcatggtggtgggcgcctataatcccagctactcgggaggttgaggtaggagaaccacttgaacctggaggttgcagtgagctgagatcaggccattgcactctagcctgggcgacagagggagactccatctcaaaacaaaacaaaataaaataaattcgcaacaatttttttttgagaaa

SEQ ID NO: 123934 - DNA, 1029 bp, Homo sapiens
aggacctgaagtcaatgtcattacctcacacgccactccagtgggctgcgtgacatggcaccgtcgcagcatgacacacagggaagtgtttctagtttccagaacatttctgaaacccacatcttccttctacatctttgtaagaacttaaatatggtgtgatgttattgcacatccaccagagacttgacgctttctgtttaaaacctaacatatgcttagatattaataaaatagactctagaaccaactcctctgaaatgggcctgtaacagatgctgtactgctcagaaactttaccaagtagctgtagagcccagcctcgcctggtgacttacatacccctaggagagtctttaaccaaagactgacaaggatgggggtgtttacttcagctcctccttctcccaactctcatcatctgcccatcccccaaacgggacaactctgagaagtgtctctagagttctcttgtagcaatgagccaaaataacccttcataagaatttacctaatgacacacccttgttgggcttccttcctttccctgtctagcccccagacgctctatttctttctcccttgggacagcccttcctaataattcacttccacttagtgtctgcttctaggaaatcctacctaagacaggcttcgttccacctaaaggccgaagctactgtgatattttacaatccttgacttttagctacatactcattattattatcattcttactttatcctttacactaccttgatcactggagtaaccttaacctatctgcacatagatctttattttctattgtgaaggtgatattattaggaaccaccaactgaaattttaccacctctataaaacaccagacaaacggtgagacatatttagcttcatcatccactgtgtggctttttctttttgttttacattaatccctattaaagagattattggctgggtgcggtggctcacgcctgcaatcccagcactttgggaggccgaggcagatgatcacctgagggcag

SEQ ID NO: 123935 - DNA, 1252 bp, Homo sapiens
tttttcctaacatgcctttttttttttttctagcagttcagtacataggaatttgaatgtgggtcagaatatcactaattttgattattattacaaaggattattattattacaaaggattattattacttacttatttcacacttgctgtataattgtcaaaattgttatccttcattgtagaaacattttaaattactgctgagttagcttaactgaagtttaacctaaattcttaatgtattcaatacctcaaggtgaaccccctcccacccattgtattgattgtggaaaaaaaagcttatatattaggtgatatttggtattaaaattttcagagtacacagaagagatgaacatgagtccatttaaatgttccttttagtcatttttttcttcacaagaataatcttacaattgcatcgtttaagaatacttgatgtgatagatgtcctaaataccctgacttcatcattacacattcaatgcacgtaacaacatatcacatgggcaccataaatatgtacaactattatgtatccgtgaaaaattttttaaatttaatttaaaaaaattaagaagaggatactcagcacttagcaaagcagaacacgacatgtggccagtttagatgatactaacaaaaatgtacctataaagaaaaacaaagttctgatgtgacacttacaaaaaaaaaagaaagtatcattctgcctgtgtattcctagctgtgtttgcctacctctgtcccttgcctctatccttaaatttggagccatttgtaatggtttcctaacaaccatctggggcttgtagcctaatctcagcctgatgcatcttgagcacagcctgatgggaaggagtgcgccattcaggaatctggctcctgttccttcagaggagggccccccatgagacagtgaccacctgtgtctatgatatcatcagacctggtgactttgaactagagtagctcccaagctgagaggctagttgatacgaggcctggagaggatagtctgtggggccagccattcccacgttgccagaatgatcatcatgaggctgttgtgtgcccagagtatgtgctcctaagtgacacgttgcgtctgtgccgggtcatggcggtgttttgtttttgttttgttttttcaccaattcactcataataaaaaagtattccagagtactgatgaaagcttgatgagtctgtaggttatgtcagtgtttcttacgggtttcattgtggctt

SEQ ID NO: 123936 - DNA, 1139 bp, Homo sapiens
tttcacatgaggaatatataaataaagtttataagtttgatggaatggctttcattattgatattgatagattgttttccagatatgtagcattccaccaagggcttctcaggttcttttcaaaagcacaaaatagacgtgccatccagttgcatatgatcagtttatttcacctgtcattgattagtgaacctaaatttttctgtttctttcatatgcaaccagttgttctagaaagatgcccaattgccctcgatagctttgctgattgtacttgcctctgggtctttctgactttacttctatattcctgggctgtgctcttatacttcctaattaacccctaattctgtttcgtatataattgctttccacattcagacagtagaagagttaatgctttagctgacatcgtatccagcagcacttgtctctccttggtctggttgtcatcatttcgcgtagtgtccttctgtaaatggtccctgccttgcatgtctgtgattgttcagaggatttaaaggttatgtcctgtgggctttgtaatcgtgatgtgttagctgactttggaagtatctttgacatacattctgagatcgcattacatttcatccttttacagcttgtacaccacacattatttttttcttataataaagtatatttttaaaattaatgttgatccttttctatgtcccactcttttgatccttctgaatcttttaaaatttttgttgacatctacataaagctgttgtgtcaaggttgaagagaactagggtacctacttggttttatttctccatcaaataaccatatatccagtctgtggttatctaatgtacagggcaaaaagtgaacacacctcttttggttgtgtctgttttactctttgcagattctgaagcagtggtgtttggaagcaggcaggtgataagtcagtaggtacatgatgagcagttccaatactgatcggcacaatgctggactgtacaaatccccacagaacccaaatggggacaagtaaccagatattcatcataaagctgaatctgaagaggttgccagaaaatgcatccctgaaacaagtattcataaattgtgtttaatgagttcaaagataaatacatctaattgga

SEQ ID NO: 123937 - DNA, 1019 bp, Homo sapiens
tccccttgcttcccagcttttaattcatgacactctgtttgcctgaaacattctgccttgtccatcccacaacccttacctgccttctcttctctcttctctccctctcaacgccacctcatctggctaaagcctttaggacccagggtgctcccagaggttgtttctccctggattcttttctgactctttgggactacgcggaggtgctctctcctgcacgctccctgggcaccatgcggggatacccgtcctagcatttatgacatggggatgtatgtgactgcctgctgtattagctgtaccacaccctctgctcttcaactacggagtgaatagtttgtgtgttcctgtactcccaatccttggcacaaaatagatgtttgataaatatttgttgaataaatgagtcttcaggtgagaaaacacatgatagattggaacactgccttgtcaaaacttgcagtttgttaaagatacgataaattcataaatgacactgatggaatcacaattcttccctgaaaatctgataaatatgcaatatgtatagtaaaatctaggggtgtcttattaatattttctgagcattcaccctttaaatatactcctcatatataaaaatgtactcctcatatataaaaatgtactcctcatatataaaaatgtactgctcatatatgaaaagtacaattgttttttatataagatcctagctatacttcagaaaacattttaaattcattgtcttatgagagaaagttgggaagagggttcgaggaaagggaaacatggcccctctctaacctaaaagaaacgaaaacatatgtccacggaagtacttgtgcaagactgcccatcagcagcaagatagaggaacgaactaattatacacacaacaatggatgaacctcagaaatcatcatgcggagtaagagaagccttaaacaaatattacatactttatacttttatacatatgaatttctaaaacaaaacccatttaccgtggtttgaat

SEQ ID NO: 123938 - DNA, 1063 bp, Homo sapiens
tgttaatttctagaaatatgctctaaaatttatgaatcaatcaggtttcttattacatgtgggaacatatatggtagatgataatttggctggctttacgaagagtctgcagtgcttttccaatcaatattctgtgcttcatgctgtcttagccctggaaggcaaactgagtgggggaagctacaggggaaagcaaggtatttgacttggatggttttcattcagcacaggctgcgaaacaaataaggattaccacaggtgcctcagagaatacccaaggggatcagtgctgagaccctttaaaacggtgctcagtgattctttttgaggtggaaattaagatagatttgccatttcttgccctgatttatgaaagcaggtacttgccatgtacaaggagtacatgaagctttactgttaagagaggaaaggttgctgtggtcagacaggtgcaattgctgcggtgcagtgtggtcctcaggtcgaactcacacacctgtctctgcattcaagtcaggcaacagagggaggtgttgacttggttaataactctgctgaaaagtgttcgtgagcctctgcttggtatccatcctcgcagtgttaaggatctgaacttcttttaaatgcctcatgaaactcctctgaaatatctgtcctctaaaatctgagtctgttggtggggtctggcagatctcccttaaatggttttctaacagtttaatcagcttccgcaggatccctttcagaaatgtgacagcccttcccatctgtggatggcacgtgcgggtggtttccagcgtgctctactctctcaagcagctcatgaattttatacatctcagtaaaaagaagatatgggaagttgctttggggaatttaaaacttttcttttgcaatttcaatgtttgatcattgttattcgtttcagtaaatttagaaaacaggatactttagatgttatttttcagcatcgcttagagcagggacctgcatgtgttttggtaagggatacgtggtaaatattttcagctttgggggccgtaaggttctttgtcccatctac

SEQ ID NO: 123939 - DNA, 1257 bp, Homo sapiens
gaatgctcatcatcaacttgggaacctgcttccaaatacaagtgtaagacagtatcatgcttacaatgtattgatatctgattacatttttggtgaaagggaagatgtggacaaaatggcctcttaaaatggtgacagaattcaaggctcttttctatgaaattgactggaaatattacagataaagatatctttgcttctgattgtgaatgctgtatacaagattcatgatagaatcagttattggaggtagaagaatcttaaatccccattacatgttcttcactagatagaagtcatgttctagaaacaggattttagataatgattacctctggcacatccaatgtatattacgttgtcaacgattgatgttaatgtcgatggctgcttgtaatcaggcagaatgctcagatttgggattgtttcaaaagaactctaattactaaattccattagcagtttgggcagcctgggaaatcaaagtaattgatagcagcttttctgaagatctgtgcagcattagtacgaagaaaacctgttagcttggcaggacagtataaagcttagggaagaatttatagttggtagttaaaagggcctttcagataccaattattttatatactcagtaatctttttggcttttatacactattactgtatgactaaggtggtaaatcaatgtgtgcaccgtaagagtaagaacttgtttgattcgaaaagtatggatcttttatttcagcaaacacctttagcacctacttgtgcagaccatcgtgcacagttgacgcatgtgatgaatcagtcataatcctggcccagtaggattttacactgcagctaggtagtttatccaattggataaagaagtagaatgtaatgaaagtattctgaggaggatagaagcaagcattttattgggaattatatacttcaatttcaattttaattttctgccattttctctgacatgctattcagtcattatacttttaaaacataataattattctagattctgtgacaaaattcagatttaattctaacattgtttaaagcacatgtcccaaattagatatggcttatatgaaatacatcatttttttaaacagctaattgctttctatatcagaaactgttattacaacattttaatgcctgactgcagcattgcgtgtcgtaggctaccagactttaatgaagaattttaaaatgttgactaaaagaaaattattcaatattttggtctgctga

SEQ ID NO: 123940 - DNA, 1029 bp, Homo sapiens
ttgacttaaaagtactgagagtgggttgtgtttctctatatcccgaattagttcttgctcttaaattaatacatatgtagctgaaaagttgccagtagagagaatgtttctgtaactgctcttgttagcgaatgccacctatgtgcttggtactgttgtaaatgtacgctctactttgtgccatttagtccttgaatgtagattagcatttagaatcatatagattgatattggacctattctgttcaagaataatttatataatttgggcctaataggcctttttatactgggttgttaatctgaaatgaggtgaattcctggtgtatagggaccctgaggataacattgtgtcatgccccttaatattctaaattactattaatgaataattaaaagtcagtttacatttcactcagcatagttatctctcatttatgtgtgtatgtgtgtttgtaattattggtttgcagctcatattttatgtaaatagatggtagcagaagctcagaggaggaaatgccatatggtattacagttaatgatgacccaagtgtggctctcattttctgtatatctatctcacagtgccaaagaccttccaagtaattgaatctttcctttctgtgattgaattccaaaggggatttccataattcctttttttccctgttaaaaccatcaaattaaagtaattctggcagtactgtaacttactaaaatttcttttggagcaaattatatatgaacactcataagagctagggagaaaaacatgcttttctgacttgctaattagtgttaatttgtatatactctctctttgtatatacgcttaaaaaaataaaggagacacgattgtttctggaagaccacacagttatactaggctgccagataaagtttctggaggcaaaaatccctacggtttacttgtgaaagtgttggaatacaattacgaatcaaaaaactaccaaggaaattcttaaatactcatgggttaatccaattgtgattttccttttttat

SEQ ID NO: 123941 - DNA, 1050 bp, Homo sapiens
agcaagacttgtttttaatattaaactaagaaaaacaaattgctaaggtaaatttgtcacgcacagaaatataatctgtgccaatagaaagaattgttaaattatccactgtttaggattagccagctttctgaattagcatggataattgaagcttgacagttcttagtagtattatcaagaatgtctttcaaatgataattttctttattgtacttgattaatttgtaagtaattagagtttagcagtaacctgatgtgttcagtcttcttattaatgtaggtttatattcataatcctaagtactttgtaaactcatttgaatacgtcatctgtattccaccttgtaaattcaatgtttgtttataatggaaacaagaattagtcaatttgcttgtcctgaaactctgattgttataagctcttacttgttaaattttaatatgcaggttatagataccaaggtagctcatagtaccaagaaacctcattgtattaattattttcctgaagtactgtagtgctttaacataattaccaacatagcctaaaaatgagtgttctatttttaaaccttgacataatttaaaaatgggagtttgtacaacattttttgtgggaaaatgattaatctcaaatttatttttgacataaaagcattataaaatgttactccatgtgaacaaccttaattcacctcctgaatttatgttcttattttctctgcttttcttggcttccaggacatttcgctctcctaggactaatatcttagcgctctgtggagataggaaatttgagtcctgtaacttgtttcttaaaagtaattgcagagcatttgtatatacaatgccatttttaaaaaatgatattttagttcacatctgttttccaaggaattatagcttctttgcagatttacttattttccccagatcagtggaaaatccaggatatttattcactagtctcattgttatttatataccattataatgatcctcagacttataaagcatgccgcattctaaccacagtgtatctcacat

SEQ ID NO: 123942 - DNA, 1099 bp, Homo sapiens
aattagctaggcatgatggtgtgcgcctgtagttccaactacttgggaggctgaagtgggagcacggtgtgagcccaggaagtggaggttgcagtgagccaagatcctgccattgcaagccagaccctgttttaaaaaagaaaactacattttatcatactttgttgtaaactgcttctgttttttttcaaagtgagtgagtgtaagttacaaatccttagttaactttttattttcactccgttaagtacttgttgaccgtgtcctctgtggcaggtgctgttctgggcattgttctgggcaccagctacacaccgtttctgcctcgaagcacctcatgtgggcttcagggcaggcactatcattcagtgtttacagattaatttgcaaatattctgggaactctttttcaaaattaggaaaataggagaaataaatggatgggcagtgactatatttaatatgtataaaaatgaaaaagtatgaatatgtttataacttacatattgaatgctttgctcttggctattaaacttgtttcccattttcatctttccagcaatatttcattgaacattcctgttgctagaccactgtccacatccacaatcttttctgtaagatatattcttataagtgtagttactgtgttaccttgacatagtcatttcaagacatttgatatgtattgacagtgataagtaaaatatttatatctctgctgtagattgttttaaaatcagaaagaggcctgtaacaaatattagagtagacctctggcagataagttttcacatgattattcatgtgtgtctgtatatctatacacatgcatacacacacacacacacacacacacacacacacacttttcccccaaaactttctataatgaatgcataaaataaagagaaaagaattttggtttactacagaatttacaaactttctaaaatttgaaaaaacataaatgagtatttgtttttaaatataatatttaatcagttttaatgattaaccttagatgcctcatagttttatagaagatagagtatatcaacttcattgtatcttctttaaagtacaaaagttaaacatg

SEQ ID NO: 123943 - DNA, 1056 bp, Homo sapiens
ttctgaaacagtaaaggggattttcaagggtatcactttaaggggtgaggaggggagaggcagtctaagaaagggtctgacccctcaaacaaccaatttgtgtctgtctgacacatcaggcaggtgtgaagggtttccatcatagatattggaaagttggaagagccagtttttagtagttattactaaagtctcttactattttaacattttttatttctgagctaaggatagcaattttttttaaaaaagcaaaggaacattacctacgaagtaatatataaaatacatgtttaccattgaagctacacttcttatatttttaaaatataaatctctacacacttggtaaatgcagcaaaattatttgacttagtttaaaactgattaagaaaaatactgtttttcttgtagatttttataatataaacaaaatccgaagtccatttgtttcacgattcagatgtgaccatcctcgggcacacctgctgtgtgttagagcccaccggacccatctagctacaataactcattcagtattccttaagaagtagttttcatcatccctaattcttagacgagtcaatgaagacttggttttttaatttagaacacatttttattcacaaatatttataaattgtaacattaactaaaatttcttagctgattgtccctgggaagtcacatttaaggtgcatgtttgcaactcaaatgcatttctgctaaagacattttaaggcatcagtgaaatattccaatgagctttgacacatagtttaagtacacctaatagaacagactgaggcattcatgtatctaattattttttaaagaaacccaagatagaacagtgaagccaggaatttgattggtgatgacctggtttcatccctggtgctcaatcttctaaggagtctgggggagaggtgacagggttagtacctggggaggagtgccagcacagaggctttggcttcctaaaggaaggttaaggcagacgttcccatagagtgccacactcccaggctgcacattctgcctacaacccccccg

SEQ ID NO: 123944 - DNA, 1050 bp, Homo sapiens
ttcttttttcttttttttttttttgagatggagtttcactcttgttgcccaggctggagtgcaatggtgcaatctcggctcatcgcaacctctatcacctgggttcaagctattctcctgcctcagcctcccaagtagctggaattacaggcatgcgccaccacacccagctaattttgtatttttagtagagacggggtttctccacgttggtcaggctggtctcgaactcctgacctcaggtgatctgcctgcctcagcctcccaaagtgctgggattagcgacgtgagccaccgcacccagccaagattttaattgtcatactgtaaaattaaggtgggtggggttatcctaaggagacctttatcttctcaatattcatatctattactatgaatctcttgagaagcattaacccttccaatggaaaacatctttcaaatgctttccatttgcagtaagttgcataacattttactaaacatcattcaatactttttaaaaatcaacaaattatagcattggattggaggtaatttagtgtttagaaatcatcttcatagaaataatcactgtagacttgttattaatttttatttttgaagagttgcttgggtaatgattaagtaatttatatatgcacaaaaagacttcatttacataaatttttatttatatattttaaatgcattatgagaagtgctagtgtattagattggtaatattaaaaccacaagtcaaaaaatacaaaagttaagatttttataattctatttgggaatctctagctttttctgttggtgtgggctataatttcaacactgcattattctaacttattacatttaataaactaacaattgggactagcttcaaatctcaagcagcaatttagtagatggttcatttcatgagaaagaaatatggactatggtgactatgactgtactattgcagaaatggaagaaagtgaaagtaaaatgtattggttagttgcaatattaccagtaatattttgtctggccaataatattagaatgtagatcaat

SEQ ID NO: 123945 - DNA, 1034 bp, Homo sapiens
ttctttcatccatcacacatttcagaaggttgcaatttattaagtgcagtgaaaatcactggtgatataggcctttgtgcagtgtatacaattagtcataagtacagtcatgagctgcataatgtggttttggtgaacgatgaactgcatattcgatggtgggaccgtaagattataacagatctgaaaaattcatattacctagcaatgacatagccattggaacgttcagcaacatatgttgccttttctcttcagagataaggatgttctttttctccgggtataggaagggcacccctcacatatgagggtcttatgaccggctttaggaaaacaaggtgggagaatgtgtgagagaacttcctgcttcttccatttttaaagatgtggcatatttggggatcgctgtcctgaccctgtcatcactcaatccctactttggactttagattatcttgcaatgccttctcattattatttattcaaatgggaccctaacacaaaaccaatgtggtatagaaagttaacagcaagaagggctagtgtctctgaggctgcagtaaacaggaggaagggcgtggtccactctcagaatgctgtcatggttcagagctgagggatttaatattgtttgggtatttttttctcttctctcaccctcttgccccattcctcactttatagcaacaccgatgtatttaccaacctcaagtgtactaacttgagcagtttggggaatcggggattaagatcttgtgcttcttggggccctggggacaatggttgaactgtgtcaggcagccagactggaatcaggtggagtcactggcaggttagaagcccttaattttgtcatgcctctcacttcctgtgaccctgacctgcccctacccactcacccacatggctccagccatactggcttccttgattttccaagaaaacaaaactcccaggtctcccgctggccttcatcaggaatgagtttctccaactcttggccaacttcccctcttcagggctgtgctccg

SEQ ID NO: 123946 - DNA, 1058 bp, Homo sapiens
cacgccgggcgatcagtgcacggcatgggagtgggtttctcacggtgagcgtgcacgggtgggggcatttttgaccctgcgtgatgggaatctagaagggcccagggatcccagcacgagaggctgaggcgaatgcagctgcagggccgtggaggctggacacaggtccctgcaggggaggccgtggtgggttcgggccgagccgtagccgcctccacctggctgtcctcggctcctggggcagcccaggagtccaggcagccacggctcctgtgtcactcccgccctcctgacctcagcggcggggaattcctacacagaggcagggagaggcgaggcgacacagcccgtccctctgcgagctcctagcccggagcccgtccgcgctgggcggggagagaaggtctgagagtgaagcaagctgagcgttcccatcagtctctagaagagcacgtgcgactcaaggagcctgggaactcaggggagggcagaacaatttactcaccctcactacccacccctgcgaggggttccgcagtggcacggaaaggctcctccatccagtcaagcttagcttttgtctctcaccccctttaaacggaccttttaacgatggcatgaatagtggtattcagcataacaattacacttggtgacattcttactttctctgcaatgtccacaaagagacctttaaaaagtcattagttggtgctcatggaagatttgcatataaaggaaaatcagaatgaactctcaattatcagcaaatccagaataggtgatattttaggggacttaaaaactacaaattatgagctgactgaatagagaagcctccttaaattaaagctttagaaattgctatttgctttcttgctcagattaagtaaaactttctgttgcataaatagaaaagaacgctattttctcttgggcgaatatgtgcatgcctgctcacttggggcccattttgagcgtttaaatacattaaagcatattatacagatttctctaggcagatctgtaaggccttagctgaattggtcgcaatctct

SEQ ID NO: 123947 - DNA, 1395 bp, Homo sapiens
gcatgactaggtttgattatacaaaaagtaacaacaaatgctggtgtagttcctggcattctagctcacaaatcactttgatttgcattgtctcatttaatcctcattacactgtgaaaagaaatatacaacctccagtttatgaatgagaaaaccaaggcttggagtgatcaaatgatttgtctaagatgtaagatttagctggaaagggatagagaccagaatcaaaccaaggcattcagactccagactctgggctgttttcacaaatcgtctctcatggtgggttgggtgggaccagtggtctccaagccagaactcactgagatgtagcatcaatagcagtaaagctcagagctgaagcatgaggcatcagctacctttcaacatcagcagggctcagaggggatggggaaaagagggtgggaggggtccccaatctctctacctgctctagtctttcattgtgaaagtgatcctttgcagacacaactcctctgtttttttcagactttacatctgtacctgatgttactgcctggagctcaccaaatcaaagggatgcagagagaaaaatgcttatatctgtgcttactttttttttcttttgagagagagtctcgctctgtcgcccaggctggagtgcagtggcgtgatcttggctcactgcaacctccatctcccaggatcaagtgattctcatgcctcagcctcctgagtagctgggattacaggcatgcgccaccatgcccaactaatttttgtatttttagtagagatggggtttcaccatgttggctaggctggtctcgaactcctgacctcaggtgatccactcacctcagcctcccaaagtgctgggattacaggtatgagccactgaacccggcctgtattacctttaacatcatcctttacaatttttattcgtgtgttttcattatgcaaacgttagtactgtaatatacattacatattactaacccacgttgttgcagtaatataactgtgtgtgtgtgtgtgtgtgtgtatgtatgtgtgtgtatgtgtgttgcttttcatgcataattttttaaactgatggagtgagtgcatggtcagtcaaaagatttaaaaactacttttcccttttttttttttttttgttttgagacggagtctcactctgtctcccaggttgaagtgcagtggtgcgatctcggttcactgcaatctctgcctcccaggtttaagctattctcctgccccagactcccatgtagctgggattataggcatgcaccaccacacctggctaatttttgtatttttagtagatatggggtttcaccgtgttggccaggctggtctcaaactcctgacctcaggacccacctcggcctcccaaagtgctag

SEQ ID NO: 123948 - DNA, 1125 bp, Homo sapiens
gcctgtgtggtgagcattttccttctgtctggttgtttcttcctttgttctccattaatagggaaaagtgtcacttatgaaagaataggaatgttttacactttgtgacttatatcaagattgcacaatttttattgttgaagcaactgtgagcaggaaaagagaaccagtgaagtgttagtatctttgttctgatcaccttctgtgtccaagaacagtcatgactgcctaaagaaataaagaggccgttcaaaggaaaaggtgagattctctatgcagactatagaagaaacccccacaagttggggggtggggggcaggtaagacggagaaactgacatcttacaattgctcttaacgggtctacttgtgttttgttgtttctttgtgtaaggttactttgactagaagcccaaatctctgaactagataaataaacagaatagactcattacctgggctatgcaccagagaactgaaacacaaactgtgctttagattgggaatgattcgagtatctgagattggaaatacaaaattgaaaaggcccatttatcttttgatccactatgacccagaggcaaaagcttgggttatgagttaaaaatgctgggattcctcagtggaaattgagcctgagaagcagagctcctcctcctcctcctcctcctcctcctcctcctcctttgacaggtgctgctcagatctccctggactcacactccttgatgtttcacagtatcacaggccaggcctcaggaaaccctggttccacctgcagctcacctgctcccgacattccgtccctccccactcccccttatgcaccccagcagctgctcaccacttcccagcacctagagcttttacacaaccccggggataccagaaagcctcagtggcatcccaccagaaagaactgttaccacaatccctcaggagcagtagagtcacaggtggctgggggggagtgatgtcctttaaccactccccccagccttcacaggtcccactcccccgcaagccaaccccaaatgaatgcatcatttgagtaaacactctatgctccctctgcaaacaaacaaagcttcaacagaagtctcttcaggtccctcccaaacagat

SEQ ID NO: 123949 - DNA, 1037 bp, Homo sapiens
acagagtatcactgttgcccaggctagagtacagtggcgtaatcatagctcactgcagccttgaattcctgggctcaagcgatcctcctgcctcagcctcccgaagtgctgggatgacaagtgtgagccactgcacctggtcctcattgaaactttttagcagtgttttccatactctatttattataggtgtatgataatctatgtaacaacctatgcaaactcattcagtgcacagtatacaagctgtgtctcgaactagttagtagaacatcttgtgaaggcttcgtgatattttaacgaacatacttgtcactaaacacaaatggagagaactgttcatcttcacaaggatcagctcggtgagggactcactcctggctttctactggagaagtgggcgtgcctaggaaatgcatcaaaaccagaatctctagcacaaagctcagtctcttaaacagagatgctggtcagcagccacagcaaaacccaaaattatgtatggcttggaaaggatcacaatgaccagagctgatcactggataatgcaagtaatttcaaagtcaatgtcgtcttcagaaagaccacttcaagtcagtgtaaccactggataaactacacaggtaatagccagccaggcatgtgtccagcacacaggaacctcccaggagggctcggctgggacactggacggggtgcctggcggttcctgcctgtgtggcctcgggcaaggagacttgctggtctggtctgcgagaatgtcatctgtaagtgaacgggggagaatgagacagtaactcagagcttatacttggatcccaccataacacttataaaggcttacagagtggatgggaactcataggccatgcaagaaaactagtgatgtaagaaaattttttttttttttttttgagacagatcttgctctcttgctccggctggagtgcagtggcacaatctggctcactgcagcatcaaactgccaggctcagatatctgattctcccatctcggcctcccgagtagcagggact

SEQ ID NO: 123950 - DNA, 1092 bp, Homo sapiens
gtaggatctctttcggatgttttgtccattaaatagtgaatattttattacactaaaaaattctatgcatgtagacttacagtaagtactccatatacattttaggctgataaattggaataactggtattctaaggggcataatttcctaacataaggacacagttacctgtgctacaatgaagagattaaaaattggttattgaatgctttatcttaaaggagtgctgtgtagtaaagaagattcatatttgctaagctctttaaaaactgtaatgcatggtgcaaatgttacatatatagacgtacattctctttgcaaagagctttcacaaaggacaatgtactatgaagatggccacttggaagtaaataggactttgaggcgtttctgatgccactgtagagaatgtcaacaatggcagtattaaatttgctgttttttattatttatttcaatgcccagaagcaaactgttgaataatttcaccatcaggttacaattgaattaggttctaaattataggaggttagtgggactctgtggacctgaaattgacctctgctgtcgcctggagacagttctgggcatcttgctgacaactgccgctaaaggaattgtggagcctgttggtcctcatgagaggaagtcagcgctttcctcatccatcttttcttccttcttaagaaaaattcttctgtcccaaatttcttcccagaggagggttctcctagaactattcaagggtctcttccaacagcatttgacaggtgtggaattactacttaaaaaagtcacgagactaactaactgaaggggaacgatggtgcttgactacgaatgccacatttgtgctcaggtgcaggttattcaagctgtggctgaatgtctttggaaccattactggagcaaagcctgcagacaactccttgctaaaccataaaatgatgattctggcaagcaaagatcagatgcaatctgagtgctctgagaagcagaagaatcagtgctttgaaagggatcacaaatactggattttttgttgtggtggtggtggtggttttgtcttttttagaggcagaaggcagagg

SEQ ID NO: 123951 - DNA, 1039 bp, Homo sapiens
aaattagccggcaatggtggcaggcgcttgtagtcccagctactcgggaggctgaggcaggagaatggcgtgaacctgggaggcggagcttgcagtgagccgagatggcgccactgcactccagcctgggtgacagcgagaatccatctcaaaaaaaaaaaaaaaatcaatagtctcatattataatgttcgtaagaactatgacaccttgggagagggtcttggagaactggctaccaacaatttttattaacacttctggcaaaagcactagctttcggtatcaacatcattatgataaaaatgtgtttatgaaatgcctctaataatcactaatgctttggtgtggttccaaatagttcttgtccccgaggaactaacaacacaaagttgtagattgtgtcagattttgcagttcataaatcgtctccacatcaatggtcatggggcagcattattagacccatttttacaaatgaggaatctgatacctgacaagaataggaatttacataaggtcattaagcaaccaagacaggcacagacagaacttgaactcaggagtcctgatcccaaccccgtgctcctttcaacgtgccacactgactcaacacccagcaactaacaacattcagcaaaagcatgagaagacatgatgttctatgctaagactggctaataactgctatggggagagattggaaagggttcttctggaatccccatgctccccaatgccacttcctaacaattatccccattcaccgtgtagaaccccattgctcctttaacattcaggccagttagtggtatcgtcctgtgtccctctcacttgtgtcacctgctgacctcttcagccactgaaccatactgattctagcatctggcccagaagcctccatctctgtcatccgaggtgacctggtgtccatacggaagacagctccgaattcttccttgacctcttcggctccactggtcatttgggcatcacttcagccatccagacccacagcctcagcctcactttggacctcag

SEQ ID NO: 123952 - DNA, 1056 bp, Homo sapiens
cgcgcgtcgagcccggtcgccacgccccttccgagggtcgctccgcccccgtcgggccccgcgagcgcgcggtgggggaggggagggccccggagcgcgcctgcgtggggcgggggcggcagccgactaggggctgggtctggccgtttagggccgggtcttggcccgtcgcccacggtgcggagggctggtgggctttccttggccgtcgggcccgccacggcgcgggtcttggctgcggggcggaggtggggcgggagagccgaggataagagtttgaggcttttcgaggcgcgtgccgcggcgtccgcctctgcgggactctgcgccgggcgccctcggccggcgcgcccggctcccgctttgtcgccgagggaagcacgcgcgacgcccctcccgtcgccgccgtggcttctttcggtgttcgtgatttgctgagaggctggaaagcagcacggcggagaggagccttgcactcgccaggcgggaagcctgcgcggacacgcgtgcgcacccacggggcggcgggcgggcgtggggggtccgggccacgcgggcgacgcgcctctagggaagcgatcttgttgcaccttcccgttattctgaaagcaaatcgtagccagacccgagcgcagcggcttagcaaataataaggggagcgtcagtcgtgctcgaaatgcttccttcgcgatggcgtcagtgttccgtgagggaatgaagccgcagtaggaaataaagaggctgtgcgcgtagtctgaaaagcagaagtcaacatttttacagatgaagaaagaatacggaggcaagaggtctttctctgcagtttggtggatttccaacatttagacttgtttggaagaatttcctcagctgcaccaatgaagtccttgatctatagaagtcggcagtccctaaatctacgtctgcattttgttgcaaatcctttataacattccattaaaataatgcagagttatttaatatccagttggccatcgtgagagtaattcgcggctgagattttgttaatcattctgtcttctgacttaacagtga

SEQ ID NO: 123953 - DNA, 6714 bp, Homo sapiens
aggaggaagaggaggagcgcagtcggagcgcggcggcagcggcagaggcgccgcggcggggaccagcccagagagaccccccgagcccgcggcacaggcggcggcggcgctgagcgggctcgaccagccgagcgagcggcggccccggctcctcctcgtccggcgccagcagcccgcgccccgcgcccgcactcggccagccgagacccgcctcccgcccgcccgccggcctcgtgagggacgcgccgagccgggcggccgagagcggcggcggctgggagcgcgtcgggcccgggcggaaagtgcctgcggggggcgggcgagcgcgcggtgccggccgccccggggctcggcgcgggagccagagcgggagccggcgcggagcgggacgccgggtcccgagcggcccgcggccggggctcgcccccgcccctccctcctctccggcggcggcggcggcggcggcgggcggagtgagctgcggagcctggaatatggtcggggaaatggaaacgaaggagaagccgaagcccaccccagattacctgatgcagctgatgaacgacaagaagctcatgagcagcctgcccaacttctgcgggatcttcaaccacctcgagcggctgctggacgaaggtgagcgtctccagggccccggccccggcccgacccccgccggggcggcccctttccccgcttgggatggtggggagggcgggaaggtcacggccgggcgggaccgagcgccggggggactgggaggccaggagggcgcacaaaggaggtgccgggccgggcttgcggcgggcgggcgggccggggtggacccgccggtgccggacgccccctgcccggccgggaccccgcgccgctggcgtccaagttggcgcgttgcggagggctgcggggtgagccctgcggcccctctagcttcggcggtcacatttccgagaggtcggcgggggctgcgcggactcggtggtcctcgccgagccctcccgagagcaggcccacgccgcgccgccggcctggaggacgcgtgtgcccggcgcgggccccgctcctccgctcggcctcccgagcctgctctgcgcggacccccaccgccccgcgttcgggagctctcccctcccgtgaggactaaagcggggtttcgtggttggggagttggtgcagctgttcaatactaagtggaagtcagtgtggggctcgttagtttaaagaaattccgtaggagaccgaaattatgctggcgtagccgacaaggaggactaagtgacggcgaaaagcacttttttcccttttgtttggggaagcgagaactgttagggagttgaacttcacttttcgggggtggggggggggggggtggagtgcgaaataacgcgatgacagatcggagcgcagcctgagttagaagaacttgggcggagggtttgctcccggggacgcagccgcctgagtttgtaggacagggtttcgagacgtttggaaagggcgaaataaaattgagccaaagtttccaaaaagctgtatggagcgctgtggggagtgaagaatgacaagaagattaatgttgaccaactttggaatttccttaagaagttctcatagcagtacctgaagtattaatttctagtagctgtgggtttctgtggacgcctagagaaaaaaaagaccacaaaaaaagtctgtttcgaaaatcgactggccaggagtttgtttgtttttttttcctgcttagaggcaccaccggaggactgtgtaaaggaaactgaaaactacaggttgaagagatgaacaatggagtttagatttttcgcaagaatttcgagattttaaaaatagagtcggggaacaggagtttgaagcttggggagttggaatgtcactagagaacaaaaggccggaaatgtttccatgataaaaaatggttaaagaaaaatcccaggagttctgttgtcttgaaagtcatagaaacaacttaaaagtagaaaatggttaggtgttacggctttctcgtcgttttgcttccgtatgttaaacatacagcactcaccaacgttgaaatgggcattttccgctgttggaacagcaaatctgttaatttcaagttgctccagagaaaacctgagctgtccctttaaggggttctgcttttcctatttgtgttggcatttgaaagattgtggaggcagaaaactttctggaatgtcaaaaaaaaaaaaaaaatgctggaactcttaaattgagtatttccaaatgtgagcgctaaggggcgccagttattttttaaccatggaaatggttggaacaaaatgtgtaacatactcaatctgactgacctatattaaatttagttgaaacttaagttatagattatttgatttgtcataatgtgtttatatagtgttttcgaacattgaaaatactttccttaaaattattggcacaactttatgacgtttcaaaataacactcttactgtcttctccttggcatattttggttaagttaaagttttagtagtattagtaacaatttctggtgaaagtttgttttcttgagtgcagttgtttagaaggaatcctttatcgacgataaaatgaaaataggccttggcaatatttagggttaattaaaattaaattgcattcctgaaatgtcgaattcaaagactataggagattccaaaaaaaagtttgaaaatactttcaccttatgtatactatttaaaaagctgcatacttttgcgttctttagttttaaaaggcttcttgtgcttttatgttgatctaaaatctctaaatttagagctgattccttgttatcaagtttccaaccttaggctttaataatttttaatctttcaaatccagaaatttcaattatgtcattgtctctgacaaaggcttatttctctctggttggaaatagtactcgtttgcgttttaaatgtaagagaccactatgatatctcctagataatgtttgtttccccttccccttttaatgtggtttactccatctcttgtcttgctatctttagttttagccttgtcaattccccagtgtaaagattgcttctgtgtggcatatagtatgtttaaaatgggcaatataatgacgaggaagtttgattgttttttatcagaccagtacaaacatgcaggaaaaagggctattccttagtgtggaataagcggcttcctgtaattgttagccttgttataaacttaatttgacttaagaaaaatattggtttctgaagtccatcacatttttttttctggatgatttaattgtgaaatttggcatcttgtgctttacccctttgtggtttgtcattgtccaaaacaaattgatcatgacttttgtttctggttaggcattacttttttttttttgcctataatgcttggctgaaaaattacttttaaatttagataaaatttagtaaaaattttactttagtgattggtttgatgaagttaacatcgtgcttagagtagatgtattttctgataattaggaattttaaatgagattttaaattttttattttaaaatatttttcaaagaataagctttttaaaaatatgcttgtcagcctaagaatttccatttggctagttacaaatttgaggattaagtgtgctggttttcccagttgatgaagacttggatgttttagaatgagtattttaattccttgccaagttaacctttagtctgtatcttgactgtggacagtccttttgttttactgcttgtttttgttttgttttgttttttgctgttgctggtggtgggggtgtgtgtgccagctcttccactgaagtatcttcaacacggttgttttttaaagttgtgaatacattttaggttgggcccatcataaaatataaaggacataaacttgagtttgaaaccttttattgaagatagagatgattataggattacacataaaacctaggtcttaaactgctctacctttagagagacgttttcaactgaacccttagagcagttaatatatggtttttaaaaaaacagacttttcttgtcatgagaatgaaacaacagtagttgaatgcaaattgttataataaagttttgtaatttagaatcgagaaggtgaagagtacggtctattagacttaacaatcctgtattaggggaaaatggagaactagtattttaaaagctgattttgagttttcaattttttaggtggaggtgggcttaaagctgctgatagggaaataaaaaatgtgtaatgaggaagaacagtcaatctttttatcgtggatatcagaaaaattagtgtgtggctcagaaaaagagagcagatggattagaatgccgtattactgatttgaaaatatattttcattttctgatggtctttttgtgtttacagtaaactttctgtctgacctcagtttagtttataccctgcctgctccctctcctttaaatatatgagtaaaaatatttcgttaaaacttgcttaaatagttgctattttttcatgttaatgtttattttcacttcttctgcctctgttattggatgtatcataaggttttcttaccataatttttttttttcctgagaattcatttacaaaagccttgacttaagaattatatggtggttggtattgagaggactcttgctatacagatttcttacaaaaaggttttctttttgtctgaagaagcaattactgttgtcagtaatcatcatctgtaacaaacagattttaaggtgaaataatctgttctttagaaactaagatattgcttttgtacacagtccttgaattagttgtagcaagaaggaagctactatttataatcacttctttccattatcttttctcacccaggaggtgtcagcagctatatattggcagtcacggaaaagatcagttgtatcattatggggcatttattaaacattcattctgtacttttaaagctaaattcccctgtaggtggaacgtgattcctttggaaactgtatccagtttacatgttttgtagtaaaagttgtatccgactgtaacacagttgagttgatagaaataggtctctttgctagtcacatttacgagtgtattttgggatgaacactttttcttaaatgactgagaatgtcaagttaaatcaagttaatttgacttcttaaatgctttatgcacattatatttctgttaatgcttcactagtcactgtcgctgtcctggagctgattgaaattggtcagtttcccataagagcaaatggtttttggtttcctttttcagggaaatagatttctgtgatgaaagaagtgaagtataataaaaccctcatgctttgacctggccttcaccgaagcatgattcagattctttttttgaggccaatatacttagacatgtaagggcttttcttttcttttcttttttttttttttttttggtggtttttttctttccttttttttttttatggtttggtttggtttttatatcaagggaattacaccagtgtgatcataggagcaactttttataaactggaactacagtttaatttacttgagaaattcggtgtagctaatacatttgtttgatttatttgtttgatgttgcagttgtaagcaaaacttgcccttctctgttggagatggaaaatgctgtgacattgttggtttttgtttgttgataacttaaaaggcagcccactgagcaactttctgctattggtatgtcagctgttatgaacatatccaaggttctattttaaggccaagggatggggagtggtgagtgggcctatgttaggaggtcacacagatatataccagctttttatttacatgatcaacgggacttcatttttttctccagtccctcctgtgtttgacattaagacagcttaatgtgaattttaagtgcaataatgtgttgtttacccttaatgataacttttagggaatatttatacccctttaaaaaagttttgggcccacaatagctagattatttcgtgttttacagttatattttttacttaacagaaaatcacaactaacaataaacttttatggtgaatatagtttgttatcttagtgggactgttaagaaatttgtttataaccccagtctgtgttaggtactaccttctatggagtgatcattatagttagcattggaatattattacctgtctgccctcttaaaattactttcttgaaggtgcctaccttagagcctggcatacacttctcagatgtttgttgaattaaacatgttgacatcttacctccttttttgatttctagtttctcaaagatagggtatgtgcacatggtttaaaaaaaaatgaaaatctgaaagtgacattagaaatattgtctaataattttaagaaatgaagcagttgtgtgattgttgatagttttgtgcccttagaggaaaaggcacttatatgttttcttaaaaacaacttaaaaacatgtcatgttatttgtagtacttgctgccaaggtgcttaattttactttactgtcattgttgggaaggagatttaggaagataaaattgctttacttaaatagtatagtttcttgtcagtccttataccaaagggtatcaattcataagcagagaaaaactaccagtgctcatctcagctcttggaaaattttggcatttat

SEQ ID NO: 123954 - DNA, 1787 bp, Homo sapiens
atttttaaaaaatatattgcagaagtgatttatctagaattcttacaattagcaagaaaaggactgcacttaatgttttcgtcttcagtttcttgatgcggaaactctagtttgaaaatccggcaatcctatcaagtctaacaaaataaattatgttcataaagttgcttcatgtattagtctaatatttttgtagaactaaattttgaggctggggaaatgaatcgattgtaagatttatatcacattatttattataagcagaatgtgtcatattctgcttagcagataagcagatattgaagtatcggaaagaacataattagtcggatgtggtggtgtgtgcctgtagtcccagctacttgggacgctaaggagcgaggattgcttgagcccaggaggtcaaggctgcagtgttatgatcatgctactgcgctccaccttgggcaacagtgagaccctgtcttaaaaaataaaacatcaaaatgcagttacatccataaagtggctccacataatggtcacaatgtaagtaaagggcatgtgtgtgcaggcatttatatctgtaagtgaagacatgcagtgaatgtgagctgggctttgtgagtactggggctggttaagttccagctgagaaaggttggccccgggattgaataagtagctggccttaagtaagcacctcgcttttgctttagtgcaggagaggtcattgtagagactgggcctgatctcctggtcagtagcaaatcattggggagcccttggtttttaagctgattttatagtttgaaatatataggaaaaaacaaacaaaaaataatacattttaagagtagaattagggaaatgcatagtaagaaaacaaacatgcaattttaaaatttgaaaccgagcctggtgaggtggctcatgcctgtaatcccagcactttgggaggccgaggcaggtggatcacgaggtcaagatttcgagactagcctggccaatatggtgaaaccctgtctctgctaaaaattagccgggcatggtagagtgtgcctacagtgccagctacttgggaggctgaagcagaagaatcgcttgaacctggtaggcggcggttgcagggagaggagattgcgccactgcactccagcctgggtgacagagcgagattccatctcaaaaacaaataaaatttggaaccttttttgtaaactcttcaatgtcatagttttacagggtctcaaacttactttgcagattatatcagagaattgtgttttagagctgcaggggacctgagagttgggagtatatgttcatttcataggtgcaaagacaagtgggcagcagagctagagcaagacactcacttctgccctctgttccattttgtggcgtgcctctccacaaggggaactggagggaaaaacctggaatatttccatatgctaaaaatctgctgctgttgcctcaagttgtgaaggtaaagaagacaaaccaaatgattttttgctaattctgtgatatgctggttttgaacaaatgatggtcagattcttagaactagaatttatttttaacgataactttctaattaagaggctaaaagtgagaaagccatttttagaggatttcagctcattcacttctttgtaagcaaaggctagagcctcagttttttgaataatgtaaaaattgttgctgctattatttttactactcaagaggaaacatttttggctgggtgatttaatagagaagtatgctattgctaagtgattcaagttaggaatgtatac

SEQ ID NO: 123955 - DNA, 1062 bp, Homo sapiens
ttttaccaagtttgatgcgggcttttaaaatttaattgtattaatttttgtgtttattttaggtaaatgagagatatcttgacattctatccctagagagatacatatttgtgtatctttaaaagttaacacttccttacatagtgacattacactgagcaagatggattaatcctacagataacgtaataaccagtccatattcagatttctgtagtggatcccctgatattctttatagctggattgttcaaaccagaatcttactcaatactgctcattaaatctggttgttacgcctttttaaatctagaaccatctctttttttttttttttcaaatgacattgatttaacttgttcagggcttgttcctttatgccctgtgtatctattaacattggaagctagttctaaagtaggttcaagaatagcatcttccactggagtacttcataggtgctgctgtgtactttgttatcttacatcaggaggcacagtaactggctctgccatcagataaggaaagattgatacctggattagagtggtgatagatggatccttgtactttaaaggtagttttttttgttttgttttgttttgtttccccacttggaaccagaaggtgccccatcgaccaaaggtgccccgtcaacattcacacctggttttgaccagttttttgcctgaatcagtttcatcagagcttgcaccatgatgatactttaattctgccattctttctgcaattacttggcatcctttgaaaggtacagctttctgaccccaacacggaaatacattgcgattttgaagtgagtttctaatggggcaagccagatatatgctgctgcttattattacttggttctcaaagtaaagtgttggtttgctagttgcttcaaatggagaccaatgaattttttctctcttttctaatcatctttgtagactcatggatttcatagattcaatgtacttaagtcaactataattaattttgatgttaaaattattacaactttagccattgataattaaactggctcctgtgtctgtt

SEQ ID NO: 123956 - DNA, 2002 bp, Homo sapiens
taaggaacttatgttccagcagatggggatgttagtacacaaaagagagcactcagtgattaaaatgtgttgagaaataacccttttgccagaataggaaaatgttctcctttaaattgtaagggaagagttgctcaggaatgtgacaaataacagttacctaattgagtattttcattggcatgtgaaaaagttgtcatagttctttaaagaacttgtctttttaagagactatatgttggtatgttgaccatattaaatgtaactagtttagtacatcagattgattgcagctattttctgaaatagtttctgcctttacaactcagttgtttgaagggtttttgttttggtgggtgactgagtcacatatattgagaggtatcctgtttgtacgttttctttgtaattataaagtctttaggcagtttatttctgtttattaaaataaatcagaagaaaatgtgtcatagtttactatatgttatatgaagagaaagttcttttggggatcatagttttatcatagtaataaaaaattatcagcagtaaaaaagatagtcttatctcacttttattatagtttatagcattacgacatactgttagcttttttagtaggtaaatactacatagattgctttaacatatgctttgcaattgttgaaatactgctcatttaagttccttcttagatgtgattcagaagtgtactttaatgtatttaagttatattttcctagttcagttatattgagctttttttttttttaaactgtcaaggcaatttaaaatactcttgccttcagtgacttgaaattgaactctgcacaggagagaagaatatgtcttgtttctatatagagaaccaaggaggaagagattgactttgccacctttgtaactgataataacttgcattttagtccctgctccccagccccacttttttccttttctgttattcctaaaatgtagagaattggagatcgatccacagattttcagttcatctttggcagtagcatggtttgtaacttttttcattcctggaagaagcagtggtgagggcacagagatagcgtagcacattgtctttgaaccttaatgggaattacttcttttcagggaaatatagcaatggccaattttgtctatacattttaagattgtttcttatagttgttagagattttatgagaagcttgaatttctttcagtaatcctaaagaactgttataaagaacttatttatcagaagaaatattccttattgggaaaaactaaaatatatcaattaaaaagttaaaagtactcatcatgcactgatagctgctcttaatgtttccttgtagtccccccccaccagtgtttatggatgtagcaaaattggaattacggtttttaaaaaaaattatatcatgagcaaaatttttccttgccatttcatattctttgcaaatataatgtttatagtaatatatttcatgctgtcgaggtatattataatttacttaactaatctgttggacttgccactttgctttcaggaaatgtgtgtaatgatagcattaagtggctttagaagttacttttttaaaagccttaagttacaaaatactgtaactgggaattatgaataccaaactcttatttttgcaatgcagttaatctgaaataagcattttatgttgcattgcagtagaaactggttgttaggatgcaacgtgattttcgaataatgtcagagttgcatatttcatgtattagtttttagtgacttaacatacttaattgaaacttttcattctattctaggctgtttggttgtatgctattaatatgtgtgcgatgttatgagggacacactaaagcttcaaattcattccttcaagttatctcagtagttggaaagaatatgaaaataagagtaacaaaggaaatagaaacataccaagaagactaaagactggtgctaaagagggtgtttttggctgaggag

SEQ ID NO: 123957 - DNA, 1526 bp, Homo sapiens
aggtctaggaacaattcactgaatatttgcctaagggttttcactttccatgttttacacaatataaataatttaaaatcccccccctttttttttttttaaagagatggggtttcaccctgtctaggctagagggcagtggtgctatcatagctcactgcatcctctaactcctgggctcaagcgatcctcctgcctcagcctccagagaggtaggactgcaggggtgagccaccatgcctggataattaaaaaaaattttttttttggtaagagacagggtctcacgatattgcccagcctggtcttaaacttaaggcctcaagtgatcctcctgtgtcaggtgtcagccagtaatttaaaatgttttgttaagagtagtctctctctttccccactttgttatagatctgagtcatttgctttggaataatgtgataaaagtctaagataaaggattgctagactaatatttagacatgtttgtgttgatgttctgtacaggttgtagttttataggctagaatagactaaattttgaagggtgattagttaagaatagactaaattttgaagggtgatctgaaaagactttatattgttcttttgtaaatcttgagtaaaagaaaataaccaaacagggtagtgagtagagagataaatgaatcccttaagagaatgatagtaataaaggcaggtggaagtaagatcagagttagaaaatcttagatttgttttaggttataggaaaattgatttattttacatgttggtaaaaggcacaagaggcttctttttacattttactttatcaaagtgaaactttttcatttgatttttaaattggaacacattaactgaatggcataggatatatcatagtgatgttgtttaggtacatggtaactgcagataggtctcaagttgaccacatttgaatgttacattattactttgtggatatttaaagacagatggcttgaagcctgagaagggggaaggagtgaaagtataggagcaagtggtggtaatttaagaagatcctcaagtagaagtctgattttgtgatttcagagtctctttaattgttaatgttactattattaaataacaggtacatatatcctaacagtataaatatgaaccagaaaaatagtataagaatgaaccacaggccgggcacggtggctcatgcctgtaatcccagcattttgggagaccgaggtgggcagatcacgaggtcaggagtttgaggccagcctggccaacatagtgaaatcccatctctactaaaaatatacaaaaattagccgggtgtggtggcacgtgcctgtagtcccagctactggggaggctgaggtgggagaatcgcttgaacctgggaggcagaggttgcagtgagctgagaccacgccattgcactccagcctgggcaacagagtgagactcctctcataaaaaaaaaagaatgaaccacgaaaggtagcatgccttgcacttttaaaatgctacctataaggttaaat

SEQ ID NO: 123958 - DNA, 1665 bp, Homo sapiens
aaagtttcatgaaataatacttgtctgtactgcctgtgatgcagtatactatttttctattctgtttcatttttaaaaaggttggttgtgattgataatattgatttagtggcttgtgtgctgtgcagtcttagcaaaaccgatgtcgattcctgctgtaatttagttttcaacaaacttttttttttaatccagctctttgctgggtgctggggggatacaaagatggataagacatagtctagtgctcaaggagccacacaatggcatggagagtaatgaaaatagaagctgcaatgctgtaactgccctaacagaggcatgcccagcctgagatggaaggggccacatcatttcctagcaggaagatggcagtttcttctaggttcacagattactactgcgtataatctgataatccctcttatgacgggcttaccttgatgggaaagttagttttttacctagattttataaaaactaaacaataatcaagtttacttgaaaataagatatttttgaacttttagcttactggccaagtttgttaaaaaataaatattaatcttggcactttgggaggctgaggcgggcggatcatgaggtcaggagatcgagaccatcctggctaacacagtgaaaccccctctctactaaaaatacaaaaaattagccgggcgtggtggtgggcgcctgtaatcccagctacttgggatgttgaggcaggaaaatggtgtgaacccaggaggcggagcttgcagtgagccaggatcgtgccactgcactccagcctgggcaacagtgtgagactctcaaaaaaaaaattaataaataagataaatgttaattatatagataatctttaaaaaaattaaattttacaaatgagtaatattttcctaaatatgtcataggaactagctttaatattattattggagaaatacttctttcctgactttttcccccctcagtattgtgacttattaagaaaggtaaagtcaggtagaagtttaatataaaaatatatttgattatttgtacagatggtaaattaaactgtaaaataaaccattaacttttaaataatggaataaaagatgggtacttaattatccaacacttaaaaatgatttttttaaaaaattgcaacttgtgtatattctgtatattgactttttatctcacagtgaattcacaataatactgaatctagacgttaatagattagttgcatattatccaaaaaacataaagcatgacatttctatagaatttagtttctgtaagttacgcaattgttacaggtttttcctgtgaaggataggctgctacctcaggttgaagaagctaatgttggagtgaatgtggtggttgccttagaatgattttgccggcagcagtgaaaaatgttttccttatagttcttgtgcagcaggccatggagtaaagcacatttttataataaaggtgatgaatttaatcgcaaactggcagcctaatggaaattgcagaccttgatactgggagaaaattgcctataaagcaactcttgagagaacaggctttaaatttatccacccattttgacattgaggagaacattggaatcatagggtattttgcttggcctgcttagttcagatgaatgacacttgagtattc

SEQ ID NO: 123959 - DNA, 1053 bp, Homo sapiens
atcgattatcaaagtataattagctgaatataattatttgtttatgagatgatactaaattcagttcccatagatactggtggtgatttactttttaaaaagagtttttcttgttatgtgcttaaatccacacccgaaatgtagccataatttagttcaagattgtttatgccacagtctggaaaacacctgaagtaattgagatttttgagtggttgtgaatggattttagaatcatgtgttgaacagtgacatcactaaattagccatagtaatgttactgtttcacattgagggtttcaggtgtgatgcttttcagttttttgtttttgtttagataactattttagggtttgagttatagttatgcaaatttacattacggtaatgcaaatataccttccaaacttgtgtcaatatgtattagacgctaaaatgccctcccctcccatctctgtttccctcaaattattcatttgtggttaaactaattttaaactccggaaaagtggttaagccaaaaaaggtcagatcctggaagaaaaagctctgaccttttaaaaagagtgttggaaaagtatttgacggtcattttcataagctaaatgtactgtgaggtttgtgtttgagtagcttttaaggttttctggattatgtggttgaattttaaggaggaacttagtaaaaatgagttgggaaaattaacctgttacattctaccttccttttgctatgtatagtagatctacatgtgagaagtcatttgcaaacagcatttgttaggtgtcttttctaagtattttttatgcctacaaagtctgggaaaagaccattttcagatttcagataatatttcagataaataatgatcagatcagtagatactgtctttcagatctatcagaacacagtatttccagaatataattttacatcacagtcatcatttataatgacattgatgaccagtactattattattttaaagagaaagatatatatacacatacacataaagtcatgcattgcttaaagacagtgatagattctgat

SEQ ID NO: 123960 - DNA, 1021 bp, Homo sapiens
ttttttttgaaacagagtctcactctgttgcccaggctggagtacagtggcttggctcactgcaacctccatctccagggtgtgagcaattctcatgtctcagcctcccgagtagcaggtaatacaagtgtgtgccaccacgcccagctaatttgtgtatttttagtaaagattgagttttgccatgttgaccaggctgatctcgaactcctgatctcaagtgatctgcctgccttggcctcccaaagtgctggaattacagacgtgagctactgtgcctggcctagaataatcttagaagtcctcatggatgagtaaatatggatggtgaaaagcttaaatgagaatgtcttgtctgattttcattccacttttaatttgaatataccatttcctttcccccctcattgtatatgtctctacttttttgttctttactttattcatagttctaatttctactcactgccccatcttttccttcttctctatctagctcttaccatctgtcatcactgcttttcccactatcatgatcactcactctagcagcaaccaaatttaactttggggatggagcagtagtgctggagaggccaaatggtatgagtaaaagaatacagcttttggagtcagctagattttcatctttatgtggtctttggtgaaagtacttaatccccaaatctctctttcctaactatgaaatgaaggtgaaaatattacttacctgtaagggaatctacctgataataatggaataaaatgctgacttccaccacagagttcttggggaggctttttatgtggaaagacattagacttcattactctgaattctggatttgtatctcctagccatatagactgaatgactgtagaatccaacataatgcttttaatattggcataacttccttagtttaagttatatgatgagatgtagaaactcaataaaaggtaaaattattctttgtgttatgaagtatgtttagaggtttcttttaagaggtcttatttt

SEQ ID NO: 123961 - DNA, 1501 bp, Homo sapiens
gctgcgtgctatgtgatattgcaacagattgaattcaagagaagagagaatctagctgtctttattaaaacagacatttaaaagattgcaaaagtataaaactgaccttttcagtaatttgtttagttggaaaataggttattttctgtaaaatgtgcatttttggttaatatataataagtttactagtattttaaaatgaaaaaataatttaaacatttttagttttaatttctagcgtggtaagttttattagacataactttcatgaacagggatctctttgggctcctccaattaatttttagagagtggagtcctgaaaccaaaaagtttgaacagaggagtgacatctcacttggatttcagcaggctaactccaaagaataaagaatagactgaccaaggtagtggtggaagcaggtagaccggttaggttaagattaggtaggaaatgattgtggttagagctgtaatgttagggcttgtgatggtgaagtgaaattggggatatagtctgaaagttgagtacacagtatttgctagtggatggaatatgaagtgtgagaatggacttgacattgtgtcattgcccgagatcaggaggaacaaattttggggaaggcttaggagtttagtcttgaatgtatcagataggttgagaagggagttggtgataggatttcattgtggagggttggtctggaatgtccattaccagggtttttgttggattgtattagtaatatatattttttaaatatagtatttagcttctaatcagttatacttttacaatctcaacacagagggctgtattctgcattgaaaaactgattaaatttgctttccaagtatgttattatatgatagaatgtacacttgaagaggcagtaaaaaagtaataaatgtagatttgccagtagcatgacatgacttagattttctgaatctttgtgaagtaaaccaactgtggtttaattaaaggagatcatattgcttaccatattaaaataatgttttcaataccaattactttgacatttgaaggcactgtgtaatatgttggtcttgttacagaccaagatatttttgctgaattttatttttcgaattcaatgtcagtgcttgttgtagttccttttggaatattgtgtatagtagattgtttcttaagcctttaaaaaactcttcaccgggtacagtggctcacgcctgtaatcccagcactttgggaggccaaggcgggtggattacgaggtcaggagttcaaaaccagcctggccaagatggtgaaatgctgtctctgctaaaaatacaaaaattagtcggtgtggtggcgggtgcctgtattcccagctacttgggagactgaggcagataatggcttgaatccgggaggcagaggttgcagtgagccaagattgcgccactacattccagcctgggcgagactccgtctcaaaacaataacaacaacaacaacaacaactcctcttgg

SEQ ID NO: 123962 - DNA, 1465 bp, Homo sapiens
gctggagtgcaggggcaccatctcggctcactccaggctccgcctcccgggttcatgccattctcctacctcagcctcttgagtagctgggactacaggcgcccgccaccacgcccagctaattttttgtatttttagtagagaagggatttcactgtgttagccaggatggtctcgatctcctgacctcctcatccgtccacctcggcctcccaaagtgctgggattacaggcgtgagccatcgagcccgaccgttgtggggtatatgtcttaatactggtaatattaactttgattagttggttaaggcgatgtctgtcagatttctccactgtagtttctccttttttccttagtaattaataaatgccttacaggggagatactctgaaaccgtacagctatcctttcatatttttgctaactaatttagcattcattgaatgatttttgtttgcattgatttttactaattaaaattctttaaggaagagctgtcccctttcccccttgtatttatttattcagttatttatatcaatcttttcttatgggttgtaattcattactatcactatataagtaaaaacttttaagaaaagtttctgaaaagttaatacattgagataattcaaaattcagagactcgtaagagtacattttcttctatccctgttatcttgggtacccgtttccattgctaagagtttatttttattctttcagaaatattaaaggattgggaaaagagttgttaataataattgctggattctcaggtatttctttttacctggattctgatgatatcaaactaacttgctgttgcatcttcttcggatattcattaaaatgttacttaactagttcgccattagatttaaatttacatttcagtacagtgactattatatatagatggggactggcttcccctgagtatcctaagaaacgacatgaccagaagaccacattttctattaaataaataatagttaaatattaacgtgtaaaagtaaacaggtttaaaagtaaactcttttttggtaagttgaaacaaaagtcagtttaaatgagaaaggctgcctatccaattaagtaactggtttttcaaaagtgaatgaaggccctccccaccaagtcccccgctctgttctgttcttttcagtgacctattttactttctgtgtctactggcagtatccgtttattcattcaggatgtcactttaggaacctagacctggagttcatctacagaactgtgttctgttaaaatggagtgaaagaaaagggctaaaaagactttctttcacacgctattaaaacagtgaacatactggtctacacttattatagtacagccagcaatacatcaaaaggtggcttattccattttatttccattctctaattaccgtttcttaaaatgaattttaagagtttcttatgccaggaaatcctc

SEQ ID NO: 123963 - DNA, 1047 bp, Homo sapiens
ctgtagtgcagtggcatgatctcagcttactgcagcctctgtctcccgagtttaagcaattctcctgcctcagcctcccgagtagctgggatgacaggtgcctgccaccacacctggccaatttttgtatttttagtagagatggggttttgccatgttggccaggctggtcttgaactcctaacttcaagtgatctgcccacctcggcctcccaaattgttgggattacaggcgtgatccaccacaaccggcccagtaattcagatattaaaaggatatgtacaaaagtagcagagtgcacgtacaataatttggatacagtaaaagagtagtggtaatggaaaagccaaagacaaacatgagctgaggctgttgaaacatgaaacctaagaattactttaaaaccttttagtgaaatccatagttgggtgaattaaggggaaagaaaaaagaataaaggtcacataaaacagaactgtgcagtgacatcggagcagaattaactgacagttgagccttagtttggaaaagaaaaaaaatcaagataattaaagcagagaaatgtgacgaggcagtaagtagtaacaggttttcaggcctaaacaaaaaatagttttcagcgtagtgaaattcgaaaaaaaaaaagtaaattcaaaaaattgtaggaaatgggaggagcctaaatgctgtaaaggcaaatactccccaaagctgaaaaatgtatatgctaaatttgatggcataacctgtagattcctaagcagattatttcctatttaaactggtggctccagaaggaggttctggtcccattgtagcttgggatttcatcaagtagtagataaagatgtgcctgtattttgggatctgggccaaagaaatctgtgctctataaaattacggttggattcttgactcggagactattcatccttaaagaataaagaatatcagctgatagattaatatcagtctgctgaagggatatgtgtagcagaaaataaccaggaaaaaaattgaaatcttctgttggtgtctaaacaaac

SEQ ID NO: 123964 - DNA, 1056 bp, Homo sapiens
aagatatttaaataataattatatggaaagtgcttttttagtccagagacctggctaaaggatgtatgtgtgattttaattagattaaatttttctaatgtcccttggttaattacttgctgtaattatgtaaatgatgtaaaggagtttaaattgttgcttggttgttgaaaacttgatttgagaattgctgtcatatgctaatttaagataaacaccaagttgatactggacattattaggaaagatttaattatgaagctagaagtataaaaagaaccttaggaaataataaaattctgcccttatcatgtagtcaaatccaaggtaatctctagatttttgttgattttatttgctattcagagaaaagcatttcgtaagctttgacaaacaaattgttatttaagagataaaatttgtaatatgaatattggtatcactgaagcagaaaatgtattacagtgccttttttaattgattaagattttataactgagtaagagtacctttgatcctgcctttttgctgtgttggattttatttaaccgaaactgatttaaataactagttagaaaaattaaagagtgccttcatatttgatagttcctaaggaactatcaataaattgaacttccccatgtttggaaagcatacaaaatacatttaaaaaatacattttatttttaaatactaatggatgcaagcctttctcccaaggaggacacagtctgtaggatagagagacattacatctgcatctggctaaccttaataatgacaacccttattgggcagtatgttccaaaggacaggagcctgtcttctggtgcatactagaagcttaataatttttgaaaagatccattttctttatgggactcggctcattaaaatagaattctcctacttttaaaaaaaatgtctatgtatatccaagaacagtaatacaggtctttaaaaacaggtcattgattttaggtattgctacttccttttttatatttaatatttcaatcattaacccagtgtagcttgatctgttaccctctttcc

SEQ ID NO: 123965 - DNA, 1868 bp, Homo sapiens
tctgttgtcttttgaacatctctgtttggatattccaaagatatctaaaaataatggaagtggtcccgtttaaatatccttcggacaaattagttctgaagtacaaaagaggctttggtattagttttgtctgacaggcattcttatagttgtttactgaagctatgatttggaatgactggcctcgtttagacttggaaaaattagatgaactaacaagtccatattataccggttaggaaggagctcgggctttgaagttaatttaataagatatgttatttgattcgtataaaaattggtttgtagtagaaattaattaaggctatagtcttgtttaaacatgggcttaatccagagaatgatagaataggccaggagctccttatttgagttttaatgctttatcaatgaaaccctcccctgccctctcttttttcctctggactagcaagaatattttttttgtctaacacatttaaaatttttacttttaacagaaattagcagagtacggaaagacatgtacaatgacacattaaatggcagtacagagaaaaggagtgcagaattgcctgatgctgtgggacctattgttcagttacaagagaaactttatgtgcctgtaaaagaatacccagatgtaagtatattttgttgttttattcaattttgttctgcttcacatatgttgggaagagatatatttggtggtaaatacttaagcattattagccactttaaaaaaatgcagtcatcaactgaagtgtgaataatttggcatgataatttaaaaaatttctctctaaatatgtttgcatttgattgctgctatgtcactttggaaatgcacatggtatagactcttgggtttcaaaactggatgaggaattgtggaaagcactatggcctgactgacacagagcaccaagcacaacattgctcatctttaatctgaccttcaagaagccacagcttgggccacagcattctttctgtaaaatgaaggtgttggaccataagtttcctttcagctctaaaatttttattgaaaccactgattgtaatctgattttcccccatcttagtccattgttgaactattctctataagcatcttgttgtgaatagcctccttgtcctatatctgttaatttctaaataaatccagattctttgctttttgttacaaagccctatatgatacggtccattctatttctctggcctcatcttaaatgattttccctcttctttaccacactgtagtcacattgaccctcttttggcttttagaataagtcaagtctattcccagtcttagggaccccatgttagttgtgctctgatctctactggctggctgcttcttgtcattaagaatttagctcaaatgtcacttcagagaggcttcccctgacctttttatttaaaagccatctatctagctactcactgtttcacgttgtctttttttttctttgcaatagcacttataatcgggcatttttctggtttattttctctctctctgtctcccctgaagaatataaggtgtacataaaataagaaccttgtctttgttattcactgctgtatccctcataatattggcacataataggtaacaatacttgttgaatgaaccaagaaaagatgatggctttttgctaagtttcagaggacttttatgaaagcagatgaaaaaaggagttattataatatcaaaaatatgatgtgctctatgattctttagttatatggacagaatactagtctgtagatgagaaatgtcttaagttgaattaataggaaaaagctttgatattttacagttacattacaatttgcaaaaattgatctgatac

SEQ ID NO: 123966 - DNA, 2508 bp, Homo sapiens
ttttataaattagctatttctccaggagatgtatttagccacttattaatttataagaattaatatgaaggtaacaaggcataagatgctcgttttccctcaaaacacaagacattttggtatatagtctccaacttacaatggtctgacttaggattgtttacaatggtttgaaaggatatgttttcagtatgcttctcaatttatgatggggccatctccagataaaaccattgcaactgaaaatatcgtaaatttaaaactgcactttcaactcagtggtgggtttattgggacttaactccattgtaagtcaaggatcatctgtattcattctgtatttttaattaaaaacagttgtgctgttaatatatagacacaactcttctctcatcttacatacttgtataagataggcccactagtgttgactagattgggtgtggtccgttttttgtcttctgctaagtgaaagacttcagaaaatatacatatacgcttctgtgaatgtatttgtttcatacccactgtgttgcttatgtgatataatgaaagatttgtaaggcatctaactaaaatcaccctagaaataactagacacaatatttaaaaacattatcaatctgttgtgcaaaaagcaatccaaaaaagtgcattttttaaatgaaaacttggtctctccccttgtccccaaattttaggcacagattacactttatcagttcttagaagtgtttcacttgaggtgcttttcgaaatccattttttattatctattgtgataatgtgttgcaggagtttatctttaattagggaattttaaaaaggttaatggaagggttttctataatgctttacattttgtcattgggaaaaatctatcatttccatttaaaatgaagtgtgagcagcaatgaacagcattagacataattgttgttaaacctcttctttgtaaattaacatgccacttggcagaaatataattggtgagccacagagaaggtctgtatttaaacagtagggttaatgaatatctttttttcccctttttctttcccttcttttggcctttaaagttgcacttagctcaggctgtttgaaatgattttctttgaaagtgttgtgacattgttttaattgaatgaagctgcagaactggcgtgataaatcaacacagaatgaattttaatgcaaggcaaacgatattaacctggaaattggttgcagtagacaaagcagctgctgtgattagttttttttttttcttcattctctacttacaacattttgagaaggatgacctcgacaatttcagctgtactagagtcctgatggcttgcaccttaacatccttgagctgtttgtggcttcttggggcaatagtgattgtttcattttttaaggttagtaaaattttttaaggttagtaagattagtaaggttagtaagatttaatgtgattttaactgctttacaaatatttttaatttagtaaatcataattgtgaggattaattagctgtggtagaagcccttttctatgtaatcttgatgtggttccagccaaggagggttaatacttgaaaagcatggggtatgccaaacaaggctctatatgtggtcacagagtgtagggcagctggtttcacaaagggtacgggtcaaaaccaattacatattagtgatttgtactaaagtatctctgttcataatgcatttttccagacatttttgggccatatgtgaagtatataatgtgtatctagttagtgacaatttgggaaaagatctgtatagagtacaactattattgaagagtagctggcaaggttacttaaagaaatagccaaggtaacaaatatagtagaggcattttcacagacttcttgagagcagagtttcgttattctcaatccttcacatttacttcactccttgccacataataagccttaagtaaatgttttgttgaatttgaaaatgaaaggctgttctctgttttactgaaaaacagtgggtgagtgatagcatgtaaagattattatctctgtccaggttggaggagtggggaagtgaaatttaatgtaatctgtgacttacataaactggttaagtgatgatgttgtagaaaaaagtaggaagagcttattggagatgaacataaggccaggcatgttgatagattttctgttatgtttcttttttattcagatcctcatttcaacattgttacaccatactaccttatgtcaattctagacctctttagattaaaaagcaactgctcaaaaagtgccagtagacttgtgtttgttaaggactgacaagataatgcaggccagctgagcaattccaggaaaataggatacaataggaaaaaaaataactgaacacatcagagattgtgaatcagcaagattgtgaagaattactagttcatggtcttcaggaggtgagatgatcaaggatataaccgtgttttgggggatctctttttctgctgag

SEQ ID NO: 123967 - DNA, 1090 bp, Homo sapiens
agttgctttggagaaagtataatttttcttaggtaaataaaagaggactttccccaaaggattttggtagaaagggcagtgcctaacaatttcttcaacactgtcatgacaaagagacagttggacattttgtggaagggacttgtattcttggctggcatctaatattttgtcaaactctttaatactctctgttttaggttatttgttgatggacagttgtatctgttctagctgtatactgttcccagttcatagtttgtgttaatacttgtgaaaatataatgctaaacgatgagctattgtaattagacctgagacttagcaagaaattcataagggctctagattttatttcaacttagtattaaaaagacatttaacttcagtaagtaaatgtagatatactttatattttaagagctgtaagttccagcaagtgaataatgtatagtgatccttttttttttttctcagtttaattttgttgggagaatccttggacctagaggacttacagccaaacaacttgaagcagaaaccggatgtaaaatcatggtccgaggcaaaggctcaatgagggataaaaaaaaggtaagtccttgaaaatggactaagtctttatgtgagtaacttactatacttttacatcgtaataataaaatttccagatttttttgtgcttaaaacactatattccaggccgggcgcggtggctcacgcctgtaatcccagcactttgggaggccgaggcaggcggatcgtctgaggtcaggagtttgagaccaccctagccaacatggtgaaaccctgtctttactaaaaaaaatacaaaaattagctgggcgtggtggcgggcgcctgtaatcccagctactcaggaggctgaggcaggagaattgcttgaacccgggaggcagagatttcagattgtgccactgcactccagcctgggcaacaggagtaaagctctgtctcaaaaacgaacaaacaaacccactatgttccatgtcaggaacttttaaactttttaaaggtgttgtcatgattttcccttgtttttcttttttctttgtttgttatttttgag

SEQ ID NO: 123968 - DNA, 1039 bp, Homo sapiens
ttagtgcataaatacccagtggaatggtactagttaagatcatggaaccagggcttgaaaactattatgaacttcttgtctgtaccagctattttgtaaatgaagagaccaaagccttggggaggttgagtaatttgccaaaggtcacacgccaaaatgtggcagtcaaatttgaaactaggctgggcacagtggctcacacctgtaatctcagcactttgggaggctgaggcaggaggatcccaggagttgaagaccaacaaggtcaacatagtgagacccccatctctacaataaaacttaaaaaataattagccaggtgtggtggcgtgcacctgtagtcccagctgctaggtaggctgaggagggaggatgcttgagcccaggagttgaggcaacagtgagctatgattgtgtgccactgcactccagcttgggtgacagaacgagactctgtctcgggggaaaaaagaaaaagaaactgaattctgagttctattctgtggtacattattttctaattataaaccatttctaagagtgataacttcagacatactagaacaacttgaatattgagtattagaaactttgactaccatttcacacaccacccagtacacttgtgaccccagatgttgtaagggtttctccccacaaaccaaacaaatctccagaaaacaccatctgaatgtcctctaattcagttcaaaactgggaataatgtcacataccacaggctgagggctcagtcccctaagactgtctccacttcagatgccagttacaagccccagtggtgacctgtgcttttgactgaccagctgtaaatgtgtttttttgcaagtccctcgtcgggttcaattaatttgctagagtagttcacagaactcagggaagcactttacttatttattataaaggatattacaaaggataccgacgaacagcagatggaaaagatgcatagggcaagacatgtgggaaggggctcagagctcccatcccttctccagtgtgccaccctccaggtgcatcc

SEQ ID NO: 123969 - DNA, 2840 bp, Homo sapiens
aatatatttatttcatcataaatcacaatatcatactatcattcctttgatttttcaggaattctccctagaggatttaatcccatgtacttaatggaaatctatatacttgagcagattacaaatgctagaggagtaattttagatgagatcgggtgcattcagtatggtatggtgtagactagaggatgaattttaggaaaagaaagtaattatggtgtttcacttgaggttgcagaggccgtatccagggctgtgaaagaaatgtattcatgctaggaggcatggtccacctttagaaacaggtgggagtcagctggttctaatgtagcaaatgagaacatgtaagccattaaaacagaacagtgttttgcacgtaattaggtacttggcaaattgttgtggagtgacaagtagtacattgaagttcaccctttgggtatatatatgcatggtcattgtaggggacaccatttgtggttttgtcttatccgtctgcaatttgtcagctcttctgaggtctcccttctcataaacaagaggagaataagtagccatgcttgtgggttcctccttctcacctcctttttctgtccttccttctctcccattgtgttgatgggtgaaatgtatgcagtttatcaaagccatgtcagtcagatgttgcatcatctggaaatgtgcaaagacttagcaattccagttcaagttctttgctcaaaatgaagggatgtgcattcttcttctagccattccagggctgctaataacagtggctagagcaggggtgtccaatcttttggcttccctggaccacattggaagatgacaaattgtcatgggccacacataaaatacactaacaatagctgatgagctaaaaacaaacaaacaaacaaaaacctcatgttttaagaaagtttatgaatttgtgtggggccacattcaaagccttcctgggccgcatgcggcctatggaccgggggttggacaagcttgggctagatggtatcagccacttttactatctgtgctgcatcatgttcagaccatgggacaaccttggaaaagagttacactcttccaacggaaatggaggcttaaagaagtgtagtaacccacccagttgctcatttctacctgaagagtacacaatatagaaacttccatctctcactggatattcaaattcagttgtacaaatcattcttgtcagaatgtgggctttgaaataaattggtaatagtttttaacttaatatttgtttcccaaatgtatttggccatagtctccccttttttgaagatgtccctataactccttgaagaactacagtgttttgtggaacatgacttacgaaatgttattagagtcatattgtataattgcagacataggtggaattcttgaattttgttttgcaggacttgtttaggtagagcatttaataacttcttttacgtgatgcttttcatatacattacaaattgttaagtatctcttatagcagagatttcttagctctatttgttatgcttaaaatatattttaattggtcaatatgttatatttttagaaaagtgagaaagtcctagagggtctcaagaaaattaaaggctcctgacattccattagtttagacactacccttgtttatagtttggtatgtcttgtagattgttcttcatgcagttatgcatatgtacacgtatggtatattaagtggatcatattatatttgctgctttataatcaacatttttttcctgcaactctgtatcctgtcctatgtcagttcaccgaatagtagagctttatgcctaagactgtgataggtgataggaaagtacacttaaaggacatttcaaggcagcattcatagtgatatgcaaaaataaatttccttgaatttttgggtgggggaacttacaagattttattcttatgaaatatgttactgctgtgtcaacactttgaaagagagaaattaattcagtcttgtgattgatacaccagagtggctttggcaattggtggcatgacatcaagtacaagtagggttccaaacagcctgttttatcgatcttgttgaatacttagctctctgacaagctctagcatggatatagttttttttttttacgttttcattatgcaaaattttaagcaatggaaagacaagtagtgtagtgaactctaatttacccatcacccagggtcagcattgcctctctcctttcaagagggaactctctcattccccattgcctcacttcaccttttgcctcccagattattttagaatcaaattcagacatataatttcaactgtaaatattttattagctatctctaaaatagaactctaatgataacgtgtttgtgttttaatatctagaaaattatttatcctcaaatatgttgtcagtgttaatagtttctctggtgtctcattaatatgcttttaaaataatttgttttaatgagcatacaaatgagggtcatctacattgtaattgatagatctcttaagccacttcccaaacctccatttctctttcttggcttcactgggtgatttgtcttgaattcctgtggattttgctggtggcattttcttggtggtgtttaacatttatctctgttccccatatttcttgtaaattggtaatgacaaaggtttagttaaattcagctctcccaccttctctttctcatttctgttcttttttgaaagaatatttcataactagtgttttgatggtagtacataaagtctcatttcctctctgtgattttagcaatcattgttgattgttttctaggtcctttttttcagt

SEQ ID NO: 123970 - DNA, 1811 bp, Homo sapiens
cttatatccaaatttatttcattttgaaagcagtgcattgacactcttctcttttaaagatgagaagttatatgatgtattaattgttttggaaaggtaacttgacagtagtggaagagatggacagaagtgggaagtgactaaaggcagaagacaaatgatcaagtctcacacaactctgcctagaaagttctttcttgtgttaggataaaatctttgaaacttcagtcctctgatcttaatctactttgaattcaaaacaaatataatctcttaaactttagagactttgacatatttaatgacagtgcttgtcttaaaggtgttctgccctagctaaaagtttattgcctagtagccttagttctcttttttgttaagatgtcatgtgatatggtgttgaattcaacttcaaaagtggtagattggtttgtttttaaagagaaaagaagacccgctatccttttcagtgcttttcaaactgtctgtggtaagagacccactaaaaaaattcaatccattatatcttttggtgaaatacaataaaattagttaccagagaagtggagttttaaaaagacatatatttaaccccatttaaaactgtcttttatcaagagacataaaattatcctgtcagaatgctcaaagagtttctgaacaggcttgatttctgtacttgtaggctgcacttccggccgcactggtttaaatgccaactgtgacgtggtatgtttgtttcaggattgtaaactagctccctggtgtccctcctcctctacttttgttcttctcactccctcatttttttttattttttatttttttgctctgtgtttataaaataaaattcattttagattattgactagattatttttaagtttgatttctggttacatgttcattaaggactcaaatggcttagctttgttttaagatagaagagtacaaaacagtgcaataaagattaaatgtttatttccgggttgataatatctcagtacatttatagagtggagtcactgctttttgcccattgttaagaaagattgggaagacttgaaataaaaaatttatttgaaaatacatttattaaaatttgtgagacaccctttgagaggtaaaaagatggacccaataagaatagacttttgtttttattagtaaagtaatactttaacctgtaaaacttcatctcattactcagccatagatataactccaggatgagttaattgcccatgtctaatgaaatgagacgtgagtctcagtgaaaagggagagtccattttatcactagatgctcttaatgagccttttaaaattaagtcttgattggattgcagtcaatttcgttaaggaatatttgagcatcttgtagttgtgtcttatgtaacattttctttttagaggattcagctctctgttgacagagtgagtagtggaatgttgctgatgtgtattaatgctgcagcaattgatcttttcaaaacccgttaaccttagttggaaataatttttcagtctaatatattaacaacaaattattaggccgtttcataagcctagggagccatcctattctatcctattagttttagttttctgtttatttcttcagttatgagagaccactattaaattattttgttgttctttagattttaaaacatgtaattgttaactctcgattttaaatacctataatttttagtttggtgtttttaaatcacaggttgttataggacatagtttgtggggctgtgtttaatgtttaacaacaattgtgaatctcagattgttgaaat

SEQ ID NO: 123971 - DNA, 1060 bp, Homo sapiens
ttaggaagatagaagctaaacaattaaacgaacaaaggtaatttcagatagggataagtgccatgaaaattataataatgccaggcaatgtaagtatgggctgggtggaaggcttttaactaggagggccaatgaaggactctgaggaagttacatctaaacagagactctgatgggtggttgacatggggaggtctgcagactgaatgtttctgggtgaagttagagcaaaagctctcagttgtgaatgtgatgggactgtccaaggaatagcaaagtcagcaagggtggaaagtgggaagagaagacgtttatgtccctgttcatatgcttctctataggcttggtaaaattttattggaagtaccaggaagtcagttgatggttttaagcagagggatgatatgatatttatttttagcaagagttgtctttagcaattagagacatgtatgtgtgtagggagttgggcaagagttgaaggaaggggattcattagttggctgttgcagttgttgaggcaagagatggtggcatggactgggaatcgtcttcagattcattttatttccatgctgttagaattcttcaacatttgctaatcttggctgaatttccaaagcacttgttctctaaatatacaatgtaatgtttatatttattgtttgcttttgtttccttacccaggctgtcttcttcaggagggactaatttatatttccaatttcctcaatgaaatgtggacataattggtgcctactaaaaaaattatgttcttcctacagaattttacaggaaatttcttattttctgacgtagaggagcatcaaataatgcatacacttagaaatttaaataaacaactgaataagacttaaattacagaatagagaaaaaaccaacaaatactttatgaattagttggagtcgaagttaaggaaagttgaatgtaaaacctaaaagtaaaattaattgctaagctagaggcaatatgtgagcatattttgcaaagactttggtggccatattaggttttcaagccacgcccacacacataact

SEQ ID NO: 123972 - DNA, 1289 bp, Homo sapiens
catagtaacacccacatgtagcttctgatagaaacccacaaaataagatgaaaatagtttctcagtcaaatggttggaatatttagtaatacttggcagtattttttattttgttaataacaggtgtcatttaatacaatgacttttaaattatatattaaaagaaatttttaaaagttttatggcaagctgtgaaatactcagatggataatgtgaattaaggcgtgttctttggccactcaaagtgctccccacccaacactggcatggactgctcactaggtggccaaaagagatttcgtttatggatgtgttttgaatgttttaacattaaaaaaaaaaaacccaaagcatttgaggcagagatttttttagacaatagttgtttaatgagctgcttgtacatacaagagaagagaatgggcctgattgctcacaatctgatgtttgaaaagtatttttctggatcttatgcatttgcatatctaattgctatgtaatcaaaactaagtgaactgtagctacttgaaactctaaaatgaaaggcaatcatcttacggggaggagggagaaccccgttccatgcaagctagcctgaatattagcattatagtcttcttgtgtttaattataggtgtctgactgagcagtaaatttatgcttgtgtaataaagaaatgaatgtgaccctgaaacaccagctcagctttgttgtaactgagcattggctttgagagaagttagcatccattgtgtattttggtgataagggattgtgccagaatggctgttaattacgtactttatgtgatacagaaagtagtggttctacactttctttccaccagtgacagcactcaattaaaacttgtattaagcagctataatgcctttatttatctgtttggaagacatgaggtgaagaaaattaactttattttttccagctgtttgttggcagctttgtttttggtaaatcctttgaggataaaaaactgtttgttatgtgtcctgtatgctttcatagactaaatattttattttttgctgcctcacaaaaaggttattaagagatattttatattcttgccgggcatggtgcctcacacctgtaatcccagcactttgggaggttgaggtgggtggatcgcttgagctcaggagttcaagaccagactgggcaacacagcgaaaccccatctctacaaaaaatacaaaaactagccagacatggtggcctgtgcctgtgttcccaactacttgggaggctgaggtgggaggatcacttg

SEQ ID NO: 123973 - DNA, 1061 bp, Homo sapiens
tgtagcagtgtgagagctaatagaggtatcagagagattttcattattcttgtgagattttcccaattgaattgacatttcagttgttggtctgttgaataatgaatgcactataaaagtggttgttaaaattatgataagggaacaagatcagtcagtaaaatccatgtatgggagttttatgattaagaatatttctgtattttgtacaggacatctgtaaccacagaaaattgcattgtacaaatgaagaagaatacccttttacatcacatgatttgtgatatctggaaaatctcccaagcacctggtttctggattttatttagatttttcaatgtattttctaagtcttaggcaatattttcagaaaagttagttctttcctactcctttgatcctataacttagccacatcattacttaagcacttagtctgctatagtggattacagagttctttaagagttgtaactcttatcttaaccactataatgtgcatagtgcctggcacattgtagacacttaggaatgcttaccatgacccttagtattgtatatttgagttaattgctagaatttttaatatctcctattgaatttattaatactattttcatacataagtacacccctttcagtgttgtgttttaagattatattacccacttcattcctcccatccctcactctcacccaccaatggcaactttgattaacatgtttgtgtatagtaatcctgtggccacaagcacatagctgtaagcaaggactgaactagaagaccaacttgattctgcgatgattaaaggaaaaatggctaggaaattgactttgaacatgagtaatgggcattgaagccagtctcacaagagtaaacgatgctttgggtgtgctgtatcacctgtgaatacagcctaaaagttatgcctgtcaccaaggaaatgtttctggttgcaggaggactggagataatactgtaactagaactagggccaagctgccaaatggcctgaatactggattattgatatttctatggaagaatgggctttgaactg

SEQ ID NO: 123974 - DNA, 1134 bp, Homo sapiens
gtaagataagctagcttgccaccacagtttcatggatgatggcagaagacctaggacttctgaatcagaagccatgctttattatttacagcaaaaatagtagcagagtgttagcatacttgcactgatgccctgagccctggtgtgcacagggtaatgcagaggccagacaacacctgctcttggtgggctggatttcagaagaggagcccagggccaaggtccccacaattcttgagcaagaagcagacaaggcagtcctctacccttgacctcctcagttgcatatgttactgcagaaactgctcagccagaggagatagataacccttgcactctggcacactcagtgggaacattgagggctgctcagagctcacccaacagtggttagacaggaacacctgtggcttactgctgcctagcttatggcattaatgagacacatcgggtttcaaaaaaaccttaaaatactttttaagaaatgtcttagaataggtgacacactgtaagtaagtgaaatcaagggccaaatttgaaatactgtatttaaaaaatcatggaaaatgcaacaaacagctttagagctatacatttgaaaactgataataatttatttatcttaaagatatgtattttcaaatctatatagtaaaatctagttagaaatcctaactttttttctggtggaatttaatgaattgattacagaattcttaagatagtaaaattgcccattggtagttgggacagttctaaaagaaaaatggaggagtgctttcagagcatttaattcttatcagtttcataattgtctgtatgactgagggataagcaggttgaccaatggaattagactaagctattttactcggatatgtatgtgtgtattgtggaaagaaagaggtagatggagagaaatttacatgagaagtgggaagcgtgaatttaataaatgatattaggatagttgaatttgcatatgcaaaaataaatcttttgatggatcacatgcccaaaaatgaagagcaaaaaactcaaccactagaagaaaacataggagatacatttatgacttcattgtaaagcaggattactgactagaaaacttataaaggaatatcagtagctata

SEQ ID NO: 123975 - DNA, 1114 bp, Homo sapiens
tgaattagagaatgaaaactttgattcagttcctaaattgacagcctgttagctgtgtgacattgagaggtgacccccttaaccttgatgaccttctgtttacttataagtaaaatgcagaaataatgacatgtttctcaaagtgtttttcatggtaatgtaaggacagtatcagatgtatgttgtatgatactacatacatgatgatgatgtatgcttctagtgcataggagcacgcttggggctgatctttagcatctggttctgtgcctggtagatagtaagtgctcagtaaatacttgttggattaattatcatttgacccagtagtctcacattcaatcaaactttgaggacccagaaaaataattcaaagacttgtgccatcatagcaaaataatgcaaacatagctgaaataattgacaacaggttagtattatgaaagatgtgctctctctttaaagagaataattttaatcatgtactctgtaaattttttaggaggagcaaaatagaggcaagcccaattgggagcatctaaatgaagatttacatgtactaatcactgtggaagatgctcagaacagagcagaaatcaaattgaagagagcagttgaagaagtgaagaaattattggtacctgcagtaagtaataatttccagaccttagatttgggcctcgtccttttttgtcagtttattttaaattatcgtaatgtttataaggaataggttattggttgttagaaattttatttaagcataaaattaaaaacacctgactgatacttctaacataataaaaacataaagttcgtatttaggggtccttagatagacattaaaaggggttttggagggtgacgtcgcgtaagaaattatccagatgcttttgtgttatcagttctccttccttcccggtttctctttccccatctcttcccccatctcttccctctgccccccttccttgggttggctccttattgtttcttaaccctttaatatttttagaaataataattgtactactcccagagtataatttttttttttttaacgggaaatgaaaaataaattactggttttctgggccattaatttttttttctt

SEQ ID NO: 123976 - DNA, 1109 bp, Homo sapiens
ctattggaaaaactagggctgggtgcggtggctcatgcctgtaatcccagcactttgggaggctgaggcggttggatcacctgaggtcaggagtttgagcccagcctggccaacatggtgaaaccccatctctactaaaaatacaaaaaataagtcgggcgtgatggcaggcacctgtaatcccagctacttgggaggctgaggcatgagaatcgcctgagcctgggaggcagaggttgcagtgagctgagattgcgccactatactccagcctgggtgacagagtgagaccctgtctcaaaaaagaaaagaaaaaactaggaatactgttagtattgtgtccaacaaaaagcattggcatttacataaatgagttatggttcctgctgctttttatttcccagatagcctattctttattaccctgatagtttattcaacaagtaaactcacaaatcataaacatttcccattaacttgatgaaattaattccttggaataaaagagttttatgtaaattctgttggtagattttattttttttaatgatcaggttaaatataaactaaaatctatatttgtgtactattaaaccatggaatctttctcattttccttaattgtgtggtattgaaaaactgtatagaaaaggagattttcgaaagtatactgggcaattagtgtcatgatcagaaaaagttatttaacatcgacttttactgctttaataacattttcttttctgtagcttactttattgtaagaatacggtatataacatataaaacatacaaaatatatgttgatcaactgtcaggcttccagacgacagtgggctattcgtcacattttgggagagttgaaagttacacaaggatctttgatgcagtctgtgtccctgacaaccgagccctcccttgttgtttgaggatcaactggatattgttagcgtcttttaaattttctatttacccagtcacctgtaatctcttgtcttgcttaccatttttatttctagtgtttagcatagagcccagcacatagcaataacatagtaaattgaaaaataaatgattgaatcttgtcataaggtaaaatcagttccttc

SEQ ID NO: 123977 - DNA, 4242 bp, Homo sapiens
ttaaagggtaagtgcattttaaattttattattttattcatgttaaaatttctaagttgccttccagaaaatttgtaccaatttactgtcctgccagtattgcaggaaaatgcctatttctcaacacacactcaaaccctggatattatcaaactttgatctttgctttttctaataggcttttttttaaaagccctttaatttcaaaaatgtgagtaaaatctcttggttcttataactatttgttatttaggtcagtttttatattaaggagctttgtgatacttacgtaacatgagatacttttgtaatgtaagaactttaatgttcacatcttgaactgttttttttttaaatgggaaatattccatttacattatcatataaagaatgaataagttctttttttttggaaagatagagtaagttcttttttagaaagacaaagagttttgtgtattttaatcattttgtgcccattttgttaggtgttgtatagcaaaaaacatctagtccaggcttgagggtcctagcagggtggggagtagggaggggcagactttttgcttaatataaactttcataaggaaatgtaataagtattttgtgtttttccatctgcagaaaagactaataaatctgattaaagattgtacttccttctctttgtgatgcagttctaatttttaaaataattttgaagattgtaatatttcatcagtttgcataactttacatgtaactaaatgtttagtaaatcagttcaaatcttttcaattcgtatttgggtttcaaaacaatctggtagacttctttgttttttaccaacaagcgtgcaaactcagagaagcttgagcattataagggcaattatacttgtttcttttcagagaacagttcagtattgtaattatactgcaaaagtaataagggttttgagataatcacacaccatttattagtagaatcaaataatattttacctggagaacatgtttactctgaaaatgacaccagtttagtttcagatgtttctttgattttgatgatcagtttactttattcctttttgtttcctggtgacaaaacatgaaataactaggcaggagttgtttctcaagttatatgtaggtttttatctagtctaaattggttgacttcaaatatctactttttttttcttcctgatccaatctagttctagagttttatcaattttatcaaccgttttctaagtatcagcttttggttttgttgatttttctcaattttttttctgttttattgatatctgcttttacatctttattctactaaggtttagttttacttggggacattttaaaggtagatcagtgatttgagacctgtcttttgtacttctgagacttttcttttaaggacatacattcctctctgagtaatgttttagctgtatccaacaaataatattatgctgcgtttttattatcattcagtgcaaaagttttttccaattttctttgtaatttcttctttgagccgtgttttatttccaaatgtttccaaatatttgagacttttctgtttatcatactgtagatttctaatttgttatgctcagtatgtatttgataagatggtagtcttttttaatctaataactttttgctagcccagcatatggtctgttttgatgaatgtttcacatacacttaaaagaatgtgaattctgcagtagttgcgtgtatattctgtattgtttatagatgaagatagttgaaagcactcagatcttctcctatgtctaccctttttttttttttccttttctctagttttgtctgttactgaaagaggtgtgtaaaaatctccattcattcattgtaaagatatacacaccagtgtgttcttgatggcactgaaagggcaaaagaatttggtgtacacatgtacatgcatgcatatctatgtatgtaatccgtctattatagcttatacaacctgtatgaacatggtttggcatcattaaaaagttttactctatttcatttcatatgatagtaactttttccttcttttaattttgaggtctttatttttttctccccaaataccagttatttcatgcagcatcttttctataaagatagtaccaagcagtatggcctacttgccttagagagactttgtaaaggtagtaattattttaattatgtggacatgaaaggcgcatacatgttcctccttcctctttttgcattttatgtgtttaactatgtatgggctggttacttgcaactgcatgtcatttgcaagttcaatttgtgatcccaaaaggcaccataccaggagagagtacttctgttccttccctacaaaatgtaccctgtttgctagtcatgattttgtcaatataggtttttatttacaaggaatagtagcccccccaaaaaatgaaattatataacattactaaaaaataatatatataaaactgtctctccacacaggagcacacattatgggaatgcttctcaggtatcagataccatccttcctccttccgttaatcctcattcatctagttggaaagtaatacatgatatttcttagtcaagactttatatggatacatattctatgatcttttgtgatcttctcagaagagacctaaaacacacaagaatggtgaaattggaggaatattatgctggattatgctgatattaagattgagaaagtagagatgagggatcctgtatcttgttttcactataattttcccacagttttaataggaagtggggaggtaaaaggtttccattggggagatagagtactaagcttgaaagggctagactgtaatacagaaattaagtgatttcaggcaactgaagttcattgatgttgtctcataagttaaaacagactttggcacacaatatgcctgcagacctagacatttcataaagtgttgaaataacaggtctttttctttatggtgagtaaaattgtgtgtttgttttctctgtatgtttactttataggtatttgagaacttgaatacagatcagtttttaacatatagctgatctctttatatacatggaggtcagtactataaaagtaaatgatctaatacatgacgacaaatttccacctgcgggttttgaaatttaaagttgtcatcaggattattatgacatttgaaaatattcatcaagacaaaagtaattttaattcattttcaaaaaactacatgttatagaaatttaggataataggcatctgttacaaaatgcactttttaaaagtttgcattttgtgttccccaaaggttcttttctgtctgccatatgcatttgactcataattaactgagtattaattataacctgaaaatgttaagagttaatgaatgagaaggtaacagacatcatgaccatagagatgtggtaattttatctttgatttagttctttaaccaaattgttaatgagttgatggtactgcatttatttagtccttgatcaaatattgatcattgaaatttgtggtattgttggcctccttttcattttattgggagagaaggagaggtattaaaacatatattaaaagacatctagaggtaatgtactggctccttgatagagctgtaatgggaaagaacatctctcatgtaaagaaaggtgttgttactgatttctaccttgcagagccattttaatctgaatgggaaatctgtctggggacccagagtgtggtaattagcagtctcttcagagtgtcagagcagaattaccattgtaatggtttagctgcaggataaaaggattgaatttgggactgcctgtctgccaacctaaatgagttgccatgggaattttcaaatgtgagaggcgtttacttaaagctttttggcgggtttgaataaactcataaattgtaggtttgaaagaaggcagtccttgctttctctcatataggcaaaactgtatagaaggctgatagcttcttaaattcttaatgagaatgagttgatccatgttcccatgcaggccatcagcttattcaggcttgttttttcactaagtatggtacaatgaagcacatttgaggaaagacattttgttccaagtctctagaggaaaaaagtgacaactctagatataaatttcctatcttaatttaaatatattttcagataatgctattatactgattctttgttttgctttaacaaacgttaaccagata

SEQ ID NO: 123978 - DNA, 2623 bp, Homo sapiens
ttaaatttgcatccttcaagcactacattgaatccacatgaatgaagtgatatgtgggcgttgcattaggtattataaataatctagagatgatttaaagtagactggagcatgtgcgtaggttatatgcaaatactatgccattttatatcatggacttgagcattcatgggttttggtatctgtagattttggtgttctggaaccagttccccgcagataatgagggacaactgtactttcagagagagcttcagctctcccctgtctctcaaaagaattaaattttggtgtaatgactttttagtgagaaaatgttcctgcaaatgtctaaggtgatgaacatcacttacactttgcgtgccctcactcatcctcaagatatcagtaatagtagttcttacattggtggtttgtatctgcccttcagaaaaacacccgaagtacaatttaagccaaaaattttgagactgtaaaatacttttaacaaaataaacatggtctttttggaggtcttaacattgtcaagccattagggtacagtttcattaagcaaataataatttggttgttactaaccctagtggcctgaaaatgtggatgcgtctttcaaaaatgtttcaccagggaaatgtgggtattttgaggagagaacagttgttcaattcaggtgagaaagagtaaaattttttaaggtacaatacattttttgtttatatattaatctttactggtcagtatgtaatcacacatcagtataatctgattaaaatcctatagctctaagataactgttgaaccattaataaaacttgagtcatggacagataatgtcctaaaatctcatttaagtgtagaatacaaagacccatgtagtccttaccagagatctctgtaatttctgcagagctccttggaatcacagccatcacctttgtgtgctgtgtgtaaggtactctcatgggtatgtgctgctttgggaaaaatgatggcggagaaaagcactgcagaaatttaaatgtgctgattttctttcctgtgaagagggacaattctaagtaaaatccagttctatatcagggtcataatttttatattctatctccacattttaggtgtgtggcttattctgcattaggacaacaggcacattgtcctaactagaattttcacaaataattaaaagtaccatttgattcgggtgacattccatacagacagattaagaagtttgccaaggtataggttttaagacttccctcaacatcataccataattatctaaatcattgagcagctatataaatctttgcttaccgtctgtccagccgtaatgttgcctggcagtgactgtggcttcttaaacacaacagagggcttttccttaaacttggatgtttagtttgatcaggctccttggtgataaaaaaatatgtcttgtttctgggaactgaacaagctttcccaaacagagactctgtatgaataacatcctcctcttgattcttgtaaggattcgttgaggaaccgcttctttcaacacaaggttttgttcaggttgacaaaaggtttagacatcttgtaattctaaattttaggcgttgcaaatgtaaaaaaaagggaccctgggcatagaataatagggcctaggatatatttattaaattaaatatttataccctaggaaatatttttgcatttgtaaaggaagtccttttactttaactttgtattccttgcacccctcagaatttgcatatttagtttgtaacactttataattgcttgtacctattaatttaaatattaatgtaaactattttataattggtataaatatataattatatattttatataattatataaaatattaatatttatgtcccataaacttctcattggttgggataatgcattttagtgtttggggttttttaaaaatttctttattaaatgtatgatattctacacagatactgtaaaattaatttcaatacatatttttaaatatttattagaaaaataggcgagtgatttctcagtgtattttctttagttcaattattttcatacatcactttaatttgtttgcatgcccttctgatggtgggtaagtagcatcatgttccttatatataggcaaagtatttgtaatcattcactttatagtagggtgcattgaacttgaattagtaaaaacattaagaaaatcacatgtcccttactatatttaatgtgcctgtgttttaactcatatttaatttttctttaccacatttcagatgtttcagtgttttgatatttttaagtaaaattattaggagtaaccattgtgacattttaatagtatattaaatgattcagaaatcacatgtcccttactatatttactttgcttgtattttaactcatatttaatttttctttactacatttcaaatgttttagtgttttgatatttataagtaaaattaagatagtaaccattgtgacattttaatagtatattaaaagattcaaataagcattttagtattaagattatttcaggtaagcttttggtagctcattatagctttatttttggttgtatttttaataactattttggaaaatttga

SEQ ID NO: 123979 - DNA, 1350 bp, Homo sapiens
catattgccaaattatataaataagtagatgtgttttgttttttaattctcttaacgtttaaaacctttgtggagaaaaacttaatctttaatgtataaataaaatataagagtatttatcaaagtatctttagttatgccttcaaactgacatggcctcagcttatttttagtaaccttctttgtagaatataatatttctgagaaagttagctaatttaggaattagcttactttgtgacagtaatttatgaattctcctgtcaatttaaataaaaatactttgattttttaatttagcatttgtggaattatacttgggaatatttctttcaagcgttgaacgactgacaaaagaaattcatctcacaaacttctattgaaaaactgcagtttacaaggctagaaaacaagacttcattatatacagagacttagatttcataatgtaaatgagaatagaacaaaattactgtgttcttaattgcttttttgatcacttgatgtctgctcttcagaactgtcatgctctcactagaattaaagtatttcatttccaatttgttcttcctggacagtctgttctgtaaccatgcctccagttaccactgcagtgctgattgtttttcagcgtgcttctaatctggaattccaaatcaaccagccattcaacacctccatgcgggtgccacataggcatctcatacataacattttgaaaactaaaatcacattcttccttgccctccccgtatcacaattcttcccttgttttctctgtagaatgatacttgttgcctaggactcatccaccttccttccacctttttctctcctgccctggctccttcccatctatatcatcaccaagttctgtctgattctacctccaaatagcacatatcttttctccatctccacagatggagtaggtctgttacccatggtgctccctcctatccattttctacttgaggccaaaactatctttttaatatatagaaatgtcatcacactccttgttgtaggttttcagtgactttctatcaccccatggtaaaaatgtatggcattcatagcttatcttcatctaacatgtgcctacttttccaactttgtttcatgtcattcctcctttacacttacacccacacatattaaataactcacagttttcagaacactgtttgtttacgtagtgtattttggcgatctccagaaagaactccgtgatttgtattctgtactaatattatagtagaatgcattgtctatgatagtggtgtagaattattagaactgaatgtttgtttgtttgtttatccccttgcccctgactgggcatttcag

SEQ ID NO: 123980 - DNA, 1026 bp, Homo sapiens
atcccagctacttgggaggctgaggcaggagaatcccaggaggcgaagttgcagtgagctgagattgcaccattgcactccagcctgggcaacaaaagcaaaattccacctcaaaaaaaaaaaaaaaaaaaaacaacaaacaacagaaaaggcatagttgatgacatatctatatcttaatatgcataaattaaaatatatatatttatacatacccataattggtcatccttaattgcaagcctccagaagttcagaaaactgtgtttatagttgcttcaccccacttagtgtgagtatttttctgtttgttacggactggattatgggcgtatcccccagactctgctgggtgttatagaatctgtggtgtattatctttctataaatctgaaaaactctgaaattctcaaggcacttccccgataccacaggttttagctattagcaggagtgtgttctatttttgagcttttacatttcaaaagtaaagacattctttgttgtgctttaataatctttccataatattttccatacaaatacaagggaaatattcatctgccctatgacccagcaactctactcataggtatttatccaagataaatgaaaacttatatttgcaaggaagccttatatgagaattttcagagtggctctgttcacatatccaaaaagtggaaacaatcaaatgtctgtagcagaagaatagataaataacatactactcagccattaaaacagatgaactacagcgacatgcagcaatatggatgagtctgacagctgtcatactgagggaaagaaattgaacacaaaatattatatatgccttcattatccgaaaatctagtctaggcaagttaaatcagatggatggttagggcttgaggtacaaggagactttctgggtttgtggaaatgtcctgtgtcttcaatggagtactatttagccataaaaaagaataagatcctgtcatttgcaacaacatggatgaaactggaggtcattatgttaagtga

SEQ ID NO: 123981 - DNA, 1052 bp, Homo sapiens
tacataaaagtggggggcagttagttctatctctacacagactttgatagatggaccctcatctactgcttgctttgactgtggctaaagtttatgttggactgagacatttgggatttggaaataaagttaaagacttctcataccagtcacttataagttctagtaagtaacttgggggtggccgtgggaacatggggttaggcagtggtaacaaagaaataagccctattctcatggagcttactttgggagtggtgatactcaacagactgtaatttgaagtagaagcaattaactttgtcgataggttcttggagatacaactttaaacaaaatgagtatattgcagcctcttttttcatcaatgttataatgaaaccatgttgaaagcagtggcattatttgaggacctgctgtctgtcgtttcacttaaagttagttttaaagaatgtattgaccacattaagtgaggatctactgtaatctagggatggcccctggagaaggaaggtagcatttaggttgaagtttgtggggatggggataggtaggatttggaaagagagaggggcagagagtgcgcaggggagcacttaggatggaggaagtgggaatatgcacagagatgaatggtggagagcaatctggtttgacttaagatgttacttacatacgtgtgtaaagtagtaggttaatgggcttaacttgagaggatattttgggaccagattataggcaactaaagttttttatatttttagatagtaagaaaccatgaaagtgttttgagacagaatgttgagaaacatgatgaaaattgtgatttgggcaattaatctggcctttgtgtagagattgattggagaacagacaccattagcaacatgttttagtagtttgggtgctatgccaaaaacaactggaacagtaaatggaaagagtgggaccaattcaaggtaaatggggtggccaaacattttgatgattagagactatcctgatttaggtttgaagcatggttattattagtgcccatttttgcttttaaa

SEQ ID NO: 123982 - DNA, 7287 bp, Homo sapiens
ctttacaaattgttgacattaatttactcatgaaaatgtgagtatatcattaataggaatttagaagtagggctttttaagattttctgtgacgttggttcctaaagatgcaggaaatgtacatatatacctagtggttacttgactaaatgcaataaaaattattctttctttactttgaaactaaagctgtactttagaaatataccaaaactgagtttctgtggactccggttacaaattattttttaacatctgttaatgcaagtgtttcattgtgcttctgcatgtactttagtcttatgaaatcttagatatatcaaatgtatgaactaaatataacctatttaatggtgtcattcatttttttacaatggctttttaatttttgcacattcttaatcacattgggaaagggaaagctgtttgcatttgattggtgtgcttttgcatttttgtgtgatcagcgcatgtactaatgatttccttttatttttcttctttcctgcttttcctttctttttcctactcccttctcatttttccgtattttatactgctgtctctatacttctttctaaatttctttgcttactgtagcagcccttgccttttctcttgcagcaacagcccaggctgctccaaggatcattactgggcctgcgccggttctcccaccagctgccctgcgtactcctacgccagctggccctaccataatgcctttgatcagacaaatacagaccgctgtcatgccaaacggaactcctcacccaactgctgcaatagttcctccagggcccgaagctggtttaatctatacaccctatgagtacccctacacattggcaccagctacatcaatccttgagtatcctattgaacctagtggtgtattaggtaagttcttctccccatggggttaacaacattctctttataaatatttttgctccctcagattttgaaatgattttatcagttttagagaggcaagacaagtttgcattagggaagaccgaaaactaaattttgttttatttcagcctctcataagggttcccctttgaaataattgcaccttaaatttattcagatccactttggtaactgaggttcagtttggttgggtaaatctgttgtgtacatttcaacaaatacttttacatttgacattactgaggtcattctgagttttaggtcccaccccattggcccgtcacctccatcagctccacttctcaaactttatttgagatttattttatctcacaggtttgtgtaattgttggaaaatttttaaacttctaagtgaaagtagtctgagcgctttataaaattcatattattgtgtgtgttttgtaatatttgcgatcacttaaaatatcagataaatacagtcatgcatcgcttaacaacggggatacagtctaagaattgccttgtctggcagtttcatcatttggtgtacatcatagagtgtacttacacagacatagatgatatcgtttactacacacctaggctgtgtggtatagccattataatcttatgggaccacatagtataagtggtccgttgttgaccaaaatgttgttatgcaggcatgactgtagttgtattcttaagatttttcagttcttgtgttttggagtcctagtcatattaaacatgagagatactcttaatttcagtagtacagtatggaatagttaaataaatagcaaatcactgaattcagaatctcacttaaggcagaaattaaaatcataatataaacgcttggttttacatgaacaaaaagtggtgtgctcgaaaaagacattactgatgccttttttttatagagtggattgaaatgccagtcatgcctgatatttcagcccattgacttgctggatgaaggactagaatacagcagctgttataacacgaccagtcaatgtggaacaaactgtttctgtgcaacccctttgttttaccagacaaaatttgaatactttttttcctgaattgtatatgaccttggtgctgcatgcatgctgttgacttttaggactttgatcttttaaggttttttttccccagcattaatattgatttataaagatttgaaaatctttaatgaactggagaacactaagatttaaactcgaaaattcgttgttcaagtaaagaaagccatgatgctctgtatgttatctgtgtgtgtgcatgcactcaggtgccctttgtttcatgaacaaatacatttcattgtacatgttttctgtttaaatcattgtataaagtaattgcaggtcagaattataccacagaactgtttatgagaggcttgtgtctgttgcacatttcttgaagcatttttaaaataacatgtaacctgtaaccttgttgtttaagttttcttttctattaatactctgtcctgtggtcccgtgcatgctccttttcccagaactcctctctgctgcacccacagcatctgttcccgaggagttatgactcttgacttcctgcagggctggggctcttagccaccagctgctgttccagcactttcagcgcaagatctccctgattttgccacgtggaattgtacttgtatatgattaccttatctaaaatgaataagaggtgatggaccagtttactgcttagaaatagcaagaggcactgcagtaaaacttgtttctcattgtaaagcttcatgtcttttgtttgttggaaaatttttacttatagaaacttaattattagactggtaaaataaagaccaaaatatgcagatttctaattggcattcataaggtgaataataataagtgcccaatgaaaaaatctattatggttaatttcatttcttgctttgccacctaagcagtaaaacatgatattgaccacttggagaactcagaaaattattttaaatttctaagttataataaatttgcacacagataacatgcatgctatttatgtcacatctcacattaaattattttaaaataagcagtgcccttcaaaacagatgcagacatgtgtgttggtagtagtgaggagattggtattagcatcaagtcttcattgatgactaatttttaattcccttccttttatctttaggtatggctttcccaacgaaaggctaagaattcaagaacggtcttaactgaaccctcatcagatctgaatttaacaaatgcttagtctcagcagcctccgggggaaaaaagcttagcctagcagtcagtgacttacttgcactttttgcacatagatataaagtaaaattatgttattaatttggtttagtctgtaatattacacagtaatggtaatttataaaggagtgtatagtagtatactgactgctaagtgtactatactgtttgctttactaatcacctaattcattgcagttcatacttattgactcagagtttaaaaccacaatctgtaggctttaagaattgcttttaaacctttttaagtgataaactcttgaagtggtcttaaggttagcaaataattgtctgtattaaacatggcgttatttaagtagtcctgctgcaagaaaggcacttcagtgaatatgtgactagtaaagcttaaatatgtttggatctaatagagctcatgaaatactgtaacttggggattgtaaatgaatggatacaataggttaaggcccaagatgtttgaaatgaatgcaatattaatagatgcatatatacatgacatattgtggttaattttaaaactactgtgccttaacgtgtttcttaaacttttgtagtaaatgaacatttgaaatccattttgataaacctgctgttaatgttttttccccccttgtgaatgttttctaactttgtcttggtaattgcaatttaactaggtgcggtggctactaaagttcgaaggcacgatatgcgtgtccatccttaccaaaggattgtgaccgcagaccgaggttagtttagttctgcagttcttgtctataagaaatgcgttgggtgtccataaaatttgcaacaccacacctgatggaaaaatgtaattgcttacctgcacacagttttttttccttttctaaatttgtttgtgatcattgacagatttaagggttgggttttttgttttggtttggttttttctcccttcatattttaacttattaaatcttctattattatgtactatgatttattcctactaaaacataaattagtcaatttggggagctattaaattttgatgttgcctcagttattttcattaataacttttgctaaaatttaccttttaaaagttctgaaatttggggttggtattgcaaaatgaattgaacggatggtgctttaatgagagaagtaaaggaatatatgcctcctgtgtacttttggagaaaactgaagatttagtttccatttttctttataataaaatatttgagccactgtataaacatgagggtgcacatgtcaagtacttagctaaaatcaacaaagtgaggactgtgaagataactttcatgtagttggatttttttatataaattagagcgtcaattcccttttattcttacattctcttgccaaaatggatcctttgatttttgtcatttgctgctaaaatatattatctgaaggtaaactgtctcttgaagttctgtggtggtatgagatccagctgtgtgaatataatttttgactaacctgtgactggaaaataagtcttcatttttctcctttacaacttttataatttgtgtcctgtatatgcccttggacccttttataaattatttttgcttattgaggaatggtattttcggtttattgacattgaattgttttctaagtttttccatcacaagataggaatatcaagcatggtagtaaaaaaggattttttacaagtttctattatggcacatttgtttcctacaaattaaattgatcaaagtctcaaatattagtggaggaaaaagtgctggatttgtacttcaattgtacatcttctatgaatttatgaaggacctacctgctttatgtgattaccttgagtactgatgataaatactagacacagctgttgtccacatcagaaataacatgcctttcccaaagacattgttaatatttgtttagcataatccataaagaacgttgaagacttttaaactaatgtattcatcactaacagtgattgttcagtgaacaaaatagaccccagctccgtggtcgtctatgaggatggtattccttgtaagtgttctgtatgagcacgtctcatagggatggggaagttttttggaaagtcacttgagttttaaagaaactggacaattccatgaataatttgaggttttattcatattgctaatgtctacaattgttctaaagagtattttaaagtagtttttttcccccagctaatctttccctatgtatgcccccttttaggagatttctcaccattttgctttaacacaataattattggcctacttaatactccagtgccttgagatagttggacatattttaggaagattttattgtatttggaaaattacgacacattccatgcatggatcttttgtagttacgtgttttgattagtcctgtcactgtttttatttaaaatgcagtgtcagcaaaccgaaatgctcatttcttttttagtaacagagtactcgtatacttatcactgtatgcactcattgggtctaagggagatgtctgaagtccttcacttaaattattttatgatactactgttttctctatttttgaggttaaaattattttaaaaaaatattttgaagagaagtttattagtataagcattcatttaatgcaaaaaaactcagcccttggacatataaccatgtaattctatatgaacgtttagagtactacatggttgaccaatatctagttctttactaaaagtaaactcacctctttatatatatttcaaaactgaatttgaagcctattagagaccaactgaccttttagttgtaatgaactgtatggtcttgcatggtgacacacctgtgtaggaggccaagacttggcagaggatgtagtctaggtgtcctggtatatataaatggtcactcacttcgtttatatattccacactcagaaaagaagtcagagttttttctgagtaatacaaaaaccatcacttacataatttgtataagaaactttaaacagttttaatcaaaactatgagtaacatcaaaaatgctttaagattctatattttggaatacctgtgaagtagtatgactacatcatgttaaatatttattttcttctatgattttggagcagcaatttttattttaaataaaattccacttttaagaaattcagggaagatttggtcacattgaagatacagtatttttgtagtatttataaactgttctaaatgatagactatagaaaacatttttgtcatatgaaggtaaatcagtccattattttggatcatttaaactgaacattacaccttctgggctttgatttatgaagtggcacagaatctaactttgcactgaatatcttttcattcacatctcctctgccttagtcacaatggcaacagtacagaaaattctatcaaacctcagaatatagtagaaataattaagctgttgaatgagtcttaaaaattatactactgttaagtggaccaagtttggtgaagcagaatgtgacaaaggttgattaaggaaggaacaactcaaggacattgggaatgataacttttccacttgagaactactttatgttttactgtaatttttaaagtttttttgtcctttttgttattttgcaaaagaaaatagtatttacaggtggcttcttttaaaatataaaaatataaagcaggaatgtatatgaaatgtcagattttattgtatttgcagagtattagctttgaaattgaataaagaaagctgtttgtagttttaaaatgccttattggtatcaattagaaatttcttctattttttgatgtacttagagctttttgagtgtagaattttaaatggcaggattttacagtgtttacatgcaagtgcattttataagtgttctatatgtgtaaaatagtattttcaactggaaagtgttggctagtgcaaaaggcctggccattttctggttcccatgatgttgcctacactgctagactacagtttagtatcgctttgtatcatgaggccaagaaattccatgttgtttgtaaatagaa

SEQ ID NO: 123983 - DNA, 7197 bp, Homo sapiens
atttctttagattcatttctgttaatcatcagttattaataatcacatccatcattaatagttgctttaatgcttgcatcttagagaatactaatgcttaatagcagtcagatactgataactgcactgactgtttaaaaattctgtataccaaacctattcattgttgtttttcaatttccttcattgactgctactaactattagttgttagttgtattttatttctattttttcttgttaaccagttttttttttttttttgtgggagtgggctcttcttcatttgttcaaatcatgatacgaaattgtcatgattttaattgtattctgtagatggtgtcaatcagtttgtcagaattaaacatgcttttttttttattagttgtgattagtttttcatgttgtcattaagccgtcactagctgaaactaatctcttctctatcttttcttttcttttttttgttttgtttttttttgtttctaaccacccagccgccaccggcaactaacctatgaccttctgacctctgaactcttcacccaatgatgacctgaccatgcctgcctgctgatcagttaactggtaatcgcctttgcttgcctgtcgtcagtgcagcgagctgaggcacttgtccgttcgtcttaccatctaaccaaacaaaagacaaagaaattgttgtcctccaactcagctttttttttttttttttcctgtttgggtgaaagtggttctagaaactgcactgaatagtagtaaagcaataaggcccaattcatcccacagcactgatcatcttttaatatcccaccctaagcgaacggtaagaaggcctctcttaagaaggggagacagatggtccttaactactcaatgacagaggcagttactgtgagagacttctaggaatctttttcttctcatagcgaagtcaaagctctctctgaatgtactgtgtgatgatgcatcatgcatgaaccttcggtcagggatatcattggtgaagtgatttcaaaaagtattcaaaatttgatatgctgtttagtcactacagtgccctcaaagggcagaagttgcagccttttttatattgcctgccaaaatttgaagtattagaagaaagtgtgccatgagagaaaaacttaaggagttttgaaaagtaatgcaaataacaaaactgcaacactatttttaaaaagataaatatctgagttaaaattactgaatctttattttacacctaaaaaaatatgagaacaaggtacatgcattatgtgtcacattactgggcaaactgttcaagtatttttttttaaacctccctgtatagaaaaaaatcattaaggatgtaaaagccatgcttgcctatttgctgtatacatgtaatgaaattgtagataaagtgtagtgcattgaaacaaatgaacaaaaagtagatacttttactatacaagggtgctggtgcagaaaaaaatatatatatttttggaaatgtagcattttatactttcaagtgttataaaaaaaaagaaaaagaacaaagaaaccctttatttcattaaatgattttttctggtggttgtcaagaaacaaaagaccaaaagagcctttttgtctttcttttttattttttaagtattggaataagtctaaagaaaagaaagtgccttattttccttcatggtcattcagtcaagtgtctcataaagatcagctcctccctcagaatacaagttaatgcatgttactcagtcgcccagtatgtgaaagaagatatgagggagacaaatgagttgatagtttgaattataggatttttgccacgttaccttgatgcaaatttgccaaatctgatactgtgaaaagatttgataacttttctaatgcctgactagtaagttttaaaacatcattctttaaaagaatagtttaatacttttggttattccaatcttcaatgttaacccaaaggattctgagataaaaattatgtgtcatctaaacttcagtttacagacaaaattagagctttgttttatttggagaagggggatgcattcatttgattttgttttttgtttttaattaattgaatataataggatacctagcaaatgttttcacaaaagtgaatctttgtgattttcattctagaaaacaatgttttaaatcacccaaatttaatcacatgtctttatatcataccagataactggtgtagtgtatccttttactgtttcaataacctctgcctcccccaccccttaactttaaaagaatgtgaaaaactagcatcatagtgcatataaatactcaaccacatttcagcttaagcttctaatttctcaagaagttgaaacagttagttatgtagttgaagcaatttgtgtgcaaagcctacatctaaacacttgagtgaataatcattaactgctcagtaccagacgtggcaaatctcaagtgacagtggacccccccccccgcccagcttatcaactcgtcccctcttccacaccttcccagcatcacagtcagaggtcagcaggaagctgagtcattaccttcttggtgacctcccccaccatcttgtctcacttggaaaccgttgtcagtttatttactatgcaatagacattcattgttttgtatccagctagctttggtttaatatgccactgctttgtctttctgttacacatacagttttgatttatttacaatatatgctgtgccattttgatttttatattgtttggttggttgaataaatttgcgacactcaaacacttgaggtgatagttgttaaaaacaataccagtatttgatccagtttcatctcaactatgttatacctggacattttagatgtttatcaaaggtcttttatggggaagaaagtaaatgtatgaaataataaatgtgtgacatttatagggaatgttggctctgaacaaacttttgaaaacttggttgacaaaattttggatcaactgaaaaaagcatgacttttgaaatctctgaatgccttggttctcagtattatcattctttattgaatttatttcttattaaaatatgtagtttttaagactttttttctgacagtattatgtaattttttagcgtgggtagatgggagtgtcgcttgtatgttatcgtacagctgacatgtatttttgtctattctttattatcttagtttcatgctatgtatgtaccataaccaacctattgcctatgagaaacatgtaagataatgtatttacagccattgttacaagtttataatgtatttttctatcttgttttatatgtatgttatataacattcaaaaagaatttttttcttgattgagaaaaggatacaaaatgcaaaatccacaattttgataactgaaaattgccaattgttttgcagtactttattatattgggtgtcttgtcttttttgggcttttagttagctaatgaatgaatacattagacacttttgggttttagttgggattttacatagcttgcattttaattctttggttctttgctgtttctattaacccacagcattattttaataaatgttataataccaacctactaactctggactttgtctgtttattaacctttatatgtttaattaaaataaacaaataaagacaaaagaatgtaaagtcttgagttactggactaaccctgaagaacgtgaccacagataacatagtgtgacttgtttttatgttgtttgtcagctgacagttttgcacactactgttaaaatggctttggttattctggtcttttagcttgggggccggggcgggtgtgggtgtaggtgcagtagagatgggaacaaagtagcctttgtttgaggcattcttctcttgccacttgcctttcagcatctgcattactaattccacaccttatttttccttctccaaaataatcactgtctgctcacagcatcgagtaaaaagatacattgtcatggtatatacctggagaaaccagtttgattctttgttgaaccatttcttttaatttctgtaaataagtaattttatggtcacattgtaaagcagagaaactgttgatattttacctttatttagatttttgttttaacttgacctttttcctttggaaagcgttgaacttgtttagctaactactcctattaggggagcttaacttgggtaaagtcaaaggcccactggctgtttctcatggtggcctgaagccccgctgctttccagtgaggaaaagaaccctcagcacgttactgagctttcctcaggtatttttttctctgtcacctactttacaaatacagtcagactaaaacattaaacaagaagtttaagggggaataacattgggatttgaaaagttgtatgtgattaatttcttgcatgcaaatcaatttaagatttcttaaatatcttcatgcttttcttggctggaacttgggtaaattaacctgtaattatgaattatttagtttaactcaaggtgcatttttatttcacagattgatacttgcttttttctgtgaaacagttctcctagataccaaaatcctcaggatgaatttttgcatttgtaaataacaatttatctttgtaaattacattttatttatttagagttctaaaattgagggctgaaatgaatgacatgtaatagaagacaaaactgtaccaatacgctgttaaccaatcagactgtccaggtattctcatttcataaatatgtatacacacatataaatacacagagtagtgttagctgatgtgagtgataacagcgaatcaccattgagatggtcatttggatcatgtaaacaaaccgtgtcatgtctctgatgggagcggtgggtagtgtactgttaggtggacaggtcttttaacatgctactatttgtaaaagtttccgttgccataacagttcatgtagtagtctgtgaaaattcgaagctgtctgtcaagctgctaatatacaagttgtcatggtaccatgtaacttaaattgatgaatttctatgcaatttactattctctgaagcctatgaatgcagcctcatctcattttcagttaagggtactttatgtataattatgtcattgctgccttttatgtaggaaatgtaaaaaagttttaaaaggcgaaaataacattacagatttcatttttatacaggttacaatattaaacatgaaactaccaaattccaagaatagtaaaattctagagtcagttgattgattgaaactatttgacaaaacagttgaaagctgagctttcagtcaagaagttggtgaaattaatgtccttaaacttttcctttaggcaaaatgtcagggaaaacttaacatgaaagtagttactcccatacgcaccagtgcagtagctccaggtgtaagaggtcacgaaggcaccctgcccataaaaccaggatgtgcatacgtacacacaatcggtgtctggttatggttttctaaacactacataaggatctgaattttttagtgtgccaaaagcaaacgataggtttaaatgaaattgctcactaccaaatcaagactcttcatatatatacgtgtgtgtatatatatatgtcataacactttcacgtgtgacagcctaaggtttctttagttttaggatggggtggggtgggagtggttttgcatgtttgaccaggatgtgatgcctgtctttattccttgataagaagtagctgttacagcatttcaagcaaattattttaggtagaatagaacttactgccaaatgattatttatttagcaaaaattattctccaacttttcgaattcacaatttttctaagtgcatagagtagttttttacattgtcacgaattccttaatacctttatttaaaatggaaaaaatatggacaatattttagaaatatgtgctacacatctaattttatctgtagtttaagtgatctaaattgagatgcctttgatatgaagagatttaccaacattatatgcactcgtgccttcaatgtggaatcaaactggttaacctcagcacagtcctctcgtttctgtgtttctgctgcactaattgccagggggtgggggagaaggcgaatgaattaattcatagtagaaggaggcgataggtgcagcaaagggcagccacagtgttgattccacattataatgttgttgcctcttcttggcaaaagacaccacattgtgggaagatctcagcttccagggtaaaagttaatttataacttaaaagtgctattaagtttttattaccaaatatatcttttatggtttatattgtagtggtatgtatgaaacatttaaaattttactgtggaaattgtgtatatatatatatatagtcgaaataggtgttcacaggtcacatgtgaacggagaactgcatgaccgtacatgaaatgcaataaaccaactggaaaaagtgcatgtgcttcatcctctcaagccaactgcagctggaaagtgctgcttatcctccacccccagaaaatgcatgtatcaatatgagaataaagaacgcacactttcaattttattgaggctttcaacactatttaaaagaaaatgtaagaatttgacattctggagttattataacattagaaaatgagcataacattcactctgattttagccattaagggagattagtaaacagactgctacagtgttccatagttggactgtgcatccaaaacatttttttatctttaataaatggtacagtttttatgtagttttcgaatgtaagaagaaaggaatgctgaccaaaacttgatttcatcagcttcatgaaaaggactagtgtcattaacctgttgaacagaattggtttattaaaaaaatcatttccagtagtgtgaaacctttacgagtctttaacatctaaatgttatgactccttgtaccttaagttttccagtctttcttatttatatcatctccaagtacctctggctcctttcctcttgctcaccggaaccttagttttcctcaacagaatgctttgttaaagtagcccacagttgcaggatccatagcaccgtcgtgcagactagcagcccaaaggtgtgtttggtttggcttatacggtgttttgctttttaaactacttgccataatttaaaagtggcaacactag

SEQ ID NO: 123984 - DNA, 1074 bp, Homo sapiens
cctctgaaagcgcttatttttacatgctacacaacagttccaattttaaggagtgtctcctaaaattgggatgaaaatctactgtagtctgttttaaagtatgctatactatgttcattggttacttaactggatattaatataaaggttattacaagaaaaatgatgaagagcaaaaggagaagaaaatatttgcaagtgaatccacaattcttgcagaactatttgagttgatactaaagattttatgttcactcctttaccttagaactgtcaagcttgggaatgaggaaagtgccttggctgtgcttgaaacctgaattttagtgcttcccttattacattcattgttttcaatgattgatttataaaattaagacatactggtagtacaagttgaaagttggtttgaatacattttaattaaatgataatatgttaatatgcttttgttcattgctttctcactgaggtaaaacagcattaaaaagttgtccagaatttaaactgactctagatttctagattcctaggtggcgggaaaatgtaaaactttaaagctcatgagcggaacgcaatgcaagtcctgaaactaagagttaaatgtgagtctcagggaaaaaagctagattagcaaatcaaacatacatatgcctcatccagaacatcattcaggcatcagttcgggggctactagcagtaaagttggttttaaatgaaataaagtggaaaagtttgatatcacttccagaagtggtctgtcatcagtaagtattggtgttgagtctaaaatgaattagaaacctcccgttactcttaggattaaagcaacccggtatggagagaaatgaaagaaaaaatgtagtgttagcttgactttatgtccctttcactgaattccatatgagcctatttggcagagaaattttgtactctacaaggaaaacatcactgatgtggacagcaccaataatgtacgtcccattaagctaataaatacccagacggccgtgtgaataccttgaattcttcagagaagtgtgttagtgcgtttagtgttgctatagcagaacg

SEQ ID NO: 123985 - DNA, 1425 bp, Homo sapiens
gcttccgctggcatgacctgcaatgaccggcgggtcctgatgtgctttttccctgatggtaaaacttttgaaagttttttcttatgtccctgtgtccctgcgaagcccttgagtcaggccacctgcaagggaaaaccttgaccgattcacaaggacacattcgtcgctttctcaggacgtgactggcgccacccttattctctacggtcacactggtgtgcggcccacagagagccctctcttgagaaatgggcacgatgacttagaaggcttggcgggccactcgtccctttaaattgagggcgcatgtagagtaagcaatctcatctgaacgccacccgcttggcaggcttttcctcacccccttattgtaaggcaccttttgctttactatttccccggggcgcaggccgggatgcagacagaggctggctgtagtctttgaaagcaccattgacttggtttcgggggcgaccgcacacagggcaccaagaccctgttgaagggattaggtcttaggttgccttgtgcccacagttttgctttgcaaggagtctagcgcctctgaagaatgtgacagaaaatgtagtactaacaataatactccctggaattgcacatgggcctgcttctttaacagaagagaaaggagtaaggatgaggagagagccaaggagtaagggtgaacagaagacaagaattgagatttggcccctgggagagtcagaggagaattcagtgagaagactgggaagatgaatagaccaaacaaacaatcctcctaactgggcagctggaggaaaataaggaggaggtaaaattgctggtgtcagtttttttacacgtaaacttacattcttgggctttatatagtatacttttttagttgaacgaatgctataaatacgcatttttttgtttgagtagattagaatgcttgtcacaaagagccttgtaattggcattgtagaagctttctgggctcctgactctaaaagaagaattggcacaggagtggaattgcggtgtggaggagggctgcttgtatgaacaggaaaccatggtggaagttgttcagatgaatgacgtgctgaggttggaaatcccatttctaaaataatggaggtgtgatagtcatgccataggtcagctgactagaataacaaaattgagttgagaataaagctgagaaaactattgaaaatcagccacggagttgtgctgggcaacctcatgttttactcaggatcttaggaagtctttgcatgacccaggatttaaaagcattcatgcagttaaaggactgcttgtcgtgaagaaacctcagggacaagaaaggaatgagcttcagtctgaagccggcatgaacgtaggctggaaaagagatcactacagtcacaattgccaggtgcgtcaccagaggct

SEQ ID NO: 123986 - DNA, 1037 bp, Homo sapiens
tggatagaataaaagcaggcagaagaacatggaaggactagactggctgagtcttccagtcttcatctttctcccgtgctagatgctttctgccctcttacattggactccaagttcttaaactcttgggcttacaccagcggtttgtcaggggctctcaggctttcagccacagactgaagccagcactatcagcttccctacttttgaggttttgggactcagattggcttccttctcctcagcttgtagacagcttattgtgggacctcaacttctgactgtgtgaatcaatactccttaataaattccctttcatatatatgtctatcctattagtcctgtccctctagagaaccccgactaatacagctggttccagctgagccgagctggaggagacaaagcctctatgcgcgtacaacactggtggagacttagactggccccatctttggcatctgcaaacagtgctgtgatgaatagcttggtacatgtggcttttttcacttgtgtatgtatagctagaaaattaatttctggaagtagaattgctgggccagaggatatgtgcattttttatttattagatattgttaagtttcactccaaagaggttgtaccagttcatattcctgtcaatgatgtatgagagttcagattacctgacatactcatcaacaggatatattatcctacttttcaatctttttggattcaacaggtgaaaacaacaaaaactaacatatttcaatgcggttttaatttgcatttctttttacaaagtatgtggttgagcatcttttaaacatgtgaaatccacttgttttttttttctcttactacctttagctattttcctattgcattcattttctagttctttatattcattaataagtgtcttatatattacaaattttatttattgtgtatatggcaagattgtttcccagtgtgtattctgtcttttgggctggtctaatggtagtgggttatcagaacttattaacattagtgtattttgtctttcccat

SEQ ID NO: 123987 - DNA, 1044 bp, Homo sapiens
ggcattaacttgctcattttattgaatttgtcatacatggcggggaggggcacttgaagggagctttaggagaaatgatttagaagagtgatcgggtcctttgggaaagtgtttaacaatttaccaaaagtcaggcaaatatgtctttttgataccttgtacagttaggtacttacattagatttttgaagcgcaggtatacatcaaaataataattagaaaggatctcacaaaacataagctactctattgcctgtcaaattggtaactctgccttgaagtgaacagagtaaaaattcatgtgctaatcttctagcctttgttctgcatctttctgcacgggtaggaagtgataagatcctctgttgttagcagtactaagggccatataaatatatgtagataattaaggctaaatcttgtattaagaaaaattccaattatcctcacaaggacatgtttcaaatcttctacccaagtgccggaagcaagtccaattatctgaatataattgttagacattatttgataaacatgaggatagtgcctgtgactgcatgatttaaaaaccagcaacctctgcttttacctatttaagtgtttagattttcagccaaatgaattttttctccaattctttccaaaatgactttagagaaggtgtcatatatttttattaaaggacccctggagacaagtgattactatggtcatgcatatattcaaattgtatattatggagtcgaatctgcttacactgagttaatttaaacgattatgacaagaacttctgggaaatatgtcagctaaattacgtgtttgcaaactcctctggctcttctcttcaacccacaaaaataatgtcatcagacatgaatgcaaggaactaagaataaagcaaaattcctcactctcaaactgaaaacttgaaagcatacagtttggatgagtggagagcaatccggacacaccatggtgcagtgttgaggtcgggcaggggttcaatgcaggaggttctgaagacccccatggaccccctaacta

SEQ ID NO: 123988 - DNA, 1050 bp, Homo sapiens
gccagcagggccctggatgcctctttctgtgtctgtaaccctggcaacccatcccctaagaagcagagatctctgttgctccccatttgagcacagcactgctttacatctgcggatggcaagcacattcacatggcttctcattcacctagaggaaacgattgcggtgccactgacaatgtgcctccaggactttatccagtatgtccttccccccacacgggccaacagggaaattccctaccatctttccatttcttagaaaaataaacttttaacatattgaaaaaggtattttaccgggaacttcactgatgggccatccctcccccaacggccctccctcccttaaatcctcccaatttacctattttaactagaacttatatgttaacccagggcaccttgaaaacgcattaatgacaaataagaaagggagtcctcccgccctccctgtgtgcttgtctcacctcatgtacctggtcctgcctaggctcttctggctcaactcaaggcgctggggcagaggccggtgaagacggcggacatggatctcgccagggaagagctgaggatgctcgtgacagccacaaaagcagccctggagcagaatgataggtgaggcatgagggacggatctgatctatgtttagattcttccgtaacaaggtctgaaaccgctgtgacaagcctacggttacattgatttctgcgttgctgaaaacatgctacttttgctaatatcatgcctgtcatctggctatttctacaggccatcacctatgtgactaagacattctgctaagtatggtgtgtccatggggggagtttgggcaggtttctcaaggaattgcctgtcttttctggtggtcccctgaagactgactgataggcgagagggctgcagatctaagacaccttatatgaatgcccctattgttttttaacttacaaagctcttctaatataacctctctgtatcattttccggggtcgaataacaattggatagggcatactctttgtatgatttgaaaaaagattaaagga

SEQ ID NO: 123989 - DNA, 1966 bp, Homo sapiens
gaagatctacggtaggctgccgactcagaggagaacagctgactggaggcatcacctccaaatggggacgatgcacgaaagagaagaaaatagcaggcccccaggaagcagccaggccttggggttggaagagagaaagggcctttggggactgtggaggcggagagtgaatgcttgagcacggggagcaagggagtcaataaagaagaaaagatttttttaaaaaaatcccacatcttgggtgaccagggaaacaaagaagctcagcaactggtgggagggatcagaacccccgagactggccccctgtgccgccccgcccactcgccagggtgatggcagctgtgtcctcactgactcctgagaaattcggttctggaagaaagatgaagccaccctgaaatgggctgactctgtttttcctccaggagctccagaaaatttgcacgtgcagcccccagcagttcaacagactgcacgtctttggaaaagtctttgaagatatttgtaacagttctttgatatttggtgatctcttgaaaaaagttaaggtaagaaacatacatcttcagcataacagttgagaagcttgcatgaggttctgtgtacaagaatgatctcaagccgcactgaaattctgctaggtatcacaggcccccttctacagacagggaccatcactcccagagactcgaggtcatctgcctgcaggcacgtaaattgtaaggggccatgtggaatcaacacccagttaactcattcctcaaacccatattttcccactaaagcttcctaattatgcataaccgtttataaattttatataacttaattataattctaataaattaataatttaactttacatgtgtaatgttatttgaatccttatggaattataggtttgttgcaatttcatgatgaaagtgatttttgggtgctgtggctcatgcctgtaatcctagcactttgagaggctgatgcaggcagatcactttaggtcaggagttcaagaccagcctggccaacatggtgaaaccccatctcttctaaaaatacaaaaattagctgggcgtggtggcacatgcctataatcccagctactcagaggctgaggcaggagaatcgcttgaaccgggaggcagagattgcctcaatattttatattttattgtatggtattttatgatattctgaggtaatcaatacttaatgctcaaatatgcttcaaagatggtgtgattttatcaatgtgagcatgtataccgtttaatgcattgtgggaacattttatatttttctgaaatgatctaaatgaacattcttgacttccgtattatttatacacgtgaaacacctgcactgtggcctcctcatacatggccagtggacttttgtttgtttctgtacaggatgaatatgaactctacatggcaacgctcctggagtcccagcctgcagcacagtacgaggtgacgatcgatcacaaagagcctgaatagagcctgcttatccatagcttcatatttcatgagcagtggaaacctttctgaatccaagaagccccatgtgtgccccataatttagaatagctgatatgttctttgttatagatgagttttatactgccttaataacattattgataaagaactttccttttgattggcatagcattatttatactcccaaacaagcgacataactatctatgtataaattgggaatataaatggttctcttccagtaatttccaaaaaccactgtccagccattgtcctggcgaaatcactgagaatgcattgtgatggctggtgtgctgtaagctgactcaaaccccatgatctctttgtttaacgggtgacagcgttccaggtgttcccttccagggtcgggttaaacatgtgattggtcaaataagaaaatatactgcaggaataactttatcacttataaaacctaagaa

SEQ ID NO: 123990 - DNA, 1048 bp, Homo sapiens
gttcagaataagaacaagtgtaagatgatgaggtttaggcctcctgggagatgcactgtcgacatttctcagtaggaaggtccgtgttgtcaccaagtgttcctactgctctgggaccacctcctttgcacgatcccgcgtattcctcagtagtaaaccctagggctctttccctgttcaagttaatccttctttctaagaaaggacgtatgctgagccctagcatttctgctgctttcgcggtccagagcggatggaccaaggtgcccctgaccctctggcacctctgaatctctttcctgaacagccatcacaggaacctgcctggccacgtcgtgctggtaaccatgtcggagggccccacacaatgccgttgtgcagagctgtgccacaggactgtttggttagttttcaagacaaagtccagaaatcctttattcagcttctcctgaaactgcatcttttatccctagggataatctcagtcagtgggagaaggtgattcgaggggaggagactgcaacctggatttcatccccatccgtggctcagaaggcagctgcatctgaagattgagcactggtcaccctgacacgctgtcccacctacagatcctcatcttgcttctttgacattcttttcctttttttggggggggtggggggaacctgcacctggtaactggggtgcaaacctcttcaagaaggtaacatcaaataaataagtcaagcagaggacttcctgccaatctcttctgtgaggcatcatagacactgagcaaccaggaccacccccacgttcagaaatcagctggccaagtgactccatttgacttgcaaaccagccttttctaataggctaatattgctgaggccttaaaggaaatggacaaaaattatccagaaggggtacttttccattgtatctttctaataagggtttaaaatggtactattatggtattgtacttgggctttaacatcaatgttgctttgatgttgttggatataaataggaatttttacacattactattgtgaatggtgaa

SEQ ID NO: 123991 - DNA, 1040 bp, Homo sapiens
atgtcatattgtatcttttgatgaatgttttgttgactgggtataaactaatttttttatacttaggtggtaataagagctgatattttctgagttttttaaagcaactttcatatatgaagtgtagagattattattatctccatttttcaaatgaggaaattgaggcatagaaatgttaagtgatgtatttcagtaattctgtaagtggtagagctaagagtaccttggtagtcgtcttcgataattagaattttatgttttaaattaaatgctgccgtagagaccagaataataattccacatttcttcaagcactaaacttgctctcatgaaatgattaagtattagggaaggaaatcagagttttagaggtaataggttacatacatgaaactttcaagaaagcggaagtgccatatttaaatctttctctgatgtaaagataagcggacacaattcttctgtgcttcactgctctgtgcagtaagttcatgttagtagggtgcacagcttagatgcctgtgtttctactcatagcatttcttagtcactagggacaatttggctcctaaatattaagaaagaattagcagctgttacagtggagggacaagatgtttgacagcagcatagcaagttgggggctgtgtaatgaatgatctgaagtggaacagctatagtgtcagcaagtgaatagaaacttttgaagtatttgcagcacagcttcaaacagtgtagcgtgactgtggattatgagaaaataaatacaggcaggtcaactggtactaaacacttaagaatggggatttctttttaaaagcaaactcagtttgcctaagaggtgaagtgtaatgcttccaaagggtatcacaatgtgtgaaagtggctgaggtcacaaatgagagaactatctcttcaagaacaaaatgtgaagaaaactgtcttaggaactctggcctgtctcactcagataacattatccatagcagtgatactgactactcagataacattttccatagcagtgatactgactc

SEQ ID NO: 123992 - DNA, 1048 bp, Homo sapiens
ggaggatgactgggatatttagtttagatgatttaagaggaggatgatttcacttaaagagatgggatatgaaagagggaggtgaaggaggagaagagggagaagattcaagtaggttaaagtgtagccatgctgagaattatctgttagttatttgatttttttgttttgtttttgtttagaagctaatggtatagatatagaagtcatccacagagatgttacagttgaagagatgggggtagagaagactttgaaggaaaagaatgtagaatgaggatagaagagaggaaatcccaacatttaacaggtgagtagaggacacgaagccagcaaaagaaatttagaagggacattcagatagacaggaagcaaactagtactctatagctctgttttgatctgccaattcattaaaattatcaattgatgagaactttgttttgttcacaccttgactctttttggtgccaaccttcagtcaagccccctacagtatcattgacagggtttcattgcaccgaaaagtttacagtgtttcatactggatgggttagttttaatggcttttgaggatttctgtggtgttctagttgggtgatttttccctttatttttcatagggtgggttacatatttgctttaggcaaatttattattggctaaatgacctgctttaccatgttatgtaggagaaatttccaagaaactaacggattagttaacaatatctgatactactgagaccaagggagatgaagactgagataatgatatttagcaatttggaaagttggtttaaccaaaaaatgattttaaccaaagaatgatatccagtctccagtaacaatatctgatactactgagaccaagggagatgaagactgagataatgatatttagcaatttggaaagttggtttaaccaaaaaatgattttagtgcagttatggggaatgaaatcattgggtgattattaacacatgaattagaattaaggacattaaaataagcactggactactcttttgactttgatggtgaaagaa

SEQ ID NO: 123993 - DNA, 1081 bp, Homo sapiens
cttctcacctcttctgaaggactggagaggcagtctgcgtagggtagaaaagagaaaagagagcattccatagagagaactggacatgtacagggagctagaagtcctgaccccgtcccctcatcttgcagaaggcaggtccatagccagcctcccagcggctggcaagagcaggccctctaggtcccagtgctgggctattagtttaaaattttcctaatttatttgaaaatttataagagtaatggatttttttctttgaaaattagtttgtgattctacctattgtatgagcttaatagaagaacccaaggaaccatttattaattgccgtgttccagatggcatattaagaatttgatgtgcattatctttattagtcttcatgataatccttataagattgatactattattatcaccattttacagatctgagccttaggataagtccattgcccaaggtcacacagcaggggccacaccatttgtaccctgattataaaggaaggtatgaactcccattttcatgatatggagcaacttctgtacaagtgttttaagtttggaaaattttaaagacagttttgctaaaaatgcctttcctttcttctctttttgaaagaaatcttgacaataaattgcttatgtgttgcatgtgactcttaaacattctgtttttaagatctctttgatattgttggtgctctctctctctaagatctgttaataagaagaaaagaaattaaatactattagtgaagtatacttccaaactttgtaacaataatttccaccattctcagatatacttaaataactgctaaaatgtatgttggtattgtaaaacctaattggcaaactgacaggtttggggtttttttcccctcaacaaaaaagtaagtggaaaaagactctcttaaaattagagttgtgagtggtttgttggcttgactcgtggcattgagtgcctcaggtgagcagagaccaaagcgtgacctgtgctagtggagctcttgttgccctgtttcgttcacaaggaggcaagttctacttcagtcttgcatgtgggtcacacaca

SEQ ID NO: 123994 - DNA, 1046 bp, Homo sapiens
tgagcaatatatatctcatttggtctagataacatttatgaaagtcaatttagcatggatgggcttctgtagatacttgtcgttaataatgattgttcactatacagtgatgttttttaaaccctaagtgaaatttgagttgtcttttgcatgtgggtaacatatgtgtttcagcacaagggagatgaggatgtatgaagtgtgtaaaagaagcagggaaaggtagtgtccaatactggcaaccagtgaagttgtttgaggttattactgatgacagtatacttttcaaattgaatttggtaaattgcttcactggctgaataagagagttgattctgaacgaaggagatcaaacctgaacagtacattatcttcattatacttatggttgtatgcaataaacataacttttctaatccaaatattgtggcagactatcttacagaaaattgtatttgtgtatatgaaggattttcctatgtgttttgaaggaaatgaaaatgtgtaatggctacagcagtgatactgataggctagcaggcaattgattgctcagaggttaagttgagagagagagaattctctggaccatagtcattattccttattcacactccattcagctttccccgccccttctgggcacagcctcagatcttgtgccgttttggaaggcacacggtgtggccctggtacatgcttgtatccactcattgaggtctgggattccaccatggtaaggctcatcagagcccttcctcaggactggcaggaggacacccagagaagcagttctaacatttcactgtggttggtaagcaggggaggacatgttttcagtcctggttggaagtcagcttatcagtcaggacaggtgaggttctaattcagtaacaagtgctatgaaattctcaatggcttagtacaacaattatgtatttccttttcatacacagtttgccacaggtccaggtgactccttcatgggtcaataaattactttttgtttttttgcttgttagtatgaattgggcttttgtttcttg

SEQ ID NO: 123995 - DNA, 1097 bp, Homo sapiens
actaaatttagagtgatttttactataccttcatgtaatttttctttccataggagtgcatgtttgaaatgaaaatggaaattagcccaggcacggtggctcacgcctgcaatcccagcactctgggaggctgaggcaggtggatcatttgaggtaaggaatttgagaccagccttcccaacatggtgaaacctcgtctctactaaaaacacaaaaatttaccgggtgtggtggcaggtgcctgtaatcccagttacttgagaggctgaaaagagaatcacttgagcccaggaggtggcggctacagtgaggcgagatcatgtcactgcactccagcctggccgatagagcaactgctctcaaaaagaaaaaaaaaaaaaagaaaggaagaaagaaagaaaaaaaagaaaatgaaaattaatgggaaaatgtggctgtgtataaactttcactgacagacacattttctgacagagccacgtggtgatgtgcagagaggatttggatgaagaggagctgctggaagctgtggagttgtttctgtgaaaaacgtttcagtgagtcagaatttctagagctcaagagtgagcggggggggggcggaattagaaacagaaggtgcattcatcaggtttgagataacagaggggcctggctgactactctgcacgctgtgagcctaataaataccattcaaattaatgctccaagaattgtatgtgctccagttcctttttcaaccagatataacttgggagtgaataaatgtgagagaattgaggtcagtattttttttaaaggaatgcagaagggaggaacgagagagaggctgatttaagtcagagacttcaaagaaatgaaggtttgatgcgactgtccttgcaggctgagaacaaaacgggcctgaataagcacagaggggaggcgaggttcagggtgagctcctaatcacctgctgtatttacaggagagaagacaacaggagaagttagggaagatattaattgtatatccaagttaaaaattagtaaatatctgtcaaattccaagaatagagtgagcatgagggaatatgaggaagtggaaggagaaattga

SEQ ID NO: 123996 - DNA, 2259 bp, Homo sapiens
aaaacttgttaactggaaatagaaaggaacttcttcaacttgttaaagttgtctactctaaaagtgatgttaaacgttacacagattaggggcatttttaatattttctctgaaattgtaaatgatgtaaagatgcccatcatcactcctattaattaacatttgtctgtaagcttgtgaccaattctataaggaaaaaagaataagtaggagaggtaagacttgaaaggagataaaactgttattatttgcagataatataatcatctgtccaaaaaagcttccaactattagaactagtaagagaattgaacaaaatttttagataagaacaacttaagaaatcttgatatcttctacactgacaatacaaactaggaataataataaaatattattccaaattccagtcaaaactagaatatttaagaattgatcattaatccatagaaactttatagaaaaaaattttatgtatttatttttttggctgagcacaggggactttgttgatggtacaagacaaggtggggctccctaggccactccctcttcagggggtctgcatggaaactgtgaggaggggagattctcattgtggcaggggactgagtgtggcagggactccccagcagtgagggcctctcttttcctcttgtgctgtcactggggctggtggttcaggggtcttactccttggaggacttgtgggccatgacgtccaccaccctgttgctgtagccaaattcattctcataccaggaaatgagcttgacacagtggttgttgagggcaatgccagccccaacatcaaaggtggaagaatggatgtcgctgttgaagtcgaaggagacaacctggtgctcggtgttgtagcccaggatgccctagagggagccctctgatgcctccttcaccaccttcttgatgccatgatatttggtaggtttttccagatggtagatcaggtccacgactgacacattggcagtggggacacagaaggccatgccagtgagcttcccgttcagctcagggatgaccttgcccacagccttggcagtgccagtagaggcagggatgatgttctggagagtcccaccaccgtcatgccacagtttcctggaggggccatccacagtcttctgggtggcggtgatggcatggactgtggtcatgagtcctttcacgataccaaagttgtcatggaggaccttggcccggggcgctaagcagttggtggtacaggaggcattgctgatgatcttgaggctgttgtcatacttctcattgttcacacccattatgaacacggaggcatcagcagagggggcagagatgatgacccttttggctcctccctgcaagtgagccccagtcttctccatggtggtaaaggtgccggtgggctccacgatgtactcagcaccagcagtgccccatttgattttggagggatctcgctcctggaagatggtgatgggatttccattgatgacaagtttcccgttctcagccttgatggtgccatggaatttgccatgggtggaatcatacaggaacatgtagaccatgtacttgagatcaatgaaggggtcactgatggtgataatatccactttaccagagttaaaatagccctgctgaccaggcgcccaatacgaccaaatccactgaccctgaccttcaccttcaccatggtgtctcagggatgtggctggcgatgtgagagaagatgcggctgtctgctgaatcggaggaggaaagagccgaaaaaaaaattaatgagtgacacagaaagttcaatggagagacaacccatgctctcaggtgggacatatttgtattatgaagatgctggttttccccaaatcaaagtacgaattcaaggcaatttcaataaaaattccagttgaatttttttgaggaaggaaaatatgttaccataatatttatatgaaagcttacaggtccacataaaagtaagtacaatttgaaatagaagcacaaatagatgtgacctgccctaccagtctatgaagacatattatagtgttaagattttaaagaatttgtattttaccaagagcagataaataatccattggaacaatatattatgttaagagacagattcatgtatttatataggcattttgtatataataaacctggcaacccaagtcaacaaaagtagattattcagtagatggtgtttggaaaattggcttactacatggagaaaaatatgagagaatt

SEQ ID NO: 123997 - DNA, 1027 bp, Homo sapiens
tgttggaagttcctttacatggttccctaagttccggagcgcatctctgtgtgtggtctgctgggaaaccccgggaggaaggaacctgtggggttcccaaggccctcgggacccggaacaggactggccctctctgggtaggcggggctggcttgggggcgacgctgccaggagcgcgcggggccgcgtaggcgcccggggagacgcacttgccccaggcggcagccgtgggagcccgaatccacaccccggaggatgaactgtcgtttgcagagttaaaacgagctgtcaggtgtcttcagaagtttagacgggaaaaggcaaagagttaatccttgctggacaaaccactgctgcttccagaaaaaaccacctgagaacggtttaaaatgggagggggcgctttcctaggaagcggattcagaaaaacaaatacaactcaatagattacagtaaaataaaattggagggcgccaaaggaacatttggttattcaaaaagcttgttttttaatgagaaacgacttcaaaggcgccttggaaagtgggtgggacgcgcacatctcagccgtcacaaggcaggtggggccccccgggcggagaccccggagggcctttgcctgggagctacccccgtccccagccaggaaagagcagagggcgagaccacgggtcccagcgtctgctcccctcaccggagctttctccctggggtggcggccgccgggctccaggcgacacagccagtcgcagggaaaggcgccgctgctccgtgtccgcgcgggcgtggcggccccgctgcgcgctcattagcgcccgctccgcccagtggcttcccgcggctgcgtgtttacttgtcattttctggcggctttgtttcccacccagctcctgagcccgggctggccgcactttctcgttctggttttctttttctttcctcttctttttttttcgagacaggttctcagtctgtcgcccggggctggagcgcagtggcgcaatcctagctcactgcagcctcgacc

SEQ ID NO: 123998 - DNA, 1214 bp, Homo sapiens
agggaaccacaatttgttaaatgcatggggaaacacagtattaaaaaaaaaaatcaccacgctgggcgtggtgatgcacgcctgtaatcccagcactttgggaggctgaggcaggtagatcacctgaggtcaggagttcgagaccagttggccaacatggtgaaaccccatgtctactaaaaatacaaaaattagggcgcagtggtgcatgcctgtagtccagctacttgagaggctgagacaggagaatcgcttgaacctgggaggtggaggctgaagtgagccgagatcacactactgcactccagcctgggcgacagagcgagactctgtctcggttaaaaaaaaaatctttctctgtaaaaattatcctgatctaaaatatgatacacgtgtgtgtgtgtgtgtgtgtgtgtgtgtgtgtgtgacttaggctgtcagaaatcttgaaaggtcatacaaaaaggcatacggaaagaagcccagcgagaagagttttcctgctgatgaagacagaaaaggcactgcagcagatcctgctgggacaggtagcaactgttcgtgtgattgctaacaaattgaatttgtggcgtctttggtgtttctgtatttgatgtcctcggttcattggacaacagagccattgttggtggcaggaaatatcactgtacatttatactgaaagtctgtagttctggcaaaattaaaactttgagaacataaagttgcaaattctaataacactttttaaaagtcagttttctttcacatgaatgcatgtgaaaaattcacgcagctttttgtcatccaaggtcccagggagagagcacgagcgttgaaacctgcaccagcagcccgggcgaggcggctccttgtgctagggcgccctctagagccggagagcggaagcggcgcgggcggcgggcggcaggcggcgcctctgcacccaagaagcgcttacccccaaaacatatgctgggccccaggtgcctgccctgggtaaccagcacgaacgaacagagataccccaggctgtgtaaatccttggtgatcccctagattcatcctttgagttttaaaaccgagaaacttgatatccagagaagaaagacccttttgaggccaggattccatgggaggaagaccctctcctcagccccttaatacccaccctccccagccaacaggacccttggggaagaaaaccctctccc

SEQ ID NO: 123999 - DNA, 1118 bp, Homo sapiens
tctactgacagatgaaacatcagtgaatgttaaatgtaattctctgtatatctcaaattcaccataaaatgttctttactttttttcactgatatgtgaagaaacttaatctcttggttattttctctagtattttgccttttattgcctaatttgtaactaataattgatttatccctaaaggagactataattatcagttgtggtacagtttctattttattataagaagctcaaactttagcatgcaccagaatcacctagagagtttgtttaaagtgcaggttgcttgttaaagcaagcttgtgatttaggaggtttaaggtaggacctaataatttacatttttaacaagttcccagatgatgctctcactgctggtcggggtcacactttgagaaccactgtacagtctcatgctgctgtatttattataaggttagacatggccttttggcataaaggaaaaccatcattcagatgaagattcaacatgcttgaatatttcttgcaggtatagcctgtcgtacatcccatatgcaaggtaagcttgtttgaatcttgtcttctttctggttctttacttatcttcacacaaatatatgaatttaagtaatttttacataaaaatactatttaaaccctttttttttggttgattttaatttcctaaaaggaaataaacatacttttttttttttttttttttttgagacagagtctcactgtgtcgccaggctggagtgcagtggcaccatctcggctcactgtaatctctgcctcctgggttcaagattcccctgcctcagcctcctaagtagctgggactacaggcgcgtactgccatgcccggctaatttttttgtgtattttagtagagacgggatttcaccatgttggccaggatggtctcaatctcctgactttgtgatcctaccgcctcagcctcccaaagtgctgggattacaaccgtgagccaccgcgcccggcagtaaacatgttttcaatgagatgaatagcagcttgccatgataatgtctgtatggaaacattttggcgacatggagcagctctgtggggagtatcctcccgccctgctgcctggcgtgcactaggga

SEQ ID NO: 124000 - DNA, 1063 bp, Homo sapiens
tgtgatatgcaaaataaatgattcagactatgtgttaaaactttgctttaatttagtataaagaatcagattggtagtgaattaagactatattctaaattttcccattttttattaaggtcctggatgcctcatcccttagtttcaacaccagattgaaatggtttgccatctgcttcgtatgtggcgttttcttttctattcttgtgagttaaggctttatattgtttaataatttttattttgtattagactaataattccatttagtaccaaaaactaatgtcctttactaaatccctgttagaccattttggtggaaggtatttattaaactaaaataaaggggtagagatcaatgaaaatacgtagaaattagtattttggggagttttgtggatagttgaaataatttaagaaaaatgtatcaatgtgttaaaagatctggagagtcagtaatttagatgtttattaccttttcatacttggtatttagcatgaaaatttaacttaaatagactgagatttactggtaagcacaaagttttgttatggctcatttatatatgctagtgcaaataggaagaagattcaagttagtgtataacattgaaaattaactattttttctgtgtaatcagactagactgtctacaagcagatttgtatttaaacatattacataatattggtattgtattactgcagtagcacgtttatattttaaccattaaaatcataaaattattttaaaataactataatatcttaacttagggaactggattgctgtggcttccgggcggcataaagctttttgcagtgttttataccctcggcaatcttgctgcgttagccaggtacgtttggcttctcaaaatatcttgtttgctcttgctaccaaatttacctttctaataagcactttcccagtaggatgtttatgtagttctgtacatactgtgaattcagccacaggatttacattcattaaataaatatgtattgactgctgctgtatgccgtctcccataacagacggtattagtgctaggaatagcca

SEQ ID NO: 124001 - DNA, 1096 bp, Homo sapiens
gttggtgtgtttggtggtttggtggtttggtggcagcaggaaggtaagggagttcacactgatggctttgggtttctgtgtgtgaagtaggggaagttgtctgctaagaatggaagtgtggggcaggaagtggaggtttgaagtggtttagagtaaaatggacgttgagataaagcaagaagccttagattgccaggcagcaatgtgcaggccatggggggctgatgaggactggctcaggacccccctgccctgtgcctgactccacccagcagtgctcagctcagcacctcctggagcaggaggagggaaagctgcactccggtgggattttaccaggtggaggcagcggaaagggaatttgaatgtcctgttgaagccgctgaaaaaacggagaagggccggatgaggagttcaggaggccaaggagtcagcacggtggggccgaggaaccagcctgctgccagaagaaacgggtcggagagcggcagccggaattttggcgatggtgtaatttcgagcaggaagactgccctgggctgggtcactgagtggagtggaggggaaaggccagtggagatcaggggatgctgcacagaaaggccaggctgcccacgcacacgtggaacccgtgccgcatgctgcaaggatctggataggccccgcgatcaagagtcctgaatgagaaggagaaagtgtggaccccagcagcgggtgtggggagcgggcggttctgcctggaatgggcctgagggtctgcggatgtctgtttctttttctcacttgtctgcacaactttgactttttatacccactgctattttgaaaaaggagtgggaggaatactggattcagtgtcatcattagtggaaagccacaagtgtttcctatgtttagatggcagaagcccaggggcaaggctcaggtccttccagctgtgctgtctcctggcgatccgtggattagagctgttcctcagcttctccgtcacttaaaggggtgggtttcggctgtgctgtgggagccactcattcagccttcatgttgttgctgctaggactacattttcctctattatgtttctcacctgcttttg

SEQ ID NO: 124002 - DNA, 1041 bp, Homo sapiens
cttccacgagagcagtcttggtggctggatggggtcagaggcctgattgaagtcaggggagaatagaaagaagatggagatggtatggccatctcagtgatttttcctgtggagcaaagaagtgggtggtagttgaaggatgcagtggggtcggggaacatgtcattttcccaaggaaaatactggatgtttctgtgcattgggaatggtccaggaaaggggaaaattatggtgcaggcaagagggaattgttgctagggggctattgaggagtgacttggaaagcaggtttctctagggaggaggaaggggcaggaagtggcagtgaggagggcagacacctagctcactgcctgtccaagtggtacaggattcacaggggagagccctggtcctggagactaaatttcaaacctagccggaaggtgagaggatcatcagagaagagggtgaggacatagggaggtttgctgttggtttttggagatgggtaggagatgagatgggattaaaggcgcacagacctgaatggggtgagggatgacctgagagtgttgcacgtcttgtgcagcaagacgtaaccaggatggcgggcacattggaattgggtcttgacagggatggttctaggccagttgaggagttgggcgaggcagtgaaggtcataggggagcatcctgacatccaggctgcatcatcctcctatgcaggcgctttgagccccggggagaggcacggtagccagagttctgggacctctccttcgagatgcctgggaagaagtcaaggagggagagatattgagccagatcttaagagagttgatcatattcctcccctgatcacatccttcattgacttcctgcagcacttgagtaaaatccagatccctcccttggcctctcagccctgcactgcttgtcggcccgcctccccaccctctccccagtgcttgccttgccctgccctctttctcctcctcagttggagccattttcttctgcctgggagacctggcagttgcatttcttttttcaggaa

SEQ ID NO: 124003 - DNA, 1374 bp, Homo sapiens
gcagtggcgtgatctcgactcgctgcaacctctgcctcccgggttcaagcaattctcctgcctcagcctcctgagtagctgggattacaggcacctgccaccatgccctgctaattattttgtgtttttagtagagatgggggtttcaccatgttggtcaggctggtctcgaactcctgacctcaagtgatccgcccaccttgacctcccaaagtgcttggatgacaggcttgagccactgcgcctggagcaattaaatttaaattaattaaaattaaataaaatttaacattcagttccttagtcacagcaaccacatttcacatgttcagtaggcacatgtggttaaaggctactgtattaaacagcgcagatacagaacatttgcattgcagaaagttctattggacagtgctactctaaactttggagatgcaaaggtaatatcacttatcttgagcccactgtctagaggggagaaagatatgtggagaagtaatcaatcaaagattagagtgactggctgtatagacaagtgctgtgagttcagaggaggtgatcgttcattaacaaatattcaagttcctgcatatgtttgacattgttcaagatgcaggtgttaataacagtgaccagtgcaaatacctctttcacatggaacttaaattttaattggaggaaacagtgaataaacaagtatataatgtgtcagacagccacagaaaaagtcagagcaggttgaggaggttggggttgccatattacttagataaggcctccctgccagggagtcatgtgagcacagctcagaagagctgctgggatgtctgagcatcctgtgaataaaagcctccaaggcagatacagagtcccaagtggtgtgtggtcagcatgttcagggccagtaaggaggccagaggggctctagcagcggggcagagaagagggacaattgtagaagaaaaggtgaagcaggaagggggattctcaattgtgagggttctcataggccatagaaaggattttagctttactctgagtgtgataggaagcctttgggtttagagcagagtggtggtgtgaccgacttggattttaaaggatcactctggcagctctgtggagaacaaactgtagaggcaatgttagaagcccagagactgggctggagacaagtacagttgtcctggcaagagatgactgtggctcaaatcagtgatagaagtggtttaaagagcaaaaaagcctgtttaaaaaacaaaaaagtggtcagattctgtaaatggtctgagtgtacagccagcaggccacactgttgacggattggatgtgtgagagtgggaggaggcaaggatgcctcatggcattcgacct

SEQ ID NO: 124004 - DNA, 1052 bp, Homo sapiens
tcatgggtggcagggcgctcttcggagcacggccacctgcccgcaggagccctccgctctccgattccaggcgaggggaggcgcattcggggcctcgacttctgggaacccggggtgccgcggacccgcccagcaaggcccctcgcggggcccggaggacgccaagtgcagggttcagtggtcgtgccccagtcgggtctacactcaatggctgtgcgccagctgtgggcagggggtccacacccgcgctgtgtccccgcgcgttaccacggcgcacctcgcggacagtgggaagggatagccccaccatcagcgcccactccgcggacttcacggaccactaccgggtccgagagaaaggctggtgagcatgcgcgcattgctacggcggccgcgctgacgcacaggaagcgggcgggaccggacttccggctggtctgtggggtttcgggttcggggtttcctggtgggcgtcaggggcaggcaacagagtggcggccgctacggccctgtaacagggccatggagaagctgcggcgagtcctgagcggccaggacgacgaggagcagggcctgactgcgcaggtagcgaacttgcgccctcgtccagtcccggggctgcccgctggccccggccgcactgaggaccggccgagcgggtggggtgggtgcgaggccgggggtctgggactcctctgcccggctggttgatttaggagggctccgcctgcttcctgggtagaatttgagaactttccagttttccatgcggtctacttaaacccactttgaggcccccccccgactctcccatctggccttctgacttaggaatccgctaacgtctgccctcgctttcccaaataatccatcgctcccacgtactatttggttttctgagcctggtgcggggtctggcctcgggctgtgcagcgtaagtagctatgcagggcatttatcctgcaagctgcagtgagccgagaccctaaagcttgttgcatctgtttgtctttggaggtaaaggtggtgttatgtgtgtgtttgctgggggg

SEQ ID NO: 124005 - DNA, 1025 bp, Homo sapiens
gcagaggtggcgacagcgatgatggaggtgatggtgaaggcatggtggagggaatgattgtggaaatgatggtggagataatggcaggagtgatgatggaggtgattgtggagggatggtggaggtgacgattgtggagatgatggtggaggtaatggtgggagcagggatggagctgatggtggaggtaatggtgggagcagggatggagctgatggtggagggatgacagaagtggtggcagaggtggcgggagtgatcgtggaggtgatcattttggaggtgatggtaggaaatgatggaggtgatgaagggatggcaaaagtggcagaggtggtggcagtgatcatggaggtgacggtgggagtggtgggagatgatagtgagagatgatggtagtgattgtggaggtaatggtggaggtgatggggatgatggtgaggctaatgagggtaatggcagagatgatagtggaggtgatggtgaagataatggaaggtaatggcagagatgatggtggagggtgatggtagaggtgatggaggagggatggcaagggtgacggcagaggtgacagagaaaaaatggtgagggtgatggtggaggtggtggtgaagatgatggcgagggtgatggtagggttgatggagaaaggatggcgagggtgatggtggaggtggtggtgaagatgatggtgagggtgatggtgggggtgatgaaggatggtgagggtggatggtggaggtgatggaggaaggatggtgagggtgatggtggagatggtgaggatgatggtggaggtggtgaagatgatggtgagcgtaatggtgggggtgatggaggaggatggtgaggatgatggtggagatggtgaagatgatggtgaaggtgattgtggtgagggtaatggtgggggtgatggaggaaggacggtgaggatgattgtggaggtgatggtgaagattatggtgggggtgatggaggaatgatggtaagggtgatggtggaggtggtggcagaggtga

SEQ ID NO: 124006 - DNA, 1039 bp, Homo sapiens
aatttttaattttgaaattttaaagttggctttaaatgttgccagttgactttccagaagattatgccagttatgctccctcctacaattataagtgtccacccccagccaaacccagatgtgattgatttctttcatttttgttagttcattagacaaaagtgttgtcctatttaaatatgtgtatgcttactccttagagagattgggcatcttttcatgcctatggtagctatcagaattccttcctttgagtattttgctcttttctcattgatctctgggagctttcgggcaatagagagtttaacctctcatctgttatgtatgatgcagattttttttccccacgagggatttatccttttgtttttcttaatgataaacttgaaatgggatcaatctcacagcagtcatgcttttgaacacagatcttacagagatcagaaaaatcttaatggaagggaattactcctttcgtactatgccttgctgtggacaggagaaacgttgcccaaatgtccttggagagcagagcacgtgcacagcacacatgcagttatgcagctgtgggcacaggggtgggacctgtcgaacctagagaccagaagctaaggatacaggattcatgttcactgacaattccatcctgaggtcattggtgccttcttaactgagtctggagtgggtaggggtggaggagtgtggtcaagaatatagagtaaattcagaagttggcaaactaacagatgccatcaatgataatcctgaagtttttgttctgggtatttttgccatttaaaaatcaaaccattagcacaagccaaaagaatgtagtttcatctggttcagcatttctacatgtctgttttaccttttcctccaccacaggcatacgccacgtgcacacacacacacacacacacacacacggacttgcacacacataccacatgcacacacacactatcacttcaccccagggtcacccagctttcgtggcatctgaactctgcccctgtcacctacagactctcct

SEQ ID NO: 124007 - DNA, 1045 bp, Homo sapiens
ctggaggcaattaaaatccctctttcaattaaagtgcatttacggagagggaaggctgtcagttatgtctatagatttatgagctatagatattattcatgcaaaaaacagaaacccatttgaaaagtagtatcggctactaaatagcacagcaattggatgcatagatttggtctcctggtgtgtctgaaattactcttggggtctagcaaatttcatcagaactggtcagctccctttaaaagttatctttttgggatattaatgaattaaagtctgcttttttatatatggtaattatcctggtctgatagggctatcataacaaaatactacagactgtgtggtttaaacaacagtcatttattttctcacagtctggaggctggaagtccaagttcaaggtactgacagggttggttcctggtgagagctctcgccttgacttgcagacagctgtgttcttgctgtgtccccacgtggcctttcttctgtgtgtgcaaagacagcaagatggagctctggtgtctctctgtcttcttataaggacactagtcctcttggattagggccccacacttttatcctcacttaacttcagttattctcttaaaggcctgtattagtctgttttcacactgctgataaagacatacctgagactgggcaatttttcaaaagaaagaagtttagtgaatttacagttccacatggctgaggaagcctcacaatcgtggcagaaggcaagtagaagcaagccccatcttacgtggatggcaacaaagagagagcttgtgcagggaaactcccctttttaaaactctcagatctcatgagactcattgaccatcatgagaacagcacaggaaagacccacccccataattcagtcatctcccaccaggtccctcctacaacacatgggaattatgagggctccaagatgagatttgggtagggacacagagcctgagatttgggtggggacacaaagctgaaccatatcaaggccctgtctccaaatacagttacacttgggggtagg

SEQ ID NO: 124008 - DNA, 1068 bp, Homo sapiens
ttcaggccactttggtcttcttgcccacaagtggagtatttgcagtatggcgcagagagtggtttgggggtgtgggagctgtaggctgcgggtcagggcctcacagcacaggcgtctccatgcagctgttgctcccattgccagcagcgagatttctatccttttattcctacattatatacactaggagcactcccccttcagggaacccagcaaggactctgtgcaatgaatcatcacccttcaggtgcttcttctgttggacccacctacagccgggtaaactgcaggcacagtcccgctccatgagccactgacctgtcacacccatcgtgacgctttgaaaatcgtttagattcttcctgcggcgctttcgatcctgtcttctctctggtctgcatatttttgcattattattttaggaataatctataaatgtgccctttgccttattggagcgtattaattccaaaatgcctgaagccaaaaccgtctacagaaggcagatgttagggtctgagaccccaaactagcatctgtttcctatgtcatcacccagttcccgtttttctgttgctgtctcggtcctcttctcacttagctgaaggtctttagtataaatagaatcctgatgggcctgctccgggcttcctcacgtgcgcttgtttcccgtgaaattcgtttcagccctgcggccacactgtgtcattctgacatcctgggacaaatgagatgattttaaatgtgcctggcgaatttgatcatgagactgcattttctctcgtcggtttcggcatgaattgtcccagagtctcagaaaggggggatccagggcagaattgccagtgtctgtctcgttaagctcagaatcccaggtgagatgctgctgctgtttcactctcaacacaaccctgcctacagtggtttacatacaaagcaagaggccggatgacttctcccccaaagcctcaaacccgttcttaggtttgcacatggaaagaaaaagcatacacagtaataacacatattagcaccttccaaatgtttacgcagcatcaggaagacatt

SEQ ID NO: 124009 - DNA, 1036 bp, Homo sapiens
taggattgtacgcaacaaagtaagggaggaggttaggtagaaataacagaacaaagcagagatatttgtaagcagcctccaggtaaacacagtcacctgtctgagcaggctcaggggtggccaggtgtgggcaggaggctgggctctggcttcctccgggactcagtcctgtcaactcctcttcatttcctggaatccttccctcccgggttaactgcagcagctttgccaggaactctgctctgcaccttcccctccggcctcctgggaggtccacctggtgctcacactcacaggcacctcaagctcctgggggtgacagtggggtgctaggcagccgtcacatgcagcaggcagcacctggctggcctgtcccatgcttctcttgaccacctcttttgctcactccaaccccaggccacctctgcctcacaagccctcggggctgagtcgtggctttctgagctgggggcatcggcaggtgcgcaggtgccttgggcaggagtgagcagcctctgggctccttcccacggccccacctctgcacatccccaccctccacactgctgcattggaaactgtcagagaaccccatcttggatttgttctgatgatcatttctgtgttgttgacaggtgctggcattgacggagtggaggaaattaagcgccatcccttctttgtgaccatagactggaacgtaagttgcatgccacagtccccacctgcacacgcgtgacacagaagtgggtggagggaacatacggcttggtgcagagggtcctcagtgtccgggtcacaagtaggtcggaggtgaatgtagacaagccacctgcaggcagggagcccccaggaccctgctgagcgggctggcaacttgggaggcacagacacgtgagtgcccctccctccagcttgaggcctgaagtcccctcagctttcctccttctactctcctctgcccatcagagtcgaggcttctgtcctccctgcacccactccccggcctctccgagccctgcatattcccgattgc

SEQ ID NO: 124010 - DNA, 2761 bp, Homo sapiens
gttttccgttgctcttgttactgttttcctgtccagaactgatctccagatgatgtgtttttaatgacttcaaacgtggtccattctgatcctcatcccagtttctactggcattgctgggactgcctgtcataagccaggctttgatggttgctgaagaccaggcagccccaccctcacaaccagccctagggagccgctagagacccatgcccagggcctgtctgcagatctgactcccacaccgctcaagcctgagcccctagcccatccctgactcctaaccggctgagtcctgtgggacacgagcgactccctgacaaagggtgtaaacatgaaatagatgaaatttcaaattggccaaaaaaaaaaaaaaaaaaacctttaaacaaataatgtgtagataacctttaagtgatgaagaaattgaaaaagcagacctagtatttaagtcaatgatggaagttgccctggatggttataggctggacatggtgggctggttaggagaagcttgcagtatgtaagaaacctaaggaggcagccagtaagattctactgaatgttcccagaagtgtcggagatgggtttgtgtgactctcaaacaacaaaaatgaaaatattgcaaaggagtcccaaaccatgaattaaccatctcctaaagctatctgtggatatacagacacaatgcacacatttttggcagataccaaaaccctttgggaatcacctgctgagaatttagaatccccacaatgaaatgaatggcttacctcgtgaaaaatatggagtagaagagctggacagaatcggtgcaatgaaagaataaatcatccgtgcagtggctcctgcctataatcccagcactttgggagacccaggcaggcagatcacttgagcccaagagtttgacaccagcctgggcaacatggtgagaccccatctctacaaaaaatacaaaatattagccaggtgtagtggcacatgcctgtagtcccagctactcaggagactgagctgggaggatcacctgagcccaggaaatcgaggctgcagtgagtcacgatcatgccactgcataccagcctgggcgacagaatgaatccccccaaaataaaaaaaaaaatccattcacaggcactgcactgcactttagtcattgatatgagagttccaactggttgcaaaattatacccttaaccagagaacagcaattggagacacagacccagataaacacattaggtgacgccccaatttggagatagaccacaagccatttaaacaaacaggatcaggtgttattactaccgagaagaagtgtgattcttgaatcttctgttcccctgaaccttgaactcctatttgccctgcattaaggaacttaacgacaaattgctaagcctgacaggagggaattccggccttctgtgctcacagtttctgtccctgttcttgtcagtgcttcatgatctagatgagtggcagcagtcctctagaaccaaggaaggccttcagtgcgtgtcatccgcatcccgtagcgagccagccgtgattccagcatcagcctgataccttccgattctccccgcccagaactccactcaccgtcatttgtccagtgggttcagtggagataaaaagggggagccgagtgcaaagtcacctattttaacaagaataataaacctgactgccctgggagggttgacacaggtttcaaggtgctgagtgcaaaagtcctcctcctgtttcatgtttccccctgtaattggaacccctgtaattttttagtgataaccaaagtgttattcccctgttgactctttttgctgagggcttaaaatacaaacatggtgcaaaatcttactaccttaggggaaaggaggtaaagatagaaatgtgttgattgcagtgatccaggtaaacccagcatataccagttacatagtagttataccaatacctgtatttcctctgcctctcactttctaaaattcctgcagaccatatttgcaaatgatgaacaagaaggaaatacagtgggtacaaaatgtgaaatagatcctccaaagaagtacagccaacaagttgccacacctgtgcgtgtaccagggcctctgaactgtttgttccaatctccagccttttgagagtgcctctggccatgcgtccaacagtcaccaaacaaaagagtagaggagaggcacacttcagaggagggtctttctgttaatcatcgtgaccagaaggactcttcaacccagagttctggtcatcatcaaaggaggcctgcacacaggatgggcgcttggggagggctgtttggaagtcagactgtcgctctggaaatttcattacagcagccactggtgcgcctgcgaaggctcatgccagctgctgcgattgcaaaggcctgggatcagatccctgggctcagggtttagaggagaacaagggagctagactggggacccggaggggcctcagcagggagtcctcgggaaagacacttcagaaggtggggcacctcagctgcttttcagacatgtgcctccaaacccagtacctgtaactcataacctctggtctgattttgaacaagctacccaacctgtgtcagcctcagtgtcctcgtctgtaaaatgggaacagcaattgtgcatcggatgactgagatgtccgtgtgctatgtctgtcctatgattctgcgtcctcatggaaggagaaactcctgaatgtgtgcccttcctctaattc

SEQ ID NO: 124011 - DNA, 1014 bp, Homo sapiens
aggtatacgtgcagtctgccatcttaccagagaactcagcagaggcctccactctgcagcacatactttaagattgatcagagaggtatacatacagtctaccatcttatcagagagctcagcagagctctccacactgcagcacatactttaagatcgatcagagaggtatacctgcagtctgccatcttatcagagaactcagcagaggcctccactctgtagcacatactttaagattgatcagagaggtatacgtacagtctaccatcttatcagagaactcagcagagctctccgcgctgcagcacatactttaagatctatcagagaggtatatgtacagtctaccatctcatcagagaactcagcaaaggcctccactctgcagcacatactttaagatcgatcagagagatatacatacagtctactatctcatcagagaattcagcagagctctccacactgcagcacatactttaagattgatcagagaggtatacgtacactctactatctcatcagaggcctccactctgcagcaaatactttaagatctattaattcaatttcaaaggggaccttggcttgattccagagcaatgtcagacatcagtatcctttttaaagccacaaattagagctgagccttcatggcttatttatttctaatctttgcaacaacaaagaccactttgagctttgctcagtcttaattaaaaattgaaaaggcttttcaggaaaattccctatagctatgcttgtatttctgataagagtacttgacttggccttttaaacttgaaaaatgaactatcttttaattcacaactcaattcttttatactttaatatggaatgaatgtataattattctcttttcctgcagagaatttcccagaatttcactgtagcttaatttcagaattttgtaaaaatcccaacttatttgttttcattgaattttatatagaatttttattctatagaaaaattgggcgaaaagcatca

SEQ ID NO: 124012 - DNA, 1238 bp, Homo sapiens
tgagaagcggtcagctgtgcaccttgctctgatgagaccattccaggccactgcttccagagtgtgtgtaatcaccactgcatgtgcccgggggagttggtgcaagaaagaaacccatgctcagacaaggctgtgctccatcccctccttatctcaagttccgtcctggcaggtgtccagtaataacaaaataaggatgtagggtgcggcagctgtatctgagaggttgctgtgccatattgtcctcgtcagaggctaatggctgtggtcaggtctatctcatgctggaagcactctagcccccaccatccaggcatgcatgggtgttcaacatgagctagctgttctcctcctcctcctcctagctcatcccttccacaacacctgccagggcaggacaggttcctaaaccgcgtgtaagatgtgttcgtccaaactgcctgaccacaggaccctgctctgcctcttttctctgtcgtactcggggcctgctggcctgccacagagtgtgattatctaccacatctgtcatttacccgtctcacccaccaaatggcaagctctgcgaggcagttttagtcactgttgtaccccaagcacgtaggccagtggctacaattgactgatggagattttgcatgaggaaatggacacggtagcaggctgccctgctggggtactctgccgtgaagccgggtccatctggatgaatgaactcactgtgctctgtgttgctctgcagtttgagatgctcacggggtccctgccgttccaggggaaggacaggaaggagaccatggctctcatcctcaagtgagtagtgtgggagccaccccagagacctgcgagcaccttctgatatcaagagctgctgcctctgaacctggaactgtgaagttttaattacattgctaggcttacagtgccaaagtattgtaagctgttttctaaaagtcactggttttacacaaaatggtagcgctcgtccgccagtagcagtggtaatagggtgctgggcattctaatgacagtgggtcaagggagcagttgctggtttgtctcatcctgctgagtggttctgatgaactcttctaccatagatagttttccatcagtaagtcacttagaatgtgtagtggctggttttcaagcgtgatggttggtgacctcccagaagtaaaggatagacggaaaaagacacaaggcctccagggccttgtccggagagatcacaggag

SEQ ID NO: 124013 - DNA, 1052 bp, Homo sapiens
aacgtagaatcaaaaaagactttatccagagtaatcccatgaagagagcagcctccgcagctgctgtctccccacaagagcagcagcacaaggccagatttccatttcaaagtgggtctgacctagaaccccgtggtgctctgagccctgggagtcccctttcgcctctccttaattgggaggtgattgcagagcctggcctgtcaccttgggtcgttgccaaggtcatcccagaagttaacctggtattaattaccctccaagtcggagtgccgtgttgtgagtctgtgtggacgttgccactcctcctcctcgtgcggccctggctgttgacgcctgtgtgttagacacactccccgtgcatccactcaggccgggagtgccggttctcattgctcctgaaggtcagcgtgatccttacagctaaaaatagccttatttaattgcaagcttgaaggaaaaggttgtgttgttcaactagaattattagagaattaatcttgaaaggtgcttaattctgggcaaagattgaatatgcccaaaaggcaaagatgaaaagatttgccttgttcattataaattgtcatcttaattacatgctgtaacttttccttcccatttccagaaaatagtggttatttttttaactctgtggcagattttttttaattgtagaaaaatacacatgacttttacagttttcaccacgtttaagtgcccagttcagtggcattaagcacgttcccattgctgggcccccatccccaccgtccatctccagaactgtttcatcttgcagaactaaagctctgtccccctgcacagtagctccccagcccccggcacccgccatccactttccatctctgtgactctggcccctctagggaccatacattttatatttgtaaaatcatataatacctgtcgtttggggacgggcttatttaatcgagcataatgtcctccgggctcctctgtgctgtagcaagtcaggctttccttcctttcacaggtttctataaaggtatcacagattaatcctccaagcc

SEQ ID NO: 124014 - DNA, 1066 bp, Homo sapiens
gatgatgcagctcccttctttttattctcagcagctgagaggtcctgaggtctcagttctccctcctccaggccagatctgtccctctgcagggctggatagcagtatccttttgccccattctagccacgttgtccattccagccatgttgctattgcatcctccacatgacctcttaaatctagaggccctaaacatgtgctgtgtgaaagtcctgtccatggtctcttggctccccaggcccccatgtccctgcccgcaggcctcatcagtgtggcactgcagctctgtgcgccagcccactggcatccctgagggtaccccagctgccaccctacagggccatcccttggcctgtatcctcctgcccaagcacctggaggctcccgggtcccctgtaaggcttagcccctcctctgtgaaaacctcccaggctgtttccagttcccccagcatgcacaggtcccccagcacacaagaggtgggactggtcaccctctggtggccccttgctgccatcaccacagggcatctccccactgggctctcacttcctggagggcagagcctgcctcttcacattccaaacacctggcacaaagaagactgagaagtagtgatgggaaaggagtgggccaggagaagaggtgggggaggaaggaatttgaggccaagcggcaagaattgtgacctcaccattcagctgtctgatttgcaaaagggctaggaagaccgagcctacctttgctcccacatctccccacaatccgcgatcctatggcctattttccagttcacctacatagagaagaaaaactactctgaccagcacgcagaatccagatcactaagacatgaactcacaaatgataaacaggagcgggtgcaagactaaattctgcaggagagccttctgaaaatgtttgcacacaatgactacaatcagaaaggaagaaaagaatctctaaactccggggtcattactctagagagaaaatcatagccaggggtacaaaattgtattctttgaaagtgttctgcgctatcctggcttctgaacacagt

SEQ ID NO: 124015 - DNA, 1055 bp, Homo sapiens
tttttaagtaattctttaatagatctgggatttattttagtgtaagatatagggaggagacctatttttttttttactgtaactaggtagtcccttcaaaatttgaatataagacatctatctttctctaatttttcaccagacttaccaagttttccttaccaatgctataaagtcagacatgtggctaaacaatgttcttcattccaaatggatgtgaattcaataacatcagtcctatttagaggatttttagatgctcttacccagagtcaaagatcaagctttgcaaggagatggcaagatggagtaggaaccccccttttctctgccatgctgcttcaccaggtctcagcttcagatcatgcagggcctggcagatggaacagggacttcacccagaagaggaggcacattggaatgacggatggcctgctctcccgtgggccctgccgagcctgggcctgctctgctgagataaagggcacagtgtaggaagcctggccacatgcatctcatgaggatttctccttgtggaagcattctgagtctagggcgtggcagagcccacgggtcctcaatggcagccccgttggctgtgtgatgtgtgacagagaagttttccttgttgagtttaactttgtttgatgccagcaggcagctcagagagagagaggcttgttgtttaatcatcctagaaggggcagtgtccccacccctcccactgtgtgcagtcactcctgcctcccccacccctggcttcctgcagagcctgcctgcattcgtgagccctgtgtcttctgcctaggcctttgcttttactttgagagaaatctttctgactccactgtgtcctttcttcctttggggtctttgtgctgagtgaatagattccaggtttgctttcatcaactccctgaaactctttggtgctcacactggctgtagctattggaggctgtaacgggggagaggtgggcaatggagatgtgaacccccaaaatctcagacaggtctcagttaatttaaaaagtttatgccaaggttgagggcat

SEQ ID NO: 124016 - DNA, 1106 bp, Homo sapiens
ttgggtgattaaaatctttaaaacccaccgatggtacacaactctgtgaatatcctaaaaaccattgaattgtacactttaaatgggcaaatcatatggaatgtgaattatatctccaaaaagctgttattcttaaaatgaacagctgctagataatacgttcctttcctaaaacccactctttcatcctcgaggcattgagatttgctctcaaacacagatgaggcatcttcctgtggtttaagacaaaggcaagtggatgcgggaagctctccagcctgtccttggccacacactgtcctactgtccatcaggcggttccatgttcacctctccagggcaccaggagtgacccggaagagctccttttctccttcaagcgtaacggttccttctttcccttcaaagttggcctcaccctcccccgccactgaaggaaagggaggcaaagtgggaatgcagctggaatctgtgcctgcctgctctgctctgtaggaatacagtggaatggaggagcgggaagctgcaccctgtttaagttgtcgctaagcctggactccctcagggctgaccttggcctcttagctaaagtgcagaacgctccatctcgatgacttcactctccctaatgcaagtatccacggctgtttataatccagtccacagtgtccttgagaaacggctcctgatccatggttatgtggaataggctggacataaaactctgtgtacagaataatcatggtattgttaaatttaagagtgacttgagcagtagtgaggtgtgtgtatttgtgtgtacacacatgagatggacattgtgccagaagcaaacatgccaaagtgaagggctgacttacaggattggggctagctgttgtcttcttccctatactctgttactgcaagttttcaacagaaatgaaatatctctaatttttttgtaatgtaaagttatttttaaaatattttggaacaatgtgcttgagtagctaaaattatttttatgctatgaaaatgagccatgtggctggatgtggtagtcacacctgtaatcccagcactttagggggcagaggtgggaagattgcttgagcccaggagtt

SEQ ID NO: 124017 - DNA, 1025 bp, Homo sapiens
attctgtgggctggcagggaactgaagccttttagggtgggtgctggatgggggcagctggtccagcttatggggaaacctgcagggtagggagactttctctctgggaggggggcacacttggcagagcagggagctcatgcagaggccttggggccccatgaggctctgagatgtgaaggcggcacttgaatttttaggtcttgcaacagtgtccccagcaactacaggcaggggagcagtacaaatatatcattctctgccttcaggtcacttgccttctagctgaggaaatgagatatatgttgggaaggacctgtcaccaacaagaaggacaaaaaatgcatagaccaaatatgtacagactttaaaccacttaagtatacaaaggaggaaaagagctcttccaagtgagttagaaggtccgtgggacttctggtgaaaattctataggggagagaaatctggttgacatttatcagtacaaccaatggtaagaaaatgcagaagttgaccactttggttagacctgattagaattgtctgtgtgtttgggggcggggagaggactgttacaaacacagatcctggccccactcctgatctactgaatcatcatcttgtagaaacaaggcctagatatatgacttttcaaacaagatgtcccagtaattcttacgtacacaaaagtcttaggtgagacattctagtttattgtaggcactcaagtttttagttcagtgttatcaattgtaacgtaatttaacccatgctttttagagtgaacttttttttttaatgctttaagtgctagggtacacgtgcacaacgtgcaggtttgttacatatgtatacatgtgccatgctggtgtgctgcacccagtaactcatcatttacattaggtacatctcctaatgctatccctcccccatccctccaccccaccacaggccccagtgtgtgatgttccccatcctgtgtccaagggttctcgttgttcaattcccacctatgagtgaaaaca

SEQ ID NO: 124018 - DNA, 1032 bp, Homo sapiens
agcccctgcactcggtaagtgtctagacgttgcccctccagtcttgggggggagccaagagtgcaaaggtcccagccatgtccctctgcccatggcaggtgaggctgctgctccacacggatgctcacttgggccacctggagtttccatggaactagaacatctatagtggctggtctttctggctttttgaggcttagtaaaggagacgttttgggaaggagccaccctacctcggccctccagccatactgcatgggcagccacaccagtgcaccgtgtgcctgtgtcatctccatcatgcaagcagatatttgcatctattggaaaacacttttaggaaaatcaagtactattttcttaatttgcatggaagtttttttttttatacaaaggaactccagttttgtttactaagtttgttaaaaaatcactaatacaaatttaaactcaagctctcaattacctttttttgttgtttttctcagtgatacacatcaaaatgtatttcagaaagcattgccaaatatccgtaagtgtatttaagatccagttagaaaggaactcttaagctactcacagctaaaatttgggtgaagacagttgaagtaagagaaagtagcttttcttgaaaatcggatagagcctgttttgtgtgattggtaatacctttcagcgtggtctctcagtaaggatttacagagggatactcaaaccaaaggatctcccttaaaactcctgtttgtttttctaaacagctggtcttcaaaacaaggggcggtattatttctggcataaaatgcaaagttaatgataccaaaaacaaatgacgcttcttcatacaggcacatagtgatgttcgccgcagagctataggaacttagagcattttccggcagccttgacgttggagaaaattttaaattctcaccagtgtacttgttttattgaaaatgctctaaacttccttgtgtatccccttgtcaaatccaatatggaaagcgagtttgaagtcttacgggtttctgatgt

SEQ ID NO: 124019 - DNA, 1041 bp, Homo sapiens
aaaaatgagtaagtggctaagacacatgctgcctccagggtttgagttgagcctaccttgagaattttacattcagcaatattatataagtgtgtgttcatatgctaatgataataaaccattcagatgtcaagctgttactaaaacctagtagatcaatgtcaaagctagactgcagaatccgtagagagccattgcacacctgtggccattgccaggatacagcccacattagcctccagggaccagcgtggttatcggcccatccctgctatgccactgaaaaagagctggtcgtttttgtgcataggaaatgataaactttttacttagcaattcggaaatagcatcctcgatgcatgggtttcctaaccaagtttccaaatccttttttctaaaataaatagtggactttttggcatgtgactgtgagagcttcagaaaccttttgggattgtctcctccatcactgaagtctctcccaggcaaggcgtgtggtccagatgcagaacaggacacctgcagttgggggatgtggccaaggcattttaccaaacctcaagctagggtagatttaaaaaaaaaacttttataatacaatttcttttgatcttgaacacttatatattgtgccagtaatggcttctggagtgtagaaagttctcaagcccacatctttcgccacacagagggattggctgtcatcatgtgggtgaggccatgccactgggtgattctgcagcctggcatttgagcagggcctcctggggaccgccaagcaccgctctaaaccatttcacaagttttcatcgattccttgaacaaagactgaggaaggatggtgccagacgctttgcgaggtaggaggggataagcaggcattagtacaaaatgtggcctgtcctgtggggggtcaaagacctgtgaaattgagaattgagactgtatttaatccatgcacagcccctgagttcccctgtaagtgttcatggggtcagggagctgctttggagcagcactgggtaacaaggatctctaggc

SEQ ID NO: 124020 - DNA, 1066 bp, Homo sapiens
ggttggttttgccccctgctttcaggctgcagtggaggaggatggagtcctgtgctggagtgggacccccacccccccatggccacccgcgtgccagccgcgagttctcacatcgcatcagacctcgtgacttaggttttgtccctgaatgtttctctctgtccccacacaggatgcacatccggagctgggaagaggaatagaaagggaacagaaattcccgtgggatttttattcagccagcagcttctagttccatggttaattcttctttgcatccaatgtttacaacaaaaggaggcaggttaagctttatatcacattcagcttcataaaactggcctgacagtctgggaatatgttagtcttaagacttgaaacagaagctaaaatgctcacgaacgagcaaaattttgcagatctcttacttctgggaaaggggtagcagtcgcttctcaggtcatcattatttgaaaagctctaagtctaataagaaaaatatgtcactctgtgggaagaagtagcagaaagctgaacttacgaactgcatcagttgcttcagtgatggcagcaccaagaactgcactagaaaattccaaatgttcttgcctggacagacagatagacagatacacacacagggtttggtgcagtttccagccactgcctcggggtagcctgtaggtgagagctccttctgaaatacgcatactagtttcccatgaacagactttgacctaactgtgtatttttcagcagggctaagttctgaataagatccaagaatacggatgcaaatctcggtggggatttgcgctaatgttccaaagctgtcattctgagaaagaagagcaatttggaaacatttgaaaacagatgatagtaggctggctttctttttttaacgtatcagcttgtaatgggtgcagaaattagccaagtctgtttaaagcagtgccctgtgtttggctcagcaatggtatcctctaacaatgggatgagccgcacgtgtgataatatgtgagcattgagtcagggctgactggcccacgtcagagccagcaga

SEQ ID NO: 124021 - DNA, 1024 bp, Homo sapiens
aggttttttttttaattttttaaaatgagttttattgtgtatgtttaaggtatacatgatgcaacgggaaatgagtagagatagtaagaaggttactgcaggaaagcccattaacatagacgtgctttcagttatgcacgtgcgtgtgtgtgttgtggggcaagagcagcagcaatcaactcattccacacgaatcccctgtatagtacagtgcaacgacctgaagtcctcaatgaggatttcaattgtgctgctgcatgtctggattcttctggggcaggctgatggcatggttctcaccctaagtcatgctcctcgccaggctccatctttaggtgtgcccagccctgaaataggatctgtctcctcctaaagcagagtctgacacggagttcacactgggaatctgtgaacttaatcttacgtggatgctgtatctgccagaccctaatgactgattcttatcagcgtttagtaggttcttgctcctcaaagcctactgatgtaggaactagtaatttactgttctgattctatttcccactatgtccaagttttaagcaaaaagtataagcaaaacaacaaaagaagcaaaaccagaaggctgctctaatcaaatagatttagtctttatcatcccgatgatgcttgccaattccagcccctgtgtctttgcttgagctgttttatttcaccttgaatgccctctccacagcaccgtctgtattccccccagttcccttgcctcctcctctgagcaccccaatcaagctgcccaggggcccttcttcctctggcccttcctgttcttgttttctgtgtatctcacttgcatgcctgtggcctcatttgttgggttggtgggtatgatcttgtctcccggtaagatcccaagtctctctccattctgttcatgccacagtttagtttatgttgtatatcaaatctaggagttagaaattttgaaaatgtttccaacaaatctgatttgtttgggccaaagcactgggtgagagtcttctgt

SEQ ID NO: 124022 - DNA, 1216 bp, Homo sapiens
tctttgtgtagtgtaaagaatggaactagttttgttttctgctttttaaataagataaccaatttttttagtgccccttattgtgttgttcatcctttctccatttacctgcaagcacttctgaattcacacaattccctataaggatggagtatttctggctctattctgtttcatgtgtctaacctatgtcaaaaccacactgtcctattaaccatcagtttaaaagaagtcttgatagctaatacagcaagtctctcctacctttatcttatcgggttttctcaatattgtcgtagctcttcttggttctttatgctccaggtagcttttggagacaacttgcgattgacacaactctttaacctaactagattaacttactttcaaattaaataagatgttttaggtagaagtgctttgtaaccaatggagtgctatgtcgatttaagctgtcagtatttgcatcatgaaaatgtgatttatttggatttaagagcattttgtgtattgtatgtatctgctagtatataacttgcttgcaagtagagaaatatggcttgatttctatcattttctctatctaatgtcatgtggcttgtggcctgtgggtgcccaagaaatattatctgaatggaatcatcagtcaggttctaagataggccacgtggttagttgttttttctttttcttctttttttaacacttctaattcttccttcatctgtcaccatctttttgagctgagtataagagattttgtttgtttgtttaagaaatattggatatgcagagtattttaataaattgctccctgcctacaggcaaaagcaagatgaatttcaatagggataatataataagaatgactgagtttaaaatttaatttcctactgattttgataagaccaatttcaaaatgcatgcatattccattttccatttctattcactttgtgcaatgagcttctttcactgatttctacacatctgaaatttcattttacttcaaatacgctacatgcagctatattatttagtcctgaaaatagggcaagtgcaacaacttgtatgttaaaagaattagtgttttcttctcccatttgtttatgcaaccagtttttagactctcgtaggttcttattcaaagataatcaggtggacttcctgcactaaaggatctcaaaacccatcaggaataagggatatttccaaa

SEQ ID NO: 124023 - DNA, 2812 bp, Homo sapiens
tatttttcatgcattcagaagtagaagaatgaagtggaagcccattaaataaaaaaggaactatgttcacatcctctgacttaccatttacctggaatttcattctgtttctcacatgtggggcaaatagtttctcagaagtggcaatttaatagtgggtgggagaagtatgaactctctgaggcagcttccagggctgctggctgtgaaggggaaggggaggaaagaggctttagggctgtagcttcaggatgaaggcaacgttcgggtcaaccagagatgtgtgcggccttggggaccttcagggagctgccaggagagtgctcctttgatatgggggaccaggatgagtttactttgtatgacgtggagttggtaaccagtaacttagccagaaatactctaccttttttgctccaaggatctgtgcttattaaataagcagagctggtctaagactagcagcattctctagaatgctctgcttttatttctgattacactgaattaggttgtgttgcattttctcagcgttttatgtttgctgatatattttcactagtaaaagctattacattgaattcaaataagtaaaaattatcaacaaataggctgttaagctacagtgtgatttaatcaagcaaatggatcagacacaaatatattccatatgaaatactgttaatcacatctgacttgcagctgcgtgagaagccttgcctgctaactgcttagctaggggaaaataatggtgcagctacaaggaagccggaggcacctgcatatcagggcgtggaggacaaatgtgcgtaaccatacacctaggatttattaccaagcaggccagaagcagtgtttccgaccagccaagatgtgtacctgttgttatgcagtcatttgcatatgttatgcagtcatttgcatgcgttcctggagatcagtcagagggtgttcccaagaatgctactgatatgagagccctacctgattccattcggcgaatgctccctagccagtcttcctctatgagccttggtgtgcaaagctccccaggctgggtggtttgcccttgccttgccccgtggaggtaggattctgcaggcatggagcaggtggtgtccctgtttccctcctgcccctgctcggtgccagtctcctgccgtgggaagtgcctgaccttgccggctgccccttctcccagccacctcacactgccctagtgttcttgctgtctcccttgccaaaccactgaatccttctgagcacctgtctccccagctacaaaataggggtaaccctgtaataagggttatctgcaatttattaaatgcttcatcagtgaaatgtgccttgtcaggacagcttgcacttggcatccgtggtgttgcacaaagctgactttggtgagaccatatctgtaaaggttcttgcactacattatgggggaaaaatgttttttctctcctgccagcctctttccttgcccctttgaatacacatctgtttctaattagtattatcaccatgaaactagcttttcctaggttatagctatgttaagtttatatacaatgatggtttaatctttgatgctgtcattttaaacataattcgtggtaatagcccctcttggaaaacagacttgttttccacgctgtttctggcatcagcccacaaggaatggctgagtggggactgttgggagaaaggagaaggcactggtagaaattatctagccttttagagaaaagaattgtttcttctttcagttattctgtcttctgtatgaaattagcaagatttttaaaaaatgaatcaaagattagtacttaggtattggccagtgtatttcctcctgttgccaaagaaaagaaaggcttgaatgagattgacaaataagaaaaacaggcctcatacctgtggaatgattcgtatgctgtagtttcacaatctgaattttcagatggacattagccagaatgcaagcctggggcctgctgtggagagcagtctctgcactcgaagtgcacggtaacattctttgcaccaagacatcttggccacacatcctgccaagggcctgtgggcttgcagcttttactcattaaactgtgaggccaaatttataacaggaggagtggggggattttactttgaatgactttgttttggaatggttatggtagaaatgccctagcgactacttaagaagctcgcacaggtcccaattttaatgctctcagcccaggataattgcaactagttctctagaactaaggtcagatatcatattagcttccaaatagttttacatccataatatcatgtggacaatctttctgagggtgaaaaaccaaggaagcctcttgttctgaactgtgggtaaaacacaagaggagcagagaagatggctttgagaggactctgtgtgagaaaagctgggagccgggcaaggctgggaggaggcaggaagcccagggggctctgcaggccctccacgagccttaagacttcaggccacatggccgtcagctcctgcaggcacctggggccctgggctctctgtcacagggtcaagccctggagagactgctgcgttctacactatgcttgcaaaggtgctacgagaagccctcttgcctgtaacttgttaaagcaactctgttgattggttgactttgaacatagcgaaggaaagaaacacagacaaacaaaacaactttcaaaagagcatttatttttagaacacctttgacttcttgaattcttcttggtttctcatcacttcagggactgaacagacgggctgcgg

SEQ ID NO: 124024 - DNA, 1032 bp, Homo sapiens
acctgcatctcattcaacagtccacttcatagatgaggaaaggggacactggcccatttgctaagctggagttaccgtcacctggctgggataggataccctctgagtgtctggcctatgagtcactgcacttatctacaaaatacgttacccatgccagttgcctaatgagctaaggtggctttgagagcaaggaaatgcaccaccctcaccgtcctaacttagcagaaccataggtccactgagctgaaaggaatcttctccccactcaacctttccacacgccagtagagcctcagaagatgggatgtggaacctccaaagcttagtttgtatttcttccaacagggaatgtacatttaaactaattaaaagtgagattattaactcaagacttccaccaacttgctaaaggtgtcaatatgcaaagtcatttcatttaggaagcagttattagtttggagttaccaaagccagagggttctctttggtgacctattatttgagctatttcagctgtaactggcatttctcctgaaagacagtagggagtgaatgaggaagacaaaatgcgagactctacctgggatattgctagtgatgaactgctgagtggaaggagaatttcgttttatttatctatttgctcaattgttcatacactcaaaagattttagcacatactgtgtgcattgtgctaagcaactgggacataaaaataggatccctgccctcagtgagcttaatgtctaacaatagaggcaaacaagtcaaaagaagcttgctatcagggtataagtgctgtgaaattattggcagctttggatttaaatggtctgattagatcaattgtcaatttatttctatttctggtggtcacagatcatcagaattcatctatctgtacatataaagacattttaattgctcatcccttttaaggaaaacatggtatcctaataaaggaagtgtgaagggactcttagcaagcatcaggaacaatattggctccagtcatggataaaaagaaag

SEQ ID NO: 124025 - DNA, 1088 bp, Homo sapiens
gggagttcaagttactggaaagctggtccggttccgaaaatcgaaccaaacggctccaaacgttatcgctgggactccgtagtaattgggcggtccgtgggtcctcgcgggggcaactccacccccactgcatttccagctggtttctccgccgctggctgcacggggtgtgggatggtcccctgtgggccacagggagccccgggtgaggaggggctttctctgcagctagaccgccgagtggcgcggagcgctccgcgggggtccctcaaagtcccgagtggagaagccccccagctccgccctccgaggcgctgatcaggtgctgtctgccgtgcccggccggcaggttccaccttatcttgtagctcattcgtgcacttgaagtcagtgtagaattcacagaacggggaagaacaggcagcagcacaatctgcttaggcgtctaaaacggcgttcaggagtaaagagcctgatgcaatatcctcgcagcgccgaggctgatacagattcgtcctgaaaacccagagtactcccaaagccctgtcctttctacctgtcccgcatcttggcatcttagagtttccttgtggacggttctctcgtggtgtgttttatttcaaccatcaaatcttattctcttattcccagtgtccaaatcacattgttgaatctatagatgacaaaacagtgaaacgtgtttaagtgaaaaagacatggtgatggggagactgaggctgggacccaaagatttcgcctgacactgtcccgcctttgcctcaaggctggcacctgtggggttttggttggtttgtttcagctggaacaatctcaaatgtttcatcttggttttctttgtcccagctgccatgatattagacacagacatgggttctgtaaccattgagagacctgaggaatagacaaaaaagtagaagagaattacttgtttaaaaagtttctcttatggcatccctaaatcagaattggaagtactagataggatcagtatggccggttcccgagggtaaaacacatctttcaaacaaaactgttaatccagtactggaggagggcttgcttttaag

SEQ ID NO: 124026 - DNA, 1032 bp, Homo sapiens
cacctatctgtaactacatatatatgtgaacacttatttgtaatcacatacacgcgtggacacctatctaaaaccacatatacacatgtgcacatctatctataactacatatatacacgtgcacagttacctgtaaccacatatgcacacgtgcacacctatctataccacatatgcacacgtgcacacctacgcatcaccacatatgcacacgtgcacacctacgcatcaccacatatgcacacgtgcacacctacgcatcaccacatatgcacacgtgcacacctacgcatcaccacatatgcacacgtgcacacctacgcatcaccacatatgcacacgtgcacacctacgcatcaccacatatgcacacgtgcacacctacgcatcaccacatatgcacacgtgcacacctacgcatcaccacatatgcacacgtgcacacctacgcatcaccacatatgcacacgtgcacacctacgcatcaccacatatgcacacgtgcacacctacgcataaccacatatgcacacgtgcacacctacgcataaccacatatgcacacgtgcacacctacgcataaccacatatgcacacgtgcacacctacgcataaccacatatgcacacgtgcacacctacgcataaccacatatgcacacgtgcacacctatctataccacatatgcacacgtgcacacctatgcataaccacatatgcacacgtgcacacctatgcagaaccacatatgcacacgtgcacacctatgcagaaccacatatgcacacgtgcacacctatgcagaaccacatatgcacacgtgcacacctatgcagaaccacatatgcacacgtgcacacctatgcagaaccacatatgcacacgtgcacacctatgcagaaccacatatgcacacgtgcacacctatgcagaaccacatatacacacgtgcacacctatgcagaaccacatatacacatgtgcacacctatctataccacatatatacacgtgcacacctatgcataacc

SEQ ID NO: 124027 - DNA, 1054 bp, Homo sapiens
gctgtgtgtgagcaagcatggtttcttgacagcatgctaggacagggtttgtcttcttgcttatctttaacaagaatatacctgttcttttagcaatagggtactgttgcccttttggcctacaaaagccatttcttctcctaatatcttgatagatatgttgagtgctgttgtatctgtgtgtaactttgttaattttctctaacataaaagcagaggcttttcaccagggcaccaggctggcctctggtggtgaccaggggatccaacccccaagcccagctccactgcccacaggcgagtcacctggggccactccttccaatttagtgcacagcagccttctgctcaatgaaggggtccgttcttggaacctagaacctgtggtgtggagcctctgcttttgttatcttctaaaagttctaaaagttcatgatcttaagaccttgatgataatccaagatctgaattctaaagcgtctttcattgtttacttttaggatgaggaagtacagacaattggtcagatagaactgtgcctcactaagcaagaccagcagctgcaaaactgcaccgagccgggggagcagccgtcccccaagcaggaagtctggctggcaaatggggccgccgagagccggggtctgagagtctgtgaagatggcccagtcttctatcccccacctaaaaagaccaagcattgatgcccaagttttggaaatattctgttttaaaaagcaagagaaattcacaaactgcagctttctaaaaaacaactccaaagtgaagtctgtttattttgctgtttcccctccatgcctgtgaattggatgttgtggtccctgtagagtgagtgcatgtggcgtacacggggagaaaggagctctcccacgcctgagtggctgttttgtgcttgggataaagctcacagattgtttttttttttctctattaaactcttcagtgccctggtagatcaggcaggcatacttggaatttagacagatggcaccgattcaggggactctcttgctcgagttttcccctcggagcc

SEQ ID NO: 124028 - DNA, 1020 bp, Homo sapiens
gaaggagaatgtgtccaccgtggggagggggtcgggagagagagatacttcagagtggacagggctgagaaagctttatgggccgcgaaaggcagagtagttgttggtggatgagggtggctgtggcaggtggcgtttcaggtgagacagctcggggcccagaaagacactgggaggaggagagctctgctctccagagaaacaggagcagagaggaaaacagagccgcagcgagcggcttgtggtctggggatgaagcccaggttgacagcatcctctgcttcgctggtggaggtgggggcatcattctcacacctgtgctgggtcctgtccctgccagccaagggagaccaggaccctgccactgttgcgctcaggatagtccagaactgtcagatcttttctgttgaagtttaatttctaatacacttgtatttaaaatcaggttgcagattttaaagatgcccttgccagagtatatggagtgatacccaaaatccagtgccttccaccaagccaggttagacagttatgttttgtcttcctttttttctcaagaagacaggttctacttttctgatggccttgtcttcaccatgcagttccctggggcagacttgtatttgtgcatttgtgtctgtatatgtgggcatgtggtgtgtgtgtgcatgtgtgtgtgtacatgcatgtgtgcatgtgctgtgtgtgcatgtgtgtgtacatgcatgtgggcatgtgctatgtgtgcatgtgtgtgtacatgcatgtgggcatgtgctatgtgtgcatgtgtgtgcatgtcctgtgtgtgcatgtgtgtacattatgtgggcatgtgctgtgtgtgcatgtacatgcatgtgtgcatgtgctgtatgcgcatgagtatacatgtgcgcatgtgctgtgtgtgcaagtgtgtacattatgtgggcatgtgctgtgtgtgcatgtacatgcatgtgtgcatgtgctgtgtgtgtgcatgtgtgtgcatgttctctgtgtgaacatgcatgt

SEQ ID NO: 124029 - DNA, 1014 bp, Homo sapiens
cctgtctgtaaactagcagtgatatttccgccttgcagagttttgagaaccaaacgaagaacgtgaaagatttttgtaaacctttaatctgcagtaaaatatcaggaatcattctcagtgaccacatttttctggaatacaaattgctgttcacgtgcagccctttagttataggctattcagttgttcttattgtcctctatgtagaatggatgcttaaactataatttgtagaagctgaaatggaaaatgggcctgaggtgtttcctggtaattagctgtcctgcctttccatggctggttgcttagaaatgacagtttgtgccactctgcgaaattccctgactgcaaagcacccactcactgcaggagaccacacgttgctttgtgaatcagtgggggttggggcagcagcatgttcttttttctcagctttgatttgttgttaattgagcaagctgtaattgtagacgtgaactgaaactgattatttaatcgtgggggattgaaataattgcctatgttgcaaataaggaattttatccttcctactttgtaaaagaaatgacatgcctaccacatgggaatagtctgtgctgagagaaaacatgcttgagcattttaattgggaatcagtttcattactttttttttgagatggagtttgtctcttgcccaggctatagtgcaatggcatgatcttggctcactgcaacctctgcctcccgggttcaagcgattctcctcctcagcctcctgagtagctgggatctcaggcacctgccaccacactcggctaatttttttgtatttttagtagagacagtttcaccatgttggtcaggctggtctcaaactcctgatctcaggtgatccacccccttcagcctcccaaagtgttgggattacaggcatgagccactgcacgcagcctgtttcactacttttaagtggagatttttcctaatcctcacaggaagcatgagtgggaaaagcatgggacctgcgccgccc

SEQ ID NO: 124030 - DNA, 1050 bp, Homo sapiens
agacttagcatgtgaggctgagacctcagtcatagtgaagcacctttaagttcagcagaagctaagcctagggcataaacgccatgttgaattcaagatagcttttaaaatcctggcttttttaagaacataaagttaaattccttgtattaacattatattaactgaaggtaattattttctctatcccacttcaatattgcaatttataattcagattacaacccatcaaattttaggtgggaagattaacctagaaatatttttgtgtataattttcaggaaaattaaaagttaagtttagaagaaagcttttgaaaacaaaatgaaatggaagtgatgtccccctttctggttcatcggtgtggcagtgaagtggccttaggattcatggaccctcagtctgtgcgttgaatcacccttgaaaattcgggtggtgaatggttcaggtctcagtcacctgttctgcacagcctgtgttctagaaaattatttcaaaataatggccatgataagttggaatggaagaagataggaaaaaaaattatatgtcacttcacagtgtacttcagatgatgagtttatggtaactgagttatgtgaaagagaatttttccagttgttacaatgttccatgatagagtctgtcagattttagctaaatggcttaaaataaatcagcaaacatgcaaaggccttcagtgagctgggtcttgagcatttaatcaaaacagtgtgggcacagtatgcatttatttttgggctctgataaaggcaagatgacttactttaaattttcaggttgatagttgaattacacacttaaaaaactggttctaaatgaaaaagataaatctcacacacaaattaatatttatatttttgagtgctcctaaatacaaaatatcagctagggaggagctcctgtctgggctgtgtcacccagtcctgtgcctatcactcaagtcacctgactaactccatgggggttggcctctggcttctccacctctgctccttgggcaggggaaggtgtcacagcactgctgt

SEQ ID NO: 124031 - DNA, 1176 bp, Homo sapiens
ggtcccggagggcaccgcggactgggggtgcctggcccatcccctgcctcattccgtgggggcgggaccgcggggcttgggggccacacgggcggcccgcagctgggccctggagtgcggccccagcgtctcttcctcaggctcgggcatgatccgcggcgggaaagcagcgcgtccagccgaagcctgggggtcggagagcttgtgtgactgagaacgtttcggaaggcgtttctgacctttgcacctgccctcccagctcgttggcttgctcgtgtttgttgctggataaatgtgagcttgttgtgaaaattgtcttgaaattataatttcctgtttcttaacttttttttaaggctgaactccgagcagctgtgtttttagcactagaggagcaagaaaaagtagaggtatgaagtttccagattttaacatggctgtattcgttaatacttaatttcttattcattaaaaaccgtcttaaaaatagtttatagtaacatatagctagggataattttgaactgttaaggattacattactattgagagagagccaaaattattcttttttcgtgtagcttttgaatttgggggtaatcttaaggtaccacagtaactctgatactaatgcttaatctgaaacaaatggtcataggagtttcttgaagaaatggtgccattgtcaatgtgttaagtgcaggttcactcagatcctttagtaagctaatatgttattaatccctatgaaacggggtatatagtatgcaacttttcccaaaattatctgaccactcaattattttgacaatgaaaaagacagcgattattttaaaagtgcagccactactctatatttaagtgggtaatttaactttttcggagtcccaccaaccatcctgagtaaatattctggaatttgtcaacaagaatagaaccatcatcaaagccttaaactcttgctgtatgacaaatcagtctactgtcctctcacttctttagacctgtatacctaatctctaatttcatcaaaatcttcagttctttgccctttccatgtctgtgcaggcatcagtcttctcttggcagcattttgctctggaccctatgggtctggacccctaattaccttgccttaacggtcatacgtggtctggaagaaatctcagtggtcat

SEQ ID NO: 124032 - DNA, 1930 bp, Homo sapiens
gtaagaataatgatttttacatctatcttttgaaacctttgatacaaatgagttaatattaagctgaaagttaatagaatttgacaactgatagttttttacatttagattatttttggtagttgattatctgtttttcttaaaagccatatgagctttcagatagctggcaccagtgttgctgctttgtgttacttgaaagcttgctaataaaagtgttactatagagttaattttgatacgatgttagagtgcacctgttaatggaaacgttgaaggtagaggctctgtaaaagaaataggcataattttttaaaatagacatttcattcattagtaagacagtctctttgagtttaaagatgtctttaaactctgaaaatatcttctttactccttgagaataacttctgctatttttttgtgcacttgtattttaacttcttttctagctgcaaggtctcgaaggtcgagagaatttagcccgagatttaggtataattgaagcagaaggtactgtgggtggacccttattattagaagtgatcaggcgctgtcaacagaaagaaaaagggccaaccactggggaagtaagtagaattctgtgttatctttttctattttaattattggctgcttagtttagccatgcagattagtgcatatatagtaaattaaggttttcatactagaagatattccttaaaaacaaaatgagatgcattcagattgtatcaatgcaaattttaatgaaaattaggaatgtgctgactgtgattctgtggcatatctgttctggtttttgatcctcaagagtgttgggtcatgagctaaactgtctggaacaaatcccaactcctcgttgcctcacttgatcctccattcattccatactgtgtatgaagtgggctctaccaggccctaccttggtgttctgaggcttctctgcataagccaacagaagcactcaacttgctattatttttattaaaacatcttatttaaatataaaagggctgatttataggatagttaataaatttttggacttaaaggcctctttaggcttaaaactaagctgttgattttgctttacgctgtttagaaacagttcaaacttacacttttttgatcagtagtacttttcatactcttaacctttttttagaaattgtgctaatgagattaatgatataattttattttcatacattaattttacatgaagatactctgttttatagatacaggtaacatctgtaactgttccagatatttgattaaatgtgagcttttagtcagaaatttataggtaagaatgtggagggctgtataggtttccagttattttctttggtgagtctcagaggatgttttctattagaatttttgaaaattgataaagcttgcctgagtactaattatgtgtaaggcatggtaaatagactttgtgggtactataagataaaatataagaaacttctgtgtctctgaatagcgcagagctatttaagataaaatgtgctcaaataaggaaattaacatttaaataacagtttaagattatggaggaattgtcatttaacacattatttccaaccatattatgaatagtttagaggaggaagcgattgtcacatgccaaaattttattgaagtcaattttaaagtgagagtaggatgtcagttgtggggcgaggattgggaagggctttccgagaagttggaacggtgccagccaagcgtgggagcaggagagcatagccagatcccaggctggctgggagtgaggcggctcacccagagcgcaggttgtcacttcagcttgtgcatataatttcattccttcatttatcaatatccagcaagcttttattgtgcgcttatttgatagatactgtgctgggtactgggcaatcaaaaacaaact

SEQ ID NO: 124033 - DNA, 2152 bp, Homo sapiens
gtgttttatttttaaatgtattttaattttaaactaaaatattttagggtgcacttgatctatctgatgtacattctccaccaaagtcaccagagggaaaaacaagtgcacagacaacaccaagtaaggtgagttagctgtggaacacggaagtcatgtctggacttaactccagagtgctctgcttttctctctctagtctttcttgttacaagttgtattgttttatataaacacatgggctctttagtttcttgaaggtgctttttttccattaagtatacattaaaaaaaaagttttgctttgttggtagttgtttgacatttgtattgtagaaaggaatgtgctggtaagtaacagaatcatagaatatttggatttatttggtacttcggacattttctcctattaacaaggagatttacttacttttcatttataaattcctagcttgagaatattaagctagaaatatgtattataggatataatattgaatgaatattttagacttctagatgggtgatgagattcagaattgtaaatcatgatggtttttaatatacctgggctgttttgatacaatttctaagaaaatgtatgtactttggttacatttgtgtgtgtatgcatgtgtgcgtctgtttgtgtgtttatgagttgttaaaggtaagacttgatttcagagattaagcataatgggaaaaaaaatgagctctacactttgaatttaagatccaggatatgtaggaatggatagaaagatgattgtcaggaaatttgttttctcaagagcacagcatgaattggtagtcccaggcggtcttaccaaaggataggttggggtctgtcttagtctgttcaggctgccaagtaccatagattgggcagcttacaaacaacacatttttcctcacagttctggaggctggaagtccaagatcacggcatcactgtggttaggtctggtgaggtccctcttctaggttgcagagagctgccttctcattgtgtcctcacgtggtggaaagagggtgagagagctctctggggtcagggccctaatcccattcacaaagccttcacccgcatgatctgctcaccccgcaaaggctccaccttctgataccatcacattgagggttaggatttcaacataggagctgggggtttgtggactacacaaacctgcagtccatgacaggtcgggtttgtattctttgactgtccctttgattttcatcccataggaatagagtgatgctgtggagtccattccaaaagatgaggtcccatgtgggtttatggtggtggatcgactctcagatacagttgcatctttttaaatagatgaacttccaggacgtagtgattatactacacgatacctttcttttttaaatgtctaggcacagaacattgctgaacgattgctgttattttttgcttgttctttgatgttgttgctcctttttattgtttaagtttggaaaactaaggaattttatacttcatttctaaccaaagaaacaactattgtattgtttatagttgctccttctgagatttctagttggtgtagggaaggcctttttttaaaattttttttttcctaaatactcataggaggctataaccccagtgatagagtaaggtcatgagtaaatttttaaaatttctttaaattaattgcaaataaaacagcctatgtaagtaagctttacttttcatgaaaatacctggctttagaaaaattaaaattaatgaatattccaaaatacttatcagtacctatagcatttgactatttggaagctctttttagcaaattattactgtttttaaagcaaattagcaatcctaacctatatataatgtatgtcttcagggtaaaatattaaagtctattttacgtactcttattctccctacatacattttaagatctaagaattataatgagaatctcaatgttttaagtcagtcaggaaatgatgctgtgagtttttccagagaaggggggactgtcctgaggctgctttagagaatagcgtttgtcctaacagctgtctctgccgtcatcccgttattctagtttagtctccgtttctcagttggcctcataaacccacttcagaaataccctagata

SEQ ID NO: 124034 - DNA, 1045 bp, Homo sapiens
ctttccctaccgtcttcttgctagctacctcctaccaaatcagccttgagggcccacggagaatgctagaaactctccaagagtagggtccacccaacctttaggaaccagctttgtgtgctcctgagaaaggtcagatgaggtcaggacaagtcttcaaggaagttgcctaggaactcaagtgaggcttatttagaatgctgctaaaatgtagcatgaaagagctgattctccacccagtagaagctgagcaggtggaggctaaggtatctgtgtttgacctagtaactattggaaacagtaaacatgaggtagatcactctaggaatagttaagaaaggaccaaaaaaagcaggcctcacagaacatattaactagatgttccacttctgagacatttttcagtaggtatctttgtttggtaatgagttagtttattttttaaagatttctattttgtggtaaaatctcattttattctcatgctcagataccaaggtataaaggacaaggtaagaagaagacaagcgggcagaaggctggtgacaaggtaacatgcatgagggcagaggagaaaagcagcctgtgggcatcaggtctcgactctggggcctcctggagcgctgggctcctgtcagattgggttctcagttttcttatgaaatgtcacttgaggctgggctaggtggctcacgcctgtaatcccagcactttgggagtccaaggcgggcggatcacttgaggtcaggagttcgagaccatcctggccaacatggtgaaaccccgcctctactaaaatacaaaaattagccggccgtggtggtgtgcgcctgtaatcccagctacttgggaggctgaggcaggagaatcgctttaacccgggaagcggaggttgcagtgagctgaaatcgtgccattgcactccagcatgggtgacagagtgagactctgtctaaaaaaacaaaaaagtaacgatggcatgaaataaaaagtaaatttcactgtcagtttttatccaggtgaaaatcatactgttgaatcttaa

SEQ ID NO: 124035 - DNA, 1542 bp, Homo sapiens
ctgttgtgttagatggctttagttctaggagtttcaaaggtaaattcctattactgtattctctttctgttcacactgttctttatgcgttattaaacaagaagttgctttaaaataatgatttagtaagttttttttaacatttacatagtgaaagttattgtgtgttaatgctttgggcaacacatttaacacagttctcacttaaggagtttatagtttaattggagagatgagacataccttaagtaagatataaaacttcttaatagattttaaaaatcagtttcttgggcttttctaaaatttaaaagcatattttatagtattaagcttttataatcttactgctattgtgggtttcaaacaacttaaacattttcaagaagtttatacatagagccaaggcatcctaagagatgtggttttcactttgtgtgatgtgaaataactgtgatgggcccagactttagctttcgcggtactttgggcagagtgtagtgtgtgccctgacttgagaggggattgaagaatctaggtgggcccatatcccaggatttagtccataatttgggtctcttctatttcattgttgtgttcctgaggccaggatgcttcctcaattacttggaaacctttttccctgtacatttctgatcttgtttctgaactgccttgtgagaagtctgtattgtaccccatgtggcctattgccagccttacttatatgggtaagcccttagctctttgttcccctgcctttctgctttgccttgtgcatgcagtgagttcccaacagccttaacattctcaacatcttcatcatccagatgctatgttgcatgtggtggttgaggttgtacacagcaagactccagatggagccatccgcatggtaggtgagtggcatctcccaaggtatgcaaagccatcatgggagccctgcctgtcctgcagacgtgaactgggcatgcgatgcaggagggcctagggtaccgctgctcccggagctctggagcactgatcaggagtgtcgcatgtgtccggttgctttcgaatgcaggaggcgacaagtactagtggctcactcagagacccttggcactttcttcagggaagctatattcatattataaataaacttaaaaaaacattcatatgtatagttagaattgatttgtagggtttttgaactgatgtaacttgggcaaaactgaagttcttatttttgttgttgctaagagacaataaagataaaaataaaataaagattaaagataaaagatttggtatacaaggagtataaatatgaaatgagagggcattttaaaaatgaattaataattttgaaatatatattaatacttgctgacttccaaagtatcatctgtgataatttatctcattgtattccatttcgttgtaccaaacatcctaattgtttggaaaaaaaaaaaagtatcagaaaattataacagacttttgataggccctactagcttaggtttttaccatttagttggaaatgttgagtaagatcta

SEQ ID NO: 124036 - DNA, 3398 bp, Homo sapiens
tttaatctgcaaaatgtgttgatgacaaatctttctcctcttcctgtagatttttttaatagtgaagtttatttggaattaagtttagtgaattcattaataacctagttggtaatggtcttttggcaaaaatgagccatagttataaagtagtaacatgttactgtgtggtttagaactagattttgagagcagttccaaagcagattgtttcagaatttatttttactccctggattaagagaactatatttttaaaataattctgttatgtttacaagtatgtgttgtgtaatatagtaatgcccttctccgtaaaacttgtcttcctaaaactggtctttctgtctatagcgggaatattggtcaaacctgtcaaataatcatggatacctactagttgctcagctttgatactagatagttcattatgtggatttaagttacattggcagtgtgaattcttggggaaatcagaataattattgtttctcataatattgctttacatttacatttttcagtttctgtcatgccagttattctttggcactttctcatgagtgtttagaaggagagaatctgtcgtggccacaggctgtgtcattgtacatatgtttaaatatcacatcagggtatttatttccaaatgcatattcttttaaaaagacataaatccattattaaaacagtgtaaaaatcagaaattacaactgctgtgaattacataatatttttctatatttgataataccaggaaaatgtcaagaaagttgttaggaaatttttgaaagtttccatccctttgaaaatatgttgtctaaaattataacttgctatttattttttcagacatctctttataatcattaatttatattaataacatggaatgtgtagctctctagaaggcaataaaatttgcacagcatatatcttgcctactgtcaactagtcaagacctctacctggtgtaaagatgtaaacgtatatcataagacatgcataatgcattctgtctgtacccatatgaaaagtgaaaccatccttcaggagcgtcttgttcggtaatgtctaacccagactttggtcaccatgcttcagtagttactactctttaattctttctcagccatccatcccttcctagatataatttgatctgaaaaatatgaatctagttcaattcttgaggaaactcatgcctaggaaattaatttacttaagattacacgggccatgtatggtggctcacggctcacgcctgtaatcccagcactttgggaggccgaggcgggtggatcacttgaggtcagaagttcgagaccagcgtggccaacatgttgaaaccctgtttctactaaaaatacaaaaattagccaagcgtggtggcacgcgcctgaaatcccagctactcaggaggctgaggcaggagaatcgcttgaatctgggaggcggaggttgcagttagcccagattgccccactgcactccagcctgagtgacagagcgagactctgtctcaaaaaaaaaaaaaaaaaaaaaaaagattatacgactgggtgtagtttgtgcttgtaatcccataaacccagctacttgggagactgaggcaaggaggactgcttgagcccaggagttttaagaccagcctggatgacatagtgagagcctgtttcttaaaaaagaaaaaaaaaaaaaagaaaaaaaaatggagttaataattttggactacattccagattccttgtttcagttgagtgctttttctattattccacgggtattttacacaatactgctctctttagtatgcaaggctgaattttgggaaattgccatttttaacccataaagcccacaaattcattataatttagcttaatagcataaatattgagttaacctctggaagcaggctttgactttgatattgacctgaccacttaactctctggagactttgacaagtgacatcaatgtctgtctctgtgtttcctgatttatatccacagatagaaagccatctccagatcctagggccattttcaagattcagtgagataaggtgaagcatttgaatgttctccataaatgtcagctgcttttattattactagcattattttttgttttcattattattattaacatagacccgtctaagggcagaaagaaatctgaccaagaatggagtgaaagtcggctgtgaaggttaggactccctgaaaacaaaaaagaaaagtggtaacatcactctgtatccaagggcatggataaggatgattcagaatttttttataacattgatgttaatatacatagagaaatacacacacacacacacgtatatatgtccatggacatcaaaatgaggtataggttaggaagttaccctggaagttagaattgagataattactttgattagcaaaggtttatgttagaaatatgagtggttgaaggcagcgcctttcaccttgatgcctgttgtgtttagcactggatagaaaattgctatttttactgatgactactttaatgcttggttcattcatatgaaataatctttcttttctcctttaataataatgatctctcctgatttcaagttgaaaatgtattaatttaagataacttatgaagcaatgacatatggaagaggagatgggaaattgtttctcaatgggaaagtgtttataaatgggataggtatactaaaggtatttccatttagggaaagaggaaaggaatggtattaatatatttctctaatatttttccccctttgaaagtttgccatgttaggaatcctggggatggagtgatgaattgtggcattgctctgcagttcacgctgctgagagctgccccaacacacacacacacacacacacacacacacacacacaaaggttgcacacacacaggtttgattatgctcatgagacttcttttattattgaaaatatcttaaagttttatctcaccaaggaggccttttctctttccctctctttctagaaggccaatgatgaggccaatcagagtgatacaagtgtctccttgtcagaacccaagagcaaaagcagccttcacttactgtcccatgaaacaaaaattggatcttttctaagcaacagaactttagatggcaaagacaaagctggcctttgtccagatgaagatgatatggaaggagattctttctttgatgatcccattcctaagccagagaaaacttacggtttgtgagtaaatggtttttgagctatgagactaggggtttaaaaataagataaatgttttcattttatagttaaaaaataatgaactatggaaggtttataattattggatccataaatctgactatgcgttgttaatgcctttcatgt

SEQ ID NO: 124037 - DNA, 1297 bp, Homo sapiens
gcagggaggcgagttgggggtagcagagagagcaagatggggatcggatgaggtggactcagagatgaggagctggacggcttttctttgagactggaagccctgaggatcttgatctggcgtacattacagaaggatcctgaggttgctggggaaggttggtcttagagtttccagttaggaggccgttaatgatggaaaaggatttgccagtaagtgctagagaaaagtaatatacagagtggcatcatggtttttagcctgcaaaactagaaggttggaaacacgttagatgaagagtggcaagagcaagagtggattacacagacaggtggcatgacagcctggaggcccctgttgctgtgctaagttagagaagattgctagtggaaatccaaagtaggctattgagtgtatgcgttgggattgatggagaggtctgagctggagatgtaaattaggagtcatcagtttgtagataatgtggggtgtgggagactacagaggatcaccaaggaagcaggtcctgcgcaccttgaggccagagcagggagctagaagcagcagaggagatggaaccaggagagtggtgtctgtggaggtggcggtagggaggagtagctgtatgatgccgttggatttagccatctggaggtcagtgatgaccttgacacagttttgttggaatgggggtgcgaggcaggttagagaattagagtgcattcaagacagacaggaaaggattgtagatgaaaaatagttttctgatgagttgtaaaagtgtgcagaggagcagggtggtggctggaggggcaggatttagggctgaaaaacgtgtttaggtgggagaaataacagcatgtatgctgacgagagctgttcagctttaaagatggaagaattaatgatgtaagggagtgagaggagaactggagggctgcgcagcagtggaatcccatgcaggggcttgtgtttgctggaaaagtggagagcgtgtgggtctcattgtaggcagggggtggatatgatggtggcacctgtgcaagctgtcacctgagttcatagttgagtgaggatggaggacggaggttggagataagaggagagtggagaaagcatgaaatctttctataagaaagtaaggcgagaaggcactgtggaaacccggagggttgttgggcagttttaaaggtccccttgaggttagtggtcatgactttaaggggagttcatcagcatggctgttagtggcttctgtaagcaatattaaatctgagaggtggcacttatttgctag

SEQ ID NO: 124038 - DNA, 1737 bp, Homo sapiens
gacagtgatgagactccgtctcaaaaaaagggttgtgatgcatagcttaagcgttcattaatcacagtttattttttccttagttttaggttattatgctcctgtcataaagaagccccatattgaacaacgacaaaaattgatgtggtttagagactgttatattctaagtcactctaatgttaatattttctcctgttcacaggtaaaaggggaaatacagttttgaaagatctgaaattgatcagtgataaaattggatcacttggattaggtaattagatttctagtttttgtgctgatcgttttaaagtgattatttttagggtaaggctgtaaaagaagtgactccgtctgcctacgctgagcaccttcctgctgctgctcattcagcaggtgtttgaatggcttttatgtgttcaggattacacgctatgcgagagatggctacagcaacagccatcatgttctcgtgaacctctgtcttcatggagtttaaattctggtcaggaatatgaacattaaacgggcatctacagatattttgactgtaaaagggtcagtatatatgggtatagaaatggctagtaggttacctttgtccagtcttggcattcagggaagacttcttataagaagtgacttctgtgcagaagcttcatggttaagtacatgtataagagagaagggaagatatttcagttcagactgagaaaaatttgggcagaggcagagccatttgctagatgctggtagtacatggtccaggcctcagagaattcagtctagtggggaaacagacttattgaaagaaaaattgtgagatgtgttcagttctgttctatggagcagaagttggtaagcctgccatgtaagtacattcattcctatggaagtaagagtgtcgatgtgaacattaccgagccctgggccatatgttgagagcacatttctcattcagtgttctgttctgtgcaagactgtagcagtgtgacaggcatactttaggcaaactcatttatgtaaaggcaaacttggtgacctgaaggaaacggtgcagccaggttctcaatggccacttcctatgctctctgtggatgtgatgggatcccttcctggtctgtaatcactcacatggaagcattggaagagcttcacaggcaggttagggagaaagaaaggtgtgtccccatttgcttttaaaacccagccctgtccaaggggcagctccgagaatgcccttccctcttctggagagacattctggatagtgcaaagaacttgggcttggagttggatagaagtgacatctcagatgtggcactgattgatgggtagcgtagggagataaactaaactgctatttcctcatctgttaagtggaactaataacatctgccttgttttaaagagtaaataggatttaaatatctcttcatatgtaaattaaagtacagtggctggcatggtaggtgcctagtaaatgttagttttctttttacgttacttttccccccatttgcagaagaataaatgttccctgagctgcccggattcttgttccgcacagtgccctggagtcctggtaactgagttgctggttgtgctgccatctgctctttgtgcgtcctggttgctggctggccagctaggtgggcctgcctcctttccctcccttgtgcttttcctgtcagctgtggtcatggttgccattagatgttcttttccactaaatct

SEQ ID NO: 124039 - DNA, 1074 bp, Homo sapiens
gaggtaggttttattactatctccatttttacagatgaagaatctaggttaagtaacttgcccaaggtcatgctgcttttagagtcctgatgcatcacacagagccctcaccactgtgttttactgcctgtatgttatttagacatattgaaataatcatttcaatgggaacataaattctgagttccaaataaataatctacaaataaagctttagagcaccatctattttagtttggcagacaaatattaattaaaggtgcccaaaaggagtgtttatagataggtactttgcatatttaaagcaagagttgctaagctttttccgtaaagggccaaatagtctatattttagggtttgtggatggcatgtactgtctctcacatagtctttgtgtgtttttttgtttttttgttttttaacaatctttaaaaatgtaaaagccattcttagttcacaggctgaacaaaagcaggtcatcagccagaggcaagaatgaaagtaaggaaagcagaaggctgtcaggaagtccgggccaaagatgactggggtaagggcagataagacagagggtatgggatggggaggagagactgtcaaaaaatgaagaaaacaagaatccttggcctgagggccaaaatttgctgacccttaaagtaatgtagtacaggttgagtatcccttaatgcaaatgcttgggaccagaagtatttcagagtctggatttttttggattttgaaatgtttgcatttttcttaccagatgagcatcccaaatctgaaaatctgaaagtccgaaatgctccaatgagcagtttctctgagcattacgtccccactcagaaagttctggattttattcaagtttggttttcaaatttttgaatttgggatgcttaacctgtatgtattctgttaatcattttgacactggcttaaattattgtaatactaaacaatacataaccaagaagtcagaatctgatgtgttatagcacattattcagtaaatatctttgtctcatgtgtctgtctgaagagaccaccaaacagtctttgtgtgagcaacatgg

SEQ ID NO: 124040 - DNA, 1025 bp, Homo sapiens
agctgttgagtggcaggtctgaggcctgagcctggctctgtctgactgaaggtgcccttatttgctgtgcttcatggcctcttcacacctcatgagtgttttttaacttttataacaaaacaattagcatgttgaaaacgctcagtagttcatctagtacctagaggggattgatgatgacttgctattgctatacgccattaagtcaagggaccttattaatggtgagtgtgccccatgttaattgccttagagtacccggagtaaagatgaggtgttaaccacattttatagtcacttgtaacagtttattatttcttaggtatttcatttgtcatttgtcttcatattatatatgcttaaaatgttatttctagtctgggactttttaaatgatgcaatataattaattttttttaaggaaatgtgtgtttaatggtaggtaaattgtgacgcacattagatataacatatcttttcttaaacttatcaggaactggagaagatgatgactatgttgatgattttaataggtaagaaaaactattgggcaaatatataaatatatacgttatttgtaaacaatttccgaacacagacaagacaaaattacatttggtgcttattttaatgtatttgattctgttgttcatattgattgaagatgaagaaaagatagttaatccaaaattaaatatttgattttagagcatgtttttgattttacattagaatatagacagtcacattatgttcaggaaacttggtaagaagaagagaaacaattgaagaattaactgagaagtcatttagaagcagttcagttgccgtgtcataagtgctgattttctcttccttccatacctttttgtggcgggaattgtctcaaaattgacctaaaataattatgctctcaaattagttttttgattcagatcacatttcctaatatgtggatatgtggtctgccctaataagattgccattctctttttttttttttttttttttttttttttgagaca

SEQ ID NO: 124041 - DNA, 2743 bp, Homo sapiens
accacaatgtctttatccagttgttgattgatgggcatttgggctgggtttcatgtttttgcaattcggaattgtgctgctgtaaacatgcgtgtgcaagtatctttttcatataatgacttcttttcctctgggtagatacccagtagtgggattggtggatcaaacagtagttctacttttagttctttaaggaatctccacgctgttttccatagtggttgtactagtttacattcccaccaacagtgtaaaagtgttcccttttcaccacatcttcactgacatttatattattttttgattttttgattatggccattcttgcaggagtaaggtggtatctcattgtggctttgattttttaaaataacttaagactactcacattctgacacttaattattttctttcttttgaacaacaaagcttgatgacctcacacaagatctgactgtatcccagctcagtgatgttgcggattatctggaagatgttgcatagacacgaagaaggaagtattctaattaacaaggacagaggactgaccggttccattttttttttttccagacaatcactcagctggaatgtctgctctctattggtgccttgcatttcaaaaacactgcagatattttttaaaagtaattttcattttactaaacaaaatacttcctatttgagcccatgtgtggaagatttaatattcttaatttaactgtacatttctttatggaaattgattatctacactcagtttcattacagggaaggaacccatgaaaacatcagtgttaagagcatgatgaaaggtgtcaataaagccgtaggatcgcgcaaccctttgtgtgtgtggctgctggtacgtgtgatctttgaaaaccttggctttagccctctggaatcagagcttacccaccatagtatattttgatattaggtggttctacacatagttggcaaaatgacttggtaaatttgtaatgctgaagtatattagtataagttaaatttgatgtgtcaactttattttgtatttccttccatttggaaggtttgttagaccattaaggttatattaaagtactcttgtgtgtgctatttagttttgcttgttttaaagaaatctagaagtggttatgagttttaattcatagaattgtcaataacataacatttgcaatcgtcattcctcctgttatccatgtaagcagctttagtcgtaggttctcttcattataatttattatctgtaaagattccttgaaacttaaatgcatctgaaaccattaagcagtgcttttatttcagatctgtaagttaattgtattaaaatccaaattggaatgaaatagtagtaatggcctaagaccatgttcagtttgacaagctttatatactgtacataatttcattgtaacccttaaaaatagagccaataatagaatttccacagtctcatttatacggttaaagcattattgctattatgtaggtcacggatgtttataatactaaagtattttaaaatgtgcaagtagaaaaaacagtagaaagtgatgcatgcatatttatatataagtaaagcaggattgtgctgtttttgcactttataatttcaattaagttgcggctttttactacaagttaactttattagtaaaaggagcaaattagacctaattcattgatctcggttaagtgagcagactgcatgacttgtgtaatgccagtttctcatttcatattagcctaaatattacagaaattactccttgggctctaaaatgtagaggaaatgaaaatgtaaggattaaggctgtgtaacagaatctggctttttaaaatttaagtgaaactaagctgtaaacatcaagaggaagtaggacataaactgggccggtacagcctgggagccctgtgtatttctgccctccgtctgtgagctgctatctcagtctccttcagctcttcatgtcttagtaaacagcaccacgtgcagatgtaatcttgttgcagtcccccagtgtggttgttataaaatgcatttctttgtaagtcatctctgtaaacagtcactttctaaaagcactatagttctggtcccctggaatctggatcacatgtatgatttatttttaatatttgataggaactaggtttcagtgaaatgatttgaaagcatagcaggatgtggctttttaaatttatgaaactttcgaacagtagcaactgaaatttgtcacttttctgttacgcagagaatcagaccttttgataatatttgggagggtaaaagaaatatgccaaatatgaaacttttttgtcagcactacatacatcttttttttgcggggggcgggggggacagagtctcactgtgtcactcagactggagtacagtgatgcgatctcggctcactgcaacctccgcctcctgggttcaagcgattctcctgcttcagcctcctgagtagctgggattacaggtgcacaccaccacgcccggctaatttttgtatttttagtagagatggggtttcaccatgttggtcaggctggtcttgaactcctgacctcgttcctgccttagcctcctaaagtgccgggattacaggcgtgaaccaccgcacctggccagtactacatccattttattgaatgattttgaatgacttaaagttcaactatgaaaaagctttcttttcacatgtactttttgattaggtattatcaactt

SEQ ID NO: 124042 - DNA, 1037 bp, Homo sapiens
ttcatcttcagatacggaactgaacacagccctgcttcattcaccgagttggtttgggagcaggtggagtcatcttagttcaaaccccatcaaacaggaggctgttgtcccggccagcaggtggcgcacaccgtcaaggtttgtttggtggatggttgaagacagtttaagaagcccagcattcgcttctattccctttgtattttctcagctgaattaacacctatatttctgagctatggttaagagggacagtgtgacataaataacaaaaacacattttgccatttggaattttcacatgcacttatcttatctccccagatcttgagattatttctctcagatattttcttttgctaatctttacaggagtaatattttcaatgtgaagacaaagatattctttctacattccttgtccagcattatgcacatgaggttatataatatttgctgatagttaattaaaatcaacacatcttcgggatgggccgtaggagcgaagaggtaaggagattgggatgaaaaggaaagaaaaagcttccaagagtaatttttacgtagtaattaccacaattcccatggcccagtactctaaactcaccaagtcagcggccgtggaagatctagactgatggccactgtgggacacgagcttatgaaagacgaatgttggtgggacagatcatagcacttattcattactgataaccacattcggggatgggaatttggacctgatctactcagtcagtacagttttgggggaaatatcacacccagtgtcgagaatgccatgtaggtgataatcatgtaacaattctgaattgaagaaaaaataatgaaaccacaataatcaggctttacatcatttttcatcttggagcttttgtgtttccataaaggtagaacaggcactgagcgaaggttgtgccatcaccaccttccccgaggccagccagaaggagccgagcatggataagaaggcgaccatcatccggttttcttttatttatttatttattataatttaa

SEQ ID NO: 124043 - DNA, 2072 bp, Homo sapiens
agacttctcacatcccctccgtctgtgttctagttggggaagaagcggacagtggaggctggggacccagctctactcacagggcaagtgtggcagaggccccagcgtggagcctttccgtctggggccatagagcccccagcgtggggcctttccgtctggggccatagagcccccagcgtggggcctttccgtctggggccatagagcccccagcgtggggccttgctttcatgctggatctgggaatctagacagcagccagggagggggccgtctacagtctcctagctccaggctttgggctgcttgcaggaagagttggttctgcagagcaggctccacgtcgtattgccctgcaggccgtccagtgcttgggggatggactgtgtcctagaccctagacctggttgctgcagagggaggggctggaggcacggcatccgggctggtggggacaggttctggacactgccccatggtactcagctgcgggcacacacagcctgttcctgcctggtggggaatattgctgcctggcaggggacgtgtggccctgttgatgtcagaccctctaccagcagagggttctcctctccccgcctgctcttgcctgacacgcaggccatcatggtggttgagtgacatagatggaggtgcgatgggggccactgcagcccccacatgctgggctccccacactgccctcgcagtgctgtgatggtctccatgacaccgcccagctcttcccacgggtgccatgacatctcctgggactcgcgtgtttctcctaaaggtgcctcttgcttctgccttgggtcgcttagtggctgatccaggctggagcatccccgtctgagagcaagtggttttttactagtcctcttccaggctacccaccaacccatccccagggcctggtggttaagcatctggtacccaaaaacagacagcctgggttcaaacctcagctgcggtgtagactgaccatgtgacctctgcaagccttctaattgccctaattcgcaactccctcatctggaaaggaggggaaattgtaattctcttatggtgtaggtgttacattaaatagtgaccacaaagtgcctaggaggtgaaaagagctccaaatgggtaacaatttctaccctcctgcagttccctgggtagggatgggcacaggccggggaactccttacgagggtctgtgagctctgaggcacctgagacctcattgccctgacccgtaggatggactccggtggcagaggaactggaggctggtagtttggacacagacctgtttacagccttcgaacctcactttaaagaaatttctgcccttgcacctagcttattgctcaggaaagtagaaaagcgaaaagccttttcctgctgaaaatcaatggctctctttaaaatattaaaagaacagacaggaggagatggcacgccacgatggcaggggcaaggccaccgccctgaggctgcagctcagaacagatgctccgagtgcagccagatggtgtgattgaaaggaagagagcggccagcagttccagagtggccgcctggagacagccctcagaggtgcagctctgccaacactcacggacccacggcactgacttgccatcaccaagagaatattctgtgattcattcatgaaacaaaggttttcgtggtatgtgaatgttgtgtaaggattgtgaaggatataaagaagttatttcgattatctcagtgtttcctgtcagtatagatcatgtgtgcacaaatcttataataaatgaaattagttttgcatttctgagtgctttgtttgaaaaagataccctgtagtatatgataaaaagtaattctttgccaaaacaaaaagaatccttcgccaaatgtgtctttcacagcccatactcctccccctacaaataaaagtccaaaaaaaagaaaaagaaaaaaagaaaaaagagagagaaaagaaagcgagaatgtggccctgctggttcgtgtaacagcaataatcctgaagatgaagattctcagtagagaaacagatcacatatagccagaag

SEQ ID NO: 124044 - DNA, 1036 bp, Homo sapiens
aatattttccttcttatttagtttttctttgattcctttcatcagagttttgcggttttcctcatatagatcttttgcatattttgttagatttattcttaaggtatttcttttttttcaagtgctctaatatcaatggcattatgtttttaatttcagatcccccttgttcattgctgttatgtaggaaaatgattgacttttggatattatcttgcagtctgccactttgctattaatgtaattgcttgttagtttcaggtgtgttttctgtggtcatttctctcagattttctacatagacaattacatcatctgtaaacaaagacaactttatttctttcttcccatctatataccttatattttatttatttgtttattgcattagctgggacttttagtatgatgttgcaaaggagtctggagaggcgacaccgtgcctcgttcctggtcttagtgggaaaagttttgagtttctcaccagtaagtgtgatgttagctgtagggtttgtgtagatattctttatcaagttgagggaagttctcatctatctcagttatcatttttaatagctgaataaaaggtattacatcgagttcatgttcaaagctggttaaggcaccatcaccgtgaggtttccatgcattgcgcagtccagagtccatggttatggcccttcagtttcagatgaagaacaaaaccagagaaaggccccagagccaccctggagtgtggggtggaaaacaccaagaggcctgtttttccagaccttctttgaagagcttcatcttcaggtaccaatgcagtgggggtgggtgtcagaggaaggatgactaagttggggcgccctcatggcagggacagcttgggattggggacaacgctcctgtgttggccttctgcatctggtttaattctgtcctgagagacatcagctctgttagctcctgccatgtctccagaacctcagagctatggataagtgaatgaactttactacctgatttatgagaaacactttgtgagtgtttt

SEQ ID NO: 124045 - DNA, 1130 bp, Homo sapiens
ccagcagcaaattaggttggctctaacttccaaatatatccaggacagaatcacttgcaggcattttgtgccaaatcctcacaaagctctttagacattttcctaagtcacaggtgagggtcctggtgactttccgtgccctggggctgtcagggcagcaggccctggagcggggcagaactgtgccctttcagctccggcctgccttcctcatccagctcagacggggggcagagggaggagggcaatgtcaagatggagtgccccaagctggggccgcagaagcaggctctgtgcaagtggggtgggggcgcccggaggacttgacgcagaacccctctctcctctgcctgcacgcctggctctcccctcctatggctgcgtggttgtgaggggagtgggcggctgtttggacatcagtcccccagtttagccttgttgtcctggagggattctgagcaagcatcccaggctaggaggggccatcccagtgaagccttgggaagagtcgccaggcttctggggccctctcctggctcggttcatgggctgggtatgtgacaaagggattttgaaggcctctgtgggccctgctatgggctctgccctctgaggtgttcctggtggtcaataatccgggccatcactcgggggctccgtctgcagggacaggctctggacatggagcccagcagagcccgtggctgcccagggatgaatcctgcgacacagttatgccctcctctccaccgggttgcctcagaccacagcaaatggtctggcccaggggtctgaaggagctgccggctgccgtggcatagagggcatcccctagccttgctgtgccacagccaaatcctcactgctgagtccatttacactacttcaagcgcactaagcacatgtatttacttcctactctctgccactgtcactgttagtggcagcctcggttccccttcccagtccctgcaggatgatgtggggtcagtgagcaagagacccacagctcacccgaaaccatggcgcagaaaccatggcaaaaccggtttcaggctccacatatggtgaggaaaggaacctcctggagcttcttccgcagggcaccgggactgcctggggcttcgacg

SEQ ID NO: 124046 - DNA, 1863 bp, Homo sapiens
ggagactggatatatctggtgataatttcactaatcaatcaatgcaatcaaccccttatgctactcttatccgggtaatttatcatggacattccagttactttccttccataggtgaagtttatgcttcactagtataaaacgcagcattgttcagaactaaggtgacatttaggaagggcaaacaatgggaagaaaagctttcctggggggcgtgtaaggttagcgaggggtggagatgaaaggtagagggagtacaaagatgggacccagaagtgggggtgaacagggaggcatctagggatgtttcctcttggtcacagaaagatgcccatcccgcttcggccttctgcgccagccctctctgtgcacacagcctaatgcatgtggtagcaggtgcacagtgtgtgtccacatctcttcttctctttgctaccacccagcttggtctgctgccaaaccaatgggcttgttagtaatatatagatgggtggatggagggatggggggagggaaaaagggagggaggcatggacgggtgtacagtggagagctgtaatccggtgttctgggttgagagaggctgcatggcatggtgactaagagccagcctttcagggctgcgcagcctgagtttaaatccctgtgcccagcatcctccccgtatggccccctgcctcagtctttccaactgtaaaatgtcaataataacgggccgtcgtgaggattgagtgagttaatccaggagcagtgcctggctcagcgtctgctgtgcaaccgtgactatctccccaatccctcctcactcagtggctggcctcctggctgcttgagcttctgtggcagagctgggctggagaacgatcgtgcagactcccatccagagcacacgtcacatgggcactggacagagtcctgggaaccagagagtcagctcaaagttttcacagtttcaaaatacttcctcacctctgacctcagcactccaaggcagccatgtggatgccggctcttggcagggagtgaatggaatctttaaggagcgctccagccgccttgccctggggcgaccttggctcagcacacatcctaatgctcaaggccttcagggccagggtcttcccatgaggccccctctgtgcatccatctgttccgcaagtatttgttaagcacctactgtacgcatgtgtgtggtttggggtctgccacctctaccttcattctgagtcaggtcttttcctatgaaatgtttatctttctgttctgcactgtgtggtcttgatgcttgccagggaatcagggttgggtttggcaggcatgagcctggaaccttccagaacggtgtgggaggtaacaatgagtgattacaacatggctcttgattttctcccctcctcatacctaacctcattttctcacccttaacctagggttccttaactccagatctgggtgaacttcctgaggagggtataaagagtgatatgggacattagaaggttttggaaggaaaacttgaacatcccactgagccctcaagtgagcagaatggctatcatgagggtgtgcagttgtcctacaactttatctgtatgtgggtggggtggggtgaggtggggtgggtgggtgccaggaatggagtgggaccatctgggtcattccatgccccttagtaccagaatgaccctgtctggacctggggtaaactgatctgaagcagacagacaggtagtctccacagggaaggctttcctgacttcagggtctttgttgggctgggccttgacgtgatttccgttcccaaagccgacgagcagtgtggaggatggggaggagcccactcttacatgtccatggggtcc

SEQ ID NO: 124047 - DNA, 1016 bp, Homo sapiens
cctaaggctctttgtttaacttgttacaaattagaccagcctctccagcagttgccaccaaattctaaaagagaatccgaaacactctgcctcgtcctaccttgggatgcttgttgacacggtctctgtctttgtgcatggccgtgagaagtctctctcggtcacatgaggacaattagccttgcttcagcaagggcaccacagcatactgggtccccagatggtgagacctgaatgcgcagtgtccccaccccaccccccggccccgtgggcgttcctccgtggcttcgggaggctctgactcaggatagtaaaagaagctctagccgcaaaggcgtcgcgacagcagcctccaggctttagttacaccccccccaccagtgcggaagaagacattcttcaaatttataaattataagaaatcagaaaatgaaaagatcaaaatgctaaataaactggcgttaaggagctctcgctctgctcttgcgcgtggtagtggtgagagcggggcatccgagagccctagagctggtgactgggcgacctcagcctaacacctgcctttgagcctgtatcctcgccaggtggctggaagagtaactgatggggattgggacaaaggtccccacaggtgtcttcttagtttatattcatttcctcattccaagagtgctattttagggcatttaaaagtgaaatggttctaataagataaaattacatttccatgtagacagaaacaaatttaatggaattttgttaaattgcaccattattaaatgttgaacaaacacccattgatggccacagtgcagcaagtactccggcagggagtaccagatacacggaaacggattctacattcaaagatgtcacaatctcgaaagggaagtagatcatctatgcaactcgtaatcatgggtggaaaacggaacatgtttgcagagaaatataagaaaagcatcctaatagttcataggaaaagtcagacaaataccaaattacaaatgaattct

SEQ ID NO: 124048 - DNA, 1074 bp, Homo sapiens
tcattattttttagtttacagttgtattttcttagatggaaatagacgatagttatgaattcacctctaaatatccttggagaaatcacaaaggtggattaatgggcatcctccactgatgcaggcagaagaacgttgagaacagggcagggatgtgaagacacaaaagcaagaacccaggctcacctgggcatgctgtcttccggggaagaaggcagcaccatggcactgggaaacttggtgaaaaattccatctctggagtcacattgctcccatctggactaggactcagtatcttgtatgagttgtcatcctgagatctcccttcagccccctcatgggaggtttctgtaaacataactcctgttttctatcttctgtttcctctgttctttccttggcaagaagccaggccaaccatggcagttgataatatgttctcctctgagctcttgctatactttctacctcatccattttcctcttcatactgattaagttattatgataacctaattgattcctgttcttctatgttgaacacatacaggaaagtgcatgccccatcattatacagcttgatgaacacttgtgcacacacccaggtttaaacacaacagcagaatatggccaacaccccggagccccactcgtgtctcttcccagtcactcccttcactccctgctcaagttaaacgctgtcctgacatcacagactcatttgtcttgtttttgaagtttgtgaaaacggaatcctacagtatatatttttgtgggtatgtttggcttcttttcctcagaactgagtgtgactgtgtatgtatgaaagattcatcctttggttgtatgaggcaacagttatttcatataaattgctgtttaatgtcctattgtttggctactgtgatgtccactgttagtgaacatttggattgcttccaatgtttgactgcccataagaatgctgccgtgaatagttacgtatgtgtcttgatgtgcagcacgagctcacatgctggttgggcacgtgcctatgagtggaattgctgaggcattgggtaggcacatacaca

SEQ ID NO: 124049 - DNA, 1064 bp, Homo sapiens
gttaataaacgtcgaggggaagctttgatgcgccccatttggccctgagagatgccacgtgatcgtcattttaaatcctgtacgtgtccccgtggacgtggaaacctgaaattaatttcagtagcaagctttgtgaattgtagggattttttttcataaggtgtcttttttgtaattgcccctcccctcccccaccctttgttttggctgcagagcgccatctctgcagtctccccacgccgggttcagtcaggcgaagttgcgttatctgtgatgtgttgtaacaaaaagcgtttatctttgaaacactaaggcaagtaatgagaagagtgaactatatttgacaaagcctttttatttttgtcattacttttttttccaatgtggaaataatttttctctccaccaactggatttcctcttttgcagacaattaaagaattctgtcatccccactgggttctgtcttttctaccgcacttgtccagtacagctacataaggaggcttctcagcagaggagcctggggtgttgaaccagtgccatgagggaatgaattattcaatagatcgctagtctcctttcttaaaattaaagtgtggtgacttgcagaaaagcatctgtgtctaaatgtcatcttcgtgttctagcactcggtttctttatgcctttcagttcctgggcttcccgatggactcgagtttttactatgtgagcatcccggtgcctgcacagcaaggactctcattgggttccacacgtgctgcgcagatccctgacgcagcgttcactgaacctcaactgcaggagcttcattcctgaggacgctgttaccaagaatgacttgcctcttgaagaatgagtttgcaaagccggcagttagattgctgatgtccaaagtaagtatgtgtagcatcactaaagagaaaattcaggattcctggaaaacagttatgggctctctgcagtgttatttttgtaataaaaaacatatagcatatgtgaaatacctactgggtgatgcaggacacatagaaggctcgaaattaatgtgaatcattctc

SEQ ID NO: 124050 - DNA, 1806 bp, Homo sapiens
cggtaccgccggttgggacccaccaccgccagtccagacggaaccctagcaccgcgcggggcccgccctccgacacctccctccctggcggccgcggcagcagcacctagtggagcggcccggaggtgcggcggcgccgcgcggggcggcggcgcgcacggcgggcggcggcgcgcacggcggcgggcggggcgcgggcgggtgcgggcggcgggcggcgggcgccgggcgcacaccggccggcggggctgaggcggcgcggcgcggcgcggactgagccccaggcggaggccaagtcggaggacgcggcgcggccgcggaggcggaggcagccgcggaggcggaggcggccggcggggggtggcgaggggcgccgggcccccgcggacctgtcgtcctcggcccgtcctccggccccggccccgcgcggctgaggaggcgcggccaggaccatgtcggcgggcggccgtgacgaggagcggcggaagctggccgacatcatccaccactggaacgccaaccggctggacctgttcgagatcagccagccgaccgaggtgagcaccgccgggcgcggggcctgcgcgacccccgcccgctgcgccgcgccccgcccctcccccccgccgccgcccgccagccgcggacccgccctcctttccccctcccccctccgccccttctctcccctccccctcccccaggcccaccgcgggccccggcgtcccccgcagcccccgtccccctgccgcggtgtatcccggggtcgcgcgggccgagcgggggctggcggggcgcggcagtcacctgttcccctctccggccgctcacctggtggctcacctgggccgccgcccccacccccgcgagcgcggcgcggccccggcctcatccccggcggcgcggggggcgcggcggcgcgcggggccggcgccctccacctgcagcccggttgtggctcgcggcgccccttcgccgtggccgggatggagcctgtgacgcgcgctgtgcttcgggttcataaacttgcaggctgccagctgggaggggaaagtcagtatcacaaagttcgggaggtgcgggctgcctgatggcacaggcccggagtcggacgcctccgaggaaaggcgcgccttctccaccttcggggccgcgaggaagggccctctgcggcggcctctgcccggagggaggcgccggccccaggctggctccctgagaggaggaggaaatcacgctcgctcctggcctggtaacaatgggggttgtttatagcaaagctgctgaaagcgttccgagcagcttttaaaaaaatgtttgagtccaagtccactaggaagggctccgtggagaggggagggaggtgaagggtcggggagcaaccctgtaaatcgctccgcaagggtcggttccgcgctctgttcattcggtggctgcacagactttaccagcataaaaaaatttcactcaatatttgtgcccgtttaggaaatcattttaatagcgtctatttttgatttgttgtaataggtaatttatagttaatacttgctataaaatactagctcctaggcaacaaaacatgtttggcagatttgaacattcttacgaaatgtaatccttttatcattaaattccactttatgtttttgagagaatttgactattgcttctctgatttcttgagtttttgccagtcatgggaaggactctatttcttctgttttcatctgtacctgtgactgcacttgacgtgggtagctagccatttgtcttaatactgagttgaatactgacacacgccat

SEQ ID NO: 124051 - DNA, 1060 bp, Homo sapiens
tttagtagagacggggttttgccatgttggccaggctggtcttgaactcctggcctcaggtgatctgcctggcctcccaaagtcctgggattacaggcatgagccactgtgcctggctgtcaatagttgtatttttaaatattggtactgctgaagatctgtttctggtgactgatgttttaatgagatggatgattgccaatgatgtatttttagtatttataggcatccctattttttatttttgataagttgaatctcattggtggttataaccttttaaaaatcttttatttcctttaataactggttacgttttatgtttgattcggtgtgttcttgtaagtctgagggacagctcttatctaacagtgttgagtcatcttaagttgaaactacatctaggctagtttcaatttgctgtcttcctgccagtgaaaaataattttattttacataatttgcagacctgatggaaaataagtgttataactgtagacttttataacactatcaaactgtgattgtggttaaattaatagtggcagactagcagaagtgggtctttcatattcttgaaaaacagggatcataaatgattaggatatgataccaaattggtgagaagcttaagaaacgtttatgattgtcattaaggatttgattgagcaattgtagtgtataaagcattatttctaggtgttggttaatctggtagcatagactaatttgtttataaacagttttaccagacttgaattttggtgtaatgtcagacagtgtgtactaataagtaggatagcatttattttgatataaacatgtttctttattataaataaaatgtatatgcaggtagcagttattgaacatatgagactgaactcatttgaaaattattttcaggttagattgagtcttgatttctgctgttgttcaaatgtttgctatttctgttagttttctggctgatagtatataggatatacccattcaccttgtagatacttaagacagagatcaaatgtatctgtctgacctacatttacacttgtaagtt

SEQ ID NO: 124052 - DNA, 1057 bp, Homo sapiens
ggctgagaggtggcaagggagatctttgcctagctgaagtcatctggttgagattttattctagcaaccataagaacataaaattcactaatcattttgacatatgtgattgaccaaaaccatattagaatttaatttagaaagtgaatgtgcttaataaagtgagaataagcatatagagaggtggttcaaatacaagcaggaaggtattttcccagtgtatttccaaaaaggataatttgaagttttatacttacaaatttatgcatgtatgtcatgagtgaaactcttttgaggaactgaaatggaatagtttactatggctggaaaagagccaaaatttttgtgcttttgctcacaagaaatttaatgttaaaattgtatggcttacagaaaataagcaatgtcaaccttggttgcacatgtttacactttgctgtgtttttaggctgaatatacacaacttgctttaccttgtaagcgtcactcctttgtagttagagtggctatgtggaaccctgtgagtacaagtgggcactattaataattataccaggacaacagccataaactggagttgtctcctttaactctaggtatgaacaggttggacttgctggcactgttttttcagtttctgcagtttcaaacttcctgaagtttattagtgcctgactgacctaggctgacaggacaagaccattttcacagaatattcagacttttttgtgggtgttttaaaaaccatcttcctcttcggtagggtggaagcaggctgaaaagtacatattgcagttgaggctagctctagtctagctctgccactgactatagtaacaacagcaggataggttgtttccaaattaggaagtcgtgccttgcctcctaaaactccacctgaaagtgcctttgattttcagaatagaagaaaggttgacccaacattatgatccgtgaaaaaaatgctcatttgtttgttgtttggggggtgttttattggctgagtggtgcagtgggctgttctattcagaatcctagcaagttctcttgcttgagt

SEQ ID NO: 124053 - DNA, 1079 bp, Homo sapiens
atatgattagacatgaaggagctagtatgtttgcttcactatagtaagatacatttaaaaaatatttgcttctttccattattcaaatatgcttattttagagcatttggaaaatacaaacagaaatgaaggtaacaaattacctagtgttctgccatctgaagaaatgagttgcttttcaggctttttttttttttttaacattttattttattttggaaaaaagtttgcgtgtatgtttagctgtatctgcttattagttgtttacatctttagtactgaatcgtgtttcttaaccagccatgcatctgtcaggaatctagtttttaaagtcacctaagttattctgatagtaattgtaatacatcacatgtagtgaacacatgtgatatatacctgacattagtgtaaatgctttgtgtatgttatctttttacgttctcctgtgaggtatgtccttttgctgttcccatttctggatgaagaacccaaggcacagggagattaaataacttgcttcagggtatgcaaaactagtaagccacagagcagtgattggaacccagatcctctgactctggaaccttctcttaagcactatgtttgtaaaatccaaaaatttaaggtcactgcaatgaaaccagtgtttggaagttttataggaaaataatatccaagtagaaaatttggaatgtaattttcaggaagaaccacaggcataatgtaataaaacatctcttctgttttatttggatcatatacttatgtgcatatatatttatttcatacataaatacatgatgtattgattttcatctagactttttaaagccctattataattttatcattgtgatagtagattctgtgttttgtagccaaggtgacacatgccatattttattttgtaactatatacaaaccttgtatcttatatagcatccagaaattggaatatgaatgaggagttcagtgaagaagtcttcatagcttcactgattactttcttaggcctataggaaagaaaggaggtcaagacctacccaaggttcagatgcctttttgacagcattggctgt

SEQ ID NO: 124054 - DNA, 1054 bp, Homo sapiens
cttcgtcctccatgatcttgctttaaagtttgttaaattgcatttaatttaatttctactctctggtcttgcttcatagttttttcggtatcctcttaaatgccccccttcctagcattctgtaaagtttcctattctttgatcatctgtgatgtccataatatatcagttagagtgtttcaatttatgttgctaattttttttttctactactggaaacatttttatgattgttatctattttattacttcaagagcgctctggattctcaccgatgcctttcttcttttgagatcccattcctctgggactttgcagctgccctttcattccttctgtcttacttcccttcctctctgtcctttcttcttacctcccattcactcatctttgggcttttctcttctgttaaaaggcactcaggttttgttttttaattaaaaaaaaaactttgctaaagttttgtaactcttcatgttttgtctcatcattcattaaacaaacatttctactccaacttactgcaggaattatccctttcccccatctactcctgactcatttaacccttgcctttcttgcttctatccccaaaacactgctagaactgcctttcttgatagccttgatttcctgattaccaaaaccagttgcccactgtgggaccataaaaggctttatttaccaccctttttttttcttggtaatgatactagcctctttctggagctattctttccttatctcccttagttgactccattttgctcatgtctcaggacagtgtgtattgtaatgctggattcttgatgttcttctactcattctctcaattaaaaaatgccccataattaactatggggccacaatcctgaggtcaaggaggcacattgataatgactctagctgacataatatacttagcatttattgacttcaaactgtgtatgcttatttagatatttaaaaatttggctggcattcctgggtcacagtatatactctgcaagatgggttgatggagagcctgatttcgtggtagctgctatttac

SEQ ID NO: 124055 - DNA, 1069 bp, Homo sapiens
cccaatatttcatcacctggaggactccagactgctaaaatgcccctttagcaattcctgacctcttctccctacaatatgagaagaaaaagttgctgtagggaaatctactaaaagtcaaggatgtgacagtattcctcactgaattaagcactaagtataagagagctattttattgctaagattgatgaatgggcattagtacattgttaatgcacttaaaagggtattgcactaaacttgagctctttgaggacagagaccaggctgtgtggtcttccagaggaggacacaatgtgcacagtggataattgaagaatgcatgcattaagaaattaatgaaagttgatcggtaaggacataactgtcatacacaaactcagcacagtaaatttgaagacttttatttaaagctttgaaagtctggccccttgctgggcttgtgtagatttctttagaaataggataacttacagcaaaaatttattaaatataagtagctcattgcagatattcatgatttggtagtacattgtaagaaataatagatttattctgagaatatgctgctgcttttcacctggtactataatctgctcatataattagaaccttttgtgttaacatttcaatatctgactaaaggagaaacaccttgggatagttaggctgttgaagactaatgtaagctttttcaggtgggcagtaactgacctgttttactcaaagggaaacttaagttttatagcaagagatatggagagcttgtatttattaagatttatgtggataaaatttagttcgtgttttttgaattgagtctgtagggtaaatttgaaggtctccctttctcctctgaattctagctatccagacatagccactgtaaggaatttttacagtgtgtctttcccagttttgctcttgtagactcaaaaatgaagtgtgtgtgtgtgtgtgtgtgtgtgtgtgtgtgtgtgtgtgttttgagatgagatcttgctgtgttgctcaggctggtctcttaaatcctgggctcaagcaatcctcctgcctcccaaatagctg

SEQ ID NO: 124056 - DNA, 1922 bp, Homo sapiens
cttcttcacaaggtggcaggagagaagtgagtgcaagcaggggaaatgccagatgcttataaaaccatcagatctccactcagtcacaagaacagcatgggggaaactgcctccatgatccaatcacttccctcccttgacataaggggattatgattcgagatgagatttgggtgggggcacacagccaaaccatatcacttgagttacagcggatagcttggaccccattccttttacatctagtaggtagcagtttatcagagcttgggcggtcttttttttccttaaatgaggttcaaatttattaaactctctgtgactggactgcgtggtatcgaaagaagccttggatgtaggtttgttaatgagatctttaaatgttgactagtttagatgttttaagttcctaatttttcatatgactacaaaaatactaaaataattttacttcagtgactttgagaagattctcaaaatgaactataggggtgtttttttctgttttggggataaatgaacataaacaaaactccccgaaaaccagtgcgtgaacttttaaaagttcaaaaataagccatgagctttgtagaaattagccttactgatagttgtaaatagttaaggttgtctgattacttaaaacttctcattaactttttatttgttgtgatgtatatttatgaaatggctttttttttcagtttatttccacaaacatcacagtaaagaaaataattgaagattgaaaaaagtataatatttaaaaaaaaaaccaagttgttttttttttttttttcaatgtatcttagagaatcttctatgagatttgggggaggagtataggatgtctaggaaatggcattttcaggggagttaatctattagaaaagtcataattaaaactctgagttagtagaaatcaaatattgtttaatataattcgtcaactgaatctgcgttaagacattcaataattgtattattgttttgccagtttagttatttgattgatgcaaacctgtcatctgtacaataaaaaaatagtgaggtatgtctatactctgtcagtttgtttaattttaaagctgaaagttaaattttagaacgcttttcatttgcttttttaccgtaagtgggagcagcttttaacttcacgaaaaccactctcctcaaagtcattaaagactttcatgctgacacatccagtcgtttatcttctgatgcagcagcagttgatcacatcttccatcaaattcttccttcacttggtcttcaggactggcctgttgcccagacctcagggtctgatcccaatacacactcttttctccacttattccctaggtgaaatatttcatttttgtggttttaagtgctaatatattccaaatttacatctctaagtttggcccttgttctgaacttcagccccatatagccagtccctcatatctctatttaggtgcactctaggcatctcaaagtgagcctgtccaaaactaaactctgatttcccaccactgcactctcatcggcaccgcactctcatctgcttcttcttcagccctctcctaagtcttagtgaacagcagctcactttaccaattgctaatgtccacagcctggcattcttctggattcctttcttcctctcagaccatgatcatatctaatcttagcagcagattctgtcagctctactttcaaaatatttttataatttaaccacttttcaccatctttgcttcttactactgaattaatccaggctaacttcatatctcccacctgggttgttccagtaacctcttacttagtcttaatttatttcccttgtctgcctttgcccccttacagtctgtttcctacacagacatacacttctaaaccttaagttaaataatgtaatgtttctattc

SEQ ID NO: 124057 - DNA, 2112 bp, Homo sapiens
agtatttgtgggttttttctttcccttgattttatatgtttatctttgtatcatgtaatgtaacttgtggggggggagagatttccagcaacatgtttaggtttagtattgtatgttctaggttgactctgcattcttgtttgttgccgtttcttattttgtgttcaattatagctagaaatgatagtaccttcttcaaaagtatccttatatgagatttttttgaacagtgtaatgttataaaaacccaatcagtgattttgaggtttttgtttcatggaactttacacatcttaccatattcttatcatattctgtatccctgtctttgagttcatgcctattgtgtattccattacttacctaaagaatttgtttcagaatgtactttttagaaatctatatgtgtatgtgttagcctaggatatttatttaacagtatagaagattctcaaaaacaggagttaagagtattattctagtgaacagagtgtttccataaaattaaatgagaatctacttcactgattggttcttttcaccatgattctgttttgcaaagagaattaattaagaaaacttaattgaacagtgagctggtttcattagtgtcacttttcctgtcgaggttctaggttccttttgtaagttactactgataagaatcctcctaaacagcttgacctcctttcagaagtccgtgtgctgatttacacagcttacctttttgtttttctcatgcctggtactaagtgacattccaatctgctgtagtcatttggtaatgcaaagagtgaaactggaagggtaggcaggaggtaccggttggcaccaaatatgcagttcaagatcactcatgataccagggagagaatgtcaaatacttgaaccagaacaacacattgttttagtttgtaaaattccagttataaggcagtaatagtcatgttactctacctcaaaattattttctttctcatttgttcttttcacctctgtcccaacccccctctcgctcatggatgtgttttgtgtgaaatgtgaaaggtcttaagatagtggaggcttgaaaaaactgcctgtgttttaaaatgtgcttgtgtttgtttcctaatgcagtactttgaagatattttaggtttaggtaagttgctttaagtttttttttcttaattggagtaggttgagtgctgtgaattcaatttttagtgtactataaaaagatagatggaagcactttgattataggaagtttctttgaatcatttgctatagtttgagtgtttactttaatgtgaaactcactgtaaatccaagtaaatgctgatctaccaatgttcatgtatataatttgtatggtacattatcttcatcgttcaaatttagaaccttcttattatttcacatacttaaagaagaatcttagttgcagattcaagatgaagattataaaacattttcttgggttttctttcagtattataattttgaggctgaatttaagaacatggttattttctgtagacaccaaaacattttataattttgtgtataggttgatttgggtagatcagttatatcactggaaatgatttcaactctcagaaattgtatttcaacaatataattttttattgtgtgtgtgtgtgtgtgtgacaaagtcttgctctgttgcccatagctggagccgatctcggctcattgcaacctctgcctcctgcaagcgattcttctgcctcctgcattcaggcgattctcctgcctcctgcattcaagcgattctcctgcctcaacctcctgctggggttacaggcacccaccaccatgcccagctaatttcaacaatagaatttgaaatatgtatagtgccattctattttttctacaaagtttgatggttttcatttttcacgtcatatatacagatctttaatatatactctgttattttttgcttttgtatttagttttgctagagataggttttttatacacatacacataaacacaaacacacacctttctttttttaacttttagggtcaggggacatctgcagggtatgcaggtttgttacctaggtaaatgtatatcataggagtttgttgtact

SEQ ID NO: 124058 - DNA, 1050 bp, Homo sapiens
cttccaagactggtgagggctgctgccatcgctttgtgtggggtataacattaatgtgatgagaacaatctcatagaatcagtggaacttctgtgtggtattaacattatgtccttattttccagttgcatatgagataatttgatttacagaaataagcttttagcaaaaaccatgtatactttttttcttattgcatgtatatttctcttattttcccagttagatctaaatgagggaattgcctctgttcagtgtctggcactggatatgtggtaataaacatacagtagcaacaaaatgttgaattaattaaaacaaatgattttacattttgaacaatacatttcagtctgcaagtaggtgctttgtctataaaattaaatgtatatcagaatgcttgtattagctagttctatgaaataaccatagcttattctttttttcatttcatgttttgaagaagaaagaagattggatatagatgagaaacctctagttgtacaactgaattggaacaaagatgatcgggaaggcagatttgttcttaagaatgagaatgacgccattcctcctaaggtaggaaccctcagtattttatgacggtcttggtccagggccaggtctgactgataaacaggagactgatgttttgttacaggagttccttctcttttttgcttctctttataaacccttttaccctcctcccagaaaataatttaaaagaagcctttttctctctactttatcctttatctcaactagtaattccagatattgtttctcaccttttcaaagaatatttatgtaaactcgttactgtgagatttaatgatcaggtgatcagctgcagttattttttttttccaaaatataaaatcagaatagttctaataaggatcaaaagggaaaataacgcttttatatctatttgtgaacttttagatgcaactttggtcatttaaaacgttttcattatgtgcagggttaggaattagtaaactttcttgaatgatggaatagagtgattctacaacttcctaggtg

SEQ ID NO: 124059 - DNA, 1060 bp, Homo sapiens
tttcataaaagccaatttattatggctactcttaacaattcctttaaagttaaaaactactataggcgatttgtctattattcactctttgtttttataattttgttaggtttcttttattcaagttactttatgtaaattacttggagttttatttactgaaaatcagatttcatcatttctcccccagttttctaactggctttgatttttgtttcttagcttgcttgcttgctagtttttaaatgaggtaaaatatagattcggtgagatgcacagatcttgagtgtgcagttcaattgattttgataaatacacccatgtaactgccagctgaatcaagataaagaccattctcattactccagaccttcctgtgtttcagtagctttgttcacatgttcggcagcatgtgagatgaagttacctaagccgtaggcaattttatgtgattctgcatagtagtcaatatggtgataatgttactttcatcagaaggctcaaagtaatggacctgaaaagcaggaaaaagaaggggttatccagaacttcaagagaactctctcaaagaaagaaaagaaggaaaaaaagaagagagaaaaagaggcattgcgacaggcatctgataaagatgatagacctttccaaggggaggatgtgtaagtcagttttggaaatgttcccctttctttgtgctccaaatcagatgtttttgttgcaccaaaattgttaaattttcagataaattatggaaaggatgagtatcagtcaggaaatgtgtttgggtctactcccagctcttctgtgtggagggaggatagagggtcttacctaagcagggttcattgctggcagtgcctgtcttgctgtgcttgggaagaatctctgcacccacagtcttgctagtcttaaataagcaaactctagttaacattattatttttctttttcatcttcagctgggttttttcctcatttctgtggttttggccatgaggcagcagttgtctcatatgtacctcagatacacttaatgcctagtcagaggctgacaaggtga

SEQ ID NO: 124060 - DNA, 1030 bp, Homo sapiens
ttctgagctgtgtccctcagctgttgtggtgtgaacactgagggcaggaacttgaagccctgtctctactaaaaatacaaaaattaattgggcatggtggtgggcacctgtaatcccagctactcgggaggctgaggtgggagaatcacttgaacccaggaggcggaggttgcagtgagctgagatcgcaccactgcactccagcctgggtgacagagcgagactgtatcaaaaaaaaaaaaaaaaaaaaagaatgcctggtgttgcatctgatacctggtgttgctccagtatttgccaagggaatgttgatgttgataagtgtatataagtctatttaataataaactgttctataaaattgcatctgataaactttttaacatctttttcttttcagtaatttttggctgatttttactgatgaaaatgagaaagtgaaagagcaccttaatcggggttttaaagttataaaagcctatcttgggattttattgacagtcccttatgaagtcatttgataatttccattgagtgtttcttctagttttggttttctgttctgttatttcctaaccagttttcttttgcaagattaggcaatacaaatcaggaggtaattattgttttaccttgaaattctttatcttctcagcttgcctttttttttttttttctttttttccttttggagatgaagtctcgctctgtcacccaggctggagtgcaatggcacgatctcggctcactgcaacttccgcctcttgggttcaagccattctcctgcctcagcctcccgaataactgggactacaggcgcacgctgccatgtccggctaattttttgtattttttagtagagacaaggtttcactatgttgcccaggctggtgtcgaactcctgagctcaggcagtccacctgccttggcctcccaaagtgctaggattacaggcatgagccactgtgcctggcccaggttgccattttataaattgtagctgttttcttattctttattcattatttta

SEQ ID NO: 124061 - DNA, 1023 bp, Homo sapiens
tctgagattttagtgtacttatcaccctaaaagtacatttttatatgtgtatttgtgtgtgaatgtggtttttatatgtatgaatgtatttactgatcatagagttgtttactaatgtaagcatttattcttaacctggtgtttttttttcaagcttatgatgtctttcggtagctgttaatttagagtagtctttggaaattgcttgctagagcttttcaaacacaccaagaggctaatatttcctctgttgagtgaaagtatgaattgggtaagctgtacacagtgattccttggcagatgttcctaaattacatgcatctttttgagaaagttttgcacagttgactgccagtcagcgggccatcctgaccaacctgagtctgcctgatgatttcccatgctgctgttctagggattttagtctttcagttgaagaggaggccaccagaccacatcccaaagaaaaccaagaaacacttggaaggcaagacacccaagggaaaggagagagctgacgggtctggctatggctccacccttcctccggagaagctgccctatttagtagagttaagcccaggtgagaaaactggtcacaccagcacacattattaatgtgcatttttagcttcaaatctttgtactttctaatgcatcttcaagtagtcttctgttggctgacttaacatttttagccatttatttttttaaaagtaactctcataacatttatttctcttaaattattaaaacttaaggttgtaaaatatgtatatgtttacataaaaatggttcacatggacaaagatgagtattcagaaaccaaatttagtgtatggacaattttaaattattttaatccctaaaatttttttttccaagataactttagtaaaatagttactctaccaacaatgacaaattggtatttacctagggcagatttcataaaggggtgggtgtgtgtgtgtgtgtgtgtgtgtgtgtgtgtgtgtgtgtgtggctgttgtttctgatgca

SEQ ID NO: 124062 - DNA, 1049 bp, Homo sapiens
gccttcaggtaattcacacagtgggagggaatcacagtgccatgtgacaagtgactctgcctctagtcccgacttctcctgagccctgtgcctgtgggatagcttaacttgttccacaaatgtctgaagttcaggtctggtgccactattttaagggtgacctaagggttggtggcaggcctgaatgcaaggccagggtcttccctgcaccaaagccatgttctttcactaagtcatgatgtcgttttaggttttcattattatgcattgctcacagtcagcatgctgaatgaaattgatctattttccatttatgagaaaataatattcatacataatgatttgttatgaatggataagtactgtatttcccctgggcacattgtcagccaagcattatatactcaatgctgaggttctgctgggtgtggttaggagtttttttgagatgtggtcatgagctcagcattgtcttttggagaaatggggagaaatacattatttcgttctttgctttggatttgaatgtgttctttaaacagaagaaatcagcccagtggggtggtagccctctgtatgattaactcactgttgctgtcctgctgcttggtgactcacctgttgtcctgtggtttcccttaacagtctgcattggtttctaaaacactgactggggcactagtatagtcttgtcctcacaaaagctgatgggtgaagtgtaccttttcttcctttgaaacgtgtctcactgaagttcaccctctgcgtctcttctcctccttccctattccgcgtgttctgcatggtctctctcctgctgatgctgccttcacctgggtcctggcatgtgtcttaaccccagggagaaggaatcactttgcctactacaactatcacacttacgaaggtaatgctatgcttactactacttttataactaaagcactaatagaacctcatgggcagaatagtgttgaatgaccaaatatcttatgtatcagttttttagttgatataaataacctattttaagaaatttaatgtactgt

SEQ ID NO: 124063 - DNA, 2132 bp, Homo sapiens
ttttggcaacggttttatatgttactccctgtgagataactgtccttctaatttggagagggaatggactactgcactctccctttcctccccagctcaaaccaaacatccctttatccactgaatcctgtggccaccatttaggttcttcaaaatctgtaacagctttaactatggtttcctattattactgtgaagtaataagagagcctgggaaggatgtttatctctctatctgttgacaaatttctattaccatggtgaggtgaggagaagggagagactgagaaagcagcttctgtctctccctttctctgttttgaaatctgttgatgtagaaaggtgtgtgatagctctttattgtctcataagagacctttcagaagcattcagaattcggaagaatatgaatgtgaatttttctttcatctctaaacacatttttcatgttctgtttttaactttgcgttgaaatgttcttgtttcacacatgattacttatttactgcttttgctttctttataatttatttgtgtcatttctctgtgactatattgcattcagttttctttatttttatataagtattcactgctgacacatcaagtctttattgattgctaactatggaccgtatgtggagtgatcagtgccagggtaaaaatttttttttttttgtaaacctagccaccagggagctcagagatgagggagataagtagatggaaatcatcatacgatacggttagtggtacaattaatgtaacagatggggtgctctgggagtagataagggggacacatttcttaactaggggggttcattagaactgcctttggtggttaaaacacacaaaatagtaaacattactggaggatttggactcagcaggtctagaagggagctacctatgtccaggaaaagccccagatgattttgatgtcttgttcagatcaggactttagagcagttagagttgaaaataaatgtttcaacacgatgtgaagcagcacagatgatgaacaatttcttaatgggtgttaggcattagtgtctctcaggtacttcagtctcatcttacctttactcgatgtcacagatttctgaagtatttcagaaatagaaaattttgtcattagaatgtaactttgtgtaccctaaaattaacatcagttctaacaggacttgcatttttatggtgtcttttgtctgtgagagtttagcggtaccactgctgagagattttagcagtctcaaactctgtgcacgctcatactccaaactgtttaacgtgtgaaactctcaaagcttacgttcctaattgcagtgactagagattttaacaggtaatggaatcagcgggtttgaaagttataaggcactcataaagcagatcttggcgactcttactggtttggccttttcctaagctttggtgggtggtgtgcttgccacactagactgactgccatggctatggtgcaggtgctaagctctgcagttacatcatcattcatgggttctggaaggcacattttctcatatgtcaactctgaaatcagaatacctcatttttagttaaggtaatgaagtgacattgtcctcatctgggatacagtaggtgaagagtgagaaaacatgtctaggtgtattgggactagagggcttcggcagagcagcttcctcctcctcctcaccccttccctgtcatggaaacacatgctcatataaattaaacattccaacagttcataaaggtataaaatgacaaaaaaaaaaaagccaaaaaacccagtcttccttttactccagttctactccagggagctaaccacttttaacagtaattcttgatcagtaatggacagcagaattacttggggtgatttttcagaggacacatgcttaggcctcatccccaaggattttcatccaggtctggggagcgctatgagaactgcacatttaaaaacctccgtcagtgatttagctgtgccctcaacctgtattgtgttgtgtgccataagggcagcaagaatactgcaggaaagatctggtccgaagggaaggcctgtgtgtctttgatgagcttcatattgctactacagttgctcctcagaatcattaaca

SEQ ID NO: 124064 - DNA, 1010 bp, Homo sapiens
taataagaatgtggtggaattaatgctagtgttagcactttgtgttaatcagaaactgatacgtttatttcttattttgaattttctgtatccagtttgttaaattgtgttacataagtttggagaattttttgaaaagaaatcctgagaaatgagaactgtagtgcctgagataaccttttgtttgttggaaataacatgacagtaatattagactttgcaaatagagctgtcttccttctcttctcacagatggttctgactctagagataagccaaagctttaccgccttcagttaagtgttactgaagttgggacagaaaagttggatgacaactctatccaggtacgtagtctgagcttcctgctgcaactctgacattccaggaggcataacgtattgtacagagcctgccacatggtaatgaaagaaggaattataattaccgacttgtatttaaatataaataatttatctactctgggtcacttttctctgctttagtgtggaaacagcagaatgtgagtttatgttcaagttccacctctagaaatttgggctggtgatgacattgctctgaaactgcttccttttctctaaaagatggtgatgatacttttataggtctatttcaggattacaggatataacctatgcagaagtgcttatcactggaggtctgaccacatagcattaggcattcggtaaattctaattaaatttagcttaatatggttctcaagtacttaaaacagagcttaacacattatttgaataaatgaagtcagaatttgtcacttctttgaagttgaattcaggcgaatcacccttgctctgtacttagttctcaatttgtaagatgatgggttcagattgttaatatcattttcaattctaccatttcttctttcttagcacaacactaaaaataataataggaatctttaatgctaatgatctgtttagatttgtccattaaccatctaacaaatattggttaagatgact

SEQ ID NO: 124065 - DNA, 1205 bp, Homo sapiens
cttaagtcactgggtactaaaaataaaaggtctgattggtttgacttttttttgacagtttaattatttttatacgattgagggaaatccactttaaaaggcactaaaaatccagagcttattaggttatatttgtcataaaaggggtactcacggttttaacattctgtgtttaaatgctgtgaacttcatgatgggagtttctttggtttccttcggtttccagttgtttggcccaggaattcagccccatcactgtgaccttaccaacatggatggagtggtcactgtgacgcccagaagtatggacgcagaaacctacgtggaaggccagcgcatctcagaaaccaccatgctgcagagtggcatgaaagtgcagtttggggcgtcccatgtatttaagtttgtggaccccagtcaggatcatgctcttgcaaaaagatctgtggatggaggcctgatggttaagggcccaagacataaacctgggtaaatagattaaccctaagatttaaaatgttttgattatacttaaagtagttcagattattcatagatatcttggctttttatttttgtttcaatttttaaaaaaatatcaaagtgaagtttgtgattttggttcctattgttaacttgggttggttttagaggaaagaagaaaggtcttgactttgtcttaaaattggaatttctcactggttttaaattgtttatatttaaactttgttttttagccagtatactaaaacagtaccttttcttttgtgaaaaaaacatggtgttctttgtaattattcagtgtaactaagattataaaattttttgaagtattcttttctgtgactgataatgaaacacattaagatctcttaaggaattcagaatattttagctccacctagtgcttttctgaagacttgcattgtgggcttagtaagggaaaacagaaagcctttcttaatgactatctagtaaaatttttttgtaggtagggaatatgacttctcctttggttttactttttaaaacatcctgttaagccacttcattgtctatttttcatgctgcttaaaacaactgaaaactcccctagattgtaggctttcttcctgaagcacagacatgaacccgcgtggtcttccctgcttggcctttcccattgttttgttctacggcatgcctttgattagccacccagacct

SEQ ID NO: 124066 - DNA, 1120 bp, Homo sapiens
ggaaatttgttgttctaggatgataattgtaagtggaatcaagaaggctttgattctactcacatactacccacaagaggaagttaggggtggacactgctgtgtgcagctttggtaggtggcagagaagctggcctgctgtcattgttactcctgttgtcagagccgatagctggactgaatctcccactcaaactgatgggagccagcagggcatttccatgtttttgtgaatatcttggtgatagattatgagtatttaatttcagaatattggtaatatattgcagaaagttgtgtgcagaaaattgacaattatttggcctttagtaaaaacttttactctttcaaaagttactattttaaagcatggtattattttgcattacaaaatggttttattttcttagtggtgagatagaggagaaatttgtacctgctcttctaatctgaaaagttgttttcaacttttacattacttccttgtttctttctattggttgagtgtaaataaaagtttcccattaccatgctgctttgaaattagaccatatattaatatttttcaagtattataacgggacatttcattctttttaaattatgttttgcagaaatccaggaaatttaaatactaattcatccttgttggtttccaggtgtttttagggcttttttttgtggaggtggggagggcactctccaatgagctgggaccagtgagttgcattcacccttcatttgtgctgaagaatgtagtcggtcccagcttgttagactcttcaatcttcataatgagattttgcttatgagttaggttttcaaagtgacatatttagaaattttgatattttgagatatttgaagaatcagtttaaactaggataatttttgatttgcatgctaacattatcaaaaatgtcccactttttaatttgtagcctaagtagtgatactcatgtgctttacaaaaataatcagattgactttcaaataggagagaagctcaccgctgttcctcatgtgtcactttccctgtgtccataaatagggccgccggcacttcaaccttgtacacctcatttatatgccatttgctgcctggatagacttacataat

SEQ ID NO: 124067 - DNA, 1084 bp, Homo sapiens
aaactcctatgatcctggagtgttctcatcagcatcaaaacacgttacagtgtcttctcttttagaaaactctttatacccctccagttttgaccccatttttctactcctgtttgctacacagcttcttggggaaaaaaaaatcatctatgcttgctccctccacttccaaactctatgttctttcctctgctcctgttcattcttgcccctccctccacagggactgtctgtcagggggactgatgacctcccaggtcccaaatctggcacgcattttgtcctgtcttacttgttgcaggagtttttagccaggccacaaccacgtacttgatgcactttcttctgttggcttctagggtatattaccctcctataaaccacctagtagtggtttctccttggtttgatttgttggtacctcttcctcttatgcttcactcctaaagtttggagggccagggtttcagatgtagggcaccaatctgttttcttcctgcatctttcctaggtgagcttaccctgttgcctgagtttaaataccatctaatgttaattatccactaatgtgtacctttggttctgacctctccagacgcatatctctctctcttttttttttttcttcctgagacagagtctgctctctctcccagtttggagtgcagtggcatgatctcggctcactgcaaccactgcctcccaggttcaagtcattctcctgcctctgcctcctgcgtagcggagattacaggcacctgccaccatgcttggctaatttttgtattttttagtagagatcgtgtttcgccatgttgcccaggctggtcttgaactcctgagctcaggcagtctgcctgcctcggcttcccaaaatgctaggattacaggtgtaagccactgcacccagccccgattcatatctctaaaggtttacttgacatatccacttgcatatcctgtacatatttcaaattaaatctagctaaaagaagactagattttctttcttaacaaactttccctgatccttccccaccttagaagacaatactaccatctgcagcgttgctccaatagaaac

SEQ ID NO: 124068 - DNA, 1892 bp, Homo sapiens
ttaacgtgtcaccttaatcagaatcctatttccttgtgacctctagaattatttaaatgttgcagagtaatatctttgcattaaacatggtggataaataacagatactgactagtggaaccagcagcatgatttggtgctgaacacctctaccccagagctctgcgggaactcagacagaaatacagaaagactgcatgacttctatggcattctcattatcagcagtgaaactggcagcattccccctttggggcttttcagatagatttttgaagaggccattgtgtttccttcaaagatccagtcagtgaggcagttagatgaggcaggcgacttgcccagggtcacctatcagttcagttgcaggtgacgaagacacagttcttcagtttcccaacttccagcagagggcactggatattgcaggattttaatatcattcatcaccagttatacatgtgtagactcataagggaatcccaggttttaactttatttttattgtggatttttggttctaatgcaagatttttattggctatgtgaatcttattacatgtgataataaatagtttactttccgtgtttgtacttgtttttgttggtggattatggagtaggatgttcagaatggtaaattggtattgtaaggaatacctctatgtatttctaaggtgtgactgagaagtatgaatcatagttcttagctcataaatatttgagtaaatgaattcgcacgagggagtggattgattaggataatgcttttaatatatgcaaaattagtgattaatatagtgtcaaaatagtaatatggttaattgtatgtcaggaattattttttaccataaacacataatttaattttacaaggtaagattagtttgcagagttattaaaggctttattttaattataaactatgttgttttgttgctattactacaatgatgagaacagatgagcctttctgctccattctttgtttttcacatgggcagtgttataataagcactacttaatttaactgatgcagtcatgaaaaatttaaacgtgtttaaaatgctaatattagtgaaggaaaaaacccttttgaatggaggggacgacttttaattgtcactaaatttttttttcttttatcaatgacaatgtaaacacttttttaccagatttgttaaaatataattggtaaagtttactcaggttcactttatgagatatataactgcctagctacaattttagttgtctgtaaatatgggaatgtaagggagatgtgttaaaataattgatcatttaaattacattgtttatagaggcatttttcttttccttaattgttgagttaaatcattagatcataaactaaataatcaactctgaaacatataatttgataaaaagaagatttgggttgtatttattattagtaaaatatttggttatatttttattattttgtataaatatattcatttctctttattcattttttggtgcatggagaaggtgaggatggagggaagagaatggtttgctgttgaaaaaaaaattagttagccagtctgtaaactattataaatctgtaatcatcataagttattcctttttatttttgaaggaaagttttttattatctatattaacttatttaatgagtggaccagcaattccaaatacttaattctggccgtacagtaccagttgtctaagattaacagacacattgctgctgaaatgactgttgttgaagtcactaatgagtatttctcattccaatatcaagataactgtgttgactttccatttcaccaaataagatttatttgagtaagtattagtctcagtttaagtcaatatttaactcagtagagatgttcatcac

SEQ ID NO: 124069 - DNA, 4729 bp, Homo sapiens
gacagttccttatttgtgtagtgtcaggctaaatggtggaagggacctggaatttatgtgaccgtaagaagaaatgtgagtgagtagaacatctctttataaggcatgcgtcactgtaagcattggaaaatgatgatagtaatggctgaaggagacttgccgtggtcagcttgtctaaccctgtgtcagcagagaaagacaaagtccaggtcttaggaagcttttccctttcagtataagaactccgtttcaagcttggcatggttagtttttctttgtgtcacttagtactttgttttcagtgttacctgagccatagctgtagcagatgcaagacagaccgatccctgtactagacatgaagtgttcattaataatccagaatcacgtcagatctgctgtcatggcggcggcatatacttcaaggaactaaccttcttagaggagtcgtgataagatcactcccaatgcattatttgattaggctacatctgaaaacaagggatattttattattttacgttggaaagattagtatatagatttaaaaagtagttgcagaaatctacacaggttgtcagtaatattgttagccatgtgaccttattttaagtgatgtcagctttcttcttttagaacacaggatgcttctgggcctgagctgatactacctgcaagcattgaattcagggaaagttgtgagtaatttcagatttcattgtcaatgaattatttcttgatccattttactccatctgattttcacattcgtttttattcttttttccttttttctttgtttttgaaatctttccacagctgaagattcatttttgtctgccattataaattatactaatagctctacagtccactttaagttgtcccctacatatgtattatatatggcatgccggtatgtattgtccaaccagtacagacctgacatcagccctacagagcgcacacataaagtcattgcagtcgtcaacaagatggtgagcatgatggagggtgtcatccaggtacgttccagccggccagccatgctcctccagtgattgtggttgtaattgctaagccagtgaattcagcttctttaaggcttctcatttggttacaagatttttttctaaaataaaagttatgtaaatattgtaggaaaatgtataactttaaagagttgaaaggaaatgcaagcttttttctattttgttttccctgtaaaacttcagcataagtgaagttaacttgtagtaatagttgtgagaaagtgctgagactgttgtgggcttttgtagaattttttctgtaaataatttgttgagatgaagttcatataatattaaccattttgaagtgaacaattcagtcgcatttggtgcattcacagtgttgtgcagccaccacccctgtcggttccaaaacgtctccatcacctcagagcgatacccctcaagtagttcctggggtttttctcttcccccgttccctggtaacgccttcttagactttttaaaaatggttctcaaaagtcacttgctcctgtgtaatgagcctagacgttggtagtaattgggctttttgatagcacatgtgtaggtgtaatggacattgtaacatacttctcacttaaaatgaaattctgtcataaacctgttttcaaaatttcagaagataaaggtattttgttggtagaatggtttgactcctttacgtactttctgtcccgatctacagttgataaaattttcatagcagtttttcatctacagatgatttgaagatttaatctttaaagttcttaaaagtaaatgtacagattttttcagtttttctgaatcacttgtcaatgttgttatttaacttaataaaactctagttatataatgttaataacatagatagattggttgcttttctcctggcaggatcatttgagggaaactaagatcttttagttccttcagaattgttttcaaaggccagaatttttcaagaaatgtttcttttatatttgagtgattagcatgagtttgatagggttatgcttcttttacccaagttaggaaataggtaaaaaagaaagtcattttatttggataccgttttgttactttcatgtcattattttataaacaaacatggatttccttttcagttgtcattcaaagccattgtctgtcttctatcatgtttggacttactaagcctgtttcgagttgtgagacacctatcataaaactacccttgatagccttttccttattgatgtgaactagtcagtgaaatcaccattatcaaacaagtcttttaaacttcagatttagggttagtatccagtggggggaatcttaaagtagtggaaaagaactgtggtagtgaataatttaaattctattttcaaaaaacaaagaatttgctccctttagtataggtgtaagttatttatacacttttaaattctcatcttctcagcttttattttgattgtttcttggtctttcctgtctcttccattcctattaattaatctagagggatggactttcaccttattaggtaccttttaagtaagtagtaagcacaccatatcactgaaagatgttcgttcacaagtccttccattgtaaatcttttaaagagatcagtgtgttcatgtgtgtttatggtaacatcatatttattgataaactctaaaaatacagttagttattgtgccagtggtaagaacataaaactaatcctttaggtcgtatacttctaaaggtgcttcagaaccataaatgaaaatgttattttgggaataacataactaaatgtcgtaccttcatgtcgtaccttcatattagtgttttgatttttttaaactatcatgattgtttacaagtttctttctctcgttctgcttgatttcccctcgtctgtttttctccaggaagtagaccaggttgaccaggtaggacatctgctgggagctgatcctagctgtgttgcttagccaagtttctcatgctgctcccatgtcaaataagtaatacaacagctggactgaacagctcataacactcattcagcaactgagacatgcagtactaaaaccctttttgactgtgcaacctttatcggcatttcataatttctgcttaatgcacttcagtgtggatatgaaatgacaaaagttctgtttcttctctttattatttatccttggttcctattctttggatctcatctgaggttgcctggcctgcacatgtggtcgggagaggatgtgatagatcagtacttgatactgagttgcatggtgtccaagccagtgactacaagtatcagggtggctgtgggtaaccatggatacatgtatgtatactgcacagactaccagataatgcacggtctacaatttggtgttatattatttgatatctccatttctccgctgattccatctataaattgtagctaactgaatccatatgtctatgtgcatgaatcctaagaaatagttgcagtggttatttacttcccattgctatgtatgcacccaaattattttgcaaatatctggtatctgtggtaaataccttggtgaaatgggaaggtactggtctatcttcagcagcttttcaagagcattcctttatatttttattacttttgtttattctctgttgcttatggaagtgtgttctgtctacagaaacagaagaatattgcaggggcacttgccttctggatggcaaatgcatctgaacttctcaacttcattaagcaagaccgagaccttagtcggatcacactggatgctcaagatgttttagcacatttggttcaaatggcatttaagtaaggaacacatttttgaaggcggcactactctaaataattaagtcatttgttttcttattcagttttccaaactaattttaagatttatatttaccttgattgaaggtgaatataaagaagcatacatttttgcaaaatgtattaactacctatagttatatccttaatatagttatactgaattcagtgagctatgtttcaagattccacattttttttttaatggaaaatattttttaagagtccagattgtttcccatgtgataacatgtctgacaatagctgtctgtcatgctaagattacttaaattgtctatgtattttcagatacttggttcactgtcttcaatcagaacttaataattacatgccagcctttctagatgaccctgaagagaacagtctgcaacgaccaaaaataggttaggatgttttctgactgtctccctctatcccgcttccttcacgtttagcatcattttaatgcttagcgtaggtaagtggaggtgtttttaaaataaatgggatgtccttttgggtttggcaatctttaataaattttaacgattatttgttttgtttacagatagttctcattttggtgtgtcatgctggccatactctttaaaaagtctcttaaggccaaactaatgatgttaagtgtaattagttaataactatatgtagtttaagatcatgtcactgtttcctcttggaatgaagttgatatttttaaagtaattaaacggcacttactaccataggtaccattatctaaatctgctgcacattcaaaggcttcttcctggatgacattttgctcctcttgtcctctcaccctgtctgggcagatgatgtgctgcacacgctcacagga

SEQ ID NO: 124070 - DNA, 1048 bp, Homo sapiens
ttacgtataatttttttctccatttttaaacctttttttaaaagagatttagtatagaggctagacagctggttatgaaaagtcaggacgatgaaactattcatacaccagtaattggtcatctgaatggtcaagtaaatgtttagctttggaagagagtttttaaaatgctttacgaacataaatctaattatacatgcacgtcataaaattaagagggcatctaaaaagatgccctttacaagataatgcttttagttctatttaatgtatatagttactgtaaatggaagtctgtttcctgaaatcattctgcatttcaaagttaaattagcaagttatatttttataaatattacataaaggataatatttttgaaataactttacaagtgtgatattttatgtcctttattcttttacataggcaacgactttgcttaccatggataagtatgcacctgatgacattccaaatataaacagcacctgctttaagttaaattcattacaacttcaagccttattacagaactatcactgtgcacctgatgagccttttatcccaacggtgagtggatgttgccacattaccacacagtgcgggacatgtttgcatggggacatttggatgaaaaaacaaaaggaaatcctatttaatacgttaacttatttattctcatcttacaagatcattttcgtgttgctgtccaagagttcaatgaaaaaacagaaactatactcctaagtagaaagggattttattcaggaaattaggttcttgggaagtcatcagaaggactagaggagaggaggttaggaggctgcccaggactgttgggttccagtgtacgtagccacaactgagtgtagagggtgggtacctctgtcacagatcaccctcttacagcctagctgaaatgagaggcttgtcccttctcatccagaatggagccaggagttttggtatgcctgcctctcagtaggagaaacagagggtgagaaatagtatctaccactgttagctatttataaagagaaatactgt

SEQ ID NO: 124071 - DNA, 1430 bp, Homo sapiens
tccaaactggcaaaaatactgggtagatatttgattccggtcttttatattttacattgtgtgggcttttccctatatcattaaacattctatacaaatatagttattaacagctgaaaattaaagaattgtgtgaggaaaaaaatgattagaaaagaaacttcttgtgattgaacaatttctttttatttaaagctacacgttacttaaaattagtaattaaaatcttggttcatctataaaatgtgtgcggcccagagttgctggctttagaaaactgatgatgggggtactcctgggacctgtgctccctccgtaaccctgcgtctgtctgtgtgtgtgtgtgtgtctgtgagataagctgtgctgcagtgagcagacagcctttgaatagttgttggtcacatgcaccaggcagtgagcatctctttttaattttgcgtttgttttccaaacaggatcttatagaaaatgtagtgactgtggctgaaaacactgccgatgagctggcccgcagtgatggaagggaagtgcagttggaggaggatcctgatctgcagctgccgtttcttttgccagaagatggttattcttgtgatgttgtcagaaacattccaaatggtttacaagaatttttagaccctctgtgccagagaggtaaattagtctaaatgcctgagtctgagctacgccccaggttgaagcgagcattttattcattgtccatctcatagggtagtccacttgtgtgggagtgcaccctcgtgctgtctggagaagtccgtgttccactgacttggagaaatatttcatggtgatgtaaggtcagaagtgtcgagacacagagcccttgggcatgttttgtgaccctgtagtgagcatctgctctgcgcacttgatgtcatggttacattttctgcctgggctgataacaaggaaccgtttattgttctcccttcttggtattttatgagcgtagtaggttgattcattcctttagcactaaattgtaaactttgttgataccagcatagcagttaagagcaacacaagctttggaagcagactgcctgcattctaaacccacctctgtcacctacaggctgtgctgccattggcaggtgactttggcacctcagtttcttttcagtgaaatgggcatgttgatagtacccagctaagagattcttgggaggactgaatggtttcctgtggagcatgcagaactctagcacagagcgagtgggtgtgagtgctgctgctgctgtggccagcactgccaagctggcttgcgcctgtgtgctggcaagacccaaactccagcatgttgtgtgcttttctgtgtgaagggcttatagccctgaaaggttcgaatacaactgatttcctggattttattatgtcacttttactacattttcttgtgatct

SEQ ID NO: 124072 - DNA, 1071 bp, Homo sapiens
gagtaatgaggaggactcctagaattgttatacaagttacccagtaatttgaatgtaagtagttgaaccgagagtctgacgtgctggcagacaccccatgctcgtattgttttctggctccttccctcttttctttccctttgctaagtaggtattctgaatgttattaaggatctcttagtgtagtggagtaaacggttctgcaaggaagtaatgacaaggctatttggtaatttcttataggagtaagaaaaaagttcttttggaacacagaggagtgggaggccaattttactttactgcttggtgctgaaatgctcttggaccaaaacaaatggataattttaaatgtctggtaattcagtttgcagaggggattaaaggtgtagagtaagaagaatcaataccgtgtgttggatattaagcaattggtaattaatcttgcttcctttatcttgacaagatgtgctttttcacttacaatttgcttgtttcctccttaggattttgcaggttaattcctcacacacgttcaccaggtacttggacaatatattttgaaggtgcagattatgaaagtcaccttctgcgtgagaacacagagctggcaagtattttgagggtaccatgaagtgaaatggatccttaggacttgaagatgtgatgcagatttgtttctttcttacactgaagattggtgtgatggcagagttttaaaatcgctgttaaatactgatattcagaaattttcaagccataattcatatatatgtattttttcctcccaagccatgtctattacagttttgtctgtaagcagtggtgctttttaaaataaagaacacttatacccatggttgtaccagtcttaatacatattttaaaacatattaatatgataaccttaaaatattttcttaaaattctttggcagaaatatttcattcttttatagtcagttctgccttgtcttaaatatatatcaagccatttagtaatattttatatctttttgaaagagtggtaaatcccaaaatttcccagtttcatacatgttaagaacaattctac

SEQ ID NO: 124073 - DNA, 1110 bp, Homo sapiens
ctctgggtgttgctgcatgagtcctgcagcggccctggtgctgtgatttaaaataaaatgactgctgggttttcgcaagagacaaagacgttaggtcatctttgttataaccattttttgcagtcctccccgtggatagtgtaaaataagtttacatttcttctttgaaaacacaaaaagactggtaatttattttgaaaggtaataaagtgaaaattgaattttttccttacgatcaggctttctacctgatagtaatgggagtttaattttgtttcataaactaagttcttcaaatcaatttaaatagcatttgtgactaaattcatctttaagacttgagtcaagaatatcgatttagtttaccagattaatacctgaagagtatctatattaattgaaattttttttactgtttatcttctcatcctttttctttccccatttgctccagtgaacatgattgactagatcatgagttgtctaaccatacagaagcacttccatttcagtcataaaataaacctttgttttcatcctttaggctcagcctctgaggaaagaacctgaaataatcactgtgaccctaaaaaagcagaatggaatgggccttagcattgttgcagcaaaggtaggccaattagtcacgtgcgagttgttctctccagtctttcggcattgaatcagtggttgtcagagtggatcgtgtgggagtactttaccacctgtgtataacgtgcctgttcagttctgtttctgcgtaggagaggaatggtgttacatgaatgaagccagtgtgctcactgggcccaattagttgagggatgatctcctactctgagaatgtagctagagtgatactttgagattgagcagatggtgctcagaaggaaacaatttaaaggcatagtcaaaacttgattcgcacagtgaggagagaaagcattgctacagtagaaaactgcatcgtgggagtggggcacagggctgtcacctcatcatagtgggccactggactcctttctcagactccagtgcacataaaaaccgctaaggactttgctacacaaggagatttctggttctcatttccaggtgccttccagtaag

SEQ ID NO: 124074 - DNA, 1050 bp, Homo sapiens
ccccgtgaaggcgggcatcttctcttgtccactattgaaaggttgacagtttctggttatggtaggtactgatacatatttgttgaatggcagtttttggattggcttatgagttgcagtagtggatgaaagagggaagtatgatgaatctcaagaagatgaatcttgattctgtcttgagcagctggacatatggaggtgtgatttacaaaggcagggaaactgaagggggcaggcatggtggcatcaggagttcagctttgaacatgtcacactggagatgtgggatgcctgttcaggtgagtgaatagattatctagtagatagttggatagtgaagctcagaaggttagagctagagataaaatttggatgtcagcatatagatgctctgaaggaaataaagaaaatggcctgttaattggacagtgtaacattttcagaaatgaagcatctgttaatgccttttcttgaaatgagagaaatgaatctagcagttccctggcatactggattactaaatacagtccattttttttccagtttacttgtaatttctggtacttggaaagtcatctaatacatacacactgccgagataacactgtatagttgataggtatgtgggtctgcttacatcattataatagagtggaggtatttttgagatttcaggggtgtattctgagtgcagggtagggcagtatacagggggatttcaccgttagccctgccctgcgtcttactgagcgtgttggtgtggcagcatcacataggattctgtttatgcctgggcttttcagtcacgctgctgctgtgcatattctgctcctgccactggcagccttggagcacggagcccatggcaccccctctcaaagcctcagtttccttgcctttaatatagtagtaatagttatagttacctcagctcttcagagagagaagctgtgtcaggcatgttgagcctggtattggataatcacctgctgtttgtattcttgttagtctcatgagtgtgtggtatatgttttttctgcagaggaacct

SEQ ID NO: 124075 - DNA, 1049 bp, Homo sapiens
tagcatccagcgcagaatgtggtgatcccggtcttgaaaaaccagctgtcttggttgctgttgaaaactgagagaagtagacggttgattttcagttcatgaagttgttgtggtcccggaaatgaaaatgtggttctctgttgttggaagaacacagtcagtggtgagtttcttcagggggcagttgccggtgttctcgtgctcactgtggtcttgaaggaatgctttttctttcagtgtaacttgtttaaacctgtcaataattaacttgctcatgaagcaacaaccgtttaatgtagcttgtaattacacactctttttttgtttttgctacttttgtgctgcaaattcttaagcttcataaaaacataagccttctgtatgcttcttatttaagaaaacagccatgatatttcatcctgctgggtataatatggtgaaggttgctttaaatatgataactgccgctatgtaacttgctgaagacatggacaagaatatctatgatgtaacctgtatttggccccattaggtggttttaactacagcctttctctaagacctgttttttctaaaagtgaacataaaaatgacacttttaaaagtacttaggatattttactattttatttaaaaataaatggttaattaatgccttaagtatgttcaagtttatgcttttagacaatgtactgatttaaagttttaaaatcttaaaatcttagcttaaaacataagattcctatgccctaaaaatgagatggtaaagactgtttattaacatgccttctcactgtttagagagtcagtttctcgcataaactgtaatttagtcctttgaagactttgagaccttctcttgtgttctttaatggtctaattatgaccatgtgggaaacacctagtcaaacaaatgaagtcaggaaattccgggttcctttttagtcagttccaaagacctattgtgcttacatttcttccacggagatgccagaaacatctttccactaagttgtatgaagtgacactgcccctcatggcttcttatg

SEQ ID NO: 124076 - DNA, 1068 bp, Homo sapiens
gtgtagagagaacatcaaccaagtcatgaacatgagtcagatagaatgggaagaggtgaggggcgatttgggtggagaatgacgagagaggttcatggagctgtgaataacttatgcaggaagctgctgtgaatttttacagcagctggcagttacaagagtctggtcagcatagtgtgagctgagctgtgcttcaggaaatgtgattggatttagagagaccagaagatcagtcatgaggagagcttcctcattttgccagaatttgtctgaaatttataatgtaaacttcaacctatttaaagatagggagtgcagtcaaaatatcagtagtacatgatcagttttgcttcaggatttaaatttaggcattaaattttctattgcatatagtatgataaattacctaccttaaaatggtagaggatttcgggttctttaaatgccatgtgctgttcatgtggagtccacatgttcagcttgcacgttggctgtctgcttgtatagggtggctaggaaggaaaagagcctagtggttgccctcaggtatgtgattactgctctgaatgaaggagttgaaacatggagtaacaggtgccacaaaactgaagtttattgtgaaactggaacaaagacatcttccaaaaatgaaaattgggagtggcagaagagctgactggcaggcagcaccaactgtgtgtgcaggggcttgggttttagggagaaatgaaacagtcctgttttcatttctgatatcattctattttatgattttaaaaagggagttttgttattacagtttgtctaagtaactgtcatttttttggtctgtattaattgtgatcatgtaaaacataccagaaatggaggaaggaggcttgatttattgttctaaaatatatatttggtatttccttgtttataatagtgtcactaaaaatgctgtattactaatattattgctaaacatttttcttgtcagagatgataataattggttatcttagtaaagggatgatttttattctttacaaggtcagtattacattaaccggaagataatgccat

SEQ ID NO: 124077 - DNA, 1816 bp, Homo sapiens
tacatgagttataatactgattattttctgtatgattttctcttactaagttcctctgtttgccacaagaagtttttttatcatttaaaatcttaaactatacgtatgaaaagaacaagggtataagggaggatataggtaaatggtgaaatgtaaaaatactgtactaggttgctttttgtattaaaatgattgatagtatatatcatgcaggtagtttttagtttgcttacacttgtggctgttcagaactattcttaaattaacttcaggattccaagtctctattttactctcatcattaactgatgcatgaataactgatttttcatacttgtaattttcatgtaaaaatgagaaccaggactttgttgcagttatctgtgtacatgttgggtggttttatttttgttttactttcctgcatagtgcatttcttacaatatatcttcaatgcagtgttttcgccttgtttttgcaatagggtgctggtcaagataaactaggaatctatgtgaagtcggttgtgaaaggaggtgctgcagatgtggtcagtatcattttgaaagaagtacattttcagtgtgtcatatattcagcaaatgatgtgagagattctgctgatacttctagttatgtagcactatagtgcttgttggaagaacaaatagagtatctactcatcattaccttttcttcctcccgctctctttgctctctacccctaatccatgcacacacctgtggatttgcctaggatggacgtctagctgcaggtgatcagctcctcagtgtggatggacgaagtctggttggactctctcaggaaaggtatcattgatttatttgcttgaagcatagtattagcatttttaggtgatttttgcattaaatgttgaaattggaagataaaaactatgctaaaacgtgctcatattactctttaccttttatagtgtacgtgacatttcacttgttatcaaattataaatatatattttaatctagtacagtttctttgaaacttgaaagaaacatactcaacacttctttaaatttctgaatattatcttactattcttaaaatgataacaggagatgtgtttgcctattttcatagtcagttttcaaaggagaaaatgggtagtgagtaagctgtctggaagtcagaaccattactcaaaataatagatgaagctgtgtaacatgattttccattgctataatcacagcgattcatgacagagcaggcactgcgttttagtctttcttacatgtgtaatcttcttctcctagggcggcagaactcatgacaagaacaagctctgtggtgacactggaagtagcaaagcagggtgccatctaccacggtctggccacccttctcaatcagccatcccccatgatgcagagaagtaaggaccagtagggaaacaacagtgttttacagtcatggcctctttgaatggtcacaaaacccccatggaggaggtactggtgttactatcgccccagttttaaagagaaagaaattgaggatgagagcgcttcagcatagtgcctgggattcccatgtgaaccttctgaccttggagcccacactgtgagtcaccaggacccctccctgtcaccaggagccatttaacttcacccccacagggctggttgactgctggtgagcttccataggcccggcacatagtaggtgctcagtagagaatgaatgtgacgtgttaaggatgaactgggaaaaaaactaaagaatgaatgaatggattttcagttttgataggcagactcaggatttaaagtgttt

SEQ ID NO: 124078 - DNA, 1627 bp, Homo sapiens
gtgattcatagcacaacttgttaaatgtatacatagacttctaaatatggcctttatggctttctcctccgtaaggcaggattctagaaacctcacaacccagaacctcaagttggtacctaatagtaacaaatcacagccacagccaaggcatcagagaacgtgacttgctgcttcttgaagcaaacacacaccacccaaggggcagctcaacaaaacctcgtgtggtattgtctgccttgctcagcatgttgtttactttttatgtcacgtagaacttaacatcttggttgtctaatttcttagttagtggtcatttaaaagaagcaaactagaatgtgagttagaaatcacagagggaagctgtgaatagtagatgataaaccagggtgagcaagcaaaaaggaggagaactgacagaagcggccgccaggagcggaaggctcacgtcacatgacggctgctcagaacgatgacgctgggcgattaaaagttcagatatttttctacaaagtcagggaaacatatatatctttattgattttttttttaaagatactttaaaaatggttagatttgttgcttaaaatagtgaagtttcagttaatgagaaaataagctttgaaagtgtttatcttcccatcattactaattaagtaaaaatattttctttattctcagtatatttacttaaaagctgttttatgattctgtaggaagaattgacctttatcaccttatttcttatgctaagaacaattcttatggaattttaatgataatcagggtgttgaaaataaaatcttaagagatactgaatatgctttgattccagtttcagatcgtcgtggctcaggtaaaccccgaccaaagagtgaaggctttgagctctataataattcaactcaaaatgggtctcctgagagtcctcagctgccttgggcagaatatagtgaaccaaagaaattgcctggtgatgacagactgatgaaaaatagagctgatcaccgttccagccccaacgtagcaagtaagagtgacacttttttgcttcctaagtacacttgtgatcacagtctgaagtgagaggaggcactttgtggtttgttaattattaaaattattctctgcaaacattggctaactaggatatggttttcataagggatatcataagtaacatttctctaacaaaaactaagatggaaaaactttagattcagttgatcccataagcaaatacattaataacatctctatttggggttggtaaattaccaagagaaactaaaatatgttttacatttttttttttttttttgagacggagtctcactctctcgcccaggctggagtgcagtgcagtggcgcgatctcggctaactgcaagctccacctcctgggttcatgccattctcctgccttagcttcccgagtggctgggactatgggcgcccaccaccacgcccggctaattttttgtatttttagtagagacggggtttcaccatgttagccaggatggtctcgatctcctgacctcgtgatctgcccgccttggcctcccaaagtgctgggattacaggcttgagccaccatgcccagccaatattttttacatttttaa

SEQ ID NO: 124079 - DNA, 1945 bp, Homo sapiens
tttaatatactagtcaggtaaatcagttttaaattaataagtctgggcaaaatgaaatgttatttattctcagtatggatcaaacactttttaatgcagtatttaacatatactattttttaaattttaaaacagatcattgaaaatcaagttagtctgtatggttgtaaaaagctcactttttttgttcttcacattttacaggagcagacgcctccgcctagacctgaagcctaccccatccccactcagacgtacaccagagagtattttaccttcccagcttccaaatcccaggatcggatggctcctcctcagaaccagtggccaaattatgaggaaaagccacatatgcacacagatagtaatcattccagtattgcaattcaggttagaaatcaaagattccacacacttttctcacctctcaaggaggacacactgagttctgagacacaattaatattttctatagaacagcattgttggccttttgtttttcctttaatggttttgtggttaagtttgaggaaaaaaggagacaggatagaatacttaataagaaaaaggattatctgttctctgatgtttgattaacaaaatgttaggaatataaggccttacaatttttaagacaaagttcactgattctagaagtgagaaattagaactcaagtggtgtattttgcactgtatcaggagctatccctgcctgtgggagctcatggtgtggcagggaaatgagacagacacaacagacacagcatggtcagtgctgtgggagaagaggccccagcaggggatggagcttctcagtcttggacgagaacctgggcacagctgtatgcacggaagggccttccaggaggagggaaaggcacagagatgtgtagtagttcagcaggaaccctgggtagaggggaaaggggtggcaagatctaaggcagtgaagataggcggggccagacagaagggcttgacatgacagctaaggaatttgatttttgtccacattagtagacgggtgatgccaatctgagtagttaagctggggaacgttatccaatgtggttttctttttagagagataactgtttgtatggtgaaggattgggagaagaaattaaaggtatgcttaaaaatagttacagtctaggatctgtgacaaatacatgccctggatcgcagacgctctaggaattctgaagattagcattcttagagtggttggaaaagacagaattcagagttgagatggaatttgagctgagccttgaagaatgagaacagtaggcagcggagagaggattgcactgaggagatggacgctgtgatacagatgaggaggagcctgttttctgacggcagaaaatgctcctcaggccacagatgttggctatcaggagatttcatcttggccttttgtctggtgtgctggtccatcctgctgttttcctaggtgggcctgatcacctgcaacggcccagtcttgggagttttggatgcactctgtcaccaaaagctggagttatctgggagaaggtgtctttctccaaatttctctttaaaaattgagtaattttgtgccctagtccttctagtatcttttgttagaacgtaggagaatctgcttcccatatgtcaagacaacccaatttgtagtgcatacattgaatcccatttttatgcacagtatttcctgttgtgtggggctggcattacgtcttcacatttatagtatacagctgctacttgtttctacctcacatggataaacaatacctagaggagagagttgaggaactgagaggcaggccagagtgtggaatgaaaagttatgatggggtttaagcgaggaggtggagagtgcgagccagcagccggggccagtgcaaagtcttaagggagcagagaagtgactcaggtcagcccttccggcagcagg

SEQ ID NO: 124080 - DNA, 1218 bp, Homo sapiens
tagtatttctgtaagtatctttttctgtgaggactaaacttttatttaaaggtctctcagagtttttccaaatgggttaaaacactgaatatttcaaagccttttagtatgaattgcgatatttggaaagtttcttatgaaaatttagtaaaaaatatttgctttttgcttagtagttctgttacaattagtatcttagtctccaaataagaaagctaagggaaattttgctgttttttattttctatgtatcctaatgatgaaactcatttaataccatgtgggcatttttctgtttctgaatactagaagttagtctgtagttctttacctttctcatcaagttgtcgaaacacagatgacgcatgatagtgagaaaatatgccgatggcagattacaggtctaaacctaacttttttttccacacttcatctttctttttttttttctttctctgttacctgcagcagactgctatgccagcaatctctgttctagatttggtatgttcttgtttctttccctttggtacttttttcctgtcttgattttcttttctttcagtggtggctgtttgatgttttcagtagatccagttctccttaggggtgtcctccatcaggagatggagtccctgacactttagaagcatgcctttgaatgttcctagatttagttactctttgcttttctccgttaattttaagtgttactgtttgtttatggttttgaccttttctcggtttcagtcataaattgattccgtgtattcttacgtagtcataaatacatgagcaaatgaaataaattttgtaatgagtaatctatttcatttttttcacattagacatagattttaaatattcagttgttataaactcagctgaaagggtattgacattatttgccagttaagatataactgtctgttggtagagtaagagatttccagtgaacatgtattctatgttttctttaataatataacatggattttaattcagtttatcagccatgccaatttatcagtctgctgaaaaatacttgaggttcatggtctgttgtaaattcaaagtgttcattgtcatattggggaagtttggctcatcgtttagggcccattatgcttgcgtatggtatctttatcacctgctagacaattatactctgatatatttatataaacttgaagacaaattctagtcaacttataaaga

SEQ ID NO: 124081 - DNA, 1064 bp, Homo sapiens
aacttctaataaaatggtcattttacttaaatctgaaaaaagtgtgtgggctgtgctacaggaagggagctagcacttactgaggaccaggtgctacagtggatggtttttcctgtgtcatttaatacattctaccactgtgagagaggacttcagtttcctaatgaggaaatcggtccctaagacatagagtagacttttgcttggtctaaaaaccaggtgttatgtcacttaccagaggtactccgattcaatcattaatttgtaataaatgatcaggtgttttcttcatgtttttgtccctaaaatttttttagggtggacatttttaaagggagggagcataggcagaaaaagtctgtagagtaaaaggctttttaagggctttaacagagtcgtgttttcagtaatttgtcaaaaagtaaagggtattatgaccccattttatgttcagataccagtttcattttcatgatacaaaattataaacacacagatctcaacatatacacacacatatatatgtatataaaacctgaaaatacctgttttggggaatgtggactacccatatagcagaaccttggttcaagcttgctacatactggctttcaaatcccagtgtagttctcgatttagaataactttcagtctgcatggtcttgattcatcgggtaatagttattttttaatctattctgcactctcctcaaagatcacttcctgcaaggctattttggtagcatgtaacttttcattcttttaatcaaagtgctaatctaataggcagtttgccactggattgctgggtgattaaatttgtaatttaagttaaaatatcctttaagtgttactgaatgtgagtaacccatacaattcagtgtactgttttaagctattattttgagtaaattaagagattctcgtttttctcattaatgctttgtgaatggtgggagtaaagcaacatagctttgaagaacaaaacaatttatgttttggagatggaaatacgtgagttagccaaagagtggaaagaaactgccttgatgacattggtgctg

SEQ ID NO: 124082 - DNA, 2123 bp, Homo sapiens
tgtcccacctatgcagaggcgagtgggggcctccctcttctacaagatattcgtagtggaaattaaaaagggagaggagaaaggaggtgtttcagtgtgttctgcaggtccatcaagtggggcctgtttgagcctgttaatttacatgaacgggttaactaaatttgttccagtaaaagaattgtgcttgttgaatgtgtgaatgtagatgataaattccatcttatagccatgattaatggaggaataactgggatttgtggcaaccgtttttaggtaatttattttaaaattgtagagctaaaaaattgtaaaaagttttattttccaacagtgattttaacctggtattttatatttaactttctgtgtgtgtgtgtttgtgtatatgtgtgtctacttgtcttaatgtgtgcattttatgtcttgtgctggtggagtttgtggagggagattaatgtcagcctgttgttagttgcaggacgaggagcggaggcggcagcagcagttagaagagatgcgcaagcgggaagcggaagaccgagcgaggcaagaggaagagcgccggcggcaggaggaggagcgaacaaaacgagacgctgaagaaaaggttatggtcctttaagggcagctagaattttaccaagttagcctgaacgtaatcgattggctggggcagagcgggctggaagttctgtgtttcttaagaagcacgaggcagagcagggcctggctcccccagctttgtgattggacctgcaactttaccccatctggcccacctacctctcttctggactgtctccagatccccttatctgccaagttttgtctccttcaaacttctgaactcttgggcgtgtgtagcagtgagcctctttgcaaagggttcgtttcctcgggcactcatctttactgaacatggcccagcttgtcattgtgaaggtgacattggttcagtgattgcttaaatggcatgtggaccgtgggaagcagtaggagcgtagtaagacagttggctgccattcaacatttcaaatagatggtttactcaaatcactcacttctggttgatggtaaagagagcagatggcttagaaaacatgatacaggaaaatttagtatgtaatccagtaaatatcctaagttatttattttcatgtgtgtgtgtgtgtttaaatcaagtaacccttttaattgaattttaaaatgacagcgaattttgacattctgagaaatggggattttgagatgtttctctccatatctccctttgtcctgtgtgtgtggccgacgccctctggatgaagaggctgtagccgttgagctccctgtgggggcctgtttcatcccgaggggactgcgtgttgctctgtgtggtttgagagaagctgctcttctctgttacttcccttctatgaaggtagaagctttcagtgttacaacttctgatggcggaaaatttagtttttattaataattccttcttggatagtctagtgaactatattaatagaacagtgtactgttcacagaaaagaacttgtagggagttttttgtagtgatatgctctattaggatacagaacaatctaagagtaagcttgatagacatgatgtgacttcacttaaatggagtagagtgaataatgtaaggacactcacctctgttgaaattggtgatttctgcattttgtagacctttgccctctaagtttatcatcatattatctgttgaatctgaacagcatttgaagtcctctcaaagagtttgagctttcaggattaggttcccctgtgagtctttcacttgtgtaatggtaagtcaacattgatgatctttctaaggaaatcagatttacaaaatgctgagccgcttgatgtctaagtgttggtggtttttgctgttgctttgctgttccatgaaagcgctccctggctgcttggagggctgtgcttttccaggtcagtgccagcttggctgtcccaggccgtgcacagtgcccattgctatagctgggcccagtcctggccacgccggagcctcggcgggggcagctgggttgtcacggcagcacagtgcacatgcagagaggaccaggccatgtttttcctgtgctgag

SEQ ID NO: 124083 - DNA, 1860 bp, Homo sapiens
tgtgttttcataactcatgattatttgaaatacacttgtgttagtaactgcttctataattaagtggtcactgtaaaaaggcgaataacctatttttatatcagaatgtccaaaactcatgggtttgctttgttatagaaaaatgtgccattcatttgttgggtagaataaagttgtcttgtaattgtatctgctcttggtataactaaaagaggatattttgatttcttcctaaaatgttaccaagcaactgttcttcatgttaatactaagattcttgatagttccatttaaaagccacaagaagtcattctggtttattcctcactccaagggaacacttactttgtgtagacaagaagatgagagtctttccttcaggatttctaaacacagagcaagaagattcaatgaaaaattgggctcagggcagtaattggggctggcatttattcttaagagttttctccctcaaaaggtgaaggagtgacattgcgtattcactctgtgtgtgtgtgtgtgtgtgtgtgtgtgtgtgtgtgtgtgtgtgtgtagctctagagggagtagggagaaaatacaggatgaaattgaaaacagggactaacaacttttcactgaatgccagcaagctctctaaaattagttttctttggttgaacaaatttacaattcattgtacttcatttcacagcattaaacatttactcgaggcagtttattctgtttgctctttcatcccccttcttatttacttttttcttgtgctctaaaacttttgtcaatctttaacaaaactgtgctgttaccttttttaatgttaaaagaattttaacactgtcaactgtagtttgtgcagatgtatgtcagaaaaaaatgtacagtatgtgtcaaaatatatttgaatatcttgttgctgttgctgttagttcctggctctctaattttctgtctgttagggagtttcttaagatttgaaatacaagttaagaactatggaaagcatatttgttagattgttactttgggagaatgagtgtttttttttttttcttcatttctggtttcctgttaatctccttcctgataactgaagtaaacagggtggttcactcatgtcctccttgtccaggaaggactgctcttctgcattcatgggggctcagtgaaaaagagtgcaagtttgccttttggaaagtgctggccatagaaagccagtgacagcctatttttagttttgcattatctttaaacacagcagtaacaggtaagttaatatcctgccaaaatcagaagaggagagagagaaggaagtaacaggagcgtggaggaaggaaagaaggaaagcagaggagaattcagtccactgggataatggaaaggcataagtgactgggaagcaggaggctgagaatccattccatgcttctgagcagttttctgtcaaataatccaggatagtattaatgtacttgtaagtctagggagaagactctggattgacctgctgcttctgttacatagtaattgtaactattaaactttgacgtcagtgtgatgatgaggattgttccctttgaaggcccagtgggtcggctgttcccttctcacctctgacctttgcactcttgtctattcccgcccgcagaggcgacaggaagaagggtattacagccgcctggaagccgagaggcgcagacagcacgacgaggcggcgcgcaggttgctggagcccgaggcgcccggtctgtgccgccctccgcttccccgggactacgagcccccgtccccgtcccccgcgcccggcgcccctcctcccccgcctcagcgaaacgcctcctacctcaaaacacaggtcct

SEQ ID NO: 124084 - DNA, 1038 bp, Homo sapiens
ctcatggtggtttggttggtgtggccggagcatccgctaagctggttcactgttggcttcatgacctccgtgcaggctgcctcacgccagggtccagagacccccgttacagggaaattcctctcatccccttttcctctaactggcttcactccttcctgttacttgcactcttagcacctagtaacaccagcagccagaccttagcaggcgtgcagctgccgttagggaaacccctatgctgactgtagagcaggacagttgtgcaggggacagggcctagaggctgtcacaggcgtgggttcagtagtcattgttttcaagacagcatgtttaaaatatagctgaattcataaggattcagatttcacactaatcttaccttaaatgaaactggaattctggtactaaatatcttcaaatacaagagtattacttttagtgagtgtatgagagtcttctaaatcctgcatcattctgcataagcaatgcatgggactcgacaattctgaaattgtcaaatattctaagagtcagtgtaactgtcacccttacaaataacagattaattttgccagaattctgtctttccccgcccccctggatcagagctttgatctactttgaaggtttaatatataataatatttaggttgagtcactttggaagccaggattaaatcattttatgaaatatctgttgtaagtatctacaatttggtaccttttagagaaatttacggaataatagtaaattttgaagcaggatgccatcagtctccttgtattgaattttataagctgaacctaagatatttttttatgtgtcatgacagaaatgtgaggtttggtagccaagtattataatgaggtgtcactactcaccatcttggctctcagtcctaccactaacccttattttaccgcacacatgaagtacctcacaggaccaggtcatagccgacatctgattgctccacctctttgaagacttcttcgtaatgtacagagccgtctgcaccgtgtgcagagcgcatt

SEQ ID NO: 124085 - DNA, 4504 bp, Homo sapiens
aaaatgtatttttgtgcaagttgtttgaaaaagaattttaatgtgaaaatattgtactacttttgtggcctgtttaatccaatattcattgctgtcagtatttgctaaatagtttgagcatttattactgcagcctgtattacactgtcagatttttccagtgtgaatttttctaatgctacaattaatagaaatacattaacactgatttactgcattatgattttaacaatataacattgattgttacttggatacacttagtgacattattacttggatacattgaaaactttgtatctgcatcacatcttttgatcctcaacaatccaccgaagccagtaggaacagggcaaatgttgccgatgggttgatgttacactcacccagagttgctgtgccagtcagaggcagagctgggccagtgggcagtattcctccctcatagtgaagggcgtcaggtcaacattttagcaccttttgagagtagtaattggattactcaggccaccaacagggatgaatttcaaactgatgaaactttgatacaatatgaggggtcttttaccttcctacttactcagtaaaggtatttttgtattctctgagcactgcatctttatcatgagtaaagcttagaaataatcaggtactttaacttgtactgtttctttcatggaaaaggaccaaactcttacccaggatctactggagcagctgttggagcccatgacgcctgtcgggatgcaaaagagaagcgctctaaaaggtatggacggttgcactagacgaggaacttcatctgtacctgatgagccctttcactcttcacgacaccttgagattatgtaaacagacttcatggcttcactctgtgacctcacctggattgtaattaggaatgctattgccccaagtgttcttaaaacatggaatttgaactcaccagaaaaatcatcagtactattctataacttattattaaatttggcatatttatagatgcctctcaggtacatgtaagatgccttaaaatgctgtattttaaaactgtacccctcaggttacacttaactggtaagagtcacctgcttgctaaaatctaacttacaagttttttgagagttgactatgactgggaaaagttaatgttgtagccaagagaacatgttgccctttttttctagatgggtttaaatacagcccctgtgatttcgattataagaaaggttatagcacaatttaacaaagaatgagtgaaaattttaatcgcccattttgcaaacgtgtgtaattgttgacaggttgtttctagtttgtccagtaatctttgatattgccctcttctgcagccaagatgcagattcacctggaagttctggggcccctgaaaacttgacattcaaggaacgccagcgtcttttttcacaaggtcaagatgtatccaataaagtgaaagcttctcgtaaattaacagaactggagaatgaactgaacacaaagtgaaagaaaatgaggagaacactttgtatttaccccaaaatcttttcagttgtgggtttgtaggtgcgagtttgaagaggaaaagaggaagggggttatatttctaagtgatttacaatttctgtttctaaaattgttgggatttagaaatgtttcaattccaagaaattttattttactttaccatgagattgccatttatgtaatttaaacactgtctagtttcttaattatctaactcacacgagggtaagttttttgttggtttcttttttggagtcctgagttcaaaggggacagaactaagggcaggagaagagaatggatgtgtcttctctcccatcttcccctcatcatcgaccgaggagcacaaagaagttctgtttctgtttttttcagaaactttattttagctgtcaagcagagaatagcttgaactattcagactattgttggcactgtttagtagtgaccacacgctcttctacccgggaaggaacatatgacgacatgctcctcccatgtcccctgatggtgtctgttcccacaatatccttctagtctgcatcgtgaagtggcttaggccaaagcttcctgtgtgatgacgcacgtccgagactgttccatctcattcctcgcaaatttgagctcttctgatcaattctaaatatttgattaattttaattctgaaagaaaattttgaggatttaagcttaggggattttatttttataaataccagattattgttagacttaataaatcactgttaaatttaaagatgacagttaccttggaaagttcactaatacttcgctccaaggcgtctgtaaaagaagatatctttattggagcaatgttcatgtgactgggaatgacagaagaatgggagatgagtagggacccctcaagcacagctgtcactcagaaattttaaatttgaaaaagaaatcgattttcatctgtatgccgtcaaggaaggaattcagttacagggcatctgtaacttaaatattgtaagaataactcatatggaagttcaagctatttttatactataatagagttatttaattttaatttgttgaattattagttaccactgtcatttcttcagctatggatatgtggctgatgttggggagacggacctcagtgtgttttatattgtctggtgttaagatgataaattactttgtgattacaagcaaattttctatttgacaaagcccttggtggagtccaaatgatttttctgtaccatattgttctcttacacatacgtatgttaggaaaataggcacactttcaaagagaatgttctcttacacatacgtatgttaggaaaatagacacattttcaaagagaatgttctcttacatatgttaggaaaataggcacactttcaaagagaggtataggggctttttactgccttcgaaatcacttttaataaaagttgtatgataaatcattaaaaatgcgagtgtaaatatttttttttacctctatcagggtttttatttgaaagtgtgctcttaccatttccttgtttgagtaagagagtgaatggttctgagtgtttaggaaggatttgcttgcttgcagcagaagttctaggaaaagcaggcacctcccaaatatcttgaggacactggcagccttatggtgactaaatccacactttctttaaagagatgcagatgaattacttttctgttaatatatagaaaaatacacaggagaacatgcagatacatgtaaatatctacatacagggatatttgtatgtgtggttgtgaaacccatacacaagtggatttggccatctttgggcagtgaggtcaaatgtgaatatgtgtaaaagtgcttttcagaactgcattactatgagaaaacatcaaaactgctgtagttttccatttctactgtatttcagttgcaacctatttttaataaactttgtatgtatttaagtgtatttgctattgttttgaaagtgctgacaaagtttatatttgtaacatcagccttcctcgcccatctctttccatctgtctcttcttcattaaacacttactgagtatgatttctgtgtcaggcagtggttttcatttgtggggacgtgtcgtgtgcctcgtcacacagctcacgggtggtgtctgagtctcataagccgttctgctgcccaggccttcctgatgcttccttgatcccagcaagcttaggtgggcattcgagccatttctcagtgacactgtctcttggtggcccctttgaaataaaatatccgtagtaataagtaaatggtgtacataaggcatcctggtgagaagcgtcctagtgcaagaacccactcgggacggcctcgtgtaaaagggtgtgtttgattgtaaaactacacaagtcacattgtgaggacctgggagctgcgggaggcctgggcatgtgcgggcgggaccttctgtgtggacagggctcagcgctgcctctgcgccatctcctgcctctgcctatttccagtggaccttttaatggcctgtgagcagggggatgggacagggcagggatggagaatttttagagctttcatggggggagaaaaggatgggaagttgttggttgaaggatgcaaagtttcagatagacaaaaggaataggttttcagatccatgtgctgcacagcagggtgactgtagtccatgtattgtaaaaataaggacgttcatgaaggaaggagtgtgtcttagggttgtagaaacttgtggagacctttttgatagaacgagatgtttgtgtattagaactatagtattcacttttactatattttaatgcttgaaaggggactttaatgtttgggaatacaaaaacttaggaagtctgagtattattacagattcctttttctcctcaagccttgtgtttctgttgctgtcagtggaaataatggtactgccctacagtggtctgtcatacggaccagcaagcacttgatc

SEQ ID NO: 124086 - DNA, 1209 bp, Homo sapiens
ggtgaggggtgctagtgaccggctgctgaccctcccggacccaggtgagggacgctagtgaccggctgctgaccctcccggacccgggtgaggggtgctagtgaccggctgctgaccctccgggacctgggtgaggggtgctagtgaccggctgctgaccctcccggacccaggtgagggacgctagtgactggctgctgaccctccctgaccggggtgaggggtgctagtgaccggctgctgaccctcccggagggtgaggggtgctagtgaccggctgctgaccctcccggacccgggtgaggggcgctagtgaccggctgctgaccctcctggacccccgtcccaggaacctgccagacgtggccactttcccgctggggcgccgggcggccctctctgcagccgcccatctcgggccctggttgctggcatgttggcactttcagatgctgctcttctttccagcttgcatgttgtttttctattttaaaggaggcgatgcgaagttactggtgattctctgcatttctcccagccagaggcacctggcacagacgttgcagggcctgggtttcgggatccgagctcggcaagtccagcgaggccctgcccgaaagaagccgcccagctcccaaacggaggggaagaggaggccggattgaatgcattaacaagtttttctcctaaaactgtgtttcttgtccttgctttataatgcatatgtgcttagaaataaacaggtttcacgtggactcaataaacctggctttattccaaagcaccctcatgaatgtggatgggacctccaactcctgccagaccatcaggcagggcaggcttcacagaggagctccttgcagtgcggcggccaccaggtgtcacagcaggcactcgctgtcctcatcagactctccccagaggccaccctgggccctgaaggccctgccccgggaaactcgggagccggcagaagtagctgtgggcaggagggcagggggcgtgagtgccccacagtgggagctggtcagcctgggcccagtgcagatcccacccgtgagctggggaggtgctgctgggcacgtacggccccagagccaccaggcctcacacagagctgccacctccgcctcctcgagttcgtgcttttcctttccccccaggctccctctttcttcaccactgtttttggttgtccaccacactccg

SEQ ID NO: 124087 - DNA, 1116 bp, Homo sapiens
ccccgcgcccagtgtcttaaacgcattcccgtctgccccgcgccctgtgtctacacgcggacctcagtgactgtgagtcgccgtctcccatgggacccaggagttcctcgaagcagtgaatgagcagcgtttccatcccagctgccacgcatgaaatgaaatcaacagtgcactaaatcgtctccgtagttacgtgtttgttcatttttctcgctcccaggtgatcttgacagagccctgccggcggacacggggctccagaaagccagcgcggacgccgagctcctcgggctcctctgccagggggtggatatcccgctgcacgtgccggaccccaagtatcggcaggacctggtgtcccagggcggcagggaggtgtacccgtaccccagccccctgcacgccgtggctctacagagccccctgtttgtcctgactaaggaaaccccacagagaggtggcccctcgttccctagggagagccccaggggccccgcaggtctgaacaccatccagactgggccggtcctcgaggctggcccggccagggccagagcttatatcgacaggttgctgcatctgtggggccgggagaccccagcaaagggtagcgagggagaacagggacctctaaggcatgcagcgtccccatctccacagaggcagggtggctggagtacagacggtggagggcgactgctggtcttcgccccagggagggaggacgagggagggccagctcagagcaggggtgccggcaggggcgggccccagcagcagggatacatgccccttgagggtccccagcagtctggcagccttccagaggagggctccaagccctcaaacagctgtgtcctcagggagaccatggtgcaggcttctcccagctcaaaggcccagcagacaccctcagctcaggactatggacgaggcaacatcatatccccatccaggatgctggacaagagcccctcaccggcctctgggcactttgcccacccatcctttgctgccagcctgaaaatgggtccccccaagagcaaggctgaaaaaatcaagagaagtcccatggacaaggtgctgaggtttgcaaggcagccgctgcttctactg

SEQ ID NO: 124088 - DNA, 1050 bp, Homo sapiens
aaaacagacagtgcagatagttcctgtctgccaaaaggaggtgttgtttttgatcctgatttcactctcataagctgtggaattctgtatccttataaagaaatgtaatttgaaaagtgaggataagtaaagcagtctgatctggagaaaacccatgtgtgtatgtgtgtgtgtgagtgtgtgtgtatatgtgtgtatgggtgtgtgtgtgagtgtgtgtgtgtggatgggtgtgtgtgtgtttgtgtgagtgtgtgtgtatgtgtgtgtgtggatgggtgtgtgtgtttgtgtgtgagtgtgtgtatgtgtgtgtggatgggtgtgtgtgtgtgtttgtgtgtgtgtatgtgtgtggggggcgatgggtgtcagtagagctttctttttgtgacagtggaacaaggaaattgcttcagagtgagcaggggcagctgccggatttagaagatgtatttcgcgtggactttgggagtttaaattgcattcacaatgcatgttttcacccctttgagccttaagttttgctttccataggtacaacagttccctttctcttctttcccttctcagtcccggctgagacaacaggacatcggcctgaagacccacctggaccagctggacctgcagattagcaagctgcagctggatgtgggcacagcctcaggggaggccctggacagcgacagcaggcccagctcaggtaccagggcgccctgacctcccggacacaggggcaggcacgcagcacaggcagaggtgaagcctatcccgccagcccctcttgggctgaaattccattccaggtatcctagtgtccgtgcagggagatggccgcttcgtcaggctgatctgaaagttaggaggcaacactgaagcctttctcagggcatatatattaattggctacctcgctcttatttttttaatttgcaaaaatcacattgtggtctaagtgacgttattgcactcaggaggcctgtggctgaagcacctccccagactggtctcctcaacttggcaggcaccagggaagaaagagagaga

SEQ ID NO: 124089 - DNA, 1022 bp, Homo sapiens
cgggcgggtatagctgcatgtgctgacctgccagtcctgtgcacacagaagccaggataagggggcttttgtccttcaagtgcatctttgctgggcacaaattcactgcatcatttacaattttgaatccaacctgaaaaatctttgctaaaaatgttcttctaaattatttctttaaattgttatatctgatgaccagtgctgcaggctgagacaccaggaccatgagaactacaagcaggggttatgggtttgagggaaggacagtggccaggaaggagcagcccaggggtttaagcatcctgacggcatctgtgttccttccaggctctcagaacccgaccccagccataccctagaggagcgggtggtgcactggtacttcaaactactggataaaaactccagtggagacatcggcaaaaaggaaatcaaacccttcaagaggttccttcgcaaaaaatcaaagcccaaaaaatgtgtgaagaagtttgttgaatactgtgacgtgaataatgacaaatccatctccgtacaagaactgatgggctgcctgggcgtggcgaaagaggacggcaaagcggacaccaagaaacgccacagtaagagctttcccacccccgaccctgggcagtggtcaggccctgaggcctgggaggtctgcttctcacaaacacaattacagattgtgtttatggcctgggagtgcaaaaaatcaaatatgctgtttaattgttgggcgtctgtttgcagaaataataatgataattggcgactcatcacatgccacttgcccaggagagcccaggctcaaagggcatgaactgcgtgttggtttgcaatgagcctttttactgttcagaccacggttggcttcccccagaatggattgtcttctggtatttgaggtgcaaacctgggaaccactggaataaccaaccctgcacctgagctccaaccaaatgttaggaactcaccaaccctgctcctgagctccaaccaaatgttaggaactcaccaac

SEQ ID NO: 124090 - DNA, 1077 bp, Homo sapiens
aggttgaggtgcctcacttagcctgcatgggccttgaggttgaggtgcctcacttagcctgcatgagcctagaggttgaggtgcctcacttagcctgcatgagccttgagattgaggtgcctcacttaggctgcatgggccttgacattgaggtgcctcacttaggctgcatgggccttgagattgaggtgcctcacttagcctgcatgggccttgagattgaggtgcctcacttagcctgcatgagccttgagattgaggtgcctcacttagcctgcatgagccttgagattgaggtgcctcacttagcctgcatgagccttgagattgaggtgcctcacttagcctgcatgagccttgagattgaggtgcctcacttagcctgcatgggccttgagattgaggtgcctcacttagcctgcatgagccttgagattgaggtgcttcacttagcctgcatgggccttgagattgaggtgcctcactgagcctgtatgagccttgagattgaggtgcctcactcagcctgcatgggccttgagattgagatgcttcacttagcctgcatgagccttgagattgaggtgcctcacttagcctgcatgagccttgagattgaggtgcctcacttaggctgcatgggcctagaggttgaggtgcctcacttagcctgcatgagccttgaggctgaggttcctcacttaggctgcatgggccttgagattgaggtgcctcagttagcctgcatgagcctcgagattgaggtgcctcatttagcctgcataagccttgagattgaggtgcctcacttaggctgcatgggccttgaggttgaggtgccccacttagcctgcatgagccttgagattgaggtgcctcacttagcctgcatgggccttgaggttgaggtgcctcacttaggctgcatgagccttgaggttgaagtgcctcacttagcctgcatgagccttgagattgaggtgcctcacttagcctgcatgggccttgagattgagatgcttcacttagcctgcatgagccttgacattgaggtgcctcacttaggctgcatgagcc

SEQ ID NO: 124091 - DNA, 1080 bp, Homo sapiens
ggttaacccacccctcctccccggggcctcacgcgggtgggaagggacagtcccagcgacagaccaggcgcctggacgcgccgtggacccgcgtgcggacggcggggacaggctccggtgctgagcgcctccggtgtccccagcagcactgacccacttgcaggccccggagctgagccgccagccatggccgctccccgcgggagggccgcgccctggacgacggccctgctgctgctcctagcctcgcaggtcctgtctccgggaagctgcgcggacgaggaggaggtccccgaggagtgggtgctcctgcacgtcgtccagggccagataggcgccgggaactacagctacctgcggctgaaccacgagggcaagatagtcctcaggatgcgcagcctcaagggagatgcggatctgtacgtctccgccagcagcctgcaccccagcttcgacgactacgagctgcaatcggccacctgcggcccggacgccgtgtccatccccgcgcacttccggcgcccagtgggcatcggcgtctatggacacccctcccacctggagagcgagttcgagatgaaggtgtactacgacggcacggtcgagcagcacccgttcggcgaggccgcctaccccgccgacggcgcagatgccggccagaagcacgctggtgccccggaagacgcctcgcaagaggaggaatctgttctctggacgatattaattagcattttgaaactggtacttgaaattctcttttgagtcgttgaccacactctgggatataaaaccctccatctgtgaagctgattgcagtttgctgtgaaccttgctacttgtacttggttgaagttctaggtacctttagtcaagggatggaaaaataaagccatacgcagttttgttacctcagttaccccaaaaataggaaaagcagcaagcacagtattttaaagatcataattcctataaaaggactgtgcacaaagtgtttagactccattttcattaggcaggttgactaaaaatgattgcagtaacaggtttatataaaatagagcaacctttcatgctgtgaca

SEQ ID NO: 124092 - DNA, 1019 bp, Homo sapiens
atattaacaatttttttcctaggtcgctggatttgtgactgttgtcagcgggcccccccaacacccaggaaagtgggcagaagggggaaaaacagcaaagagggataaaatagtttttgactctaatactgtatatgcatttaagtggaatatttggtgccatttacaacattattttcatgccaataaaagattttttttgcaaattatgagcttaaaatctgcagttatttctgttaaaagctacgcttactctcgaaactaactccaggtagagaattcatcttccaaagtattttatagtaaccttggctcactccaaaaattcagtggaaatgtttagtaacttaagatacttaactgtttctccatagccccaaaagttaattttcatgaaacttcctaatctacattgtttccggcctaccataggtagcactgacaaagttatttaataactgaagaattttcataggtatgacaaatggcccactaagatttggtgcagctggatttagagttgtcattattggactggtacaggaacaaactttgtaaatacctgcctgccaggaaatcctttttgtatagaaaagtaccatcacctacttggggtacaggcatgaggctttagtccaggctcagggaagtgtacgtaaatcatttccaacttgattttagtaactcttgaaaacttacaccaacttcggttagaatctccagagtaaaattacaaagttatcaaccttttgatttgtgtcacagcatgaaaggttgctctattttatataaacctgttactgcaatcatttttagtcaacctgcctaatgaaaatggagtctaaacactttgtgcacagtccttttataggaattatgatctttaaaatactgtgcttgctgcttttcctatttttggggtaactgaggtaacaaaactgcgtatggctttatttttccatcccttgactaaaggtacctagaacttcaaccaagtacaagtagcaaggttcacagca

SEQ ID NO: 124093 - DNA, 1484 bp, Homo sapiens
gattttttaacttagattttatagctctagttttgcagttttggaaaatagcaggttttaaacaaaattaatatatgagctatttaaaatggtctttttagagtaagtcttacacataatggtcatttgctacttggattttcttgtccaattaatagtgacatttgacattgtatttagtctttccttccattcattaaacaaatcttactgtgcatgtagggagtatagaatgctacatttaatcttacgagatcatgctgtttaccaaattttatgatgaaattaatgctttcttcagtaggcagtcttacattgtaggcagactcctgtcaagttttgtctttcaaaatggtcctcattagcaagttaccaaaagtaaaaatagggcaataaagtaacagaattccttttaaacccatagtaagctcttctggcatgaatttatagccctcttctacccttccagccaaaggtcattccaaatgctatatgtggaatttgtctgaagggtaaggagtccaacaagaaaggaaaggctgaatcacttatacactgctcccaatgtgagaatagtggtaagtattgaaatgtctttttaaaattttaaccaccgtatttattggttcaaaaactagaatttatagtttcaggcagatttcaaccaaagagtcaccaaattaaatacacagggtagcttgtgaggcatagacacagcccatgtgttttcctctacattgtatattcatttctctttggcgatttgacattatagccattctctggaagtcctaaagcaaactagtattttatgtgccatattaagttaaaatttcttatgtgagataccactaatactggttttgatttaggccatccttcttgcctggatatgacaatggagcttgtttctatgattaagacctacccatggcagtgtatggaatgtaaaacatgcattatatgtggacaaccccaccatgaagaagaaatgatgttctgtgatatgtgtgacagaggttatcatactttttgtgtgggccttggtgctattccatcaggtaaagattaaaaaaagagcaaacattatctttgggtgatgagactctcccagcactccaaaaggctgcataaacgctatcatgacatgaagagcttgtggactcttatgtgcaaatatgaccaaagctgtgattatacaggtcatgtccaccagcttttcatccctagacaattccaactaaaggataagtgaaaggccagaatgcccctgctaagttttggaagtatagttctatagaatgagctggtgtttttctactgaaatactaaagtaacaaagcctttatttttatatgttatctatttagaaacaacaaaatgactgctacgtctttatacatttctatagaaatctattatagatttctgtaaattgaggcagcatgacaattccagataactttagaacagagttgaataaa

SEQ ID NO: 124094 - DNA, 3752 bp, Homo sapiens
catagtttaacattgtgaaaacacaaatgtgtacttgaaggacttttttttttttttcctaactgcagcgcttcatttttcctgaaggaccttcttaatgacttttagtactcagtgaaaatacccacacttatttgtaacaatatatttttgtatgaaacaaatatgttcccttgtgacggaaaatgatgttgaagctgtgtgccgtaatagtagctgaagcggataattgtgtttttgtgacttatgtcagaaaacaaagttgatgaaggcactgatatggaatcagttttatataatatacttagaagaaggaggaatgatttttaacataacttactttagtctccactggaaaaagctttcttacatttagaatgatctttttatttttaaaatgataaagctttaaaactttctttgaatattttccatagttttcaaaatccagactcaaatttgtcttaattccaaagaatctttgtttttgccttttaaactccaggacagctcctctggcaatgtatctgaaggggaaagccctcctgacagccaggaggactctttccagggaagacagaaatcaaaagacaaagctgccactccaagaaaagatggtcccaaacgttctgtactgtccaagtcagttcctgggtacaaggtagaagaaaaaagcccctgactcagcttctttactgaccagcctctccctgaaatattttaacttgactttcacgattgtggagcttctgcctgctgtacctcactagctgttcttctatggtgtgccctttgtccgctgctttcttttttgctttatttccttggtggcttttctgtcacttttggctatggtttaccttctgttttctgtatatgtacaatttataagtctttttttttctttgaaagaataaccaggcaagtatgggtttttaaaacattatttcataggcagaagtttatattttctttccttggagtaaagatcataattatttggcattttaaatgccccagcatttagtgtagctaaagctgctgagctataaagtatgagtggatatactgttagactaagttgcattttttttagtgcctttcattaagaaagatctgggtttaatctaaggattatttgatccatatgctaaatttagctaactctgggatagaaaataataaaacctgttacttacattgtagtgatttttagcataaccttggtaaagagcctatatgattctatggcaagaattaaaacatacttgttaacttgttgatctgattatcctcagagtaaaggagtaggttgtcagcaactattattatattttgaacttttcctccctctgtctgcccctcccttttcttctgaagaaaaggtgaggtgagagatgagtagccttatttgcatatagggatttaagaatatcataaaaggaagaattagctgtacagtttcatatttgggatggtggtagtaaaatagactaccttttgattcttttggtctgaaatgtattagaacatgcttttattgcacttatgaaggtgtattgaaggaaaattttagagtaagctgatgagaaagttttgccaagtgaaattgttaaacaccttgtatgtcagaactgtgattgtggtaaataattcacaagaacaggctgaagtaagtcacctttccctcaaactaactagaacacgttctaacatgttcatttacctttcttcaagtaaaaaaagcgacattaagttagtgtatttcatattttattaggaaatgcttttatgtaattaacttaaaaattcttttttttttttgtagcctatagcaagcaaattttaagcttaattcagcaagggttggcttccaagggtggctgcaataggctgcagctatgtgatttttgtacttgtttttacatatatagcttatgtaatttctttatataaattaatgcttaataactgaaagcaagtgagctccaaagatgaaatttcagaagcagtatacatgaatgagtgtgttctactggtctgctaagagctttaaatggaagtggccgctcaaagcacagtgtcctgttaactcttgagtgctaagtagatctttgcaacagtaagcttgattgatcatgggttaaaaagagagaatattgaaatagatgttttaatacaggctggaaatcagctattcaacactatcattgatttagtatacaagaaatcatatggattaactgaacttaatagtactcaagtaggatatgcaaaatttatattttacataatctgtgaacatttttagtacctaaaaatgtttcaggtatttcaaagatgggaacaaccagtatctagtcatcatacattaatgtgaacatgcttattaaaagttaacctctttataaaaagtattaataaaccaagatgtgcctaaatattagggtacttcaagctaaaggtcatagtttatatataaaaagtacgagattcaaggaagtaatgtatctgatgctttgcttaataagattcactagtgcttgcccttaattcatagaacagtattgtttaggttacattaacctgaaatttaaagcataattattaggattccggcctataaatacaataattaaaatctatactatattattgctaccatgaaagtcttatctttggctgtttttcaagtagaaaagtaagtgtactgtgagccttttatttgagatgctgagagctattaggatgagtatttcagttttcttgtcaatagtgatactctgatgatgttgcagttatttgaagtagaactgattgtctaaaccagacacacataggagtgtgctccattggtcttgtggagagtgctgcacattaacccctccctcaactgtgcaatccacttgagactggcttctctaagccacagttgttatctgctgtgtaaagtcctggatgccagcactgtggcttcttagagagggcagatgctttgtatatcgagctgcagcattcatcgtagaaaatgctacaaagctgtctctcttccccttctctcatgtttccctcttttcatcaagatgaaggctgttgggtaagaaaaactaagtgatttaacaaatcattatgatttaaacttagaaataaacctagaattttttggtgtcccttttatcataggtgtttaatgtatattttaatgattgtagaacttgaattgctctagaatgtgaatgactacccttgtgttttactccttttggcttttgttttgtaaagaatctcctgtgaggagttctgtttttagaatttaatattgtttggttacttccctgactttagtgaaagatattagagtatttactatgccagtatctaacttaaactattagtattaaataagtatatcttttacatttagtacaggtaccataaccaagagatttcttagttttgatggattaagagagagcattctgctgtatattatggcaggtacagatatgatcataactgaaccagaatttggattatagaagtgcacttcctagctgttttttatttaggtataggaacacacaatgagaaccttatgtttagaatgtagcagtaacaacagagggtaactacactgcaagacttaaatggtttgagcatgtgacactatccttttgttggggggagcagggtataaaaatatacatacaggagattagtttaatagtaaagttttatatgtatgtttaact

SEQ ID NO: 124095 - DNA, 1047 bp, Homo sapiens
atatcatgtaccatgcactggtgtgatatgtatgcattaaataagttaatgcatatatatcaactgtatgcggtagatgctattattaggtctgttttacaaatggagtgacagcacagagaagtagcaaagacctgggacagtggtcgaggtggatgtgagctggcagccagacttggggctgctgacattttatttacttttttctttttttgggttgagggcaaagaggggaggcacattatctcttagtaagaatcaaatgcatattttacataagtctagtgaaaagatgttcaggctttttattaaccctacttgatgacaaaaatgaaaaattagtactctagttttcaaaagtcttcggggttactcaagaagtttaaggctatcttcataggtcaaagatgagtctgtttatatttaataataaagggaaaccaaaaataaactctctgaacttcaggtactcaccagatgagctgcggtatctgccattaaacacagccctgtatgagccccctctggatcctgagctccctgctctagacagtgatggtgattcagatgatggcgaagatggtcgaggtgatgagaaacggaaaaataaaggcacttcggtgagaacatttctctctagtaggaagcatttcctttctctttgaatttttgttacattgaatttctgtcatcaccctctccttgaaaaaggatggttgcatgtaatttccagaaagtattcatcaataaaagttacttatagtatgttttgataaaaacaagcagtgaatggcctttggtaagctttatgcttaaaatcgcccctttgtagttaccatgagcagtttaggcaagggtatggaaaattagcttacaatcatttattcaacttgctgtctctttagcttaaaatattgaacaaaacagaatttgatctcttgacacagaaatgtagttttcttagttgaggggagtgcatttgcttaatcttatgcttcctataggaaaatattatgtttagtaatatgttgtacaatttgttgggtt

SEQ ID NO: 124096 - DNA, 1018 bp, Homo sapiens
aaagcacatagaatcttaaaaataaacttgtttggttgaaaaattgatatatttgccttttgcaagataatcttttgattgctcgagtttatattgtgaatattaagtttaattattttcaaatgtactaagatattttgctttggctattggaaaaccattacaacgtggagcggtttgaagaattaaattttgaagagtgcttttgttcacttatccttaaaagagcttctttatttttttattttttggtctaaaataggcttaacagcattgcgcagtgatgaagtgattgatttaatgataaaagaatatccagccaaacatgctgagtattctgttattctacaagaaaaagaacgtcaacgaattacagaccattataaagagtattccgtaagtaattgaggtgactggcattttttatttgggttggggaaaatgacattttagaaagttatatgtgacttccaactgtattttttttttccagcaaatgcaacaacagaatactcagaaagttgaagccagtaaagtgcctgagtatattaagaaagctgccaaaaaagcagcagaatttaatagcaacttaaaccgggaacgcatggaagaaagaagagcttattttgacttgcagacacatgtaggataacttaaatttagtaccccctgaacttagtttattacttgttattgcagagtgcccatcaccccctttatcgttattttttgtaccacctatgtgtgtgtgttttttttgtttgtttgtttgttttgttttgttttttgtggcagagtctgtgtagcccaggatggagtgcagtggcatgatctcggctcactgcaacctccgcctcccgggttcaggcgatgcttctgcctcagcctccccattagctgggattacaggcgcctgccaccacacccagctaattttttgtatttttagtagagatggtgttttaccatgttggccatgctgacacctgcgtgttctttttttcctcagaagttgaga

SEQ ID NO: 124097 - DNA, 1050 bp, Homo sapiens
gaagagcagaaaccaaagcagatttgcatttacgggttcattgaaaatgttcttatttggattggattgaagatcagttttaaattttattccaggtcttgctcatgccaaactcttggacccttttaattataatatgaagttaatacttgtatgactagttgtccttagacagtctttcatttattgagacttactgttcttttattctttctctaattattatttttgaatcttttaaatgtataggatgataatgaagataattcaaatgatgggacccagccatccaaaaggaggcgaatgggctcaggagatagttctaggagttgtgaaacttcaagtcaagatcttgggtactgtcattttatcggttattaatattttttgtgatgttcctctttgccttaacatcctcttccctttcccccagctctggcaaaggcaattattaaaaattgtagaatattttcttcctgttctataatgtgccatcaaagttggtcttgctactgagtgtaattaaaaagcaattttatgatagtaaaatacatacatacataaaattaatcattttaacaatttttaagtgtgaaattcattggcatcagttacattcacagtgttgtgcagccattaccaccatccatttccaaaactttcactaccccaaactttataaccattaagcaataacctccctttctccctctatttagcgccttgcaaccatcattctactttctatttccgtgaatacgactacttagttacttcatataagtggaaccataaaatatttgtccttttgtggctggcttatttctcttagaactttgaatatcttcaaggttcatctttgtagcatatgtcagactttttttctgtttttaaggctgaataatactccattttatgtatatactgattttgtttatccattcagatgttgatgggcatttgggtttccaccttctggccaaggtgaataatgctgcagtgagcattggtgttcagagtttgtgttttcagtttttttggatgtttatc

SEQ ID NO: 124098 - DNA, 1043 bp, Homo sapiens
ttaggtgcacatgaacgctacccggggttacgcacacaaatgcctgtgcgctccgtggctgacaagaggcattttcaactgtgagttttctactattcacaccgccaacatgcagattaaatgaatcaatgtatcccacacacttgtaacagtagcggggaatatttcctgtacaaaaaagatgtcacccctaaatctaaaatgcaagcctctaaataattatagctaatcatgttagatcccttggtattttccaactttgagctttggatagctttgggagctagattggtaacactgggccccaaaattaaccggaaatatcaattatcagctttttttggtttatattactatggacattttcctgtaagtatatgatttatggctgatctttaattttgcattttaatttgtattttaaaagaagacagcgttctgtttgtttcaagttaccttacaagtttacttacttacttgatcaaaggtggtataaagagctgttgacttcagaaaaggaaagaaatgaaaataaacaattaaagcaaaatacaaatacactaacactatgcaaaataagaaaaaattctggtacatggccacacatcccaaagttttttgttaaaacaaacattcatctagaaacactatgagaggaatgtcactgacaaaataaacacattacaaaagacgcaaaaacacagtgcagctggccatgaagccgcattaggacactgctctcaacagagctttagcccagttatctctaaaatgtacaatcccaggccctcacaaatcgctgctcatacaacagaatacttctcctgacgactggtatttgtgcacaagggagcacagcttcctattttctccaatgaatagccttgtctgtttttattttatttcatgcacgctgcttctcagcatcatcggcacggcctacagacatgtgctgtcctgagttctgatcccaactgcaacattttctagacatgaaacctacaggcaaccgattgaactccacagatgcaggttttctctgc

SEQ ID NO: 124099 - DNA, 1050 bp, Homo sapiens
gcaaatatctgtaaaaatttcctaatatttggttaatcctgttttataatttgttctttccttttcaatacttagctgctgttacatacaaaagcaaatgtgtttttaagaaacgagttaaattattttagctgagattaatattgattgatctgtgatagagaatataaacatacatgtaatccattcacttttttttctgatggaggatactgtaactcagatatattaaaagatgattaacagttaattacatttgaaaaataaactatattttcatagctgaatgagttaatctaattaatgattttcttccctataaattaccttaaaaactgatagcagacagtcatcaacgaatctgagtagcagtacaagagaaaatgcaagcaactgattagttgtttcttttgaaaattcatgtaagttgatctccccgtggcttaaatgatctcttatgcggggaccctcctgatggttcaggaaatcccagagaaattcctttcagaaattaaacagagaaaatattttgttagtatccgcagcagagagacgtgcctggtgttgctgaatagaaggaaagagtgcatccatcaagtcctctgaagccctgggtgggactctgctggggagagctcttctcctacacccacaggacagaccagggagccagagaggctgtggggaaagcagagctgcccaggtggtactggagcctcatcaaattccagtctttcttgttttcaccttcctccaaggaagggaactgagtgtgaacatttgcaaatgagcttttccaaggcaataaaagaaatcacggctctttcttgtgtgagcacagcccctgcactttctcatctgctctttcaccttcaaaagtctgttgcttcttacgacacaaatccaaggcctctcccacaggttttagggaaaagaggtcagaaaactgctgcccttggcaaaccgccaatggtcagaagcatcacagagactcaaggtggaaagaacattaaactagttcaatcatcttattttttgatggtaaaaatg

SEQ ID NO: 124100 - DNA, 1041 bp, Homo sapiens
gggaggcagaggttgcagtgagccgagatcgcgccagtgcactccagcctgggcaaaaacagtgagactctgtctcaaaaaaaaaaaaaaaaaaaaaaattgtaggtagttacagattttttaatttgtcagctatcaattcactgactttgtttctcataggttttagttggctgacttggatttttaagttatgtggttatatcagctgcaaataatgtaatttttatgctttttaaaatatgtatatgcttggcaattaaatgtttatgcgatcctttttttagttgtattcatttttagtgtttaagtaactatttcctagttacatttccaattgtttggaatcttttttttcttattcatctccagttttgtgcacagagggtgggtgtggcatttgtgatctattattgttaatggcctccatttaaaatcattttattggctgtcatttgcctgccatgtcaagcctattttaatgaagcacttgcttttctagctgcatagaattatttgaagaaagataatgagaaatggggactctaagtggcctacagttcaatagaagaaagctaaaagcccacccaaacatgatagtaaccactgttttctctgcactaggaaaaatcagccgtagaattgttgattagtcttgcagaaggctatagttctcgctgtcatccggtttttcagcttaaaaaacaggtatgccaaatgcagggtcccgggaggggcgtgtatgtctctgaaaccacctgtcttctgcagagatgctggaagggtgcagtttgcttgctgagtcagactttgagttgggcagatccagctttttaaccagtgcggggcctgctgtggcgctggcctggttgctcagtcttctgagtctcaagttccgtgtctagcagttgaaagtaatgcggtgctgacggcactgaggtttttagtgttaaatggatgagcactgggaagtgtttttgctgagtcccctggcaggctgttattgctgtcagcagtaacgcagagctaggagcagttttt

SEQ ID NO: 124101 - DNA, 1634 bp, Homo sapiens
gggcttcatgggggtcctgcagggacagtcccaaggtgacagctgctgcacctcgagtgcggcctgaactggagaggcacctgcacctctgacatggctttggatgctgcacagcatcgtcacacctgctgtgttctgttggttccaggccagtcgccagagctcgtgcagatttggtgggggcctccctctcaatggcaggtgtccaaagaacctgtggacatggtcatagccaccccagacgttcactcccttccaatccactggtagtttccgcagccttcccccatctgaatgtactgaagaactgacacccaccatctggttttaaaatgtttagaatttgtaataatttacgtattttctagagagtgatgtaacatccataaaaacacagattttctaggaagttactgtgaaatctacaaaagcaataaaacatttcctcccaggtgctgagctgtgaggagagcatcagggtttgggctctgctgcctttccccgaagaactcactcggcaagccgtcaggtgcgtggcatcctggggcctggctgacctcaagcttgtctggtactattagtttcagcagcatttcttctttaacgaggctgtgggaagataaaaggggaaggaggaatttctgggccttggtggctgatgcaggctgtggggagctggaagtgtcgctgaatgcgatcttccaactggcatggggccctggtggagactgaacatggaacgagaggcaggttttgtgggtagacagtggcgtccatgagaagtaccctgagtagataggaagaaagatgggtctgaagctcaggagagaagtagggatggagacataaattctggaatcgtaaacaacagcagacatccttgttcagcaggaagaatacgcaggtggttcatcgtctcgtcgtcactggactttgctcttggcatatggcatcgtttgtttctccactgtattgtcatggtggctttttccattttatatttgaggaaagtgagattcacagtcaggtcgctgctcagtgaaccattgaacattcttgtgcacaggcactgatgtgagcactttaattgtcacgtatctttaaatattttctgtttttcagattagaagataattctgaaacaaatgcctgccactctttgattacaaaaatgacggatgagctgtatcaccatatgcctgagaatcgttgtgtgttaaaggacttggatcgtcttcctactgagacgtaagttccaggacatcctgacaactgttgaaacattgattcagcagattagcatagcaaacttagcattttctatgttttagattttataaacttggtagtagtcttagaatcccactgttactgctccaggaggaattatgagataagttttgacaatctctgtgcaagcttggcacatctgatgaggctgtgaatgccacattctgtttgccacaattcagtgtgtttagttaacacttgccgcgtgtcacggttgtccctgcagaccaaccagcgatacgccgctagccctggctcccagaaagccgcagccttgcaggtgcagaaggagagtgaggcccaggtgaggatcatgatgcctgctccaagtctggctctgtttg

SEQ ID NO: 124102 - DNA, 1033 bp, Homo sapiens
tctgggaccatggagatgcgccagttcacctaacgtgcacagctctgggatgtggaggggactgggggacaggagaaaacccatgccgaacccataacgaatgtgcttctccacacgggcagtggccctcctggggcatccatttcttttctcactgatgttgtgacgaaacaatgttgaatgaaatgatgttatttgaggacttcctgtgctgattttcatagaaagttgtagtacatactattttaaatattgtttgtaatttgggcatgtggaaatgtgggttctatctatctaaatgaatatttggatttaaaatataacagcagattaacgtgattaacagcagattatatttggatttaaaatataacagcagattaacttgattaacagcagattaacagcattatggtttcttcacttatagagtatattttagaatgtgctacatccttaagaaatggccattttggatacatttctagaatttttgggttgagtggtatctgtttttaaagctttacatagatatcgctggattcccctccagaaaggtgctgctcaatttacactcttaccagcagtttataagacaaggtcattctcttactaccactctccaaaaccacaatatttttacatgtctcaactagtttcatgggaaaagtaagatcttaactttaattgggatttcttcaatctggtggcattgagcctgctttcctatcgaggccatttgtttttctctggtgagagttcctccctagatgtcagagggcagcgagcaggggggctgctgggcgcagactgtacctgcctggtgccctgtgagcgtgcatggcccctggcagccctgatgtagaccgggcgcctcagatggtgactcagagcaagaaatgcggacgtgcaggatgggccgggagcaagggctatgctgggcactcctgccggccacgggcctcggggctggaagcaggcattgggctctaaggattaggaaaattattttttgagaagttgggacttaagg

SEQ ID NO: 124103 - DNA, 1054 bp, Homo sapiens
ccatcgattcgcaaaggaacaaggaaagaacacgttttacctggatggatggtccccctcacggtggccttggaacccgcttcagcgggagaggcagcgcctcactcacggctccccctggccgctgctttaccagggagcgccaccccgtgccccgccagaggaagtgcaggcgccagcacagcacgggccgaaagccacactgtgggacccgcagcgcagctccaagaaatccaaagtccattcacaagaggagcttctccgccaaatcgttgaaaaataaaacgagaaatgagtcgccaccggtatccgctttagtcagccgtacgaaaacgcaacccggtcagctgcacttctgctgccagccctcctccagtcaagcaccggcctcgagaagggcaaagggcaggtaggagttccgacgcatgcggccacggggcggagtcacagttcagaggcctcagctgaacctgaagttatcctaagctcgagccccagagtgaggactcggggtcaggcatccgattccccatcagctcctttactaaagctgtgcagagaatccgaggctatgagtgggggtgggggaaagatgtacaggatgctttggtttcactcctgagatacgagaacgtcctctgaacacacatgcagatagctggacttctagacagaggaaatccaaatcgtttctttcctcccagcataagggaacggtccggtaagagctggtgtttatcgatgctacgtgccagaatggggctgagcacggcgcctcactgtatcctaacgtctaatgaggcagggaatgtcactgtcacactctgcagacgaggaagccatgctgtcagcaggtacacatcttgccacaaaaccagtaacctgtggcactgagatcgcacaccggtcgtccactgccaagtccgtggcctccttctctggggtttgcctgcctcttgatggcggccatgcctctgtcctctcgcaggggctggctcttccagtggtcactactttttggttgcaagcagcagagattccctggagggcttgt

SEQ ID NO: 124104 - DNA, 1023 bp, Homo sapiens
ttgttctttagacccaacaagccagatctgttaacgccaaaccttcattcccaagacaaccctcccttttgatggccctaaggtgctgccccctaatttcatgacttctgccactgcaaaagcttcccaaattcgtactgaggccacgcctttcagagtggatgcacgaaggagggcggttcatcggaagtgaatctgagattaaacccatgtatcttagctccccagtgctccccttcatcatttctagaacatacgtaatagcatgtcctggtcttcttggtggtctccttagggatataggggaagggcagttttcatatcaactttctttatgttaccatgaattagctgcttgctgaataaacttctcagacaaaaatcccacacttcccgagtattcgcccttccacaccacagtcacttgctctagtgtttgcacacagttacattattatcaaaactgcagttcaactaaatgctccaagtgcaggtgaaggtctgtcctcaaggtgctgcttgaagcaggtgactggaacagttccaggtccctgctgttctggggtgtcagcatcagctccgttcaggggtgacagacagcaaggccccagccgggagaggccaaggggacgggagtgagagggagagctcagaggcagggcaggagcctcaggatgggagatgccagggccttggcaggcggccaccccaggaccaggcaggctccccaagccaggggttctttcccttccaagagcaggactgaaaggaggctcaggagtaaggggcaagggcggatggtggcaggtgcagggggtgaaggggccccgcctgggaaaagatggcaatggagctcaaggaaatagaagcagctacgttgccacggtggccacagtgcaggagcaggtgctgctggggagctgggccccaggctttatctacactgtctcaccgtaagtccgctcccgacttggcaccattgtctgactccacacattgccatagccctgtcaggcaggtgct

SEQ ID NO: 124105 - DNA, 1056 bp, Homo sapiens
ttcagcattcagagcctctgcctctactggggattaatgcaggtttccaacatctctgtgtttggtcagtgctgatctttttcctaactggcgacttattggttccaggagagtactgggcaggctgcaaatgtctgtgttaaaacagctctgctgggctaagacaggacagaagcagacagcaggtggatgagacacaatttcctatccagcagaacctgcagcaagctccacagcaccctccatgggctcagtcttgctcccgggaagatggttaattccatcaggtcagtatttccacacctcccgagcctccactttcctctatgtgttctctgaaacccacccccctgggcttgccacttagatgattccagaattgcctcaccaccctttacttgcagaacctggccttcatgttatggggatgattaggaaagaaagttgcttcaggaaatggccagaaaggggttccacagaactggcttatgaaatagttttgcagaatctgtaattagtaagctggaaacaaaggcaaaagaaaaaacagaaaatcttattgtagaaaacatgctttgcagtgtttgaaaaggctgttcttgttaaattaacccattaataaatacaaaccacataatatttgcttttaaattattgtctgtagtgtcaaaataactggtctatgaagccagtgggagtctgtctagttggaaaatagtagtatttattctttgaggccccaaacataaaagaaagtgttgtttaaataaaaacatggtgtgtgagcatgagaggtgagtggacaatgggaaattacttaatgagtacaatactcatcttttgggtgaacactaacagctcagactttagcactgtgcaacatatccatgtaacagaattacacccgtaccccatacatgtatagaaataaaaaagatgcatcataaactgaacaaaacagcctatgatatatcttgaagaaatcatgctttaaaaatgataatttcattattgtatgggagaaaactcacatggctcataaatgaaaaacatgaa

SEQ ID NO: 124106 - DNA, 1023 bp, Homo sapiens
gcactttaccacaccttgctcttataaattggataatcccccctatgagtacatgtagcattccattttcttacagctgtggagtatttcagtaccacactgtatgggtggttggtgttgatagacacagattctttcaaatcttttgttataacagataatgctgttatcttgctaatataccattttgcagccatctttggaatcagtccctaggagtgacattgctgggtcagaggacacacatctttgtaattctgtaggtgttgtcaaattatcctgcatgcggtcatgtgattcgctcttcccaggcatgaaggccactacttctccacggctccctacctgcacatcaggaatgtcttctgacatttgctgattgaataggtttcctattatattattagtaaggctgagcatctatttagtttcttttcactggaccattccatcaaagttttttgcctattgatctattgagtttttttaatctttttcttattgattttttggagcttttaatatattaaggatgtaagttgtgataagaggtgaaaatacattcttttcctcagtgtctgtcttgatttcttaatttgctgatggtagtttttcatgcagaaattcctattttgaggtagtttaacttataaattattttactgcatttggatttttcagttttaatttaaaaaatcatggaatttgtccatgatttctgttagtatttttatggctttactgataacatttaaatattttatctatttgaaatttatttttatatacatggtgggacatgggtgcaactttcatcttttattatttattttgctgaatgctactcagttgtcctaatgccatttatcacatagtttttttcactaacaactttagatgtcacttttatgacttactaatttccctcctatttttgtgtctatctgtatttcctgtgcttttctgttgttctgtgtgtttattcatgacccagtacaacaatgttttagttattaaaactat

SEQ ID NO: 124107 - DNA, 1147 bp, Homo sapiens
ctccttccactgaagctgcggataaacaggaccttggaggccagtgagctccctgccccagtagggacgtggcctgctctaggcagagggcagttgagcaaaggagagaggcatcaaagtagaatgacttcaacttttttaaaggttgaaaaacgctgaataaaggattactgtaaagagtatgggattgtttatatttgctgagtaatcaataccacatattgctttcacgttgtttgctcagctctgttccagggcacatccaagaagcatgggcatgtttctgtgctcttacaaagcctcctttctattaggaagcctgcagcacacacaaaacagccatcagcaagagtgtctgtggccccagtgctgccctaggcagcacacgagagtgatggactttgagtccctttattttctgctctctggaaggaggggttttaatagaatttatctttttatatattctgcctagcattagagaagcagacaattttagtcaatcattcaagaccatcctgcgacctcagcttttgtgctttacaaccttgtaaagaaacacagcaacataattaattacaattacagcactgtgatgtgaaatttcagccaaaaatctaagtcagccaaaaatctaagtcattgcctttggcctgaattcctttagcataatcttaagacagaacacgcatgcctgatccaagggcctgtgcacatcaggtgcacctcccagcaggaaaggctcggaggcgtgggccaggggatcatgcagagttgggctttcattcagcatccccgggaatcaggacattgcactcacacacacgcttgccacacagcctggcaggagccaagacaaggttgcaacactttcatctttaagaaaggagtttgaaaatattcgctgcaaattaacacaacttttctggctggtatgtacccacaaatggatgcagctgcaccccggaccgacctgggctccctgaaagatcagagggaaatgtgagggacaaacccattcagtgcagagctctctttcttcaagcaagggaaaaaagatttccaaatttgaaaatgaccttcgcacctcccctcctttctgttcccctcttcagtggaatgtttgaacaagcactgatgactcgct

SEQ ID NO: 124108 - DNA, 1079 bp, Homo sapiens
aatgtactttgatgtaagccatccttcctgcacatggccgagaagttcacctctactttatagcaaggcttcttcaaagaaaagcctttcttcaatggaaagacgtccttcaatttacatgctaggacaggcatggatattcatggacgggcttcctaaagcagatatatccacccatttcttaaaatatttgcctagacagttaagacctttgtatagaggcctggctgggattaaggagctcgcctgaagtgcccagagtggtggagggtgtggctggtcccagggtcagaacactcatgcctgtgtgacacaccccagctgtgtggcctgggtgtgtagctcacactctctgagcctccgttcctccaaggacaaaatacaatagtctgtcttgtctagcactgagtttgcagaggggccaccaccaatgcaggcgaagagcccggcctggagcctggctgagagggcagggatggaagacgtgatcgtgggacagtcacatgagagtgctttggaaagttaaggcaccacagaatctccaggtgtgctcttgctaccaggccatgacccgcctgtccacgcgcctgcagggtgtgggtacatgtatattaagtgtgctgatgagatcgcatgcacgcccagcaggcctcccgccctccaggcacgtagaaacctgggcacagcgcctgaacaggcaggtccaggagccaggtgtttggcgccaggtgcgcgtctgtggaatttggctctacagaggtgactcagcagccaggcactcagggccccccgggtgctgaagcgggggcagagcccgggccgcccaggcaggtactgttgtccagactttcacccaggaatgcttcttccagcttttctaaaagggacactggcatcggtcctatcctagaaataaacagccaggaaaccctacccctgaggcatctctgccacaggcctcctggtcaaaggcggagcctccccagccccgggcctgccctacccacctgaggcttcccagtctgagctggtcagctgggttagctccctgcactccctccccaaccccctggccacgc

SEQ ID NO: 124109 - DNA, 1056 bp, Homo sapiens
tctctccatctccacctctctgtatctctccatctctgtctgtcttcatctctgtttctctccatctctgtttctgtccgtctctgtatctcttcatctatctctctctctccatctctgtctcactctgtctctcttcatctctgtctctgtatctcttcatctctgtctatccccatctctatctctctccatccctgtctttgtctctctctgtctctctccatctctgtctctctccatctctctctgtatctcttcatctctgtctctctccatctctgtctctctccatctctatctctcttcatgtctctctgtccgcctcatctctgtctctctccatctctctctgtctcactccatctgtctctcttcatctctgtctctgtctgtctctgcctctctccatctttgtctctcttcatctctgtctctctccgtctctctctgtctgtctccatgtctgtctctctctccatctctctctgtctctgtctctctccatctctgtctctgtccatctctgtatctcttcatctctgtctctctccatctctgtctctccatctctgtgtctctgtccccatctgtgtctctgtccatctctgtctctctgtctctgtctgtatctctctgtctccatctccatctccgtctccccacctcccgctcgccaaggctgctcccctcaccaactcccctacaccatggcttctccctgtctctgactcaacagggactgagtgcagcaagggccctgggggaggtctgggctttctactgccttctggttacagcttctcctcccccgtatctgtccttcctcctggcctaataagtccacattttatttatgtgtgagtacatgtgacaaccaataactaatgtcccaattgaaaaggaaatataacacaaacttaccttagtttgtataatatcaactttctgtctcaatccaggtcttgtccaaaaagtattgattgaggcaaacccctggtacaaaatagaaatttagtgaaattcagcccatttcacttatgtaactccatcaag

SEQ ID NO: 124110 - DNA, 1217 bp, Homo sapiens
acactgggccaggaaactttgtgttctttgcaggaagcagattatgaggtagcttcctatggcctccagcataactgtcttgggattctgggggaagacactgattacctaatctatgacacttgtccctacttttcaattagcgagctctgcctagagagcctggacaccgtcatgctctgcagagagaagctctgtgagagtctgggcctctgtgtggccgaccttcctcttctggcctgcctccttggcaacgacataatcccagagggcatgtttgaaagctttaggtacaaatgcttatcgtcctacacctctgtaaaagagaactttgacaaaaaaggtaacatcatattagctgtgtcagaccatatatcgaaagttctttacttgtatcaaggtgagaaaaaattagaagagatattacctctgggaccaaacaaagctcttttttataaaggaatggcatcatatcttttaccaggacaaaaatctccatggtttttccaaaaacccaaaggtgtaataactttggacaaacaagtaatatccacgagttcagacgccgaatccagggaagaagttcccatgtgttcagatgctgaatccaggcaagaagttcccatgtgtacaggccctgaatccaggcgagaagttcccgtgtatacagattctgaacccaggcaagaagttcccatgtgttcagaccctgaacccaggcaagaagttcccacgtgtacaggccctgaatccaggcgagaagttcccatgtgttcagaccctgaacccaggcaagaagttcccatgtgtacaggccctgaagccaggcaagaagttcccatgtatacagactctgaacccaggcaagaagttcccatgtatacagactctgaacccaggcaagaagttcccatgtatacaggctctgaacccaggcaagaagttcccatgtatacaggccctgaatccaggcaagaagttcccatgtatacaggccctgaatccaggcaagaagttttaatacggacagaccctgaatctaggcaagaaattatgtgtacaggccatgaatccaaacaggaagttcccatatgtacagatcctatatccaagcaagaagactccatgtgtacacacgctgaaatcaatcaaaaattacctgtagcaacagattttgaatttaagctagaagctctcatgtgtacaaaccctgaaat

SEQ ID NO: 124111 - DNA, 1351 bp, Homo sapiens
atgtgggtcaggctggtcttgaactcctgacctcaggtgacccacctgctttgggcctcccaaagtgctgggattacaggcatgagccaccacgcccggccttctccctgtactttaacccacaatgttctctttctctcttgtattcttatagcacttttctataatattcatgtgacagtatccaacattggttgtgagtttccacacatataacgtcacacttcctaacgagacttagagactcctgttgtgcatcctctcagtggccaaacactgaggcagtaatggatcttcactaacaaatccatcagcggatatattttcaatcatggcatattggctgggcagatacacatacctttaagatttcagtgtctgaaaccatggttacttgttgctttacttcaggccccacatttgtggggtcttcttgtttaatttcagggtttgtacacatgagagcttctagcttaaattcaaaatctgttgctacaggtaatttttgattgatttcagcgtgtgtacacatggagtcttcttgcttggatataggatctgtacatatgggaacttcctgtttggattcatggcctgtacacataatttcttgcctagattcagggtctgtccgtattaaaacttcttgcctggattcagggcctgtatacatgggaacttcttgcctggattcagggcctgtatacatgggaacttcttgcctgggttcagagcctgtatacatgggaacttcttgcctgggttcagagtctgtatacatgggaacttcttgcctgggttcagagtctgtatacatgggaacttcttgcctggcttcagggcctgtacacatgggaacttcttgcctgggttcagggtctgaacacatgggaacttctcgcctggattcagggcctgtacacgtgggaacttcttgcctgggttcagggtctgaacacatgggaacttcttgcctgggttcagaatctgtatacacgggaacttctcgcctggattcagggcctgtacacatgggaacttcttgcctggattcagcatctgaacacatgggaacttcttccctggattcggcgtctgaactcgtggatattacttgtttgtccaaagttattacacctttgggtttttggaaaaaccatggagatttttgtcctggtaaaagatatgatgccattcctttataaaaaagagctttgtttggtcccagaggtaatatctcttctaattttttctcaccttgatacaagtaaagaactttcgatatatggtctgacacagctaatatgatgttaccttttttgtcaaagttctcttttacagaggtgtagga

SEQ ID NO: 124112 - DNA, 1233 bp, Homo sapiens
acccagaccctaactctgcttttctcagaaaagatgtgcttttcctaactccgtcccacatcttcagtctggaatgttctgtgctcttcagtgtagccttcagcgctcacctacttaaaagtcctttctgctgaagcctgtcttcttctaggagacttagtggacatctgttggggctctcctggctcttattttcttcttagttatagcaattctctgatcactttgcttgcatacgtccacctctccgggtcatgtgcttctcaagagtgggagctttgccagggaatcgttgtcagatttctgatgtgtgtaattcatccaggtctggaagggtctttattcagtctgaaggacattttaattttgtgtagtattttcatcacaaatcctcgtacacatgagggtattggaagaaacttgaacctttcctttgtgctcactgtcacatgacatctcacccaagtttcatgtcccaccaggttggttttaagaacatgcagaatgtggagcatgttccgctgtccttggacagagccatgcggctggtgaaagatgtcttcatttctgcggctgagagagatgtgtacactggggacgcactccggatctgcatagtgaccaaagagggcatcagggaggaaactgtttccttaaggaaggactgatctgtgtgctcttatcaccaatcagttcagacctggttgattttgtactttggaactgtaccttggatggttttgtttattaaaagagaaacctgaagtactcattttgctataacttgtcttctctaagcaggacagatataggaagtagaatttcttttaattttcttcatttttcccacccttttctatttttctgagattttttttttttttttttttttttttttgcattttaagtaatgaaaacaggtcatgttaattttcccttacactaatgaggtaggaatttctctgtaaaagttgaccttttgagcaaacttatcttatgaagagggctctggtgtttacgcagccagcttgcctgaagggacctttaaaccatccagaagggagagtatttactagggttttattaagactctaatggttataaatgaaatatcttaagatttttcacttctgggactgttaagccatctggaatagctattttggagaaaaatcttcaaccaaaataaaactgtaaaaaaaaaaaaataggcctttatacaagctgtagcca

SEQ ID NO: 124113 - DNA, 1199 bp, Homo sapiens
tttgtgtattctcatggcttccaactgttttacatctgcagtggttaattctcttgtcatctttacctgaagatcataaaaatgcctttctccctcttacccaccctttctgtgttactcaatattgtattttaactcccaagcctacagtttacccttgaacaacacaccaacacggggattggggctgtctgctgggtggcacctgtgcaatggtgactgggttctggctgtcacatgtgcaacagtgtgtgtgctgcagctgtcaccagtgcaacagtggctgtgttccaactgttccctgaagttttagccaaggtgatagtccgttttgtgtcacgttttgacctgatttatttttgcgatgatttgggattgtgattggataccatccttatgaatactgttttcttctttaaggaaagggggctgtatacagctttgatccagtagggtcttaccagagagactccttcaaggctggaggctcagcaagtgccatgctacagcccctgcttgacaaccaggtaatgatactgtgtccaggtaatgatactatgtccaacttgtcatggtgttcagttgaagtgccttcctccaagttctcctcttcattagcttaggagagccaagatataaagactttcttataaattactgtttgagtttggcagacgtgtcctacagaaacctcatggtctctctctgtgttctgcctactctcttgtgggtccttacctactcccatggttttgattgttttcctgtattctcatggcttccaactcttttatgtctgtagtggctaattctcttgctgtctttacctgaagatcataaaaatgcctttttccctcttaccccccctttctgtgttacccaatactgtacttgaactcccaagcatacagttgagccttgaacaacacggggattggggcgccagttccccgagcactggaaaatccacatataactttcgactccaagaaaacttacaaataagcctactgttgactggaagccttgccaataatgtaaactgtggattatcacgtattttacatatgtattatgtgctgtattcttatgataaataaactacaggaaagagaatgttattaagaaaattataggaagagaaaatacatttacaatactgtatttgttgatactgtaagtttacatcatctgtttac

SEQ ID NO: 124114 - DNA, 1086 bp, Homo sapiens
aagtctttgatccacctgtaattcatctggaataaggggtaagatggaatacagacccctcctccccagaagggtgactgtttgtcccattaccatttagggaatagtgggaatcagaattttaaatttaaaattgccgaagatatgttttgctctactatctaaccagctcagttttctgaaatgtgctttttacagaacagacaaaacagtcattggatgcagcggttttcatggagactgtcttacgctgacaaagattattgaagcaagactaaaggtagatgcttttgtacatttctacactattttaaattaatagtaattcattaaattcttttaagcctacagcatgactgttggtcagatagctagagagtcactaggttagtagatgaattacaaatgtatgctagaaatgaaatgatatcattaatgcagggtcattaaagtagcataatgtgaaacagcagcacattccatttgttaaagtcttgtatcatatgaagggttctctacccttttagaaggagcctgggaggagttcttcttctgaagatactcttccctcaaaaacaaagcaaatcaatttctgtggcaggagagagcccaggaaagatttgacacaggagcttggtttgcatcaccatcagttgacaagcttttcctctttacagtgctgtgctcttagttggcaggatgcatgagtagaaatacgaaagaatgaataagctgggagcttggatgggaggcacaacatgcaccattaacgtctgtcacctgaccagcttcagttgatagccagctgccagaagtcaggggtgatcacattctgttttgcctattcatgaataacacttgagattatttacacttatgagtggttactggagtatatagtatatttatttaactgacacatgctttttgaatgtgtagaaaggatttcactcagtatttatcaattgttaatgcttttttagaaacttacattgaaagccatagtgacttacatttattggcatatttatatgataattcctaatgcttattttataaatgggagttagaagacaaaagtaaaca

SEQ ID NO: 124115 - DNA, 1022 bp, Homo sapiens
atctatttgtcattatataagggattgggtataaagaaataagcattatataggcgttatataaggacttggatataaagaaatgaagcaagaaaaaaaaatctcatcttctctaaactcatagagcttgcgttgtagtaccactgtctatacctgatcctcaagggcacagatgtggtatttagttgttctgtattagtagtaccttgcgcgagtaagtatttaatgtgttggtgatgataattcattggcttttctgttaactcctgccaaggagactttgccctgatttaggcttattaataatttttttttcccagacaactcgtagccaggcgttcattctcttcccgctcatctttcctcttcccatttgaatcatgtttttgttgacatctagagtattttatcccattatgtactatggagcattcttctatttgtagggataggattaccaccctggagaattaatttttttcttttttcctcagtactatactggcaattgctggagaagattttgcaattgttgcttctgatactcgattgagtgaagggttttcaattcatacgcgggatagccccaaatgttacaaattgtaagtaaatatttctaaagacatttcacaatgcctttgtaatgatttgatgttgtgagagtttctacttctaaatgatttgtttcatgagtttttaagttgctgttgggagcatttttattagaaaaccattttctaagttaatgtttcctaataatttaatgtgcagtcttaataatatttgctgtattcagggtaccaaaagtgctttcggtaacctaaatgtgttcaccccagcattttaccatgaaaaatttcctgctgtgtcttaacatggtggaaggccagagaaagaaagaagagcaagcgaacccactgctgtgataatgtccattcatgaaagctgagccctaggacctaaacacctggtcccaactcccagtaccatcacaatggcaattaaatttcaacatgagtttt

SEQ ID NO: 124116 - DNA, 1042 bp, Homo sapiens
ggcaattgaccccccccccccccctcagcctcccaaagtgttgggattacaggtgtgagccaccgtgcccggcctcctctcctttaaaatacttataattatgccatcattctgttcatctaagttctaaatcttggatgtcataattggttttcccagttcctaaaacatttgcgtagatataaaaatttgtctattttgtgtgtttgtgatgattttggatttactgttcaccctgctaccttactattgcattagtagtattagaacagtgtttctgtcccatttcacatactatgttattgtcagagcagtcttcctaaaaccccactttgtaaatggaacttttctctctcttgcattccttttttaaagaccaggtctcactctaatgcccaggcacgatcatagctcactgcagccttgaacacctgggctcaagcagtcctcccacctcagcctcttgagtagttacaactacagatcattcttgctcagaataccttcatgatttcttgctaaaattccaaaatctttagcttggcatttgggattttctacagtaggaaccctgtccatcacataaaccttaacgtcactacatgtgcttatgcaaaaagggctgcctgaatgagttgcttgaatgtatgtactatttgaataattacctgtttgccattgcttgctgtttatattacctggaatgccatccttttcttcttgagagctttagcacaaatccctcctcagtaaaaatagtggcttaagtttcctgagtgcttacgtctgtgaggcaccatgcctttaatttccactattgcattgaagcagtggttatagttatcagtcaagccttgtacattaaaatatacacacccaaatatatatacacaccttgtgacacaggtactgttatcatcaacttgcatttggaggatttgtccaagatcacatacctagtaagtagcaagagtgggtctctgtctcatgtaattccagagcccaggtgcttagtcatactccagtgccatagcacttatag

SEQ ID NO: 124117 - DNA, 1881 bp, Homo sapiens
gcagttgtttcttagtgggacttcagcacgccttgattttcccttctgtagttcattgtggcgtaatcatatgttatactgcttgttttctttgtactttttattatcagtgaggttgtgagctctttaaggataggaaatgttatatacattttttattagccaggacaattaacgttcccaccgttattcgagttgccgttgcgccatagttctgacaatttttttgtatggtcagacttaaatttttgtccattggggtgaattccaatgttttcttcgagggggaaaaaaacaaaaaacaaacaaaaaaaaccctttacatccctgtcagcgctttttggaatgggcgggattcaactaccaaagggacaagccgccgtgcagccctccaggagcaacgactagcgtgagatagagaggccgggagcgaacttcaggagaagccggaagtggcgtaacgtccggtcaaggcagccatctcgccgtgagacagcaagtgtcggatccgcaggcgcagccgtgcgatgttgtcctctacagccatgtattcggctcctggcagagacttggggatggaaccgcacagagccgcgggccctttgcagctgcgattttcgccctacgttttcaacggagggtaaaaaccccagagagctgcggctttcactttcgcccttcccccatctgctgaagcctatttaggagtcaccgccgtgatggcgctgccccgggctcctgcaggcctcagaaccctgagctgagggggtccgcacaaggccggtctccctgccgtcctctcatgccctgtgtttccctcttcaggctcgctttgctcaagtttacttggtgattgcgatacagccttggtttttagggtttcccattacagtcatgtcatttgagtttttatgtggaccgccactccgtgctccttgctgctgtaagacagtaaagtagaaattgaaacatagcctctgctctgtggaagaccattaaaactggacctcatgtacacgtttcttatgccagccggcgagggtagagggttagcgtctgaaacttaaaagttagggttgtttggtctgtgttgttagatgcatagctgggttggtagccgagatgtctaattgtagccgcctgatttctgttatttctaattgtagcagtttaatcattttgttttatttcaaatagaaggtgggattggctgagcaaacttagtttcatagataagtgctttttttttttaacgtttagcttaagttcaggaaaacaaaatactcagaagatggaccttttagtatgtgtgttcttgtatgttatgttcaagttttggtttttattttaattaccagctttatcttgagtagtataattttccgtggtggcacgccagagatttagggttatagaaagatgctctgtttaagactcttgacagggaagagctgtaaattgaaacagtggttatagttaccaatcaagccttgtacattaaaatatacacacgcaatttgaacgaaccgatggttcttaaaacagaaaatattggctgggcagtgtggctcgcacctgtaatcccaggactttgggaagccaaggcaggaggatcatcgcttgaggccaggagttgaagaccagcctgcgcagcatagcaagaccccatctctacaaaaataaattttaaaaacaaagcaaaaatgttaattggttcctcataaatttgaaatataaatgcacattttgggagtgtgttagaaagataacgaaagtctgattttagccttggttctgccactaaaggacactttgggtacttctgaacttcttgaacctaaatttccttatcttccttagtagcttcatagtttttggtga

SEQ ID NO: 124118 - DNA, 1232 bp, Homo sapiens
cagatgtgtagtgagtaaagcgatgatgatttaagaaaagtcagataacaggcacagtttgcattaatgtgttctaaagaggtaaggttattacatttataaaaattcagggctttatctttgtgcggcttttttttttttaacagtttcattacagtaggagcttgataaatgatcactctgaagtatattggattgaatttgatatttacttaattttttgcccaagacattgtagaggatgtaaaattggaatatttaaagatctaaactttgcctaacagtgctgtgtatacagtgcttagtgaatattctgctctgatattacattttgcttaggaattatttttctctaggtgtttttcctcaaaagtttttaatgctggttatgacagctcgattttgagcattttccgattatttaaacatgtaacaaaatgatttttgttttgttggcgattttacatgcaatcgccggaaacatggaaggaataaaactttaggattataaggtaaaaacaaatgtattccaaaatagcttcattggttttcatgtttgtgttttgtatagccatagaactggcttataggactgtacaggttacctggatccttaaattaaactttagacttttttccaaagcagcatcactgtttcttggcgtgtgaagataacccaaggaattgaggaagttgctgagaagagtgtgctggagatgctctaggaaaaaattgaatagtgagacgagttccagcgcaagggtttctggtttgccaagaagaaagtgaacatcatggatcagaacaacagcctgccaccttacgctcagggcttggcctcccctcaggtaatatagcaggagggagagaatagggagggcggaaatctgaactgcaagagatggtatcaaaaggcaaggaagggcatttaatgatctgtttttgaaaatggtttaatatgttttttaagccttattttgttgagaagttctattaggctttgaataggcacaatggtgtttatttgggaagtctggaagctaagttatatatttatgaaacacctaatcttttgataaacacttatgagaatgttccaaatgactatatagggtctttgattttgaaaatcaccctcaccaaattattttctagttttatttttccccttttacatttcaagctctcaaccacccatctactttaaaaatttttcagcctgggtgcagtgg

SEQ ID NO: 124119 - DNA, 1260 bp, Homo sapiens
tgtaatatgtccttcacatcttttgcccttttttattattttatttgttgatcttcttttatggagttgtcagagctctttattattctgtttaccagtcctttctcagatgtatgtattatagttatttttttcccagtctggcctgccttttaattttctcaatggtgtctttcaaagaacagaagtttttaatttttccgaagttcagtttatccatttttcttcatgtttatccactgtgtggtattaaagaagaaagcaatgtgtataagaatagctggttcttccgtaattaatgtttaataaccccattattctccgaaggcatctgtctttgcacacctgacctgctgttccaccaagaaagttccacaaacacttagcagcagccagcctaacctgtttttctccttgctttccacagggtgccatgactcccggaatccctatctttagtccaatgatgccttatggcactggactgaccccacagcctattcagaacaccaatagtctgtctattttggaagagcaacaaaggcagcagcagcaacaacaacagcagcagcagcagcagcagcagcaacagcaacagcagcagcagcagcagcagcagcagcagcagcagcagcagcagcagcagcagcagcaacaggcagtggcagctgcagccgttcagcagtcaacgtcccagcaggcaacacagggaacctcaggccaggcaccacagctcttccactcacagactctcacaactgcacccttgccgggcaccactccactgtatccctcccccatgactcccatgacccccatcactcctgccacgccagcttcggagagttctgggattgtaccgcagctgcagtgagtacttcgtgttttatgtttcctcccacttaggagtccctttgagttatgttcctgctctgttttcagatggatccttttattaagggagggagtggcactaacggtaattgtgtatcaaaatttgctttatctcacatttgggaaagggaagcaaagctatcttagtcagtgtcctcagtaaaaggctcttaacaggtttagaaatgtggtcatttgtgtttacatacctgagccaataaaatttaatctgactttcactgtcgttattattatattatagacatttccctgtatctgatatcgctaaatcacaatgttaggtagtctctttcccttatgctattttaggtctttagtcacaatatcagtataatttctggtagt

SEQ ID NO: 124120 - DNA, 1070 bp, Homo sapiens
cacttagctcttgtttttcaaaagatacttactttgagagaactgggcagttcatgcctgcttgttttcattataaatagttacttaggaatagggtggtggtggtagcttttcagagctcacagatgagaattgagtttgtctgtgagaaggctaagggcaggctctggagacagacagactcaaatcctggctcctccacttgggagccattgcgtcctgagcaagttgcactctacctttaagcctcagcttatttatccaaatgtgggaatactggtaacttctacctcagtgcgttatatgtattaaatggaataatctatataaaatgctcaacatgtgcatgatacttgttaaacaataaatgtgagcaattaaaaaaaagtaaagcctggttgaaataatcagatgtctgcataatttctaacgcctcatccaatgaaacttaagtaatttaaatagtcgtgttttctttttaaatctcttacagaaatattgtatccacagtgaatcttggttgtaaacttgacctaaagaccattgcacttcgtgcccgaaacgccgaatataatcccaaggttagatctattttaatgtatttcttttttttttcttttttgtctcctctgccgtgtctctatattttaatgtatttcacgctataaaacaaatgtctgtagatcaggccaggcacagtggctaatgcctgtaatcccagcactttgggaggctgaggaaggagaatttcttgaacctaggagttcaccaccagcccaggcaacatggcaagaccctgtctcttaaaaaaaaaaaaaaaattggccgggcttggtggctcacacgtgtaatcccagcactttgggaggccgaggtgggcggatcatctgaggtcaggagttcaagaccatcctggccaacatagtgaaaccccgtctctactaaaaatacaaaaatttgccgggagtggtggcatgcgcctgtaatcccggctacttgggaggctgaggcaggagaatcacttgatcctgggaggcagaggttgcagtgagcggagattgcgccattgc

SEQ ID NO: 124121 - DNA, 1043 bp, Homo sapiens
atgattttacttcattacgtattgataggcttgtaatctgatttattaattccattaaggtagaaaaggtttattggtttatttgcctcaaaattcatattaataaaacaaaatgtatcagagaagctatagtcatgataagcagcaaatataaagtagaaacagaagcacttgtatttattgagaacataaccaaattttgcaaacatttctcttgatggaatgctcatgtgaaagaacatacagatttggtataacttagtcacaattgattattttctgctccttatgcaaaggaatatttgttacatgtggtgtatgcaaatcctttacagatatacagaaatacagaacaaatattttgataactagatgtactatgtccttcctaccagttgtgatttttttgtcaatgggtggttcgcctaacaacattgagcagtttggcatgacctcactaatgattctctctgaccattgtagcggtttgctgcggtaatcatgaggataagagagccacgaaccacggcactgattttcagttctgggaaaatggtgtgcacaggagccaagaggtagccgtaagaaattcattcttctggtctatgggttatgaatgaaaaggtgatatctcattgtttttaggttattaggttagcactttaacatgttattattgctttcttataaaaaccattttaatatgattctattaattatttttatttatttatttattatttgattctattaatgttagatagcagtgatttcattttcttaaaaattagatatgggcaggcgtggtgtctcaccaaggcgggcaaatcacttgaggccaggagttcgagaccagcctgaccaacatggtgaaactccatctctactaaaaatacaaaaattagccaggcgtggtagtggatgtctgtagtcccagctacttgggaggctgaagcacgagaatcgcttaaatccgggaggtggaggttgcagtgagctgagatcatgctactgtactccagcatgggagacagaacaagaca

SEQ ID NO: 124122 - DNA, 1016 bp, Homo sapiens
ttttttttggtggagtcacctaggctggagtgcagtggcacaatcttggctcactgcaacctccacctcccaggttcaagtgattctcctgcctcagcctcccaagtagctgggattgcaggtgcctggcaccatgcccagctaatttttgtatttttagtagagatagggtttcaccatgttgaccaagctggtctcgaactcttgacctcaggtgagctatccgccttggcctcccaaagtgcttgggattagaggcgtgagccaccatgcctggcccacattctgcttttcttatgtaagctctgaactgctaagtcgtagtttattcaacaaatgacataggaatgtctattcatgatgagtcttggtataaaagaggatagaattagtgaatacattgttcaataataaatctcatcaacattttctgatcaaaatgaagtttgttagttttcctctcagtagaaatgcatgggctaaaatacagaaatagtgatgactgatgatggtgataattcacatccataaaatctagggctacaataatttggcggattgaaaggtcattttggcaggcctacagttttctgtcaaggatccaggaatactttataaggaattgtgaatgcctgtcagtcttttctcctattgcaagaaggctgaccagtttacactttattagtttactgttttggactttttataagttattagtctaaataagtattttagctggctctgagtatgaataactcacttttttcctttccctagtgaagaacagtccagactggcagcaagaaaatatgctagagttgtacagaagttgggttttccagctaagttcttggacttcaagattcagaatatggtggggagctgtgatgtgaagtttcctataaggttagaaggccttgtgctcacccaccaacaatttagtaggtaagtctgaaatgtattatgattgttattggcaacagttcatttataatctaaacattgttcagaataaa

SEQ ID NO: 124123 - DNA, 1705 bp, Homo sapiens
tagtttgtttattcagtatttttccttgtacaggtcctcattttatctaaaagcacacaaagctcttgatttctaaactttttgcaattttccttctagttatgagccagagttatttcctggtttaatctacagaatgatcaaacccagaattgttctccttatttttgtttctggaaaagttgtattaacaggtaagttgtaacaggaagtagtatctgaaagtttgtaagtgttttgagtatggcattttctcagtgctgaaaagaaatttcagtgttcggacagtgggctagcttcttgtacaaaggcctcccacccaaagtctgatgagaaacgtgcccactaaaggcacagtgagagcagggaagtctgaccacagctctgcaagcagacttccatttacagtgaggaggtgagcattgcattgaacaaaagatggcgttttcacttggaattagttatctgaagctttaggattcctcagcaatatgattatgagacaagaaaggaagattcagaaatgagtctagttgaaggcagcaattcagagaagaagattcagttgttatcattgccgtcctgcttggtttatggcctggttcaggaccaaggagagaagtgtgaatacatgcctcttgagctatagaatgagacgctggagtcactaagatgattttttaaaagtattgttttataaacaaaaataagattgtgacaagggattccactattaatgttttcatgcctgtgccttaatctgactgggtatggtgagaattgtgcttgcagctttaaggtaagaattttaccatcttaatatgttaagaagtgccatttcagtctctcatctctactccaacttgtcttcttaggtgctaaagtcagagcagaaatttatgaagcatttgaaaacatctaccctattctaaagggattcaggaagacgacgtaatggctctcatgtacccttgcctcccccacccccttctttttttttttttaaacaaatcagtttgttttggtacctttaaatggtggtgttgtgagaagatggatgttgagttgcagggtgtggcaccaggtgatgcccttctgtaagtgcccaccgcgggatgccgggaaggggcattatttgtgcactgagaacaccgcgcagcgtgactgtgagttgctcataccgtgctgctatctgggcagcgctgcccatttatttatatgtagattttaaacactgctgttgacaagttggtttgagggagaaaactttaagtgttaaagccacctctataattgattggactttttaattttaatgtttttccccatgaaccacagtttttatatttctaccagaaaagtaaaaatcttttttaaaagtgttgtttttctaatttataactcctaggggttatttctgtgccagacacattccacctctccagtattgcaggacagaatatatgtgttaatgaaaatgaatggctgtacatatttttttctttcttcagagtactctgtacaataaatgcagtttataaaagtgttagattgttgttataccttgtaagagtcatgtgatcatactgttttctacaaagttgtattttagatataatgcctgaaaccattttggtgtttgcttcagtcagtatttcattgtatgctgcaatgaaaacagattaatgatctgagaaccttccat

SEQ ID NO: 124124 - DNA, 1035 bp, Homo sapiens
gagctcatagctcctcatcgtgttctcttcaggccatgttttatgagtataatctgtaagaaataacttcatagtaacattagtctgttccttaggagcctataaaagcaggcttttgttatcttgttagaggagttcctcacacagatgggccatgtagaaaggtgttttgcagtgctgatccatttaatagttactaaaagactaaaggttatactgtttatcatacagggttcattttctaaagcaagcatcagggatgggagatgaatgagatgttgcctaaggtacatgaggtttaggcaccattggcccccccgccagaaagaaaaaaggttatttttgcccatttccaacaggtaactttggcttgtaaaatgtgacatgttaacatttttctccttaacctcccctaccataaacgtaaatcacgaaagaaaactaaactcccataaaccagtcactggttcaaataaatacacaggaagaatagatctaggtcttaaacactaaggcagtttttagcaatgcatatgcttttagacaaaatacagaaaaccactcagttgctgtaggaagcttattacagtgaaatttacttatgtttgtagtagttttcaaaacactatgtttcacttggtatttgtccctcctaaaattttttaactatgaaggtaggcacagactctgggcagaattctgcaattagagcagaggctcattcttagtcccttcacaatatattcataggattaagttgccaacattaggtagtaaaagcatcatctgggagatatattttgatgccctctgagtcagataaactgaaataatcactttgaggtgattgagaaggcattagtggcacactggtacagccaggtctgatgggggaactgtgacatgccttttgggtcagtgctacatcaagagtaggaacattcatggagtagatagcatgttaccattggcaacttataggtaaggtattgattatttgaacatgatcttcattgattttagattcttagatat

SEQ ID NO: 124125 - DNA, 1096 bp, Homo sapiens
gctggctggagggtcccacgctggggattcctcctcctcaaactcagcactgggagccccttccaagaccgcccaccaggcatcttgttcatggatggggatcacagccagggtgagtagcgacaccaggacccgtagtcgggccacaccctgccccacccacgcaccccacccccccaccaccaagatgcctccctgtcagccccacgggggccactctaggaccagaagcagggaaatgtcccacccaggaggggcccttcacgtccagatgaggtctcgtcataaccttcagcacctccgggtttgtgtgaaataggcggattgtctgggctccgatgtgtgggaagtgagtttccttccacgtgcaatgaggcagcccccttttctgtgaggaatgcattttctgggaactttgctgcaatgtgttctggctggtgtataaataattccgcacatcgccgccctccggtccttcctgggccctgtgccattctcattcccagttctcctgactcacacatggccgctgaaaaagacctcctgtgttgagcgggaaggccttggctgcagctggtccaggtcctggccgagcccaatggggcccctcctgcctgcagccctgtggctggagagctcgccgtcctcacgcaaacagtccagaccacagcggtggcacatcgtgagaatgacagatgggggatgagcaaggtgccaggggttttaaataagacggccgcgttttgccaaacacctaccccacggggctggaacaagtgacgcagaaatgggcaggaagcgtggaccgcgaactcggggaccaaaaggtcgtgccggagtcactgccagggagagccccgcaccttccagagctctgccggctgaaagcctggtattaaacagcttaatatatctcgctaatgacaggtggtggttttctgctgtgtgagtgatgagaagattacccaagatagaaaggctaatttttgcctccgtgccttcatttagtgagtcagggatctagtgtgtttggaggaataagaaagtgtctgtcttatctagttttgggcctccctgagtttggccctggagaagg

SEQ ID NO: 124126 - DNA, 1050 bp, Homo sapiens
cttcaatagctaaactgtgggctgacgctccctggagccatctcaactcggctgcccaggacccttccccaggccagaggccaggaccccacatacagggctggggacaggcggggtggacccactgcctggggtgctggagatgggcagggtggacccactgcccggggtgctggagatgggctgggtggacccactgcccggggtgctggagatgggcagggtggacccactgcctggggtgctggagatggggctgggtggacccactgcccaggatgctggagatgggctgggtggacacactgcctggggtgctggagatgcccggggtggacccactgcctgaggtgctggagataggcagtgtggacccactgcctggggtgctggagatggggctgggtggacccactgcccgggtgctggagataggcagtgtggacccactgcctggggtgctggagatggggctgggtggacccactgcccggggtgttggagataggcggggtggacccactgactggggtgctggagataggcagggtggacccactgcctgaggtgctggagataggcagggtggacccactgactggggtgctggagatgggtggggtggacccactgcctgaggtgctggagataggcagggtggacccactgcctggggtgctggagatgggtgggatggacccactgcccggggtgctggagatgggcagggtggacccactgcctgaggtgctggagatgggcagggtggacccactgcccgggatgctggagatgggtggggtggacccactgcctggggtgctggagatgggtgggatggacccactgcctggggtgctggagatgggtgggatggacccactgcccggggtgctggagatgggctgggtggacccactgcctggggtgtcgggtacaggcaggtggacccatggcccagctcccagcccagcagcctgttaggaaccttgtacaggggcccttgacaattctgcttttcttctggaaggtttgggaagtattcgcacg

SEQ ID NO: 124127 - DNA, 1033 bp, Homo sapiens
atgagccattcttggcctcagtttcccccatctgtacaatgggagaatggggcttggtctctagacatgttctgtgagatgctgtgagcctaatcccaattcctgtcagggtactgcaacatggccaatgtggcaaatgtgattctggaaatttcttgaaaacttgaaatccctgtgtgcccctgattgggttaaatgttttcaccctgttttcctcctatgcagccatgtgtgtgctgggtggttcacttggtcggtggtctcagtgtctgtctttcccttctccctgcagatgtgaggtgaggatgagccgcagccctttcctgggacatggatgtacatggcgtgttacattcctgaacctactatgtacggtgctttattgccagtgtgcggtctttgttctcctccgtgaaaaactgtgtccgagaacactcgggagaacaaagagacagtgcacatttgtttaatgtgacatcaaagcaagtattgtagcactcggtgaagcagtaagaagcttccttgtcaaaaagagagagagagaaagagagagagaaaacaaaaccacaaatgacaaaaacaaaacggactcacaaaaatatctaaactcgatgagatggagggtcgccccgtgggatggaagtgcagaggtctcagcagactggatttctgtccgggtggtcacaggtgcttttttgccgaggatgcagagcctgctttgggaacgactccagaggggtgctggtgggctctgcaggggcccgcaggaagcaggaatgtcttggaaaccgccacgcgaactttagaaaccacacctcctcgctgtagtatttaagcccatacagaaaccttcctgagagccttaagtggtttttttttttgtttttgttttgttttttttttttttgtttttttttttttttttttacaccataaagtgattattaagctttcctttttactctttggctagctttttttttttttttttttttttaattatctcttggatgacatttacaccgataacaca

SEQ ID NO: 124128 - DNA, 1379 bp, Homo sapiens
agttttaggggtgattcttgccggccaggccacctgggcctgggctgctcagagctgtgtttggtgagctgtgggcggctttggtgagcgtggtccactctcggcatcttgagctgggagcaaagggtgggcttggtagactgggagctattccccctctgtcccttgtctcaagaaatttgccagctcaggctttctgggggtcaatgagctagcacggctgccgtcttctctgtttattaagccagggctagagggtggcggggcacggggactgtgctctgtggacgcagaccacatgagtctcctgcgagccacttctggtcctgttatatttctctgggcctcagtttcctcggatgtgaagaagtgatagcacccaccgcacactcagaagctaagtcattggtaaagcagctaatgcaaacgtggctatcacaaggcatcggaaaatgggagctggtgttattgaattttctcctacgagtggagaacggacccgttactctttggtttggccatggcaagatggccaccaccaggatgtgattcataagtgtcactttttcatgaaaagaaatgctgcttgtaacagttggttgatgggaaattcttactgcatgagtagttctgttctgatcttattttgggtctcaaaaaaaattagtgtcattggaacattgagtcattttcggtaaaaagttgggctccgggcgagcttcgtctttgcctgacaccttctgtgaggtttgcgggcttcattttaaatccgcaggctcctcgggggtgcggaggaagctgaggtttctccggttggtttgtggatagtcacggatgcctcgatgggctggggagagacactttgggctgctagtcctgaacccaggaggtgcagagcccattagccgtctggattggtgaccgggacttcccaagcttcccaggagggggcagggagatctctgtgcctctggagcatcctggctgtgaggctcactgtctccgcgcctgttcacccttggttatatggtggggggggcaggatggagggagatgggaagagactccccagctgggaccagggggccaaggcaaggaggcccagagccacccgcggtgcccaggtgcgggcagtgtgtccatgggcaggactgtgggtcctctccctactgcgggatttggagagacctgagactcccccagcctgtctgctgtagccgtcagcgcctgtgaaggggtggtgtgtgcagctgggtggggtggcggggataggttctcagttctgctccccggtcagtgctggtcttggctctgggccactgccccacctgcacctggccgcctggctgtaaacacggctcgcagatgccagcttctct

SEQ ID NO: 124129 - DNA, 1048 bp, Homo sapiens
cccagagctgctgcgccaaaaagggccagagagccggtccccgcccccgccccggcgctccggccgctctccacggttcggatccagggccccagccttcctctctccataaaaggagggggagtcagtctttggggaaggaggggggcgggtttggggcactcacctggcggctgccacgcgcccccgcccaggatccgaggcctggggcatctgaatgaggaccctccacccacatttccacttgggagcgagctccagtcggggaaagggcctgcagcccgcctcgtccccaccctgggaccccgcgccccccagtcccccactcccgcgccgaaggcagggccgcgccctgagccgggaagtcgaggggatggaagggaaaggagccaccggtgagggtcccccgggttctgagcctcccgcgtcgggatccgtggggcgcacagagcgccacctccggccgaggcgcagctcagagcgcgatgcgggggaggaacgcgcgcggaggccgaggtctgagcgtggctagacggctcccacgccgagaaagggcgggtgcgcctgggctggatggatttcgcctccctagaccaggagggattggaccctgactacaggtccaggtgctcgtcagtgccctgccagggggtctacgcgtcctggtaccgggtccagcggggtggcgtgctgtgcagaccccgaggctagacggcctaggcccctggagcccaggagacgcttccttgggtgagcagcggagaatcccgcccggcccagccgtcacccccaaccctgtcgattaaacccctgcccccgtcgcggtcgccctccctccagacaaaggccgttaaggcgcagccccgcgggcggtctttcatccccagctaggccagctctagcatttcaaaggccgaatccggagagcgcttcgggggctctccccttcccccaaatatttggggagcgacgcctctccctccgctcccagtgggtcgcgtctacacgcgcccttccacacacctgcaggccccctccccacgtctct

SEQ ID NO: 124130 - DNA, 1034 bp, Homo sapiens
gagaatgaggaggacctgaaggacaagctggactttgcccctcccaccccaccccattaccctccacatggtgagtgaccgcggcagaggggagcgccaggaggcgagcccttgttgggtgggaaaggggcttctgagcctgaaggaagcttcagctcttgcagttctgagcccaggcggccgcgtcggaaaggtgcaggcgtctccccactgggctggggctcctgcatcctgggcagagcacgtctctcctcagcatctggagagcccccatgtgccttgcagtgacctctcccctcctctggccagctttattttaaaaaggctgtgggcttctgaaagtgtccagcgcactgccagatggtgtccgcccccctccgttggctgtgcacacaagggtgcattgaactctgggttcctgggcagctctgctggtggttggggggtgttggaaacagtgggatgaggggcttatcatttcaccaagacagagctcagcacgagggccacgggtgaggtgaggtcttcttcatggttccacatgatttccaacctgggaacagggtctcctgctgcgtggcctccccgcccttcccacatttgctccctggccatgttgcgggcacccatgtgcatctctccgcagagcccagcaggtctggctgagtctgagtggaggctcccaggtccagccccaacacatttgctctgccacgccgccggcccaccttgggcttcatctgtttagaaaccgccctcctctcgcggggctgagtgtcttccacttgcacgcggtcaagtgctttcatcacttgagtctatctgcggggcatcttcttaaaagtaaataatagatacgcactgacgaggacaaaaagtaggtgaagcgcagcccacatcagatgcccagcccaaatcagatgcccagctcaaatcagacgcccagctcaaatcacatgcccagctcaaatcagacgcccagctcaaatcaatcagatgcccagcccaaatcaagacgcccagctcaaatcaca

SEQ ID NO: 124131 - DNA, 1102 bp, Homo sapiens
gtgcagaggggctggtgtgtggtgtccactgtggaatcccacggtgcagaggggctggtgagtgtgtgatccactgtgggcttccacggtacagaggggctggtgtgtattgatcagcttagtgatgggaaggttgggtcactggtgtccgatgaggggtgtgtggtgaaccccacagctgggacacagcatcctttgggccagacttcactgcctgggaggcgtgtccggctcgctggcctcagggacgttctgagaccacacccggacccttgtacctttcctgagggctctgagcatgtgccaaggactcactctgcctaacacggggctctgtctggtgcacggctgtgtctgggaggccacggcgccgagagcaggagcccggctgagaccctcgggtttggctctgagttttctcatgtttctttctcgcagtgtaccagatccgcagagctcgtcgggacgtttgtcagccctgaggtgtttctgaagctgatcttatcgacgctgaagaagacgccctctgcctccggcctcctggtgctggcctccgccatgcggggttgcccccgagaagccctccagccgcacctggcagccatcgccacagagctggcacaggcccacatctgccaggcatctgaaaacgtaagagcacttgggagatgcgggagtggagaggaggagcctcccctgcccggccgtcagccatcgtaatgacatgtctgtgggttgccctgtgccgccaggctgggctgtcggaagcacccagcgacgtgtctgtgggtccgccccgtgccgccaggccgggccatcggaaacacctgcagtaaccggagtgccctcgctgatagcccttgttccggggcctcgtcctgggctgtgcagagctccagccccagccccagccccagctgcaggcggccgctcacgtttacattcgttgctgcccctttcttggccacacaccacagttcacgtgtttgatgactcaggaggcgtccatggccgggaccctctggcccatgctgctgggggtagatgtggggtccacgtcatcccacccctgaggagcgtggtcgcacgtccaccatcccat

SEQ ID NO: 124132 - DNA, 1074 bp, Homo sapiens
ttgttattcaccctgcagtttcttttctgattctgagatgcttgtgagagcttcagccatctaggaacgcatacgctgctgcttgaccacgctgtagcaggtagttctattttagttagtaaaataaaaactgatttcagaagaccgagaacattttgacacagtgaggatttaaaaacacatcttgaagagagctctgagtttctctccgtgtttcttggaaggtgcccctggtttcacgagtcagccactttagggttcccctggtctttttctcaggatatatgaggggactagattatgatagaagtgttcctgggcttgtaactatggaaacacttgtctcgtctgtttagaaaacactgctgctggccgtgtttcctgtgagttttgagggtgacctgagttgagttgcgtgtaggcagctcaggttgactgagacaggaatgcgctcgatttcctgcccgttaaaacactctgcatttctttcccgccctctgcagtatggtttgaagtggtgaacatggatttttctcggcttcacatgtacagtcctccccagtgtgtgccggagaacacgggctacacgtatgcgctcaggtgagtgtgcacctgcacgtggggtcctggccttgcaatgcccactcgctgtcgcggtggcgtggaccttaacaggaactccatagtactaccgactacatgctgtattttgaaggtgaaaaaaaataataaactgtatcttatggctttagaggtggttttttcttacggctttaaggtaaactgaatctgttcatcctggtgactgggtggttagtcatcgcacatggcttgctggcttcgaccccacccaggtggttgtgatgttgagaagatgtctctgtggtgatgcctggtgtttgtgagaacgtatcagtggcttggtatttttaagttaacagaaataacctggaaaattatttcccatttcaaaggaaacatcatagaacagcgttgaagctcagggttttgagaacacaacttttgtctgaggcggagttttctgcttttattcatattccgatccactgaacc

SEQ ID NO: 124133 - DNA, 1100 bp, Homo sapiens
gaattgtctgaagcctttagataaattctaaatttagaaggggagcattgacggcccgatcacttggcctcctctcctgcgtggattcattctacggcgcactggtgtattggattaaatctcacgtccgcgtagtgttgacgaggaaacacactctgatgtgtttatagcaaggacgtaggtggggactcagggctctagcatatgccctcaagcagttcttagggtgagttgtagacgctgggccccagcatctgggaatgtgctgtcctacatctgatgtgaaggaagagtggctggggcagatgtcaggagcccatgctggctgacctgtgtgccaccgtacgtttgctttagagtgaggttgtcacccagtaatagttgctcttgaaaatccacagtacattgcactttcagtttatggtttgttcattttgtttcagaatgggggctataagcactgcttacctctgatgagctttttccttctagttccagctattcttcagatgctctggattttgagacggagcacaaattggaccctgtatttgattctccacggatgtcccgccgtagtttgcgcctggccacgacagcatgcaccctgggggatggtgaggctgtgggtgccgacagcggcaccagcagcgctgtctccctgaagaaccgagcggccaggtgagcaccgctgcacttcctctccatctgatctctaacaccagttaaaaccaagcttccatactttttggtctgtaaagccgcaccctgtctcgagcttaaggatatgtgtgtgtatgtgcgtgtacagacacacaaacctgtcatataaagtggtagtttgctgcaaataaagactgaaaggaactctggaatctgtgtggcttgtctagtattgatgttctgctgttcttgtttcaagttctcttcgctggtgcacgccacgtgcagtgccagcactcaggtctggaagctttgtggtcctgtggtgggagctcagctacagctgtcctaccacatgtgtaaagaggaaggaatcttacagattacacatgctgtcgtggacgatctccgtgtccagttcattcttttttctggag

SEQ ID NO: 124134 - DNA, 1043 bp, Homo sapiens
agctttcaccttcagtcagaagatggtatctgcatatatctggaggcattttaggaaataaactgtgaccagtgccataatgctgatttattaaccattgtaacctttacattttttaatgggttttgttcttatttgataagctgagctcaacagcaaaaatgtgtgtgtgtgtgtgtttttttttttaggtcttgatgatgatggtgatcttaaaggtaattattttagtccttttatcttcatatacttttcaaaatagaagttttagttaaatatctgcagactgtgataaacaggttccatctactgtttgaaaactttaggtggaaataaagctgccattcagggaaacggggatgtgggagccgccgccgccaccgcgcacaacggcttctcctgcagcaactgcagcatgctgtccgagcgcaaggacgtgctcacggcgcaccccgcggcccccgggcccgtgtcgagagtttattctagggacaggaatcaaaaatgtaagtctcagtcctttaaaactcagaaaaaggtgtgttttccaaatttaatatttcctttctgtaagtctcagtgtctgcactatttgtcttggagacttaaaattatcccttgaaagcataagaagtacaccccaaaccagctttgtccttcctgtcctcttctagtttacattttatgtggttagtaattttgtacctaaaagtatttgaaattctataaatttggacttgacgtgagcaaaagaaaatttctacgtaagcgaaactaataaaactacagtcactttcagatgcacacctttatttttataaaacggcacagatgttcacacatactgaaggagtggctttgggacgctgctctggtctgtcctgtgaagagtggttatgccagtgttcgtgtcgggaaaacatttcccgtggtcgctagccctgtgcttatggtgatggaggggccttcagagaacctgtaggtctgggaaggacacacgtgactctggtttgttctgggacagcagcagtcactgcaggaaa

SEQ ID NO: 124135 - DNA, 1075 bp, Homo sapiens
gctgggctcttccccaagtgattatctttggtgtccattctaaaagtgcctgaaatgaataatttggctacctgacttatcaggaagtagatattggctttatgggaagaaataacgcatgttcatggttttttaataggcggtgcgtctttctacgtgaataggattttgtggctggccagatacactgcatcatctttttcatcatttttagttcaactttttcaagtggttttaatgaagctcagttatgaatcagaaaattacaaattgaaaactcatgaatcaaaagattgtgaatccgaaagctataagtcaaaaagccatgaatcaaaaggtatttaaatattttttccctcctttttccaccaatcacactttcgcagtggagaaagtgctgtgactttcctcgccaggcgcctccctcgctgcctcctcctgtggtcttggtgctggctctctcctggcttccccctctggatcttgcatccctgggagcttgtggaacttttcgtttgttctgtgtgtggtttggttccctcagagctgatcagtgttgaaacatctttaaagttatttcttaaacaaaaagttaatgtgctcaacttttgatttttattacctttttaaagcaaaaactttacctgagtggtatttagaacctgttttttcagaactttttttctttttgagacggagtttcactcttgttgcccaggctggagtgcagtggtgtgatctcggctcaccgcaacctccgcctcctgggttcaagcgattctcctgcctcagcctcccaagtagctgggactacaggcgcacgccaccacgcccggctaattttttgcatttttactaaagtagacatggggtttcatcatgttagccaagatggtctccaactcctgacctcgtgatcgcccgcctcagcctcccaagtgctgggattacaggcttgagcaactgcgcccaacccagaactattttaagcaggccaatctttgtattgtttgggccacacacacgattcagccagagggtgggggccctttcacgtctcttctcgtggcccggg

SEQ ID NO: 124136 - DNA, 1028 bp, Homo sapiens
gcacatcctctgatcatgttgacttcatcagggtgcgagaagcacttgagcttggcgtcggtgagttccctaagcctcttttgcgtgtgttgcagctcatgccagttactatgggagaatgaatgtgagagaggttctcagagaggatggccacctcagtgtaaatggggaagcgctgtgtaagtatggcttcgttttcctgtgggcgtcggtcgtggagttggtcccacacgctgtcatgttgggtactagcagtagagaatgaacggcccgtgtgacatggtggtcctcactgatgacgacgggctgttggagctgctgcttaagccctcatcacagaagctcatagccaccagatcgcatttgctttgattgttgactgtctcgtgtgtaattgagtttcccagtttctacagactgccattgctatgcacggctgagatggacagagtttgcttgtgaatccgccacactcactgcctgtcaccacacctgcaggcgacgactgtaagggcaagaggcacctcgacgcgcacacagccgcccactcgcagtcgccacggctgcccggtcgggcagggaccctctggcacatctgggcatgtgcaggttgtctctcgccccgtctccgtctcatctcgccctgtcaccatgctatttgtgtcttgtgtggtttgtgcttggaattcaagtgctttaaagtcttgctgtaaaaactgacaggaatagtattaactttggtttaaaacagggtgaatctctctcgaaaagctcccttgtaaatattttttggaagcggagtctcactctgttgcccaggctggagtgcagtggtgcaatcttggctcactgcagcctccacctccagagttcaagcaattctcctgccacagcctcctgagtagctgggactacaggcgcacaccaccacacccagataatttttttgtatttttagtagagacagggtttcactgtgttagccaggatggtctcgatttcctgacctagtgatctgcctgcctcgg

SEQ ID NO: 124137 - DNA, 1025 bp, Homo sapiens
cactgctgtgagccaggcacttcagttgggtgtcctgttgtaagaagtatttttaaatgtcagataagcaagtctttggagctccttaagtgttctaggatagttcaaatgcacatttaaagtactctcatgattcagttagttttaattttaaaaacataatagtattcatcactgtacaaagtacagaaagtatagagaagaaaatgagaagcacccatagtcagccatgtaaggatcaaacctgatactccgggtttctgtggattcctccattcgtgtgccgtgcgccccagagctggcgtcttgctgtaggacactgtttggaggtttaactgactctgtgctcatgcttgtttgactacctggtttcatttctctcttgccatttcagggtgacagtgaggcttttccgtggcattggatgagtggcgtggagcagcaggtggcctctctgtctggacagtgccaccaccatggtgagaatctccgagagctgaccactttgctacagaagctgcaggctcgggtggaccagatggaaggcggcgctgccgggccgtcagcttcggtcagagacgctgtgggacagcccccgagggaggtgggtgctgccgggctaccaggctccatggtgacaccaacgcgcttctgggtgccatgttctctccttttgggagacagaggggacaggagaggtgccgttgtgaaaaggggttgccctttctgttcttagttgttgagagcagtgtgccggagagggagtgggtttcccgtcgtctgccgatgaccaggagctgtgggttccatagcgcacatggaagtggtgggcgggagacttgtgataaccccaagcgggaagtccagcggtcgtggagaaccgtggtctttcctgtcctgttctccagattgccctcttagtggcaggtcatggcgctctgtccctgcagacaggacagccgctgagatggacacaaaccgtctcgtgtgggtcccagacgcacttctcggaggcagcctgagat

SEQ ID NO: 124138 - DNA, 1057 bp, Homo sapiens
ttttctcatcagaccaagtttgttgatggcagggcctctccgatgcacctgtgcgcctcgctgcggggtgcccggtgggtgcttgcgggatggacacgcacctccagagggtgtggacatgccccactatgtccttcagctcctaggatgtgggtcgcacacatcccacgagctcacctatttctgttctttttaacatggtcctgcattattggaggggttattaaatttaatatgaaggaaaacactgtcacaatgacattctagattttgagaggatatataattcttctgaggtatctaagataatggacccgaacagtggaagtgatttagttaaaataggacatttgtgtccgtctgctgttttactaggtggacgtgcaagtcagagaaatggtgaaactcctgttttccgaagatcagcaaggcggttctctggaacagctgctgcagaggttctcatcacagtttgtgagcaaaggcgacttgcagacgatgctgcgagacctgcagctgcagatcctgcggaacgtcacccaccacgtttccgtgaccaagcagctcccaacctcagaagccgtggtgtctgctgtgagcgaggcgggggcgtctggaataacagaggcggtgagtcggcgagtcggcggcaagagatgcttacagtccattctgtgctgagactgaagacctagctgtgaggtgtggatgttgatgtcttgttttaagagtggtctggctggggtgtgcttagctgacgtaagtgagatgagacgtgcctgggcagtgccgtgtgtggagggggcacctgtgcggtgagcttcagctcttgctgtcagtgtcattactgagctgcttcttgggagttctttatactttgtgaatctttttgtcccaaagagcccatctgcctgtgtggtggccacaccttctgcagttccatgaaagtctctccgtgtattagtctgttctcatgctgggcaatttagaaaggatcattgactcacagttgcacatggctgcagaagcctcacagtcatgggggaaggtgaacgag

SEQ ID NO: 124139 - DNA, 1060 bp, Homo sapiens
tcacgagaacagcacgggagaaacccccaccatgactcagtttcccccacccgctccctgccacaatgtgggaattatgggagctgcaattcaagatgagatctggttgggacacagccaagccctatcactcagtaatacctaaattcccagaatttcctgtgttccaggcttgaatgctcatccttgctttattcgtgttttatggcatctgggggatttttctggttcaaagattgatggtggccatggctgagacctgggggaagaggcctcgtgccctcccatctccatctgatggccttggcagtcgggcgcaggactggagtgtggagttgacttctgccatgcctaggaaccctacatagtttccgttgagaagatgctctaatgtaagtgtctggtcctcatccatggcactaaaacccacgtctctcctctcctgttctggtgtttggtcttccgtccctcgtgtctgtccagcaagcacgtgccatcgtgaacagcgccttgaagctgtattcccaagataagaccgggatggtggactttgctctggaatctggtggtgagtaaatagacgttctgattactaagttagatgatcacctgttagcaggggtgtgcacttgagaggctgttgcctaccccacttccagcagtaaggactcctaacttttaaacatctgagaaagggagcatgattctgggcatgaccctggtgttctttcttcctggccagttgtgtttggggggcacaagttctcccctggaagggctgggggtgcatgcttgtggctaagtcgaggttcacagcacagaaagtgtgctcgactgttcactctctcctgtgctgtgatcggggattgttcagtgccttcaggagagactcagcagtgaccacacagctctccccgagggcgtccactcagcagcaagacagaccgagagcagaagcaggctaagcagatggaatgatgggggctgtgtttcaggacctcagagaaatacaaaggccgctgtggtcggggtttgggaaaccctgcaggggcacaagcct

SEQ ID NO: 124140 - DNA, 3329 bp, Homo sapiens
accctgactccccacaccccagcttaggccggcactcgctcccttctgcctgctctcttcccaaagtcggtcttctgtggcccctcctcctgctggtgaggcctcatctccccgggctcagcaggtgctccagagcttccactgtgagtgctgagggcagcagctgagcatggtctgtgtgtccggcggggtcacttctctgccactcattagtgtgtcctgttttggcctcagttttcctaatgtgtataacggggaatcgtgctgacctcaggacatgtcgtgggttacatgaagccctcaacaaaacacaccccttccttccagggaaggcctcgtgactgccatggaggaatgaccttctcttactgatgtggagggaaacggtcctgtttgcttagtgctggctgtggaagggaacggtcctctctgctcagtgttatttttccattcgttcataattgtgtatggtcttgttttcagggattagaaaatgagtatcaggaagaagggcagcttctgggacagttcacgtatgatcaggatggggagtcgctccagatgttccaggccctggtaagaactgggactggcactgcctggggtctctgagtcccacaacttctcgtgacagcagggcccagctggcatcaacagactggaaagcagcgtgaggaccatcctttgaaaaatgttaacctgcgcttcctggctctgcgttaatgagcctttccatggctaatagcgttctcagttttacccgtgcttcatgccctgtgatacattacttagaaggatcatatttaaaaagttaacttccagctgggcgtggtggctcacgtctgtaatcccagcactttgcggggccgaggcaggcggatcacgaggtcaggagttcgagaccagcctgaccaacatggcgaaacccggtctctactaaaaatacaaaaatgagctgggcgtggtggcgcacgcctgtaatcccagctactcaggaggctgaggcaggagaatcgcttgagcccgggaggtggagcttgcagtgagctgagatcgtgccattgtactccagcctgggtgacagggcaagactctgtctcaacaacaacaacaaaaggttaatttccaactcagctgcttcctgtcagacgtcatatttggggaagtgattggacttggggttattaatatgaaatacatgtgtgtgtttttcccaccttgatttcagaaaagacccgacgacacagctttccaaatagtggaacttcggattttttctaactggggccatcctgagtatacctgtctgtatcggttcagagttcatggcgaacctgtcaagtgaagacactactcattatttttgtacatttttgtatatactgggacagcgtgaaacactggaatccttcatggacgagggcatatacaatgatgggacagtgccacactccttcaataaacgtggctgctggccagaggacgtgagcgtgtgacgggcgccttggcgccacctgttgggtgctcactgcctctgcaggtgcagaggggtcagcagcaggagaagcgtgttgaacacgtggctctcagacactccttgtttttaacgggaagctctttgcatttgcatttcctcaacaaaggagcaaagcagaggaagctgagagtctggcgtgttcttgacgctttggtcttcagccttgcactggctcttctaaaggacttttggagggcagataatttcatctgttaaatccaacacacatttctttcagggaaaaacaatgtcaccaaattttcagagttctaaactcctttccttcaagccggaattttccttttttcagcaccagtaggtactaagtctccagatggggaaataactaaaatgtgtttttctgctttgttcgctcttacttctgaggaaggtttccagtcaggactcgctgtaccaatatccatggaggaatatgggagcgtttcgctctccttgtaggctgaagtcagtctgacttgaaggggcctggtttggatctaagcaaacacccagatggggttctctggtctcagcaaggcttttcctgttgggagtcacagtaaacagaaacccaaaaatctcatcttgggtgttttcagggcttgttttgagttttgctgaatagggagcgcaagacgccctgagcctccctctcactggtggtgataagaggagccgtctggtgtgtcagggtcacgaacccgttacatttcaggacgatcctttttccttcagcagcatttcttactggctgtggctggaatctgccttttatcacagctgtcaccattctcacgtgattcttgtgagactctttttggttataattactatttaatatttagactattttactgagcagactttataaatgagatatctacaaggcacttaaagtgttacagatgttttaccttaagaattatttaagttgtgttgggttaagacagttttcagtgtaccgtaaatgttgtgttttcagaaaaagacaaaacgatggtgctgactggttttctgtatattgcacaacagtcctcaaatacactgatgtatgaaactattcatacatcaagcagcatttttttcactctccttagaattggaactatgcagttaaggcagataaaatgtacagatgtttcatatattacaggttacatatataaatcaaaatttcctatataaaactgatttgggatttggggtggaaatattttgaatattaatttatttttaaagatgcaagataggactttgtgcaatgtatttttgtaaatgcttttcaaaatatctgtctttggtagtgcttctgctgctgccaccaaattgataagatgctattaagaggtttaaataaagagttttaatttttaaaagggcatgggatataaacagtctatttcttttctcagtttgtctgtttctgcccctgggatgtgggagggactgggtttgctggttcttgttggcaagctctgtagcacagcctttgaatggtaacctgtcctccaaggccttgaggcctcaagtgtgccaggcacctctttctgtagggcaccatttccacttggaaaacggactgaattacaagttgcttgatgggcagaacattaggaaaactgatgcctttcctcaggacacagttttcatcgctgcttctgtagctgaaggcaggtgctggcaccaggtcacagacgatagcacacacaccacactattttgcacctggcttttccccagttaccaagtgtgtcccgtaagaacctttttttttttaacagctgtttttgtc

SEQ ID NO: 124141 - DNA, 1125 bp, Homo sapiens
actcgggagccctgctcttcttcagccatggccaggtaagccgtcttgcttcctcctgcatccctttctgctccgggcaggcaagtggaggtgggaatgacctcccacctccactgatgggcaaccttgcgctgccctgggcctcggccactggggctgtgggtggcagaggggcccagagtcccccctggcttggctgctccactctcaagactggggctctgcgctgcgtttgtgcacgatggggctgagagggcgttgtgttggtataaacgtccccgtccattttcatgtgattctcggccaggagctctctttttcggcggcattgccaagggacgtggtgctcagaagagactcctcagcaccggccgcactctggcttctgctggaaacccagccttgtctttgctgtcctgaacaggtcagggctttgttcttgattcttgtgtgttgctttctcttgtagcaaaacagtgcagcagacttgtccatgctggtcctggagtccctggagaaggcggaagtggaggtggctgacgagctgctgggtgagcatccggcccttcaccccgggaccctgtgacagcggccccagtacgcccctccccgggtctctgcgctgtgtttcgtgtctgcgtttgggggtcttgtgtgctgtggggtgaactctgctgcagaggcagttcccacccggtctcagtgagccaggccccctggctgaccctggcgcgagcacacggcaggctgagcaggacctgctgtgattcgtaggcagggcatgactggggccctgtcctctccactgctccgatggacagtggcctccccgccagctggcaaggtggggcaccactttggcttgtcggcctgtcctgtcgggtgacgtgcggttggcagagcccttctgtgagctgcctggctgcaagtcccactcctagtccctgctgctctgggagatgccccgggccagagccaggtacccagagcggccacagctgttcctggactccagctccccacggcaccttccccagcccccgcctcggccagggcgtccgtccttccttcctcgctgtgctctggggcatatggcgctggaactgcggtgggcagctcagtgtg

SEQ ID NO: 124142 - DNA, 1022 bp, Homo sapiens
aggacgggcttgggagtggtgtgtgttcatgagatgttgagggttggttgttgggtcagtgtggtgagaacatcaggctggtttctgctgttgatctacatccgaggtgcactggcctgggccctgattatattgcgccctgtaagttgcttctggtaggtgagaagggtcacatggtaacactaattggttatcacaacgaacattagtgcagttggattaagcagctccaagagcttggagaatcaagatgttgcatagctgagtgacttttccccgtggatctgttgatttggtgctgcgtgtgaggcctgggctggctctgagtccctatcaggacctctgcctgtgggctctggctgggctctcctccagggcgggcaggtgggctagaattaacatggagtgtctttccccctttccttttctgtgttatattcgtgaaatgtatttacatttttctgtctttcctttgcagaacaaaactattgtgagtcgaggtatcattttctgcactcagcggacggggagggctgtgccaacatgctggtggagtattccacgtcccgcggcttccgcagcgaggtggacatgttcgtggcccaggccgtgctacagtaggtgtctgtggctcttcgggtctcggcttccattgctgccttggctgggcagccttagaacaggtccccttgtcccctgtccgagccgagctgcaggataaactgagttcactctgggcagagcccacagtgcacttgtcagcctgacccatgatttttcataagtttaaccaatgttaagaagtattttagaaactccccctttcccgacgggcactggagtgccctacacacgcccctcgcctctcgcccactgccgggaggccctgtggtctctgctgtactcaggcctgcctcggccagttctttcccgcactatctggaaatgcgtggaattgtgagcatctaccccgcggcccctcccgccagctcgctggggcgtcctgcaggccaggctccggg

SEQ ID NO: 124143 - DNA, 1222 bp, Homo sapiens
gcaggtgagtgttgggcgcgggcgcggtggtgtgtgcaggtgagtgttgggcgcgggcgcggtggtgtgtgcaggtgagtgttgggcgcgggcgtggtggtggttgcaggtgagtgttgggtgtgggcgtggtgtgtgcaggtgagtgttgggcgtgggcgcggtggtgtgtgcaggtgagtgttgggtgcaggcatggttgcaggtgagtgttgggcgcgggcgcggtggtttgtgcaggtgagtgttgggtgcgggcatggtggttgcaggtgagtgttgggtgtaggcgtggtggtgtgtgcaggtgagtgttgggcgtaggcgtggtggttgcaggtgagtgttgggcatgggcgcggtgtgtgcaggtgagtgttgggcgcgggcgtggtggtgtgtgcaggtgagtgttgggcgcaggcgcggtggtttgtgcaggtgagtgtggtcctgttctgctcacccagcacatccctgtgtgtctctgtcccagtgggaagctgacggtgttcactgtgctgtgtgagcagtaccagccatccctccggcgggaccccatgtacaacgaggtgagagcttggggctggggagggaggaggggaccccacggtctgggtccaccccctctgagcccgctgcctgtgccttgcagtacctcgaccgcataggacagctgttcttcggcgtcccgcccaagcagacgtcttcctacgggggcctgctcggtaagccggggcgcccttgtcacacccactccagccctgggtcggtgtggggtcatcatctctgcccaggcaggtccagtgcggtccttcacgtggaagtggttttctgatcttttaaatgtttctcagtttacttttgttagtaggaaattattagatttcagagttgagaattctggcacggtggctcgcagccccgtctccactccagagctccccatccctgaggtgtcttccatttcctggcagggatcacatcacgtggctggctgcgtgctcccccgtctctctgtgcgccatgctaggtggcctccgtgagcctggtgtgcccgggacgctgccagccgtcgtgctggggcaggcagtgctgccgtggctttggggtcgcggcggggcgggtgtctcactgtgggtggtggttcgtggcaccgcgggagaggcccctcactgagccgcctgccttcccagcgtcacctgtctgggtttattttagt

SEQ ID NO: 124144 - DNA, 1087 bp, Homo sapiens
gacctcaggtgatccgcccacctcggcctcccaaagtgctgggattacagacgtgagccaccatgcccagcgaggtgtacattttgaaggctgggagctgcagggggcacccacagaaccacagcgtgccagggcctggcgagtcatgtgagccagtgttcccacctctcctggtcacaggagactcgtgacgcgtgcccgaccctcacagccaacccagctccctgtcactgagctgttccgggcacattagccggggtcctgtcctgcgcaaggttctgggctctactgtggacgcccctcccccgccgtcgccacacctgcgtccgagtgagggggatggcctgggccccatgtgcctgcctggacgcagaggggttctgtgggagcctggcctggcccaggcgggtggagccttcgactccttgcctgtccgtggtctcccgcttgcctctgtgcccagagacttccttttcctggctgccgggctgtctggggaagcagggcatcctggaactggagaacaatggcctggcttctccccccactgggcaggcccgctgtgccttctttcccgtcagccatgcactctgctgacttccttcaagggaaagaggaacggggagccaggtgatgggagacttagaggctgggagagaaagcccagatgagcctcttcagaagtgggctcttttcctacacgaaagcctgagtttgttgtggcggcgatgaaagattctggaggctccctcagaaggcaggagagaccacagagaagggccgcctgccccccaaccccatgctgcaggtccctcttgggccaggcttgaggaacagagctggcacatgccctccagtcacccgtttcactctgagcactgcctgcccggtggcgggggtgatattcagcttccggggcccgccactgcaccctcagccagcagggaccctgtgggcctctcctccaggccagccccacccttgcactgagagaccaccagcttgaccaccagcttctcccccagttcctggccaccctcccaggccaggccgtccctggcagctgctccttcctggctcccccact

SEQ ID NO: 124145 - DNA, 1044 bp, Homo sapiens
ctgcactctgctcccgtgatcagactccccggaccgtcacgcgggtggcacctgtgcgtgtgcagcctccgagcctggctgtccccgtgcctcctgcgcttgagatggtgtgtcacgtcgtgcacaccaggtggccgtggctgctcgccactgagcacggggggctgtgccgcggtctgtgtcccgccatcgtgggagcgacatttgagttctttccagattgtgtctattataaagctgctttaaatgttcacatacagggtttcatgtgagcgtaattttattttgggtggatcgctaggattgggcatcgctggttcttacagtgtgtgcacatttagcttcatacaaagctgccaaagtggccactctgttttgcgtttctgccagcacctgtccttctaaccccagggaaagcaaagggtcctactgagccctggaattccctgggaggaggggttggcccttcacagtctgttttggtggccggtttccggccaagagccaggggcttgtgggactcgttcctgagccacgcagaggggctgccaaggtcaggttcggggcctgggggaactccccaaagccgggaccttgagaattgtgtgttcttgacggcagcatgggccctcgctgcttaaacaacccttcagagaggttctagaaagcatgggcgccacttctccagggctgcttccccagagctgggaggccggggactccagtggtgagggctggtggctcctgcagggccctggaccctctggagggcatctgggagtcacccctgcccctgagccctcccagcccccgccagggcctgcctgccacggggcccctcagaggagctgctgcccctgccacttcccgtcacacgtctacattgggcagggaggggggttgtgcagattccctcagcacgctggtttattgaatgttttcccggcctcttcctgggttttattatcatttttaatggataagtagttataggctgtggtggtagctcacgaaaccgtctccccagcgtagacagttgagtgg

SEQ ID NO: 124146 - DNA, 1041 bp, Homo sapiens
tccaggccgaaggggtcctcaggcaccgccagccccggctctccaggcggaggggtgggtcttcctcagaagggaacttcagcgaatctcactcctacttctaggtgtcgttttccctctgtaatgttttgaagtggtgagattgaatgctgagtgatcctttgtccgctgagtatgagtaatgcggctgctgcagcctgaggcgtggttcagagacctgcgtgggctccccccttccccctcccccccaggagagctggtgcaggcagaggactggggtgctgggcctccaggtgcactcggcccctcgggacctgctccccgccaggagagctggtgcaggtgcaagagtggggtgctgggcctccaggggcactcggcccctcgggacctgctggggctcaaggcatctgtgcaatagcaatttaaagtctttcagatgtgtattttaggaaatatacacacatttcctaaacagaatgctgtgttaattttttaatggaaaaatactaacgtggagttttcttccagcagtagaaagttgacaactctaatatgtacctttttgtatttggatgataaagagctgatttgctcttagacattttttgaccagctgtgaagttgagatgatttcagcattaaaaatgcctgagacacaattttgaaagatgtgagtcatgagaaagtacagaaaaaaataagtaaaataaaaattcaaaccttgaaatagctgagacatgtcacttaaaaatagctgcaccctgctagtgcaaacccatggcttctggtctctctgcccatcccagcggctgaggaagagctcagctcccaagctctccactcacgtgccctgggtttcctggggagcctgccctgggcgggcgagtggccgatactcctagatttcctgcttgcagcatagagtcagcggatcggggcatctgggtcttggagcgcagccttctcctgtgggcactgggcgggtaagtaacttgtactgtacagctactgatgtaagagacagggcccggactgcag

SEQ ID NO: 124147 - DNA, 2642 bp, Homo sapiens
tcagaaatgtttcctgcagcggcaggcaggtgcagcggcaggcagggttggcggggaggagctgggtgacaggctggtcaccgctggcctttggaccctgcggggcgagcgctttgggattgtagcaattctgtgtgaggagtgcaaggtgaccagtcgtgaggtttcctaagcagccccagggtgaccaggcaagcgtgaccctcgcgaggccccgaggagccagaagccacatctgaccgcagtttagagacatgacgtggccgtgccttgtgtccacccaggtgtgtgcagctcccgagtcacaccctggctgggcctatgcggccaaggctgtctacacggcactgctgaacctcacatccgactgctcggtgctgtctggaatgacggccttcagggcagcgtgacagaagcggttcagggccggcaaatttgttttctgctcaatgtacagcctcagcttgtccctgaaggtctccccgagaaagctgtagatgagggggtttaggcagctgttggagaaggcggcgaggttgacaatgtggcccgtgagggggtgggcatggcggaaagactgcttgcagggagcggccccaggctgcgtccgctgcaggaggtgcacgctgatgaagacgttctccggcagccagcagacgaagaagaccagcaccaccgcgaggatcatgcggagcgccttctgccgccggggccgcagcccacggtgccggtgcgccctgaccagcacccggacaatgagggagtagcacaggccgatgatggcgaagggcacgatgaagcccagcgtgacctcgagccactgcacctcccggacatccgcgaaacagaagcaggcctcgtcggtgtgctgcaggtgcacggcggtgaagggcaccagcgtggctgacacggatgccatccagatgaggccacagctcagccgggcgtggtgcttggtgcggaacaggctgcagcgcatggccctggccagggcgatgtagcggtcgaagctcatccaggtgaggaagaagacgctgctgtacatgttgacctgcaggaagagcgacatgaaggtgcacaggacggcgatgtcgtagtaccgctcgtgcaggttgaacacctcaatgagggagtcggccaccaggatgaggtccgccaccgccaggttgatgaagtacaggtcggggatggtcatcttctcgcggaagctgatgttcaccaccaggatcaggatgttgcccacaaagccgatggggaagaggaagatggtgtagaggcacgagaggaacaggccgatcacgtactgctggtgctccgagagctcacctgtcccattggccagggcggtgcccaggagcgggtgggacaggttgagctcgggggaggtggtgttgggggccgcaggctgcgcggtgcctgggtacatctccaggcccacgccccgggcttgggaagtcacatccatgtctctgcaccgtgcagctttcaagatttgccgaaaggctcccagagctctgttttaaatggtgaatccatctttagaaagaagcgtgattctccttgaagtgagcctggcatttgtcagacaggaaactccccaggaggagcacctgtggtggtttgggttgggtttgttaactgcagagagtgggaagaacagatgctcctcacaccggcatggtgcatccgtggaggcgagggccctccgcgtgctcgtccggcgggcgtccctgcgggtgtcggccaccgtgcacagtcccgcgtggagctgctcactctctgggtacctggagaagcaacaggagaggatgaagtctcatcgagtggccccagctttgggacaaggcctggctcccctggccgggtgtctgtagagtctgggtgtgtcaggagcactggggagggccagaacctcagctttatgagctcgggaggtggctgtggttgagctgaggtggaagagtcgcctgtgggaagtacatggccttctttcctgcaggtcccacggctgctcagctgcagctggaggctggacgtgagtcactcccacaggcaggggtgtttttccctttatagccacagagcaggcccaggaagcaatgaaggtatgggcacggccgccccaggacaacggcatttgtgaggagaggggaaaatgcatttcagcagctgatggagaagtaagataggaagggaaagccagtgtttctgagagagagagagtgggtccagaaagctggacatcagagcagaatcttctcttacgataaaacagaagttcagcggtttcctcatgctagttctgtgttctaggtaccaaaaataaacttattttcgtaatatagagtgaaaggggtcattgttttgggaaataatatgtacgtttttatttcatgttttaacaaattattgtaaaacctaatatgtttttgcaatgctgtttgtaacctaggaagaaactccagggagagagtccctcccgagcttatcctctgcagagagggagaagtgggctgtccgcccacggcggtgcccgggctctgccgccagtggggagggtcccgtcacccaccccgtgtcaccctggctctgccgccagtggagaggtcccgtcacccgccccgtgtcaccccggctctgcc

SEQ ID NO: 124148 - DNA, 1012 bp, Homo sapiens
ccgcccgggaaggagtcctgtggagcgtgagatgtgaagtagatgagctccgagtccctgcccagcgctgccatccgattccagctgttctgcatcctgtggggcgtggtgacccatcagcacctcgtgatgcttacagaatcttctcagtgtggacggtcgaagcaagtccgtgcccctgccatgtgggtcgcacacctgctccgaacaggaacagcaccagcctgcagagaacaggagcagctgctgctgcccgggcggcgccttctgggagcgggcactcctggctttcagggcattggttgctgggggacagtgtgaaaacacagtactcagcaagccagtgccatcagggcgctcactcgcactttctcttaaagcaagtttatgtttaaaataacggtagattcttagtaaattaaaaaaaaaaaaagcatgaggggcctgtgtggcctggcttccccaggacatcgacgtggatgcctcgcacagagctcgtccagagtccacggttgtacgtgcgggtgtgtgcgtgtgtgtgcgccctgcagtttttccaggtgcatagcttcctgtaaccaccactgtggcggtcaagatacaggaggatcctgcactgcacggctcctggtgctgctgctttatagacccttattcatccacggtgcaaagaacatttggatctctgggctttggcttttgtgagtaaagctctgtaaatatgcctgagcatacgtttccatcgctctggggtaagtgcccaggacgtggctgccgggttgcatggtgcatgcatgtttagatgtttacgaagccgctgcgcttctccagagtggccgtgccgttttgcgttcgcactgcaagcacagctgaggccggaccccgcaccctcactggcacatggtgtgatcgctttttcttttttttttttttttttagccatttggatcacagcactcccgtttcgaagaggacagccgattaatgtcctaggaattaggagaagcagaat

SEQ ID NO: 124149 - DNA, 1923 bp, Homo sapiens
agcgttgggaagcgacctggagctggttccttagcctttggaggagctggcagcgggaagagggcctgggaagccagggaatgcggtctcggtggagcccggttcaccagcaggggtcggcagcacgttccttccgagggagctggcggagggagctgccttcagctggattctctgcaaactgcatgcccctgtggccagtttccgggctactgggagggttttcagatggagtgtgggggctcaggggctcatgttcttgtatgtctgggagccagtctcccagtgaaatggggtgtctctgctaatatggatatttccttgctgactctccctggttctcatgggaaattgttttaaaaaaaaaaaagtttcaagcgttttgtgaagctgaacccaagtgcttaggagggtgggcggctgggcctggggagcagcattcctgggctccgggggagcgtgtggaaaagtactgcgctgcttccctcccctcccccagtggatcctggatgaacctccggaatccaccatcgaggatggagaagcctgtgtccccccgtgggccattgtgttgtcctcccagcaacgtccgtctggggagcctgcgggtcagcggccactcccggggccccgtgcagcctcttcccacagcatgagcactctgagcttgcgccaggatcgccgccacgtccccaagtgatgggaacttcatcgccccttggggagtgttccttcagcgttccggttcccactcaggcctgtgggcttggcccgggaagcctcctgggccgggtgcactcactctcccaggcttcagtccctggtgcctctgtctggcgttggtgaggtttggccgttcctcggtcctgggcaccagggcctcagggtctcggctctgggtgttgtttgctgagctccccatcccggagggccctgctggcctggagtgctggggaggtgggcggcttgtggtggcccggcaggaggaacagttgctcccatgggcctgtctcgtgtcttggtgactgggctgtatgattgcccactggtcttaggagggactggcacctgccgcttctgtcctcctcagctctgcgggcaggaggttctgccgctggggttggcgccttgggcctttcctcttgtggaccagaggggtcccagggtttgccctgtctgcttcctgtttcatagctaagccctccccggggagctggggtttaggagttctgttttcacgttcctttaacccttccaggcctggtttcccacttgagcgggttgtgaggatgaggtttcaaatgacacatgtccttcgggaggactgtggggccccggctgagccaggcctgctgcccagcatcccttggggtcggcggacatggtgggaggtcatgtgactcggcaggtctttctgtctttcaccctccccctgcctctccagtctcactaaaggggacccttagcttctctgtttctgtctgaagccacggagccgtatgcgggggaaggcggcatacgcgtgaccaccccatgcagagccagccgagtggctgctggtgtggaggcccctgtgatgacctggccgcctccctgctgctgtcagtgctgtttggctgcctggaaatggaaggtgggctccctcagtccactgctgtcagcatgtcagcagaacccccctggcttcctctgcctcgtaagaatcccttatgtgtgcaacactttccgtccccacgagcatcttgacagctgattcttagcagcctggaggtgccaggggcagaggcgtgggtgctgtgctggtttcagtcacctggccagctggtcctggggaagagactcacccctggtttctgactctggttacctcatggagcccactagcagagaccaggatcccttcctgtggctggctgcgagccg

SEQ ID NO: 124150 - DNA, 1001 bp, Homo sapiens
gtcatggcactcttgttgaaaatcagttgacagtaaatgaaagtaaacgtcattttccataacaaacattcattatctcaaagcttgagtcactttcccttagaactattaaaaggaacctttccataatatggaaaagtcttttatcccttattagcaaatagacatagtgattaagtttttaaatgataacttacagaatgaatatagattttacttaacttttatagtaatgggtgtgtaaatatttgctgaacttttcttatttctctcacaaggtaattggctggcatggtctcttgtctttccagagcccctgtgtcaacagtatctcattcttccaagatttcttattacatagctaattgaaatctgtagcctctggcttctgatgctttttaaagataaggctcaattaaagaataaggggcttggggttttctgattccacaataggaatattcttccaatgtgctgttaccagtgatagccccgagtgggatggggggaacccttgtgcaggctctgccttttggacagggcctttgctctttgactgtctccttggtttctggcctcacctggcatcccaggcctgtcttgacctcccctgactctttttcacagcgaggggtatttagaccacacctgggccctaggtgggctcaatgctgccaggccctttccatgatgatcatgctttttaaactgctgctcttctgtaacctatcctgctttactcttttttttttttttttttttttttaaacacaaggtctcattcttttgcccaggctggagtgcagtggtacagtcatggctcactgcagcctcgacctcccaggctcaagcaatcctcccacctctacctcctgagtagctgggaccacaggtgtgcaccaccaagcgtagccaatttttaaaaaatgttttgtagacgtggagcctcgctatgttgcccaggctggtctcaaactcctgggctcaagcagtctgcccac

SEQ ID NO: 124151 - DNA, 1044 bp, Homo sapiens
tgacagtcccacccaggccctccctgggctccaacctcttctaagcagctccccaccctccctgggtgtcccgtggcccctcgtggggccccccagtctgctccttcaggttcctccactcccagctgcagtgctgccccgtccagtagacctccagggctccattcctgcaggcactgcatacctactgtgtgctgaggaaatgcctactgtgtgctgcacgcctgttatgtgttgatgacacaattgtcgtgtgctgaggatttacctactgtgcgctaaagatttatctactgtgtgctgaggatttacctactgtgcgctaaagatttatctagtgtgtgctgaggatttacctactgtgtgctgaggatttacctactgtgcactaaagatttatctactgtgtgctgaggaaatgcctactgtgcgctaaagatttgtctactgtgtgctgaggatttacctactgtgtgctgaggatttacctattatgtgctgaggatttacctactgtgtgctgaggatttacccactatgtgctgaggatttacctactgtgcgctaaagatttatctagtgtgtgctgaggatttacctactgtgtgctgaggatttacctactatgtgctgaggatttacctactgtgcgctaaagatttatctagtgtgtgctgaggatttacctactgtgtgctgaggatttacctactatgtgctgaggattcacctactgtgcgctgaagatttatctactgtgtgctgaggatttacctactgtgtgctgaggatttacctactatgtgctgaggattgacctactgtgtgctaaagatttatctagtgtgtgctgaggatttacctactgtgtgctgcacacctactatgtgttgctgacacgattgtcctgaactgaagctgaagctatgcttactgtgcgctgaagatttacctactgtgtgctgaggacactgcagggaccacgacagacacattcctgtcctcacattgctcacggacaggcagtgaccagatacacacatg

SEQ ID NO: 124152 - DNA, 1512 bp, Homo sapiens
gaggctgggcttcgggtgggggccccagcccaggtgttcacagtcaagccgccgccagagcaggcctgccttcagccccgggctgggaccggccagtggcacgtgcgtcctgccttctggataggggcctagggtccctgccgttgccgccaaccatcacgagaccaagaggtgaaggggccttgatgggggctggaccccttggtcacacacctcccacctttcccccggtcagaccaacctgcagcggctgatgagctcggccgaggagtgttgccgcaacctcgccttcagcctggccctgcgctccatgcagaacagccccaggtgaggccaccgccggcctctgtcccgccgccaccgctgggccctgctaacccaggtcaccgcttgacccgcctggtggccagaccaggcttccaggcggctcagctcgccctgtcgggtgggggtctggcgtgggcacagggtggaggttcccactgaagtgtgtgggtctttcagcattgcagccgctttcctgcccacgttcatgtactgcctgggcagccaggactttgaggtggtgcagacggccctccggaacctgcctgagtacgctctcctgtgccaaggtgaggactggccccccgcccagggccctggcagccctcggggaggccggaggtgcgtcccccgagggctggctcttgggagtcccgaggtctggtcactgcggccaggatgttgtggccagcgtgacgtgcagggccccgtttcccccacagagcacgcggctgtgctgctccaccgggccttcctggtgggcatgtacggccagatggaccccagcgcgcagatctccgaggccctgaggatcctgcatatggaggccgtgatgtgagcctgtggcagccgacccccctccaagccccggcccgtcccgtccccggggatcctcgaggcaaagcccaggaagcgtgggcgttgctggtctgtccgaggaggtgagggcgccgagccctgaggccaggcaggcccaggagcaatactccgagccctggggtggctccgggccggccgctggcatcaggggccgtccagcaagccctcattcaccttctgggccacagccctgccgcggagcggcggatccccccgggcatggcctgggctggttttgaatgaaacgacctgaactgtctgtgtgctctctggtgtcccatgtcgccctctggccagtgagagcctcaaggaccctggccttggcttcccagccccacagtgcagggagttgagcagggtccggggtggtggagaccagggccaggctgggctctcccttgggccagcagttcccgcaggtgttgagggtcgggggatgctgcccacttggccgcccccgccccacgtcatggtctccctgtcgagtgccggccctgggccctgccgggcctcaagtcctctgcccacggggtcggcctctgttgagtgagtccggccttgtcaggctgcgtgggggactggcccagc

SEQ ID NO: 124153 - DNA, 1016 bp, Homo sapiens
gtacccgcttccccaccgcaggccggaacctgcagcctgtcttctgctggtaccacagagggcagctgactttctctaatcatttctgcttgtggtttttttcacttatatgtcattttatttgttgaaatcacacttgatgtgcagttttgtggagggtttttgaggcagggtgtctgttgccaaggctggagtgcagcggtaccatcatagctcactgcagcctcaaccccctgtgctcaagtgagcctcccacctcagcctcccgagtagctgggatcacaggcacgtgccaccacacccagttactctttttgtatttttgaaaatagagagggctattttcattgcccaggctagtcttgaactcctgggctctggtgatcttctgccgcggcctcacagagtgctgggatggcaggcgtgagccactgcgcctgcttggccgatgtgtagttttggcttgtttcccgctcattgtatcatttggtgtggagctttgcttttattctgtatggggttttcccagaggctggctgtggcctgcctgccctcccgaggtgctcatggaagccgtaaggagccagttcctctgctcatggcgtgccacgcggtggatcacggccacagctggcggccaggctgagtgtgggtgggcaagtgaggggagccagcggccccggcctcagagcgcccctccctgcagctggacggactcatccaccgcttcatcacgctccttgcggacaccagcgactcccgggcgttggagaaccgaggggcggatgccagcatggcctgccggaagctggcggtggcgcacccgctgctgctgctcaggtgctgtcccagaagccctgccctcgccagacactggtttaaccaggggggtctgcggctctccagcctgggcaacaagagcaaaactccaaaaacaacaaaaaaaagcatgttcccatgggctgagcttgaccgggggaagtcaggactgagctgggcctcaggtgggaggagct

SEQ ID NO: 124154 - DNA, 1056 bp, Homo sapiens
gggtccccgtgtgtcctctgccagggtagccacgtgccactttgtccccgcagcgctgtgtgccacaggacaccggcttctcctcgctcttcctgaaggtgctcctgcagatgctgcagtggctggacagccctggcgtggagggcgggcccctgcgggcacagctcaggatgcttgccagccaggcctcagccgggcgcaggctcagtgatggtgaggaccgcgccgggctggcagacggctggggggcactggacaggggctcactcagagtggccaagctgcctggcaccccgaggcctgggcagtggcttggggggtgggtacccgcgtgggcccaggggagcccttctaccgtggggcctccctggatgggatacaccgatggggtgagggctggagccacagggcactcacacagacctcccacagtgcgaggggggctcctgcgcctggccgaggccctggccttccgtcaggacctggaggtggtcagctccaccgtccgtgccgtcatcgccaccctgaggtctggggagcagtgcagcgtggagccggacctgatcagcaaaggtaccttcctggcaccatcctcttgggccacggcggccctgggaagacccaaacctgaggctccttctagctgcccagtgggggacggacagtgtctgctcagcactgtccccggaaagtgcccacagaggtcccctcccagatggctcagggcggggcctcttgagaatgagttggagcttcctccttggggggcccctgatcactgctgcacccagcaaagtgagccccggccccggccgcactctccagccccggccgcactctcctctccggccccggctgcactctcctctctggctccggctggactctgctcttgtgtcccacacatgctcaccccacaccccaccctggctagcccacacccactcagcggcccccacccgacctgggagtgacccacatgtctctttgtcccttgcgcagtcctccaggggctgatcgaggtgaggtccccccacctggaggagctgctgactg

SEQ ID NO: 124155 - DNA, 1018 bp, Homo sapiens
ctgcccccttgtgcggccccaggtctcgggtggggtcaccgagcccacgtggcccagggtctcaggtggggctgccgagtgtgcactgccccaggtctcgggtggggctgccgagtgtgcactgccccaggtcttgggtggggtcaccgagcccacgtggcccagggtctcaggtggggctgccgagtgtgcactgccccaggtcttgggtggggtcaccgagcccacgtggcccagggtctcaggtgggtggggtcactgcacacaggcagccccaggtctcgggtggggtcccgagtgcgcattgcccgggttttgggtggcgttacggagcgcgtgcaccctcagccctgcaggacctggagccgcagcagctgctgctgttcgtgcagtcgtttggcatccccgtgtccagcatgagcaaactcctccagttcctggaccaggcagtggcccacgacccccagactctggagcagaacatcatggacaagagtaagatgccagggacctgcggagtgggttcacacacgctgaccgagccccagcccggccaggcttttggggcctgggtgcgagcgggtgggtgatccgaggtcgggtgggtgtgggtggcactcgagggcaggcttagacctgtgggttggtgaggctggcacagtcaggagggagccgaggcctgggcctgccccaaccctggggccaggcaccccctagggccgtgttttgagcttggagggagctgttggggcctcagtgctgactgagctcacccagcttctgaagtccttgggaagtgctggtgacggtgggggcatctccaactctggtttctgtggagagggaaggacctgctccctggcccctggccgcgcccaggtgtgaccctgctacggtttgcagattacatggcccacctggtggaggtccagcatgagcgcggcgcctccggaggccagactttccactccttgctcacagcctccctgccgccccgccgaggtactggggaggggtg

SEQ ID NO: 124156 - DNA, 1048 bp, Homo sapiens
ggttcgggtggacgtgggtgggtggtgacccctgttgggaggcagacacagtcacaggcgtcgcccttgggaagggcagccggagaagctggccctgtgtgggcctgggcctgtggggtttcccagtggctttgcggagccagagagctggatgggacctggtccagccaagcaaagccccgagggcaggggctggatggggacacgcacatgtccccttggccacgacaaaatggcagtgatgctgcttgccttcctgcagcatctgtgaggatcaaatgcgtgcacctacgcaaagcatccgcacatagcaagtgctcacctagcacaggagccccgtgctcctcccaagtctcagtttccttctcgggagaggaggtgcctctagccttggcaccagcggtgcttggggctgggccccggtgggtctgaaggctgctcacccgttgtccttcctgaagccgacgacagcgagttccaggcgctgctggacatctggtttccggaggagaagccactgcccaccgccttcctggtggacacatcggaggaggcgctgctgcttcctgactggctgaagctgcgcatgatccgttctgaggtgctccgcctggtggacgccggtacggtccaggctgggcttgggcaggggctgctgactcaggggtcccgggccccttgcctgctccttgtgggcctgggcagcctccggctgtggcagaggagaagactggccgggtagcctcaggggatcctgcagaccatatgtcctggccacagcaggctgtgctggaccctgggaggagacctagggcagcctgtgctggccccgtccgagagggtcttactgtcaggctcaggggtctagagtgagaaacaggtcctcgatggaaaaaagagaaagtggtctggggttggagaggaggaggagaagtggtggggcctctgggtgggtccctgaaggatttgggggttggagctgcagccggggaccccagcaaggactgagcaaggggcctgggcccacgtaggtcagtagggctggtgc

SEQ ID NO: 124157 - DNA, 1050 bp, Homo sapiens
cactgcagcgccctcgggcgccatacctgttggtgctgcgggaaggggcctgtgacagggacagcactgtcgggcagcctcccacgcggcctctctctgccccagttcctggccatggtgttccaggacctgctgaccaacaaggacgactacctgcgggcctcgcgggccctgctgcgggagatcatcaagcagaccaagcacgagatcaacttccaggccttctgcctggggctcatgcaggagcgcaaggagccgcagtacctggagatggagttcaaggtgccagccctcgccgctggggcgcctttccctcactgcgggttccacgcgccgccatccccctcgtcctgggtcccatgcacactccaccccttcggatgctctggctgagcgtgggtacggggatgagtgaggctgtttgcggtgacgcgtcccagagggtagcataggctctgtcctgtgtgaggacctatgaggggctgaccaagcacaggggaactggcaacccctaggctggatgggatgaattgctgccggcagcaaggggagcacgggagcagggaggcagggtggggctgcgggctgcctggctgggttggagacttttcgagggctgtggagggagctggcgctggaaggcacagtgagggtggatcacagagatgccaggtccctgcagccaactcgcagccagcctgccggggtggcctgttttgcggacggggctttgtggatctctgttgactgaacctccctcctgtggccagactaggaccttgtgggccaccggccctggtgcccctcctgtcaggcccctctcccaactggtcctgggctctctctctggatccctgcttgtgtgtgtgtatgtgtgcgcatgtgcaagtgtgtgcgtgctgcacccacgtgtttgtggagtggggctcccgggtgtcccttctggatacagaccccgtgccgcgcccacgtgggtgtggagtggggctcccgggtgtcccttctggatacagaccccgtgccgcgcccacgtgggtgtggagtggggct

SEQ ID NO: 124158 - DNA, 1020 bp, Homo sapiens
cccgccgccatggggcgctgcaggcatcaggccggcgccgcgggcctctcgcgcctccttctgggcccgcttcccgccgcactgttttccttccggttgttccggaagtcgggtcctcgagggcggtgagatcggtttccgattccggggtggccgggtggcggcggcggcgctccggtcgcgatgggccagaggtaagtgagccgcggcctgggcgcttcctcattgccgggcgagcgcctggttctcccggctaccgctcccggcctctgggccgtcccttctggttctgccgcctccagcccggcgtccgcgtcgcctgctgccgcccgactgagccgctcccgggcggctgggaggcggggtccctgcagctcctgcagcatcgccccgccgggcgggcgcgggaccactgtccccgggtcccaggcccaagccccgtgcggcaagggagcgaatgagcgagcgaacgagcgaatgagtgaaggaatgaccgcacgctggctcctccgcaggtgacgccgcagccgccgggagccgcgagggacggggcaggatgaaccgggccaagcccaccacggtgcgccggcccagcgccgcggccaaaccctcaggtgcgtctccctcctcgctctgcagcccgggggtctttgggggtctttgggggtctttggggatctcagctgccgcggatcctgcgttgggcttggttgttccgcagccgcggctgtttccaggaattcggtctggaaacactgctctcggtcctcagcggctctgagagtccctgggaggcttgggacagtggcgacttccttcgggaccccggtgatctcgtttcaggctgagctgcaaggcggccgacagtagcggaaggtctccccagccaggaggcgggaggcagcacagtgtagcgtagcacggggtctgcggctgaactgtcggctcagatcctccggactttgccactcgcctgctgtgtgacgctgggcacgtcgcttaacctctctgtgtcccttt

SEQ ID NO: 124159 - DNA, 1063 bp, Homo sapiens
tcccagcgctagggggttcctaggcgcggcgcttcgggggtcctggacacagacacgggggacagagctcctaccagcgacgatcccgagggtctgcagcagaggggctgaggcccgggacgggggtggtcgcagcgccctttcctgaaaaaacggggttcggctctaaggcgcccccaagccctgccggcagcgcggaacccgagccgctcagaagcccgggagccccaagtctccgggaccagaagcgccgcggccctgacttccggaaggtggacggaacccgcggacggggcgggcccgcgtggcgcacgcagagccacttccgggcgcggcgccggcttggtgagcgcgggtacccgcgggcttccccgggcggctgcgtccccagtagcccggccggcctcggcaccgcgtgtcgtgggggtcccgggccgcggctgcagggccggggcggcggcgaggccgaggggcgggaagccactgcccggcctggcagtgtgaacgtgcaagtcgatcccctaacccagaaagccccaggcgcggtctctatgggcggccccgctcctgcttctgttttatttttttacggacagggtctcgctctaccgcccgggttgtaatgcaatggtgtgatcacggctcaccgcagcctcgacctcccgggctgaagcgatcttcccgcctcagcctcctgagtaactgggaccacaggcgcgccctgctggttttttttttttttttttttggtagagatgggggtctcgctatgttggccaggctggtctcgaattcctggcctcaacgatcgtcctgtctcggcctcccaaagtgccgggatgacaggcatgagccaccgcgcctggccccttcttttgaatgggcctccttgcgtttccgtttcaatgccccgtgctacttttttgggagccccaaggctgtactgtttgattgactcctttttttcccctttctttttaacctaaattaaagctgccactgcagagccccgccatggaagacacgccgttggtgatatcgaagcagaagacggaggtggtgt

SEQ ID NO: 124160 - DNA, 1033 bp, Homo sapiens
cattcatggaaggatgaatgaatgaatgaatgaatgaatgaatgaatgaatgaggggatctgagggacttgggagaagcagaaacagaaaagagaaaggagaagttcagttttttccagtcttgaagctgagcgctggcttggactgggaccctgagacctgcctgcccaggagggcttccagaggagccccccaggagtggctgtgggctccccctggcccctgggcctggacctccctctcacccacctcagggcctcggctctgctccgggaggtggtagctcagcactgcagccttcgccactaagtcatgcttttccagtctctctcttgaacaacatctcccaaaaagtgtgatttttcgctccatgctgtctgacacagcagtaacagcccgttaagcaaaataatgagaggaataaaatccgctgagacgcgggacctccagacccacccggcacacaaatcttgaggttatagagcccgcggtctacaggctttcagaggatcaaagtgccgggtgggagacatcaggccgggcgagcgggcggcccggggtggccctgtccctgcagcctggagctccgagcagcgtccctggcagcacctgctgcagccgtgacgggggccgtcttccgtctctgagcggcgggagcctcctggtagcctcccgggctgcatttttgcaatctggggttctgagccccgtgcacctgccctgaagtgttacagaaatggccccggtcaagcctgggactctctccagcccaggccgggcttcctgaactcctcggcccaccgcagagacccagctgcctctctggcctcccttgcctgtgtcctgaggacctgggcctgcctaaagcccccagccctgctccccacccctctcccggcctgaatcccacccaagagctcaccctctcctcagacctgctgggggactctcagtctctatgggggctgtgtggcaggcggggcccacaaaccactgccacaacgccccctgtaccaccactctcccaacacct

SEQ ID NO: 124161 - DNA, 1094 bp, Homo sapiens
gtccccaagcccttgtgtcaccttcccaagatctgaggctgctgaaccttctggttgctgcagcctgggccacggcccacacctgccttccaccccggcttctgtggcatcaagacgggcttggcagctaaagggccacaaacaagccccctgtccccaggtgcaatctcaagtctgcatctggacccggggcgccttcctgacttggtctccccttccccgtccacatccgcatccggaccaggggtaccctcctgccttggtctccccttccccctccacagccagggatctccaaagcaccttcctttcggggagcccggggccggcacctcccctgccggctccccgggagggtctacaagaggctgggccccccagccagcgctgagatgcaccagctccggccggcaggcggctctgctctgatcatgggattttcctttccccgggaagaggcagaggcggggctggagcagccctcacacccccaagggacgtgtctgggtgggctggagagagcagaggtctctgataacatgtgtcccttgcgggctgatttaataaaccttccccacgagtttgtcaaatcctcttcacgcgtctgccaggtggaatgggaaagaaacagcgtgtgaggaccccaggaggcgccaccggtcccctgtccctgcccagccctggctgccgggccagagaaagttctggttctggcagattccccgcttccccccagctccttagtgggcacccaacgctaaatggttcttaagccgctaatgactaattttaagggattagtgctacagcaatcaactgtaattgccaggatgtaacaggatttggggggccccagggctccctccagcctcccggcaggctggagaggacagtgccacctgccggggcctctgagggatcaacctccctccctccctcccactgcacctggcaccgggcagccagcacaagaccattgcagggttagtctgtctctttccttcccacagacaactcgtgcaagttttggagaaatccctgggttttctgcagcccctcacttctcagagtggggtccctggaagcacctgaga

SEQ ID NO: 124162 - DNA, 1150 bp, Homo sapiens
tacagagatctatggagccaaggggctagttcaccaaaataagacctggccgtgtccaccactctgctggtctggctggggttgccgtcacagagccccacggcggggggctgagaccgcaaacgtgtgtctcacacaattctggaggctgaaatctgagatcaaagggcaccggagttggcccctggggaggactctcctcccggcttgtggacggccgccccttgtattcctgtgtgacctttccactgtgcacttggagagctctggtgcccctgctggatcaggacccacccttatgaccttcatcagacttaacttccctccttaaaggtcctatttccaaatacagtcacatggggattaggttagtatctaaatttgggggacacagttcagcctgtaacagttgctctgcacagccccgctcggttacatcatagatgttcgcacacgtctgtgcacgtgaactacctgttatctgttgcacatgcagcgttactaaacagggttcccttatacctcccggggttcctggagtggcgtcttctcttttgctgggaaccttgccgcctttcctctccctgcccctcccagcccgtgtgggccacctgctgtgttccacgccttcctttctcctctgcttgtgcagcggaaggttctgccagcaggggagttagtgagcagccagtggagggtgtgcccagccttcctgctgcagacccgcccccaagtcaacacggacttccctccctgcgtgccagaacttcgcgttgttcttagtggcatctggggtcgaggagggcgactgtcagccagttgggggatgttttcttcttggtctctcggcttctgcttccctgtgagctgggcagcctcagcccaggtcctatccggtactcagctggcctcggtgtgcacagcgcaggcttgagtgcagccgtgggggcgggcagggcagcagcagggcccctgggaacagctgagtctgaagggtcagaagccatggcccctgtggggggctctggggcagccaggggagctgctcgttagtcgtctctggggcagaaggaagggaccttcacctggattgggactgggcctgggtccccagtctcacagggagcttgtcctgattgtacctgcccag

SEQ ID NO: 124163 - DNA, 1022 bp, Homo sapiens
catctgggatgcccctggaccacctcctgccctggtggtccctcccccactgcctccagacttctcaggccaccctctgagtcccttggggcccccagccacagccacgccatgcagagccctaaccccggtctgcggcccagcgccgccaccttacccgcacctctgaggggtcgcgtgagtgctgcatgaccgttctcctccagaaagcagcagaatacatgaaagagggctcacagagcactggccgggcccggcaccccatggcgtctgcagatggccgctgccctcaccctccttcccttcatctccagggtgggcccagcagcagcagcacctctcccacaccctctgcttctcctgggttgcggctgtgacccaggaagtgagagtgggactctccacgacttggagaagggttccaagccctttcgtgggacctacttgctcttacttcctgcgttactctaaccactctagccacctggtttaagccccaggagcacatccgagtgtagtaagtgttcatcatcatcatgcattcattcagcaaacacatcttccacatggagcctgtgccgggatagtcctcggtgctggggctgtggtggtggacaggagtccctgtcaccgcggagctggacttctggcgtggaggacgcctactgagatgagtgtttaggctgatcggggtgtcccgctggcaacagcagtcacccttggcagccggcctctgctgggcccctgctgagcgggcgccgaggcaccgtgctgcttccctgctctgcagagagagacggaggcctggcccttcgcagcccccatctagcgggagggtctcggtgtccactgtctctcccagtggccgacggcccaggtgaggggctgcccgtacccgtctccctctgcttccggctcccttggtggccactgcactgtgcacttgcaggggctgccaagccacagaagccaggccagccggtcccctgcctgtcagctgctgactcacaggggtctttgtc

SEQ ID NO: 124164 - DNA, 1003 bp, Homo sapiens
cttcacagatatgtatttagaaataaagctgtatagctgggtctcctaacctttcacctccttatcacccagagggtgggacttccccagcatggctggcctcggacacctggtcaccgtcttgctgtccttgcaggttgaaggtcgaggagctggaaggcgagcggagtcggctggaggaggaaaagaggatgctggaggcacagctggagcggcgagctctgcaggtgagggcggggcagcctctgggtgaggcactgcctgggcctctcatttctttgggcgtcgtgaacgaccgtggttcctgctgccacagaacacccgttttctggctcgtctgtctgaactctcctccctcccatgtgcacccccttgcctggcagggaggccatgccgctgacaggcctgcactggctgcctctggagtcctctgcggcccgcaccacccacacgcctggtgtcggtggagtgggctctgggcagatttgcactatgcccacccgggatctgctgtggcgaggctggactgctgtttgtgttcttttaattgtactttctctttggttttcatcctcctgagttgctgcatggcaggaagccctcaggttcgaggttaccgggtttttggacaggccattgattttatcttggcacctgttagaggcagatcaaatctattttttatgaccagtttctgacgatgggaggagtgacatctgtggtgatgggcggctccgagccgcgctggcctgtcctcagcctaggacctgtcatcttgttttaactgggccgtggtgtacagggagcggtcacggggctgctgcccgcccaccagaggctctgcgtcagagctgctgaacgtctttctgggtgttgggctgagcagagcctgaaccctgctccttggtgcccacgttgcttgctgactgggggccaggcatccctgcaggcaccacttacggcttccctgctccagcttccagccctttccccaaggtgtcct

SEQ ID NO: 124165 - DNA, 2095 bp, Homo sapiens
agcgcagtggagggagggaggcggagatgtgacgctttgctcagcggagggaaaatcaggctgttgggggctccaggacaggcctttctcaggtctgggttttaaaattggagaaattggagtatcaaccatgtttttctttaggctgtagaaatactggggggtggggttgttgttttgtttattttcctctctgtgttctgctgtgacctttcattgctgatgtagtttgcaggggaacccattgtaactgtattgtttaatggcaggtctgagactcggtttccattcctctgccctcatctgagatggctcagggcaggcctgaaagatgctcctgcttcagtgagcgggttagtggggactctgtggagtgtggggtctggtgtccagcagtgtgtggggttagggggctctgtggactgtggggtctgtggactgtggggtctggtgtccagcagtgagtggggttaggggactctgtggactgtggggtctgtggactgtggggtctggtgtccagcagtgagtggggttaggggactctgtggactgtggggtctggtgtccagcagtgagtggggttagggggtctgtggactgtggggtctggttcccctgagtgcaggtgttcaggaaggatgccagggtcctcttctgcctgtgtgggggcttggcggggggttggcagggggttggtgggggacacacccagagccttcctagttcccagccctgagggctgtcggtgcttccttctcagtgactgagctttctggacccttcagtgaggacccttttcctgttgcctctggaacagcctggggtgggtggagggatgctcccatctgaagatgccctgtggagaccctggtgttctgtgtgtcaacacgctggctgcctcactgttggcctgaattgaaacgtgcctgggggccatgcttctgcatgtgcaggaggccaggagggttagaaatggagttgtctgagcacaggccaagccctcggcattatggctgagccacctgcccggcacctgcagctgccctggagcatggactccccatgtccaacagaggcacggacgcctcggagctggcatcttgacccgggcatcggcccttgtctggctgcaggtggttttggaggagctgctcactccagtcctcttttgtggggagagagacagaaactggtcttgggccctcaggtggggtgggtgtggccgcccctggagtgctggcttctccagatatctggttctggtcagggggctgtgaggtgcgcttggtgcagcgctgggctggaggtttggctgcttttcaacctgtgttttttctcttttttagcccatataatttctgttccttattcatcgtacgcagcaccgtttaagcgctaatgcctgggccccaagctgcagcatttgacttcgaatttggtgggaggattgcccccaagcagaatcatgattttacccctccctgggttgagctcctgttcctggccccgtcctttgtttggagccgcagggctcccgagggacgagaggaggggtctcgctggctgtgtgcccctcttgccatgcaaagcccttcagaggaggtcctggggagagcagtgccaggcaagggggctacagacaccgtggttggggctggcccctgccaggcatgcctgaaggccagtggcctccctcccctgccccccgccaccgcactgggctgtgcagccctgggctccaggttgccccttctctgtgtgacccagagccctcagtgtcatggcttcttcccgggggttacaggtgcatgttcctgtctgaagggggtctctgggctgcgggacagcctgactcccttttcattttatggtggaggaacctgagcgggagctcgccctgagctgggatggctggagtcacccaggtctggctctgaggcccctcccacccagttccctgtgactggctcggcagtgggtgctgtctggggaaggggctcccttgtccctggaaaggctggggcctaggtggtctgcaccctcagggcttgtgtggagaagccacattctaggcagggctgactgtgtcact

SEQ ID NO: 124166 - DNA, 1014 bp, Homo sapiens
ggtggcacgcagtaaacagttcaacccaggagttcaacccgggagctggcattggggcatggatgtgcgcgctggtggccattcattactgatcctccagtttcctttgtcgtctgtgagtgggtgcgctcagcccagggggtgttgtgtgcgcagcgtgtggtgcagaggtagcacctgggacagggggccgggcactgtgcgtgtgggcacagggagcgctgctcctcctccttagacctgaggctcctgtctgggcaaggtctagccctccacctaggagcttacggaatcttcagtggggacagatggtctggaaaggactcacctcttttcccacccttggttgaatgtggccccttgggcacaggcgggcagcgctcacccctttcctacactaagacgtcctcacggcttagtgtagggcaggcgggtgaggcggggtttgtgtcgcttctgatctggaaggggtttagcagctgaggagatgatcgccacgcagagttccgtctccagaaaaataagaggatttgcacagttcttgaacttcacccttccaaagttttcacctcttgtagactagaagttttaagtgagcttctgtgtgtcgaaatcatttcatgggcagtgccccagccggagcctgtctggaggggagggttgggtgggcacgggcgccgggcctgggaggaggaggacaacatgggtttcctagctcgctggacggccctgaggttgtgggggcctttggtggctgaaaggggtcttgtatttctgtgcacattgaaaggcgatcttatttgcctgcgctgccgtccagctgaggacagggacatagggtgcctgtgagtgcaggcctggaaagggatgggactcccctctgtagggagggcggggcttcagtccacctggggcgtggggcctgcgccaccacccgcatcccaggagaggcactgattgcagggctcggcctggggcttacatgggaccctccttgactccctagaggcagcc

SEQ ID NO: 124167 - DNA, 1023 bp, Homo sapiens
gggaacctcctggtttcttaagtgaggccagcggttggaagctgatgggcagagttcccttgacaggtcacgtgtgggcctgagtgttcttgtgtgctgggtctggcctgcagcctgtgacccacgcgacactggtgctgctgcccacaccctcttagtgccagggctcccggccgtgatgaggagttacatgcagtcactggatgtctggtgtggttttcatccctgtggggctccctcatggtctagtggagccccgcagccttctgggaagtctgtgcccggcttccttcctgccgttgctctttgatggccaccccggcccgctcagggcaggaagtttctgttcttctctgctctgctttgcaggtggagagcctctggcactttctggcccgcgccagcctcaccccgaccctgctgtgctcgcgggcctgctctgtgttagcaagaaggtgggtattgatcgccgggcatggactggttgtttatcctgacgaaggattgatcccagtcgcccgtgtagccccaggccagggatgcaggatccgtccagccagccgtgatgaagctgttcactcagccatctggagggagcggcgtgcctgctgctctgggtctgtgtgccttggtgtcggccagtgcccacctcagctctgcatggcagcccgcccagctggggtggtcgaggagcgccttctctcaaggcgcacccaggagggctgcgagcctccggctggtgggggctctgggcctctgcttcccattggaggctctccttgtgtgcttgacattttagtacacggtgcttggagtgtgtggttttatttcgagacctttattaaacggctctagtctaaggatttaattgttactgatagctaagagtataattaccttggtaaaatatcatgactattttaagcagttgaaaattggcttctggaactgggtgaacacaaaccattttcctgtttgaaatgagccgtttctccagtgccccaagcttccgcagtatggctg

SEQ ID NO: 124168 - DNA, 1016 bp, Homo sapiens
cccagtgcttagcgccaggctgggctttcaacctcacagaatgtttttagaacaggccccccaaccaggcgcctggcgcttgcttccccgcaccacgctgcacatctgcggtgattcagaggggaagcgctggctctgcaatctcgctcattcagaagtcccgtctcctgaagggctgcgtcgccgacaatttttcccattgtgtgtggagttgagctcccttccccctccctgccgtgttctgggatcaccctgggagtctatttgaaatccagaaactcctgaaaggccttaagtagctattcagcagtgcggaaatggcagtgagggggttgcacgtgcagctctattttaggatgtcctggtgggctcgttcctggggtggggcggggcttggtggggtggtcaccccaggcttcattgctttgccctcttgtctctcccatgcagcgcccgggggctggagaaggccaggcagcagctgcaggaggagctccggcaggtcagcggccagctgttggaggagaggaagaagcgcgagacccacgaggcgctggcccggaggctccagaaacgggtcctgctgctcaccaaggtgatgtatgcccttacatcttgatcagagtcgcagggagctgcgggtcagtgcacacctggttagctggatctcactgtggaggcaggagtgctgcagccgggtcagggttggcactttggccctgggttgccaggagggttctgggaatgccagagagtgctcagccccggtgctccctgtgggactctctgggcctgctgcgtgccccacccttttcagttcctccagcatctcagtgtccacccctggcctggtgctgagctctggagagggttccctgtcactgcggaccccctgcaggctcccacgtgccttgcagtcagcaccctcatgctttcccatccagtgatgccatttacactgtgtgggtcttggcctgggcttgggatgaaggctgtcacctgcttccaggtgtgcc

SEQ ID NO: 124169 - DNA, 1090 bp, Homo sapiens
gggaggctgtgtgcgcagcacagggaggcgtctggaatggccgggtgggggtctggaacccatacttggtagcgcctgtttggtctgtcccgtgctcttcctgcgagccctcgcgggggccctgcacttccccaggagctgcctcagagatgtgccagtgaagaagggatggaactgatcgtggatcgggccggctcctggaggccacctgggcccatttctgacagccgctcctgccgcgtccctagctcagaaggagctcgaggctgagccgtttccccagggctgctgcctttgtttctcccattctgaaaggagatgaaagtttctactgaccttagagagaaagccagagtgaaaccccctctgccaacccctggctccctgtgaaaagccttcctggtaatcaagtgtttacagaggaaggctttgttcagaccctttctggggctctgtatgtttaaacaaagagctttttagacctaaacacagatgttcatttgaaaatgaaaaatcaaattaagcagaaccagcctttgaaagttaatgccctatagcaagtaaaacaaagggagaaaaacactgtgttgtaaattttacttaaataactttttattttaaataaagttttaaactaaaaaagtataatttgaaagccactcatcttcctctctgtcctccagtagaacatctgtgctgattctgacgcggatgaatgacatgaattaaaccaaaaccgtcggagcgctctttttaccataattacaccttgttcgtttgtgagacacaatgtggggatgaaatgccaattaagcctgctatgataatgaggtggggcctgaatagtgatcagcggacatgaatcccaccggaattcatttgctacagcccccaagtttgttctcttctgatgggaatgttatcgtacataatgaaaatctttagtgctccttgtatttaaaaatgatccattttggggtttttggtcagcaagttttaaaacaggtgttttccgagcacctggatgggtttcatgtccccactgagcatcctgttggtggggggtgggggggtgccggtgtctcctgtc

SEQ ID NO: 124170 - DNA, 1084 bp, Homo sapiens
gtgaagtcccgggttgggggacatagacccggtgcccatcctgccaatgccgggttctctgtggccccccagtatggtctgggggcctgtctgaggcaccatcatgtttcaggctgcagctggctgctgggcctgagatcgagccccatctctcctgagagggggtccagcccatcctggctccaggggaaagcctgggtcatcagcaggcatggtcgggtgtcatggctgtgccccgcagcacgcggtgtctgcctgcttggaggggcctccgcagtggggcactgcgtggccctgtaggatgcaggcaggctttggcaaggctggccctgctctaggtgggtgtctgaacctgttccctccccaggcagagcccgcaaggcgagcacacgctccttcatgacggggccgggtccagcgtccgctgccgctgggctctggggtctgtccggggtgcctccgcctgctgctttagccagcttgtgttgcttctttcagcaagatgagctgccgttaatatttcacacccagactgtttccctgaatgttttgcatttccatatttaaaatggcatttacatattcatggctttttaaataagtttttattgttaagggatgtggaagtggatgaaatgtgaaactcccccttttattcaagcactagaaaaaaatttcatcccaaatgcaatcactttctgagtgtttagctctgtggcagttgccataggagattgttccagaagccagtgggtcccagggccatggagccgccctttctggcatgcagggactgggggaaggcaactgccatcagcattgctttccagccgaggttgggcatggaggcctggttgctccttggggtttctcctggcgggggcctggcctcgtgctgggatgcggggccggctcccacccacatccatggctcttgttttggaggaagtgtctaaggcagacgaggctcttcatcttggaagtggctaagccagggatgcctggcttcttttctcccttctccctggtcactcggcgtccctgccctggttggcctcttgctcccggctttgcggctgcggct

SEQ ID NO: 124171 - DNA, 1224 bp, Homo sapiens
tgaaaccacaccttgcctgggtccctttccatggggtaagagtgacctttcctctgtctgctgggaagagtgtgagtggcatcgtctgccatgtggccagggtgtcacggagcggcccaggctcttggtgagagggactggtgccccatgtgaatcccctgacttggggttcctctgatcttgggaccagagagtctgagctccagcttagtggcctcaggctgggtgcagcaggtgcagcaggtgcagcctcaggcaggtggctcctgcagaacctgacccagggccgggtactgcacagcatggcattagtcccctgtcttcaggaaaacaccagctgctcctcccgtgttctggggccatgcatctctcccaacctggcgaccccacctttccacacaattgtgttgcatcagccagaaaagtccggctgacatgacgccctgttgcccttgtgactttgcagttgtgaatgctgattgtcctttggtttgtagcactgaggttttgctgtctaatgtattttattcctatttctgcatacttttcgcaaaacaagccctgcagagacagcctgtgtcgcttgggttgtgttccctgccttccgcagggctctggctggagccccagcctcagcagttttggactgtggtcctaggccctgtggatttctattctttgaaagcttgaggtgtcttgtttgctaattagtttgatggctgttgctgtttcattcattttccacctcggagtcctctgggtctccagtttttcagactcggtgaaactggcactttgggcttcagctagagccccaacatctgctattagccccaaaatagctgtggcttgggctggagctgctctcgcctcggaaggaaagcagtaggccggactccccacagccctctgctgctctgcgtgcagctgggcttgagtcaaaattcagctgcagatagaacaaaaagactttcttccccttgaaaacccaccagttagaatttaaaaggcttcgcagctgaagcccgcgtgttcagcagcagatgtcacagcttggactgcagttggaactgtcactgccgtgtcatctccgagctgaggctcctgaggcctctgaatgccttccactttgtagttggtgaagtgcgggtttcagaatggactgtcgggagttattcttaggccgtaataatacttggcacggctcctcctggttacgagcac

SEQ ID NO: 124172 - DNA, 1040 bp, Homo sapiens
agagcctgtccccacaggtgtcagtcatggcgatgtcggctgcagtccttctccagagccactgagactgcccttcttgttgaagatgcaaactctggcctgtgagtttatcccgagctttcaggcaggcgtttacagagtcgagcagaaacttttcacagatgacaaagacttgatggcaatggttaatttcttactgataatttttaagtgtgaaatgcctgatgaggttttatataattttcaaacatgaaatgtctgatgtggttttaatagtaatgcaactaatgaggaaattgggttgtttctgtggcatccaaaacaaagataaaaaggcgattaaaaaattagacaaaatattactaaggataataattcagcctgtttcaaagaagtcagtggatgttaacatctgattcattgaaatgggtgaacataatttttatgaagaaaacagtcttgagatgtacaatgttgagacaaaatattcccggaatataccaaagcatatcaaatgaagagactgggtaagtctgagatagagtgaaccatttttaatttcataaaacctcatgaatacatctgctgtacatgaatgcatagcactaggccacttgagaaccagtggcctagaaagtgccagattcaaattaaagaagtaatgtggctaatcattttaggtcattgaaattgtggctgtaacactatgttgttactgcctgatatcagggagagcacttgaaggactcggatacagaaaaacttgaccagactatttcataagcattttggtctgtgtttctcctgacattaaaacatattatggaatgtgaaggcattgacagatctccagggatttccactgaagcgcaccatttctgaaatacgtcttttaataacatattagcgattcacagttcacctggagaaggctgggtgtctcttctgatttcacaaccctggccacacagctcaccaagcaaacagttattactagcgtatgttttttagaggagctcttgcctatcttttgataaatt

SEQ ID NO: 124173 - DNA, 2112 bp, Homo sapiens
actactttaaagaactgcagggtgtgctggagtgcagacggactcagactccagcagcccctgttgatggacacttagggtgtttccagcttctttccccaattagccatgctatgctggttgggtaaattcttaaaaggatgatttttagttcaaaagagatgtgcgtttgagactcctagctggtgccacaccgccctcccgaaaagcatgagtgctgtgcgctcccgtcacggcgtgtgactgccgtcacctaatgggggtggtgtgctttcaacgtttctagagagattcagctcgaagtcacagtacagtgaggagagcaggcatcttcaaaggcttggcttttcaaaactgtcatttagcagctcccactgagggggaccctatgaaataggaagggagtgggtgtcaagtcctgtagccgagcccccacttcagggaggaaatcatttgctcgtggccaagatgccgctgtttttggctccttgcctgtcccgttgtgcctgaatctggccttgcttcccatcccggcgggtgggcattatacccgtcagcaagggcaggcctgagggggtgaggaggggctgcagaggaggctgggctggggaggtgggaggcgggcattgctggctcagagtcctggcagctgtgcccacctggaactgctgacccatcccctgtagtcaaagctgggcacctgtcagtgctgacctggacattttcccaaaaacttttgtagactggtcagatgacaagtctcagggcccagcttccctgatgtgtgaggccaattaggaggacagtgaggggatgcatgattttcctctaaggaagggtctaattgaccagcctggacagttttattatcctagttaccgtgcgcgtgatttgtaattacccggctgttgagttgatcaataccagacgccctggtggtgcttgggaaggtgggcgactgtcaggtatgttggtccattttaattggcgccggtttggttttctttggggcatgggaggaggagggggagaagcgtttggccttctggctacttgtgtgagcatggcccttcttctgggcctgcatgccggatgcctcgtggtctgggccacgtttccccttttcgtttgttcattcgttcaccatgagctgctcttgtggagcccatgatctggagggagaaggatccctcaggcctgtgcgtctgtggtgtgcaggtcccaggaccctggagctggagagtggcgagtgtgctgccctccagaggtgcaggccagggtggggcgtgagccaggttcccagctccgtccgagcacggtgcctgccatctctcctcttctcaaccccagctcctcctgtggctgagtcctggccgctttctgccttggggttgtgttggttttccgtaaacgcatcctctcaatcctgagcattgtgagttaagagctggggtctccctttagcgcccctgagccagacgtgcagtaggcgtgtgctgagcctttgaagagtggaggaccgagcgagggcgtctctgtgccttgcagttggtggtgatgtatgggcggagcctccagtgctcttggctgctgtgacagggcccccctggggtcctgcactatcccagcgagacccccaaagcaaggccagcagagagcttcctgacagctgcctcgctttggcgacggccctggctggggtgcagcctgtgcccctctccgcccccttgtgaagtttcggatgggcgttcccagcagtgctgacaggctcacgccgcccttgggcttcattccaggtacggtcgggcaggctggagactgtcagagtctgggggcggtgctgtgggtgttgggaccccgcagggagaggcgagagaagggcttcccagaagagaccgttgggctccacccctgcatgtgcctgactgcacagacagctgagtgctctgcggcgtgtccgggtggaaacgctatcacttggtctcggagctctttttggggcttttctccaagctttgtagatagggctcttctacttataggtctctttttaaattgattttaaaaagtctaaggccagagtgacaggctttagacaagtccggctgccgt

SEQ ID NO: 124174 - DNA, 1050 bp, Homo sapiens
tttctagagcaattttaggttcacagcaaaatgagcagaaggtaaagctcctgtgtaccccctgcgcccgctcctacacacacagcctaccctggtagagtggagcacgtgtgacggtgatgaacctgcctggacacatcagtgtcacgcagagtccacgggtcatgcgagggtcactcttggagtgggacagtgtatggttcgggcagatgtaaaatgttctatatttgccattagagtgtcacacagaaaagttttactgcctaaaaatcctctctgctcccccagtcaatccctgcctctctccttctgagcccttgacaaccccttcctttcccagaacgtcctgtggttggatcctgcagtgtgtatagccgttgcagaccggcttccttctcttagccgtgtgcgtgtgattttctccaggtctcttcgtggctcatttttcccttcttctctgtccctggcctccatcaggatctggagcagaagctgtccctgcaagagcaggatgcagcgattgtgaagaacatgaagtctgagctggtacggctccctaggctggaacgggagctgaagcagctgcgggaggagagcgcgcacctgcggtgaggggttgcgggggatggggcagccgcctcgagtgagtctgggtttgtgcacatggagcccactgtgcagaccctgtaggggcagggctcccgggctcttggccttatccctagggtgtgtggctatttgagcgactctttgtggcactgccagggagatgagagagaccaacgggctgctccaggaagagctggaagggctgcagaggaagctggggcgccaggagaagatgcaggagacgctggttggcttggagctggagaacgaggtgagggcctgtgtggtgtgcggttcctgtgggtgtcctctgccctgcctggaggagcctcggtattgtggtcacgcccaccagctgctcacctacaacatggaggttgctgtgatggggtgggaggcagaatcgtggtccccagagaggtccatgcctcatcctcagag

SEQ ID NO: 124175 - DNA, 1006 bp, Homo sapiens
gtgccaggcctgagagtccgggcccatcttggctggtggaggcttttgcttctgaagccgcctcaccaagcctcctttccagggcccctggctggggcccggtctcctctgtcagctcctgggtggcttgtggcaggctctgggctgtgctgctctggagcaccaggaggagggtgggccctgcgtgtgagcgtctgcctgacctgcatcctccagaaggaggtggctctgccccctggccctctgctcccctgctcctcttccccctgccctctgccccccttgcccccttgccatctgcccccctaccgctctgcccccctacccctctgcccgatgcccctctgcccccttattcctctgcccctctgcctcctgccctgattatagcacgtgggtggtgtcgcctctccactcttctcatctccatgtgcaggctccttccacgcacgggctccactcactgagcggctctctggtcccctctacttttagaccatcaacgcactgaaggggaggatctcggaactgcagtggagcgtgatggaccaggagatgcgggtgaagcgcctggagtcggagaagcaggagctgcaggagcagctggacctgcaacacaagtgggcggggccagggtgtggggtcgggggtcgggtcacgtgtgggggcatgcgtcccacctctctcctggtggctgggtgggatgtggatacactcccagatgctgtcctaattcacagacactcaagaggggcagatgctgaggcctctggagccaggaccgtgagcccagaaagtgtcctgatgttcctggagcagaatgggggcagcaacttcctccccctccttcttagagagggctcctgcagagccagattttactttattttttgagacagggtctcactctgtcgtccagcctggagtgcaatggtgtaatcatggctcactgtagcctcaacctcctgggctcaagtgatcctcctgccttagcctcccgagtaac

SEQ ID NO: 124176 - DNA, 1023 bp, Homo sapiens
aaccccatctctactaaaaatacaaaaattagccatgcgtggtggtgcgcacctgtagtcccagcctgtgggactcgggaggctgaggcaggagaatcgcttgaacccaggaggtggaggttgcagtgagctcagatcacaccattgcactccagcctgggcaacacagcaagactctgtctcaaaaaaaaaaaaaaaagttaagcacttttttgcctttgtaattatgaatttaaatggatgatgaatctgttttttgttgtttgtggacgtttagtgtgtttgtgttcgctcatgtatgtatgcgacaggtagcccttccctcagccctcgcttctgttgactttggacagacccctaggactgggttataaggtccctagcgatggcggtctctgcagccgttgtgctcagaggcctggctgagggctccaatttccccgtagccttccctgtcgtggatggtggtcttttctggaaatagctgttgttttgtcaggaggcttaaggaggcacgtctggatttgcatatctttgactgtctgcaaggtctacaggcatctgatggcgtcggataattgcctctgaactggagcctgtgtgaactgcagtcctggtgaaggttgcttgcattttagaaacagcccagacatgggcactggtggaaattggaatcttctgacctctcctgtcctttgtctgtggcgatcaagatcgctggtgccaagaggaaacatgaaaatctgctggtgtgggggtggaggcgtggtaggggtggggtgggcgtgcagcgggggtcctggaggggtccagaaactggccgcgggtccttcctgtggccgtgctggggaggcgtgttcaggctgttcccctatctgcttctggagggaacgttggcaggagaggaggcgtgattggctcccgagaagctgctcttgccttgcccatgctctgggttccagttcccatgtgctgggctgtactggagttgggccgggggctgtccccgctgcctgcgggcac

SEQ ID NO: 124177 - DNA, 1048 bp, Homo sapiens
gtcgtaactaccgctgcatgggctctgatgctcagccgcggaaaagcaagtaaccgggaatgaaggaagtggggtcagtcccaaccctgccacgtgcgggtctcgagacggtggacaagtggctggactccactgggcctgggctgtcactggtacacagagggcactgggctagaactgcgttcctcccaccagaggctccacaccatctccgggcccctccccagagcctctcaaccaaaatcagtgtcttcaaagttcaagttgattctgaagctcagccaggtcgggaccagataatgcattctaggggacatcctcctgggtctcccatccaccctggtggctccctgggctgtgtgtagatgcccagctcctcctccctgccatcgtgtgggcatggcaccatgccctgacggcctccctcccctgcccacctctgcccgcagggagctgcaggaggagagcggtctgacagtggacgccctgcacaaggtgggccagatcgtgtttgagttcgtgggcgagcctgagctcatggacgtgcatgtcttctgcacagacagcatccaggggacccccgtggagagcgacggtgagtctcacagggcctgctccccctccccactatgcgggtcccatctcctggctgggagaaaggccatccgcccaaaccatctctgagtgccagggaccgggcagcctgcgtccccctccaccccacagtgccagcgtggggcccatgagccgtggtctctgcaccgaggctccagtagcgtacctgcccctgctctgcgcccaccctaaaatgagaaacacggtaatgaggatgaaatataaacgatcgtcaggttcctcacgatcactcagtgaactcctcagagagtcagtgtacgtttgggctggccagacgcagtggctcacccctgtaatcccagcactgtggactgtgggaggccgaggcaggaggatcgttgagcccaggagttcaagaccagtctgggcaacacagtgagaccccatctctacaaaaaaacatggttttgtt

SEQ ID NO: 124178 - DNA, 1028 bp, Homo sapiens
cggcatgagaagggcgtgttgcacaagcaccagcgggccctgcacaagtacagcctgatgaagaggcagatgatgagcgccaccgcgcagaaccgcgagccggagtccgtggagcagctggagtcccgcattgtggaggtgggtggcggggcggccgagcaggcccgtgggagcctttcccctcccggccatggtgggacccggagccgtcctggtgggctcccctgggttggctccttgtgtctggaacagagctgggggtgcagtggaggcagggagctggcccgcgtgcccagagcgatgcggctccctgcacggtgctccctccccggccctctcttacctcgccaccttccaaatgcctggtgaaggctgaaggagaaggggccgccctggctcagggagcacgctggtgttcgggccttggtgctcccgtcgccggctgggccgggtgcgaaaggcggctgtttgctccgcagcaggagaacgcgattcagacgatggagctgcggaactacttctccctgtactgcctgcaccaggagacgcagctcatccacgtctacctgcccctcacctcccacatcctccgcgccttcgtcaactctcagatccaagggcacaaggaggtgagtccgccctgctccggccgccgtctcggccacggcctttctttgtccctccgcccttccttcaagcccggcagcgcggtggccggccgccctagagaggttctttagtggagttgggctccgcatgggccttggaacacggtgctcgcccggatcttctagtctcctgtgtagccaaaatcagaatcgtgagggtgtccctgtgattcctggggggcggagggaggagcagacagggagagtttgcctcctggagggatttgagaagtcggaggtaaagcccgcagagctcccgcaccctgcggctgagagaaggtttctagcgcttcggagcgccgcaggtggctgttcttccagagagccctggccggcttcctccagagcagatggcggttc

SEQ ID NO: 124179 - DNA, 1082 bp, Homo sapiens
gtaataaccagcatcctgacctgtttcatctcagaaggggcagaaagtggctcaggcacatggggggtcatatttggaagaaacacgggagaatttcggccctgaaacacggatttctgagcacgagtaaatgctcaccagtttctagtctggtagttttttcactgtcaggatgagactttaaaaaaagatcccaggccaggcgtggtggctcacacctgtaatcccagcactttgggaggccgaggtgggtggatcacgaggtcaggagttcaagatcagcctggccaagatggtgaaacccgtctctactaaaaatacaaaaaaaagttctctgggcgtggtggcgggtgcctgtcatctcagctactcgggaggctgaggcagagaattgcttgaacctaggaggcggaggttgcagtgagccgagatcgcgccactgcactccagcctgggtgatacagcgagactccgtctcaaaaaaaaaaaagatccctttgacttggggaagaacagaccatgggctggcagcgcttcctttgcctgaggggaggggagaccccacccgggactctgcttgccccagcagtgcccgtcacctgtgcacacatgtcacctgggggctggttgggaagaagagacgcagcaggtcctgaggtgcagccccagggccaccctttctcccgggctcccagggtccccacaggccactctttgagcagcagggtcctaggacggggtcacgcaggttgccgtggaggacatctgtcgggggggatgccagactcgactgccaggtgagctccaggccttgagtgtctcctctcctgtgtgcttgctccctcagtgcaatagggtctgacacgaccccgctgccctcctgggccgctctgaatagcagcacgtgggggtccctgaagcaggctctgaaaggcctgtctgtggaattcgcgctgctcgccgacaaggctgcacaacaggtgagtggatcggttctcccaggcgcctgttccagagaacacgctatgcctttgcatggggagtgcctcctgcttagatgggcgtcacagttcgtttttgtt

SEQ ID NO: 124180 - DNA, 1037 bp, Homo sapiens
ttttgtacagatggggtctcaccatattacctaggctggtcttgaactccagggctcaagtgatactccctcctgggcctcccaaagtgctgggattacagggctgcgccactgtgcccagccaaggctccagcttttgagcagctattctcactggtcattcaccatctcccctgcagatctgccgacaccccaggccatcgagccccaggccatcgtgcagcaggtcccagcccccagtcgaatgcagatgccgcaggggaacccgctgctgctgtcccacaccctgcaggagctgctggccagggacaccgtgcaggtggagctcattccggagaagaagggcctcttcctgaagcatgtggagtatgaggtttccagccaggtaactggcaaattgtgtgtgtgtcggggcaggagggggaagaaagggtcacgtctcaacatctcagggcaggagtggtgtgacaggagaaggctgaagggtgagtctgtgtggctggcttacaggcaagatccagaactcgcagcagagtcaggctgcggaggtgacttttccacacctctgctccccgcacctcactctggcccagccacgtccccacctggtcacccctggtccagtttgtcctccccaccactgtgctctggagtcctgtttcttttttttttttccccgatgtggagtcttgctctgtcgcccaggctggagtgcagtggcatgatctcggctcactgcaaactctgcctcccgggttcaagcgattctcctgcctcagcctcccaagtagctgggatgacaggtgcccgccaccacgcctggcaaatttttttgtatttttttttttagtagagacagggtttcaccatgttagccagggtggtcttgatctcctgaccttatgatccacccgcctcggcctcccaaagtgctgggattactggcgtgagccaccgcgcccggcctggaggcctgtttcttaggaatctcccgcggacggtccacagagcacaaagcgggatccacaccagcctcg

SEQ ID NO: 124181 - DNA, 1046 bp, Homo sapiens
ttactgtttaaagtatacaacctaggctgggtgctatggctcacgcctgtaatcccagcactttgataggttgaggtgggaggattgcttgagtccaggagttcgagaccagcctgggcaacatagtgagacccccccgcatatctacaaaaaatacaaaaattagctgggcatggtggtgcacacgtgtactacatttatagttccagctacttgggaggctgaggtgggaggattgcttgagcccaggaggtcctggcaacagtgagctgtgatcgtgccactgcattccagcctaggcaacagagaaagatcctgtctcaaataaaaaaaatagaaaaagaaagtatgagacctgtatggcagttagcgcagtagttaggggagctgtcttgggcatgagaggatcatgggtgaagtgtgttacctgtaacagaagcatctctatttctccatgttcgaggggcgttcctgctgttccctggccacagagctgccaaactctcatgtctaatgccatggctataatatggatcaggaaacttctgcttccatttcctgagaacagtttgttaatttcagaataacatagtagcttagagaaagtttttttgttttgagactgagtctcgctctgttgcccaggctggaatgcagtggcgcgaacttggctcaccgcaacctctgcctcccgggttcaagcaattctcctgcctcagcctcccaagtagctgggactacaggcgcccgccaccatgcctaactaattttttgcatttttttttttttttttttgagacggagtcttgctctgtcacccaggctggagtgcagtggcgccatctcggctcactgcaacttctgcctcccgggttcacgccattctcctgcctcagactcccgagtagctgggactacaggtgtccgccaccacacccggctaattttttgtatttttagaagagatgaggtttcatcgtgttagccaggatggtctcgatctcctgaccttgtgatccgcccacctcagcctccaaaagtgctgg

SEQ ID NO: 124182 - DNA, 1535 bp, Homo sapiens
ggactttagtaacgtaaactaaacggtttccctagcgaaaggctcagacgccctgagcaatcgcctgttgagtctccactcttccagggtattaactgttgagttagaggacattttcctagcattccgggtactaaaatcatttcttgtccccgccttcagctccacaaatagttcagtcccgccccgcagcgtccgacgggaaaggaaagggggaggacgccatgttggacggaaccatctgctgccacacatggggtggtcaatgctcccatgagtttactgatgcacagaaacaaccttgctgaatggaattaagcactttcttgtcacaaatatatcagtttgatgattttcgggcgcggtcttgtggatgcgagtcctctcagggtcgttcgtgaggccccagggcgtgggtgcgccccccgccccgcggccttggtgcggcctccccgtcgcacgcacatggctgggctgtagccgtcgcggcgcgcggtgcggcctgggagagtcggaagcgcggcggccgcggagccctgcgagtaggcagcgttgggcccatgcaggacgcggagaacgtggcggtgcccgaggcggccgaggagcgcgccgagcccggccagcagcagccggccgccgagccgccgccagccgaggggctgctgcggcccgcggggcccggcgctccggaggccgcggggaccgaggcctccagtgaggaggtggggatcgcggaggccgggccggagtccgaggtgaggaccgagccggcggccgaggcagaggcggcctccggcccgtccgagtcgccctcgccgccggccgccgaggagctgcccgggtcgcatgctgagccccctgtcccggcacagggcgaggccccaggagagcaggctcgggacgagcgctccgacagccgggcccaggcggtgtccgaggacgcgggaggaaacgagggcagagcggccgaggccgaaccccgggcgctggagaacggcgacgcggacgagccctccttcagcgaccccgaggacttcgtggacgacgtgagcgaggaaggtgagggcgcccggggcggggctggcgagcggcgcgggagcgtggctggggttcccgaggtgggagatatcgtcgggctgtgccaccggttcgtgcagaagttccagcgagggtgtccgtgtgttcctgagaagccaccgagggaggggttcccgagtgccctggaagtgttctgagagcccagcgcctccccttttctttcctgaaaaaggggacagggtggagctcacttcgggagccaggcatttgcatgacaaccagaaatctgagagggtgggagagggcacatggggtactccgttatggctgggtgtgctgtgagtgtagcagctgggggtacggcaaaaaccgaagacccggtggcaggtttgcgggtctacgtgtccccagagctgaccagtcagacctcccaaggtctggatcggaggaacagcttgtggcagagccggtgattttgtcctcctgcccctcagaat

SEQ ID NO: 124183 - DNA, 1109 bp, Homo sapiens
gctaaaatcttctgtaaaaagtcagttttcattgacattgggatgggattctgcctgcctagatgttgcaacaaacctttcaaaatctaggcatctctggaagatctaatagtggatattcttgagatggtcttcttcatttgcattgtgcattgttaaaagcttttcactgttattctcctgtagtctttggttattaccagaacttaattgacctgtcttgactgtttacatttccatcaaagggagagaggagagttccagtccccccagctgtcatgtttaaaatctgaaacaagctagggttaggatttcttttgctcacagtgaaagcatttagacaattcattgtctcttcttgaagacttgtttagtgtgctcagttaatgtattaatgtttttcttggtaaaaatgatcatttgaaaaatctctcttgttcagaattactgggagatgtactcaaagatcggccccaggaagcagatggaatcgattcggtgattgtagtggacaatgtccctcaggtgggacccgaccgacttgagaaactcaaaaatgtcatccacaagatcttttccaagtttgggaaaatcacaaatgatttttatcctgaagaggatgggaagacaaaagggtgagtgttctcctgttggagaagtatcatctgtgtctggcacgtcatgatgagggagtgttgcaggagatccttactaacacagctcctgccttgcccaggcacgtgggccgttcacttcttcaggccgccctcagctggaagctatccagagcagtgaatgagaagatgataaagtttgtttttttaagttaaggttttaaagtttttaaaattatctagaataggccagcatggtggcttatgcataaactcccaacactcttgaagcctgaggccaggagttggaggctgcagtgagctatgataacgtagctgtactccagtctgggtgacagagcaagactctgtctctaaaataaataaataaagtaaaaactaactagaatagttttagtttctagaattatcaaatacaggtaatgctgctgcattttctgtgttgggcagtcagttgaaggatggcctcttgac

SEQ ID NO: 124184 - DNA, 2865 bp, Homo sapiens
ggtttcaccatgttggccgggctggtctcgaactcctgacctcaagtgatctgcccaccttggcctcccaaagtgctgggattacaggtgtgaaccattgcgcccagccaagatttttttttaaacagctttattgagataattgatatacagtaaatctgcatagttttaaagcgtacaatttaatacattttgatgtgtacatatcacgaaaccatcgccacagtcaaaataatggacgttttgattaacttttctataattatgataatgaaactagagacttcggatcttctggttaggatttccctgtcacttaggagctccctggctgtggatctgtcccccgtgtgactgccttaggctcgaggcaggaagagcagcacagatactcctggcaccgagggcttgtccgtggagaggggtggggcggacagcgcatacctgcctagccttacagtgtgggtatgtgccaacggccctctctcactcaggtatattttcctggagtacgcgtcccctgcccacgctgtggatgctgtgaagaacgccgacggctacaagcttgacaagcagcacacattccgggtcaacctctttacggattttgacaagtgagttcagacttggccacaaggaagtggacgttgacgtgcaagtgactggctgtgtgcgggtggcttggtgcttctcggtgctggtgtctgtcagattgttcacatcctttctggtcaggctgccgcagagccatttcacagccctgccccacacttctggcctacagcacccctccctgttatgccagtcacagccctgggggcgggcaggcaggagcacagcagggccatgctggagcccccacgagttgctctttctagtcgtcagggcgtggggctcagcagtctcctttcttctccaggtatatgacgatcagtgacgagtgggatattccagagaaacagcctttcaaagacctggtgagtggcctgaaacctacatctcagtggtttaaagaaatgctgctgggtgtggtgggtcacacctgcaatcccagcacttagggaggctgaggtgggaggatcgcttaagcccaggaattcaagaccagcctgggcaacaaagtgagacccccgcctctacaaaaagtaaataaatacatacattagctgggcctggcatgcacctgtattcccagctacctgggaggctgaggggggaggatcacttgagcctgggaggttgagcctgggaggttgaggctgccgtgagctatgattgtgccactggactccagcctgggcaacagcgtgactctgtctcaaaaaaaaaagaaatgctagacggtgtcttgacttgaggttagggtgtgacttgggagttaagatgtggactgaacttgtcatatctttaagagcaatagttgtgaatgagttttttattaaaattaatgaaatgttatattccttgtctttgtttttaaggggaacttacgttactggcttgaagaggcagaatgcagagatcagtacagtgtgatttttgagagtggagaccgcacttccatattctggaatgacgtaaaagaccctgtctcaattgaagaaagagcggtgtgtatttgctgctgctgggggcggggactcacctctcctgtatttccttaacaaagtggaactttgtttctatcagaaaactggaagagcaggtgacgttatattttctttgagattactttctgaaaacaacttcttttattcctcttccagctttgaagtaaatcctgagaagtgaacaggctttgtgtatttcacttaagagtttgcagaataggccgggcgcggtggctcacgcctgtaatcccagcactttgggaggccaaggtgggtggatcacgaggtcaggagattgagaccatcctggctaacacggtgaaaccccgtctctactaaaaatacaaaaaaattagctgggcatggtggcaggcacctgtagtccccgctactcgggaggctgaggcaggagaatggcatgaacctgggaggtggagcttgcagtgagctgagattgcgccactgcactccagcctgggagacagcgagactccgtctcaaaaaaaaaaaaagtttgtagaacagattcattgtaggataaattcattgtaggaggggtctttgtgtttgccattttgttgtattaacgttggcactgcctttttctgcagagatggacagagacgtatgtgcgttggtctcctaagggcacctacctggctacctttcatcaaagaggcattgctctatgggggggagagaaattcaagcaaattcagagattcagccaccaaggggttcagcttattgacttctcaccttgtgaaaggtaagctgctagaaaaacacaggggagtctatgcatttcaccccatgccagccttctacaggtgatctttcattttgtagcatttcaaacttagtagaaaaatacgggagtatgcagaacgctaataagctttttactgagatcttctcacatttggttgcatttacgtcatcatctcctatacagatattttttcctgagccatttgggagtgagttgaaataacatgtccctttagccctgaatgtgtattcctagaaataggattttgttagtgtgaccatagtgtgggtactgacttcagggatttaccattcatttaatacttcaatgtattgccatattctgattttgttacttgacctaataatgttctgtataatacttactttccttcagttcaggatctagtctaaggtcacgtattttacagataataaattgtccttcctctatcacccaggcttggcgccacccagtggcacc

SEQ ID NO: 124185 - DNA, 1306 bp, Homo sapiens
gggccgggcagtgtggggtttggggagagagctggttccgcgagttctgacggcgtgttctggccgcacagacagactgtgatcctctcgtgagaggaggatagtgtacagtgttgcccttctcttctaggtacctggtgacctttagccccctgatggacacgcaggatgaccctcaggccataatcatctgggacatccttacggggcacaagaagaggggttttcactgtgagagctcagcccattggcctatttttaagtaagtggaccattgtaacgagctctgtagcctttgtcttttcatgggaataccctggcacttttgtttttcttaggtggagccatgatggcaaattctttgccagaatgaccctggatacgcttagcatctatgaaactcctgtaagtggcctcagtgatggcaaacgccccgtccggtccttgcttgtaaccggggtgtggtgcctttccttatttgtgctagaagaggaggaggaggtttcacagatgcataggaaaggcctgtctcctgtgcctttttaactgcccctgctctgggcagagctcttcagtcactcctgcccacctggcgcagccgtgggaagtcctggatgggagttaatgcagtgggcttcagaactgcagttctgggtggcgggtgggtggatgggttcactgtcacgctctgtgtgcactgccccctaggcaaactcacatcagactcttgtttccttttgtaaaaagttaggtgtgtttctgagacactgacatgatttgactcaactgcagccttccttttttttgggcagtctatgggtcttttggacaagaagagtttgaagatctctgggataaagtgagtattcttatcagtttggtgtcttagtgtgttcaggctgcttaacacaataccaaaaaaaaaaaaaaaaacacaataccataggctgggtggcttatgacagctgagatttctttctcccagttctggagcttgggagcttgaggtcagggtgcctgcagactgtctggtgacggcccacctccctcctagtggacagcccctcggtccagccttccctggaggaaggcctccgtggcctgttctgtaaagtctctcatctcattcccaagggcttccccctcaggacctcccaccccccaaaaggccccaccccatgccgtcaccccagggggttagaatttcaccctgtgaatctgggggacacagacgtggtccattgcagttggtttcctttatttgctgtctctcctttagcactcagctttttgttgttgttgttag

SEQ ID NO: 124186 - DNA, 1077 bp, Homo sapiens
aaaagagaaaagagattgagcctgtgttcttgtttggctttttgttttgccatggagaaaaggaggaaggaagggttaaaaataggtgagaaaatgggaaacatggccgcccttccaggcagggagaccggaggtcaggatcccactgtaggtgcacactgggtgcgagggaagcggcatccacagctgctgacaatgtcgggctcctgcggtcctgctgtgggtgtcctgctctcaggaagggagcagtttcacgtaggtcactccacacaagtggaagcagctgtctctgaaactccaggaatgtgcacctttcctgctgttgcttgctctcccgtccttttaatgaacttttacacgtcgggggatatttctctgtggttgaatagtgaacattttaactgatcaagagcactatgttctgaattgaccaaaaagggaggggtctgttttgtgcattttagaaaccatcatagcctttgcctgggaaccaaatggaagtaagtttgctgtgctgcacggagaggctccgcggatatctgtgtctttctaccacgtcaaaaacaacgggaagattgaactcatcagtaagtaacctggtccctttcctcttctgagtaggtcagcacagatgatgacccagtcgctgcccaacagtgagcatttgactggcctaggaccactgctgggcaggccgggactcgcctatgaatggggtgtggcctcggctgatggaagtgagcgatggcctggaggtgccgcctccttgcagggtgtctctctgagccccgttgagccctcacgtttaagcgagtatttccaaggcttccattctctgccatcatctcaagtgaagctttttctcttctggctgtagctgctgtccctgggcttggggtcacttcctgtggacatactcctgccagtccccagtctgggtcaggtgcctttgaccagggtgcgcagagctgttgcacacagctgtactctgcccccgtgcacccggttccaggggtgccacactgcacccacctggggctcgctcctcacagtggtgcgtgggccctcgcctgtctc

SEQ ID NO: 124187 - DNA, 1013 bp, Homo sapiens
gagagcggaactaggcggcgtgtagtgatgcagttagcttacatccagcacagggctccgcacagctcacacccggcccagggctcagcagtgagtagtgctatgcagttagcttacgtttggcacagggttcagtccagtttaaatccagcacggggttcagcggcgcagtagtgaggcagttagcttacatccagcatggggttcttattgccagccagaatgtgcaggcctgtgctgtgatgagcgctgctccagctgctccgtgccccgcactccgggtcggttgcataatggaggtgtcttgcattgactgcccacctaccctgctgtcagctcagcacaggcagagctttgtttgcttcacacgtgtccccgatacccaggaccttgttcagcaagtgacatagtcacggttgtggctctctgacccctctgtgtcctggtgtgtccctgccctggcctaggtggacaacgcgtactggctgtggactttccagggacgcctcctgcagaagaacaacaaggaccgcttctgccagctgctgtggcggccccggcctcccacactcctgagccaggaacagatcaaggtcagcatgcccccacccccgggtgcagggcacatggaggcaattgtggcgttgaaaaggtgtcagttttttctgttattgttagggtggtgactgggggataaaaacgtgacatttgcaaggattctttgaagagacgcaggaacagtgagaactgaatggaatagaacagctttaggatagtaacttgaggctttcagcttctttagggaagttttgcatgaacccgaggggtggataaaaagatgccagggccattaaaaagtcctgctgggattagaagcggcttgtctgggatttacattattgtggtaaaataggccgttggtcttaggtcagagcaaagaggagggttaaatcccagggagaaagtccgtctcaaagtgaaagatggaggaaggagcaggcacgagcgctcct

SEQ ID NO: 124188 - DNA, 2227 bp, Homo sapiens
tgctttgaatgttaaatcctgagtgatgggtcttttgtttcagcaaattaaaaaggatctgaagaaatactctaagatctttgaacagaaggatcgtttgagtcagtccaaagcctcaaaggtgagcctcattcccaaaatgagggctgtgctgtgacatccgccatcatggcaaaggcggggctgcggggagctgctgtgtatgtgctcagagttgcctctgctccgaagacactggttctgttcccccccaggagggatgcactggggaactggggttggcacggggacttggagttggtgacctcactgctgccttgtgggtggggggcagcgttgggggaaaagtgagaatgaatggactagccattcctgcttgagtgcctctgtatgctgtccttctggcaccgtccgcctgggtgtgggctcttcgcgatggggaggcacttgtcttaccagttctgtgctttccccaacctcatgcataggaattggtggagagaaggcgcaccatgatggaagatttccggaagtaccggaaaatggcccaggagctctatatggagcagaaaaacgagcgcctggagttgcgaggaggtaacttagagatccctcagtccccaggagctggcccttacgctgcccctgggccctggtgcccgcggactcctgcgttccttcccactggcctcggcggtgccactaggcatgtgcccccatgggtgatctgcgccctttgtcccctcaggggtggacactgacgagctggacagcaacgtggacgactgggaagaggagaccattgagttcttcgtcactgaagaaatcattcccctcgggaatcaggagtgacctggagcactgtggtgagcgtctgcagggggcgcgatgggggtcctgttggctgctcatgctgcttcagttatccccgtcactgaggaagcacctcctttaaggcaggggtgaagggtgaagccctagtgtcatgtgcccagggttagctgagcctcgtgtgaaatgtagagtcggtgccgacgtggcctcgactgcgccctctgaccacattgcagatggcgcctttcaggcagtgctgggtgagggaggagctgtggccaggtgttgggaagtgccaggaagaggagggtggccatgcctggccatttcctgatacctgtgctagtgacggccgcggtgtgtccactggaaagaaacactggcgtgcacggctgtgactgtggtttcagcagttctgagacaagagccttccaagtcgggggctggggagcagagtgcgggagctcctgagtcctgggggcctccgcgcctcacagcatgggcacatgtgggacagaaggcctaatggggtgcctgagggtggcctggttgctgtccccccagggtgggaccatgagcgagtaggggtggcacacgggctcagctctctgtggccggggtggctcctcttgcgggactcaacgtcagccccaaggcgatgttcagggggtccctcagccttttgaggtggtgccgtttagggccgccatgcctgtctatccaggggacggactccgcctgctgttcccgcgctgagctacaggactcccgagtgtgagccgcggttcctctgttgcagcgcagccgtgtgtgctgtggagccgaggccgtcctgcaggaagccgcgtgactcccgcctcctccctgtgctctctggctctggactgtgactgcgcctggattctgccattgcgacacatttttgtgcctttcagcccctggtgtctgcagtgggggatttaaggcacccgcttccacttctttcttgtttggagttttctgttggaaccgccggcgttggctccgaagacttagcgacgccactggcggcaccttctcctgcgcccagtgatgtttccacggtgcctgtacacagccgagcagcatttccgttgaaggacttgcatccccattgcgggcagtgctggacgtgtcccggagacccaccgggagggcgccgccatgccttgtacccccaccgtgcaggttgtggccggttttctccgcaggttgaacatggaaataaaagcaaacttgtatgaaaaaccggtctttctcctctctttgaatgtagatagagaccttgaacttggtgcctgcctccctccccagtggcaagggcctgcttgccaagccagacctctgcagggcgctgtcccgtccggtcgtcacg

SEQ ID NO: 124189 - DNA, 1052 bp, Homo sapiens
gacagggacagggagctcacggccgactccgatgtcgacgagtttctggacaagtttctcagtgctggcgtgaagcagagcgaccttcccagaaaggagacggagcagccgcctgcgccggggagcatggaggagagcgtgagaggctacgactggtccccgcgcgacgcccggcgcagcccagaccagggccggcagcaggcggagcggaggagcgtgctgcggggcttctgcgccaactccagcctggccttccccaccaaggagcgcgcattcgacgacatccccaactcggagctgagccacctgatcgtggacgaccggcacggggccatctactgctacgtgcccaaggtggcctgcaccaactggaagcgcgtgatgatcgtgctgagcggaagcctgctgcaccgcggtgcgccctaccgcgacccgctgcgcatcccgcgcgagcacgtgcacaacgccagcgcgcacctgaccttcaacaagttctggcgccgctacgggaagctctcccgccacctcatgaaggtcaagctcaagaagtacaccaagttcctcttcgtgcgcgaccccttcgtgcgcctgatctccgccttccgcagcaagttcgagctggagaacgaggagttctaccgcaagttcgccgtgcccatgctgcggctgtacgccaaccacaccagcctgcccgcctcggcgcgcgaggccttccgcgctggcctcaaggtgtccttcgccaacttcatccagtacctgctggacccgcacacggagaagctggcgcccttcaacgagcactggcggcaggtgtaccgcctctgccacccgtgccagatcgactacgacttcgtggggaagctggagactctggacgaggacgccgcgcagctgctgcagctactccaggtggaccggcagctccgcttccccccgagctaccggaacaggaccgccagcagctgggaggaggactggttcgccaagatccccctggcctggaggcagcagctgtataaactctacgaggccgactttgttctcttcggcta

SEQ ID NO: 124190 - DNA, 1055 bp, Homo sapiens
agtggccccacgaagcccccagtggctggctgtccagctgggcaaacagtggcacccctcccagctcttctgagtggggagtcttccaggcctcctcagaggtcttccctttgcctccccaggacagggtgagtcagagctcagcatttaatctcctctccaaagtagagagcaagtcgcccacagtgggcgtgtctgtaaatattgtgacagtatttttttactgtgctgttttttttgaaaggggatgggtaaaaagtagggtgttcttgttttttgcttgggagggtgggggtgggggagggtcttattttatcttatcttttctgtggatcagaaaaaacagaagccaaactcggggtcatctttgtttttaaagctgaagtgggactgtctggcactctgtgtatttatgcgttccagcatctggaacctcccatccctgccctcctcctgtgtagctgccacctccccgctgggcccagcatggctcacctgtcccgtgggctgtgtttcttgttgtttttctctttgcaaagacatagctaggaaagcgaatgataagggaaaagttctcagggaattgaagtgttgttgctatggtgacgtccttttgctgtgaataaaggtgctctttgcagcaatcctgggggtcctggtcttggctggaggtggggcctaagccccagggcagccagggtcaggagaggcacacaggtgaaggggaggcttggccttgggtgcaccgcatggagcaggtagataggaaacgcttagagacaactattttggaacgaaacctggcgtcactatagctgcctgctggtgactacaggtgcggcccacccagggtcagggtggtcgctggagcgtgagccctgtgcttccaggaggaacaggtctaggatgctgggggctctaggtcccagccaaaagcacaaccccaaggctctggcctggtctggccactggggagcccagcccctgcaggagggacagtgactcctgtgaccgggcctggggcctccttatccaacttcactcctgccacgagc

SEQ ID NO: 124191 - DNA, 1050 bp, Homo sapiens
caggcttgctggggacattaggagcacagccaacttgtctcgcagccagggtcgcggcactcacctcgcgtttgtctccagtccacaggcactgaggacccaggccttccaggtccttctccagcccctggcctgtgtcctgaaggccacggttcaggcccccggacccccaggtgtgctgcttagaaagggctgggagggcagaacctgggtccctgcggctgggggaagggagatggatgagagtagctggctcgccacccccgccccactttaatcacacccaggcctccctccaagagcaaaggggaccggggacatggccatctcccctggtgagctgctgctctgcacctaggtcctggcctgtgctgtgggtggtgaccgtggggtggctggtgaccgtggggaggctgaagtgctctctaagggagctcttcctggcttggcccccaggcttgctggacgggacggcagacgatgccacgacggtggacacactcctggcctccaagtcgtcctgcgccggcctcctgtgccgcaccctggctcacctggaggagctgcagccgctggtaggtgcggcccggtcctcatgcagcccagcagcatccacgctggcggtgggaccgcaacgtaggctgacgccccccaccccttgctgccccagcacccttgcatccacgccagcagtgggaccacaaccttggctgatgtcccccgccccacatgcctcgaagtcccagcacccctgcatccacgccggcagtgggaccgcaaccttggctgacggccctcttcctcgcagccccagcgcccttcaccgtggccccaggcgtctctactgggggctacagtgactgtcctgcggctctgtgacggctcggctgcccctgcctccagtgtggggggccacctctgtgggaccctggcgggctgcgtccgggtccagcgagcagccctcgacttcctggggacgctgtcacaggggacaggtgagtgtgttctgtacggctttggcgtggggctatccctgtgcccccactctcc

SEQ ID NO: 124192 - DNA, 1125 bp, Homo sapiens
ctggaatgcagtggcatgatcatagctcactgtagcctcgacctcctgggctcaagagatcctcctgcctcagcccccttgagtagctgggaccacaggtgtgagccaccacacccagctaatttttagattttttatagagacagggtcttgttgtattgcccaggctggtcttgaattcctggcctcaagcgattctcctgccttagcctcccaaggtattggtattataggcatgagccaccatgcctggcctcattatgctatttctttataataaaagttaaaggagaaatgtcagtatataggtaaagtaactcttttttcatttttgccagaatgtttgactagagtcaccacgctcgtggattttgttttcctatttctgtctttctgaagttcatgtgttgagctcacatgttgctgtccggcacctctgaatccacgtgttggcttttccagagtcaccttatctctctaagccgagaaaagtggcctcctggaggtccctcaggacggcagggagcatgcctctgggcggccgagcgtccctgaccccgcagaagctgtggctgggaaccgcaaagccaggtatgtggttgtcgcactggagacccttcctgcttgagagaagagttcgagaaatttcagggagtggtttgagatggagtttttaatattccttgtttgaattacattgtctttagttttctcgaagacatcaaatatacacatcgtagttttatgtcatgcataaatgtggtttcgccaagtggcgctttagcctcccttggtcccgtgtggtctctacatgggagtggtgagttgtcttgccagagccaactgttatagtcttaggagtttggtgggctggtcagtgtcatgctggcaacctgatattagacatggtagaaatatgtataccgtggaaataggcaaacattgtaatcaggactgtattaattgatatttgggagctggttggttaaccatttaccagcacgacactgacggctggcgtctatcagtgattcagctttcttcaatccaggaaagttgattagaaacaaaacctcccattgtgtgtgcttgtatctgtcatattaaacccatgcacattcaaac

SEQ ID NO: 124193 - DNA, 1037 bp, Homo sapiens
gcgcgcggggacctgtgtgcggcgtatacgcattggcgtgtgcgtggctgtgcgcgcggggacgtgtgtgcggcgtgcgcgcattggcgtgtgcgtggctgtgcgcgcggggacgtgtgtgcggcgtgcccgcagtgtcgtgtgcgtggctgtgcgcgcggggacgtgtgtgcggcgtgcccgcagtgtcgtgtgcgtggctgtgcgcgcggggacgtgtgtgcggcgtgtgcgcattggcgtgtacttggctgtgcgcgcggggacgtgtgtgcggcgtgtgcgcattggcgtgtgcgtggctgtgtgcgcggggacgtgtgtgcggcgtgcgcgcagtggcgtgtgcgtggctgtgcgcgtggggacgtgtgtgcggcgtgcccgcattggcgtgtgcgtggctgtgtgcgcggggacgtgtgtgcggcgtgtgcgcagcttcgtgtggatggctgtgcatggcccttgttttcttcagtcattgcacgtgcagaagagcgacgtggacctgatgagaacgaagctccggcgcctggaggaggaaaacagcaggaaggaccggcagatagagcagctcctggatcccagccgcgtaagctcctggcgcttcacggacggggcaaggggagggtcctcggggcagcatctgccagccagccctgctgggggctacaccgaaggccgtcttcatgtctcaatctgcttaccacagggcacggattttgttcggactctggcagagaaaaggcccgatgccagttgggtgagtatggtgtgtgcaggacagagcctttccccagacgctagttactggggacagccacagagggacgcctttccctgcagcacccacgcgtgaagagcagcaggcaggggggaggctgcggacccccaaacccttctccactgacacctggggacaccacggggaggggggccagcaggctcaccacagaggccaagcaagacactgtaggaaaaacccatcacaacgggcgacttccccctcacacctgagaaaatacattaagctt

SEQ ID NO: 124194 - DNA, 1070 bp, Homo sapiens
ctcgaaacctgcttgttctgtggacccctgtatctttccaggatgaggttttaacgcctcagtcctgcgccgtccttgtgctgtttttggcgtggctactcgcatttctgtacctgactttcgagtgcgaagggagagtctttctgggctgtgttttggtttctttaagggaaactgaggccacacgtccattgccttatgtctcctgttcgtacaatagttcccccctcgtttcctgccgaattttgtcaacttaagtttgcagattttgtcttatttcagtgcagaacctccatgactttgctttcgtttctctatcgatgtgtctatctaaagtctactctcttttgagaccgaggggatggcctgacagtgccagggaaaagtgattctctcttccttacaaaaccatccattcaaagacggcttgtcctttctaagctccaaggcctttccgcaccattaatctagtcttttaaagacagcatcttacttggagaagaatatctctggaaaagctgtttactcactttggaaagtggctggtctacacaggagatgctttccagcgtgaggaattctcccatcaggctcgaaacgagtcacttgttcaaggaacaagtcaaatgaaggcccgttcaggcttttccctcccatcctgggtcttttccaaagcctctcctcttctgaacgttctgggaaactcttcctcttgctctgtcccctgggaacgctggcacatccctattaacgctgaacttgggttttcagcaaactccagaccgatatgaagactaccaacctggaagagatgcggatcgccatggagacatactacgaggaggtgcgccgtgctgggcggcggagcggagggcgggcaccgagctgggcggcggggcggagggcgggcaccgagctgggcggcggggcggagggcgggcaccgtgctgggcggcggggcgggcaccgagctgggcggcggggcggagggcgggcaccgtgctgggtggcggggcggagggcgggcaccgtgctgggcggcggggcgggcaccgagctgggcggcgggg

SEQ ID NO: 124195 - DNA, 1003 bp, Homo sapiens
taaaaggaccaatagaggttcaggagcgagtgggcggggcacgctgtggggcgggatcggcgggggatagaccaatggtgggtaagaggcgggacagagggcggggcgcgcgggggctgggctggcgggaggcgggccaatggaggctcgggggcggggccggcgggcggacgggcgggggtgcggagggggcggcggcggcggcggcgaacaaagaggcggcgggcgcgggcggccgagcggagccgagcgcagccgagccgggccgagccgggccgggccgggcccaggagcgcgcggatgatgcgggcggccaggcgggggtcgacgggtccctgaagcccgcgccccgggccagcaagggagccccgcgcaggccgcgcgcatccggaggcggccgggccccgccatggccggggtcagctacgcggcgccctggtgggtgagcctcctgcaccggctgccccacttcgacctgagctgggaggccactagcagccagttccggcccgaggacaccgactaccagcaggtgacatgggcctctcggggtcgcggggtcagggaccccaggtcacggccccctcctctcccagggtcacggcccccatccccgagggcctaaagacccctcatccccccctccagggtcacggccacctcctcctcgcaggtaccggcctccttccttctcgagggtcccttctgagtcctaggaccctttcttccagggtcatggcctcctcctcaaaggtctaaataccctccaacccccagtgagggtccacggcccccctcccgattctggccttcccttctggtgtcactaaggcccctgggtttcatggagctgcctctccccactccgtgagcccccttggccagtggagggcctctccaccatcactgttggcggcctggtgctgtgtcccagcagagacccctccccagatgacccccaggctctgagatcagagcgggtgcctgagcacattgggtgcag

SEQ ID NO: 124196 - DNA, 1037 bp, Homo sapiens
atctgccttccagggcagatagtgggccctgcctcagtttgcctagcatgggggacgtgttttccactagagcctggaatgcccagatgtttctgttgagaccttaatgataagactgaggtcaccatacagagaccttggggaagagcttctgggctgggggaacggcaggtgcaaaggccctgaggcagagagaagcttgagcctcggggagaggcctcagccccacgtgccagagggtcgctctggtctgactgcgcacggggaatgtgctgcctcaggaactggtgagccctctgttccaggcactgtgccagcccaggctggatggccactcagaggggatctgagctctgggagtagggccagtgttctcctagcagagttgggagcctggctcctaagagcacaacacctctgtctgtgccgccacaaggtgaggtcagccttgtgcccagttgcagcctggggggcagttccctggggcagggctggcctgttatcatcctccccactcatcagaaggaaatgagttctggttaaaacggcagtgttggtcgcctgtcgcctgtcttgtcatttacgaaagcagtacacgttcatggaacatttggggaaaagggaagagcgtgagacagaagcgtccctccagctgggttcagtccaagagcatagagctgtagggtgggtgtccctgagaactggaatcctattgcttttgacatgtctcgtactttggaccgtgttccagatgcttgtccagcgtcccacggtgccaggcaggattctgtacctacagatgacagaagcgggccagacacggaggcccccggggagctgggtggaagcttcaggagcaatccctgagtggacaggagctgatgaactaggctgggggtgtacagcgaatgggaccctgcattggggggtggaggtgggcaggaagcccctgatggctggtcccagtccactcaggatttccatcttggccggtgtctgcattcctggggagactccgattggctgagcttgccttt

SEQ ID NO: 124197 - DNA, 1029 bp, Homo sapiens
gtgtgaagctgtgggccctggacctgcttggggtgggtgtcaggccacccttggcccggccgctgcccgcatcaagggttcctatatctgggctcctggtttttgtggttctgagggtactctggccacctctgtccccaggagactctggggttctcaagccccttccttggagtgcagcagcctgggaccctctagaagtccccgaggtcttcacggctttttgtaggtgtggatgttggggtggttattcttgctcagggtgctggctccctgatctccccagttctagcatcaccaggggccactccagtctgtgtgtgcgggacccccgcctgccccccactcgcctgagactcgagggccagctctaggacccctcttctgggcatctccatggtgacccttcttcctcccctgacccctgggcaggccctgccagccaaccccgtctaagggatttgcagtgtcagccgctctgacccccggccgggggctcttggtcaggctctgggggagcggggagccctgcagcttggttccccaggccacggcggctctccccggatgcttgtgctgctcgtttctaaagcacttttcttggagagccacccagtggccctgggaggtggacactgtgtccccgacataagcagaaacgggggccggccagcatggggggccggaagactgggcacgggttccagctgcagcccagccacgtccgtcccagtggatacagcgtcagcacagttcgtgaacccaggggtgcaggtttagggggctcaggggcatctacacttcccccacctgccccaccgtcagttctgctgaggcctcggctagagaagaggaaccgaatctgcagccaggggcctggggtcaaggacatgggaagtgcctgacgtggccaccggggaattggcatgtgacagcgggtggatggtgggtgtgggagggtcacaggagggcctcctgtacccgggcctgccgctatgttctgcagggagcccacccaggccctgtgct

SEQ ID NO: 124198 - DNA, 1027 bp, Homo sapiens
tcctggggaaggagagtgggtgggcgggcagatgtggccccactgtggccctcccagcttgtaggcacggccctgcaccaggccctccctggcctcttacctgccattctctgtgccttctggacctgtggggtgccaccgctccagttcccaggggccccggccctgcctccttttctttttcttccttgagtcttttcctgagtgtccacacatggctgtttcagcccaggcctggtgtcccctttgacttcccgcgtaagacacaggcaggaggggacagggtgccgaagagaaggagttggtggcgaagctgggggaccggggagggggcggccgggctaccaggacagggcttgggaggccgaaggctgccttgctcagaaatccccatcccggggccactgtcatggtcccctgtagcacagagctgggcctggggggcctgggaggggccgggcctgtgaggttcaggccacacaggtgcaggcccagtcccgctcggctgccctcgtcctcgccatcacacggcccacagcccactcctggccccacaccctggcgttgaggccacactctctctctctctctctcttgcaccccacccaccccgggccctcctagcgctatctggctgccctggactctggcagccacgcgggctggcagtttaagcccatggacagtgcccgaacgctgtggtagctgttccctcagagcgacaggtactgacccaccggtcccccatcccgcacggccacccgcctgcgcctcccgcctccaccctgcactcactgccgccctcccgtcggcactgagctggggctccatctgtccggctcctgttggcagggccagctctgagtgccacggctcagccagagacttctaatgccggctctgggcccgccagcctcacagtggggttggcaagtccccttccaggctccccctgcccagttgcttggcctctggggactctgccacagctccaagtggccccagccccttctgtcacctcccagtg

SEQ ID NO: 124199 - DNA, 1098 bp, Homo sapiens
ccctgacacgtgccaggcctgtgggtcctttggcctcagcacatgcctcgcacatgtgggtttctctgtgagcacacacatgcattctcttgcacacacacgtgcactcaagaccttcacactcctgcctggacgagggcacccacgaggtgcaggccagctgcagagccaggcacaggacagcgccccctgcagccgcctctgttcctaagtccaagacccccaggagcccacagttgggtcccccacgggagggggggctgcattgctccagcctcctgtgtggcttaaggggccctccttccatggcgtgaaggggcagagtagcccgggggatgtcctcaggctggggcctccgtactcctgcatgctgtggcctggctgtaggtggacccggccctgagcccggaggaggccttggcccggccctggagggtggctggtttgtgtccttcaggtcctgggtgcgtaaggtgcaggtagggccttggagctgtggctcctgggggtggcagaactctgcctggcccaatgcccaaatgccgctggtgtgggcatgggaggctgtgtgtacgcccctcctcagaggagacatcccctgtcctgagcctggagagttcgggggctgcccctccctcagcctcagccagacctagagcgcaggggcccccagccagcggcccctccttagcccctccctataggctctgtcagggcaccctgtactgtcccattctgcccccagggctgttggctcagccaagtgaggaccacgcggaaggcgcccctggctgcgtgcgccatgcaggggccctgctgatgcctcccccttgtctccctccagtacacctccagcatgagagccaaatacctcgccacgagccagcctcgccctgactccagcggcagccactagaccgcgcccggcagccacccaccccacgtgccaacttcccctccccgtgccagcactgccgcttccacctgggccacccaccggaccctcgcacgccgtgccaggcctgccccagacgcgtctgcaggccgcttgccctcctgtcccctccccgcaggggcacagtggagacgcaggggctc

SEQ ID NO: 124200 - DNA, 1090 bp, Homo sapiens
ggggtcttgcagcccccaggcccacagcctcgttgggaggacagggtggccctggggacaagagggaggagcccaggggcttacctcactgagagtgctccccagcaggcatccactaccccagggccccccacatgtcatggcaaggttggtagtgaatgggcctggttgggagcagcccctggcccattgcccacccacccatctcactatgcaattcgagttccaagcaacatttgctcctgccctggggccagctctgccccagccctgagaggggtggtgaggcagccccctggaccccagaaccccagacaagggggcaggcgggggaccagggcctctcctgtgggatctttgttttgtgtttaaccataatggttgtgtactgaaccacttcatatttgttatatataatatatatatatataatctccttaagactcagcctcctggtttacccccccggcctgggcatctgacctcccccaccccagtgtgatttaacatccaggaactgaggcctgaaccattttgcatttccccctcctccagcctctgtagggccatggctgtatgtactgtcgctgtgtttttttgtttttttagaactgggtttgggggctgatttttatttctttgggggctttttttcttggcaaatactaaaaatctcgtcaatgtaatttctgtggtttctattcagcttgggtttcatgttttaaaataaattttaaaaagcaagcctctcttcctgagctgctttggctcctggctgggcgctggtagggagtccacggctccaggcaggggcattgggggaacagggggacactgagggtggggccgaccaggtcagctccgaggggtcggctgggcggggcctcttgtggttgcgggcggggcctctcggggttgtgggcgggtcttcaggggtgggcggggcctcggagtgactgggcggggcgccggggacaggctctccagggatggggtgggcggggcgccggggaaggctttccagggttggggtgggcagggcttctggaatgagtggacgaaggccttgcaaaatgggtggccgaggccg

SEQ ID NO: 124201 - DNA, 1053 bp, Homo sapiens
ttgttaatgccccagctgcttggcgagctaacagctgacctttcgggaagcccacagacgctggaggaatcttgagtttctccaaactgccgctccaccagtgcctttggacagccgtgcctgttcgccgctctccctaagtctgattctcatcgaggcccctcgcttctatgactgtgcttgcagaagagtaaacactctcggatgccgctgtcctgggggagcccgcgggagcctgtgaatgttgatacgagctggccagtcctgggcccagctcacttgtccagctacctgccaggtggctttcactgtgtttaaaatacattgcattccaagctggtcccctctgtgtatcactctactgagaaatcctgcctagtgtgttttgggatgtgtcctagcatttacaagaaaatgaaaagcgtcctcttaattggcacccgaatgttgctgtggctcagtcacatatcccagggccctcgtcccgaggccgtgctgccccgagccccgagcccctctgcagctcacccttggcttgttttccgcaaacccggtaaacgcaagcccttggggcagatgcagaagcagaagagggaggggaaacctgcctctgggtcaccctgttagcacagcgttctcatcgggagacagcatggaactctctctcgcagtgctcgaggctgtgtgtcagtgtttgctgggcttgtggctccttttttggctggataaagaagtcgctgtttttgtactgcttctgtggctcttcacagacctcacggatgtgaccggagatgagtgccgatgaccacgttttaaaggagaaagagagctcctggtggggccctcggggtggtctcaggtcccatttgcagtctgcaacagtgacgcgcagcccggtccggagcgtggtgagctttgtttgccttctgggtcagctttcgctgtgtctcctgtgtgtgttagaatccagagcccagaggaagtgcaagcgggtcctccgccaacggggagagcctcttcgcggcgctgttggcgacagcagcgctgtgattc

SEQ ID NO: 124202 - DNA, 1027 bp, Homo sapiens
gaaaatggatgtggttttgcgctgggcctgcccacgagtgttctgagcattcgtcctcagactggtgagcctccgttcgttttgaaatgaagtatttgattctttctgtttcacggccagttgataatgttataaatgaaatttgcttttggtttctggttcaacctgttgcaaaagtcagtctctttccttcttatctttttgccatctttttgtttctattttctctgttctttcttcctccccctaaatttctgcctcatcctgtattttacagaattactttcctagtaagcaagatatcctgctggctaggaaagccaccaagggaattgtggagcatgacttcgttattaagaagatcccctttaagatggtggatgtgggcggccagcggtcccagcgccagaagtggttccagtgcttcgacgggatcacgtccatcctgttcatggtctcctccagcgagtacgaccaggtcctcatggaggacaggcgcaccaaccggctggtggagtccatgaacatcttcgagaccatcgtcaacaacaagctcttcttcaacgtctccatcattctcttcctcaacaagatggacctcctggtggagaaggtgaagaccgtgagcatcaagaagcacttcccggacttcaggggcgacccgcacaggctggaggacgtccagcgctacctggtccagtgcttcgacaggaagagacggaaccgcagcaagccactcttccaccacttcaccaccgccatcgacaccgagaacgtccgcttcgtgttccatgctgtgaaagacaccatcctgcaggagaacctgaaggacatcatgctgcagtgagcgaggaagccccggggtttgtcgtcgttgagcagcccccacggctgtcggtcagactcttgggtgtgtgttgtctgtgtggtccttgagtgggtttctcggatccgtgccctggaatacctggctcaggaatgctgtcagaccagccagccagcgagctctaggcaaaaggacatggaa

SEQ ID NO: 124203 - DNA, 1052 bp, Homo sapiens
gcaacaaagtattagtaaactagaagaaataatggaagaaagtatcaagaatgtagagctgagagacaaaaagggagaatataaaaggtcaggaggaaggaggatggggtcagaaggtgtaatgcacgtttaacactgagtcacaggaagaaaagtcggggcagcaccatgtttgaagtgacggtggctggtaaatcatatcaaacagtcaagaaacccagtgaatcccaagcaagattaaaaaaaaaaaaccaaaacactatagacataataaaactgcagaaaaccaaacacaaagaggaaaatcttaaaagcagctacagaaaaaggtagacgtgaactttcaaggagtgacagtttgacagctttcttcccaaaagctacagcaggcgccagaaagagtggaatgatatctcgaggtggtgtctacaagagagcttaactctcaatctaattgagttttgtaaaatagaaggcagaacagagacatttccaaacacagagagttgatgggtagcaaatcctcccaacaggaatcataggaactacacttgaaacaggaagaatgtgatttctgatggaaggtttgaaatgtgtaagaaataatatgaagactaacatctcttttttcttttgttttcacttttggtgtcaaagctaagaatttgttgccaaatccaaggttattaagatttacacctacattttctttttatgtttaagttattttctatttaggtttttggtaaattttgagttaatttttgtatatggtttgaggtaggggtccaaatccattcttctacatgtggacactcagttgttctagcacaatttgttaaatgtctcctctttccccatttaatggcattcttgttgaaaatcaattggccatagatatgtgggtttatttctagactccaaattctattctctcaatctatacatctatgcttatgccaggaacacatcactttgattactgtagctttgtagtaagttttcaaagtgggaactgtgagtctttgagctttgttttcttttcctcattg

SEQ ID NO: 124204 - DNA, 1097 bp, Homo sapiens
cggaagtggtcaaggaagtaaagcgaggatggagcgtgggaaggatgggcctggggtgcagttttggataagatggccaagggcaggccaccctgagaagcttccctgccccagtcctcactgagcattgaggaagtgagccgtgcggctatccggggcaaagggtttcagttgtcaggaaccagaagtgcaaaggcctgaggcagaagtgaggatgtgcctctttgaggacctgagtttttgccatgaatgagatgggagccttgtagggttttgaacaaagcgggtgataagagctgacctaggcttagcaggctaacttgaccactggttttgacagtagactgaaggggacaagtgtggacacaaagcagccaattagaagacttgccataatccaggtgagagatggtggtggccggacccaagtgagagccatgggagcagcaggaagtagggaaattgtagctgtctctggaaggtagaaccacggcattggctgacaggctgggccagacctcaggatggtgcatctcccctagctgcaggccgctgctgctctgtggggagtgaggtcctcctgtgcggcccaggtccctctccatcccatccaaattcaggcccacaggatggtccagggtaacccacagcacctgggcactctcctactacagccagtggccagcctgcagggacagacagcctccaaggccacagtcagctcggcccacacccttgctgatctgcagaaggtgcagaagcagcttttcaggcagcatggtagcagggcctgggtaggccagctctggcttaacccaagtgcaggccgtaagcactgaaggcgctgctctaggtgggtgtcgggtagcactactcatgatggtcactgcttacaggagggagttgggtatgcgtgagaaggaaacatgttcacagattcccgaaagagatattgaaacttgcagaggccaactctgtaattgcaaatgaagcataaattaagattttccgtttagttgtctaaacagttacccatgcagtccatagaagagaagatggatgcctgcagagcaggacttcattaagcagcagcctga

SEQ ID NO: 124205 - DNA, 1013 bp, Homo sapiens
gcggcatccagaggacagagaagcagagggtgggagctcttgcaagcagctagaaaggtgctggagggcagcacatccagccgctctggacggcaaggggaagaaaacatccctgacccccactttcttaagtagagaccaagtagacggcacctctctgtgaacgtcagcatctattttactgtctagtctgaagtccacagcaccaactttgtcacatggccctgttaaatcagaccacagcagcagagaaccagctgtagtgggtatttgctggtggaagtgtgccaggcatgggtaatcaatagctacttaagccaagccgaacagaaactaagcccgaggaacactgagacccgaagaatctgtgctaattctctcgtcaccgtggtggaacgttccagtgatggtgcatggcgtggactcctcgcagccctcgagtgcctgtttggggcagtcagtggaggttgcctggtctcaactgggaaaggccaggctagatgcggggtccacgggaggacctgctctgtcgttcagagctaggctttgtgctctgctgtgtgtatggtagtgagtggaggagacacagtcctggcctcgtggagctgattcctagttcacttctctggggacaggaaacacaacgggaggacagggcatgagccggaacatcactgggaaagtcacttggaggagaggggaggccttgcctagtggaagaggcctttcgactgtccataagatggatgaacacatccacctggactagtctaacgatgtcctggggccaaaatcagggatttgggctgcggagaaatttgtgacaaaacagtttgatgctcagtcaaggtgagatactggcagtcactgacaactccacgggatgcaaattacattcattttaaggtaaaattttgcacatctttgtagacaagatacacagtattccaggcaaaacccttgtgataagggagtcattacttaaagtctcacctgccttccggtttccatta

SEQ ID NO: 124206 - DNA, 1477 bp, Homo sapiens
atgtcactcctagaattggttttaataaacttgaggtttgatctgggcatcaggatgctgagacaccccctcctccctccaggtgattctcatgtttagccaagtttgagaaccactgctctaatggttttacgtgaggccacatggcttgatttccctttcatgccttcctgggcttattgtcctcccccaacaattgcagtgacttttatggaccttgggcctgtgttcacttacacctgttccaggttcatgatttgaaactcaacagagtacactagcttttcacttatgtatcgtttattcctactgaaactgttgagcccctgctttgtgctgcctgaggtgtacatcggaatcactggtgaaaatttaaaatacagttatctggactccacctcagaccagttggttctcagaagcatgcatttaaaaactcctcaagtgattcttgtatgtttgtgttactttttttattttttatttttaatcctcgtgttggttaatcccataatgtcactcaatttctctgtcatccttagcctgatttttctgtggtctgggtcacttttctcaggccaattcccagccttggacagggtgtactaattaggcatttctgccacttgtttgctagagtgttgagttcactacaaatctagcttccttttgggcccatgttgctttccattaatccagaagtactttgcttcccctcctcctaacctactccctttacaactttgtaatttgagtttcaactggaacttgagttctagactcccttacttgaatatcatcttaataaagagtcttgcttagtgagtgctcagatagttaattaaattttattaggccactgggtatttaacagacaactggtctcttggttggttactgtcttccaaatccaacaataagcagttattaccctctatgcagtctgcatagccacctgtagctgtcctttattgaacctttacgtgccaagcactaagtgctcatttattcttcacagcagctcctgagaggtagacagcatttttgttctcatcttacctatgggaaaactgaggcattcagatgttaactaactttcctgaggtcccaggaccaggagtggtgatgccagaatgaaaagtctgatccagagtctgaacataacttgagttcataacccctgggctggagcgtttcccatgtagcctctgcctttataaggagagggaaaaatgggcagcaatcagatctgtaccaaagggaaagacggtggttgatattttctaaaaacagtattgagtaatctgacctcaagttttagataaaccttatttacgattatgattgcaaaataaaaattacataatttggaaaatagagatgagggatgtatgtaaccccttccatctacacattcgtctcctctaagaaaatgactatcaccattttgatgtattcccctaccccaatttttctt

SEQ ID NO: 124207 - DNA, 1621 bp, Homo sapiens
atacctacctgccagttattgatcctatacctgagatctgttctggagaggttactactcttagagcttcattatgtgaacagtgttgccactaaatccaaatacaaaaatcatgattattatgggagcattgctgtagggaacccttgtttatgtatgtgcaattctagtgtttaggtggttggcttcctgacagaaagctccaaagccagaaactcattccatcagcctgataccaatctcctgtgggtattgtgggaatgaaagcagtttttataaagctttcctagaaacatggatatagtaaatggaaaagacattgggctaagtatcagtaggcctcgtttatacttcattctgtaactactgtgcaatatgaggaagtctattagtctctctgagtctgttttctcacctataaaaggagggattagactagatgttcagaattgttctactctgattctctgatcttctatatgttgtcttcctttctgcccttcactagagtctgcatgtgtctcctgtctggggattctgtaactccatatgtcttagcttagaacctaattttcttcattttacttttctcagagtatttacaatgttgaagacaactaagatgcaatgtagtatttctccttaggtgctgccgtctaacacatgatatatttactctagcctaaaaatggttcatgttcaaaattttaggttctgtaaaacaaattggtgccataatttatcagtataagcctgaaatttggagaaataaattttcttaaaatgtgagatgcttatttatatacatggctggaagaaggggcaaggctaacaaatctggaggtaattaatgcagtgagaaacttaaaaagatatgagaaaatggcgatggatgagaatgtttatatttactgtacagtgaccatcagtaatgaaagagattagtagatgtctgtttttgtgcttaacataatgttatgttggtttaattgtcttcattaggggcttttagtaaaacaaagggtctttaaaattaacacagtaatttttcactttaacaggcttaactggcactttattgatatacagacaatgtctagtgaagataacagctatcaattaaatagtccaatttcttgaaaacagatagtcaggtaaatctatttctgatttttggagattaggtagatgaacatgggtaagactatagtttctgcagtgtttttggctttggttcattttcaaaaaaattttttttaaatggataaggctaggctttagagttgtgggttcaaagaatgggctagaccctggggtccatattattacgtagaattagtctttgtgcagtgtttggttgccttttctcctttctataactctccatggtattctagacctaattctttaccttgagggggttggaagctctcaagtgtgtaagcttaattttacaacgatgaatagtctttccaatgagaaaaaaatagagggagataaccacgtaatgactatggtgatttggggaggaatatggaaacttggggagctctggtagttgcctttattaagaatagttggtagcaggaattttagcaacccaagcaggctaattagaata

SEQ ID NO: 124208 - DNA, 1835 bp, Homo sapiens
ttaggtaacatgtacaatttctggctaagagcaaggcgagtttataatacccagctatgtgaaatcaaaaccaggtaatagaatagtggcagagtgtcactagaaaaagattttttttttttttttttacatgagtgtataaactgttcccaaagggagcaagtttccagggatgcaactttgatttatattattgtatagtcatgcttttacttctgattttttttattcagcatttattcagctcttacagtaagctgtaatgatttgcagaacataaaagaaaacatggctgttaccctaaagcattttatgtaacacctttaaaaggaagagatacatgagttcacaaacattaagcatatttatgtatttgccggccaaaggtatttttactctatgtagaatttgttttatttttgccttgtaggcatattccctttttctaagcgtgctgtcttggctcttctaaaatggttgtcttagctaaaactcctggttgcaagctagaaactcagtctgaactacttaagaaaaaaaggattttattgtaggagtcctggggtatcacagtataattaggagaatttctttacatttggcaagtttagtattcacttccacctagggaataactagagccacatgctcaaaagctcccgggtactgtccttttggccatcatctctcagtttgcttctgtgtctgtgctggcatcattctggattcactggaaattgctttctttttgtggctgaaacccagctgtcaccactctttgcattcctattgcttcagaccctcaaagatagacttaaagctttggtgctgagtccaaaatctgtgaaatgatcagatttgtattttaaagtcatcttgagtggggggaataaaccattatttttgttgcaaaattgagaatgggttggaagaaaccagaatgaatgactgtagatgtgttggactgtaacaacaattgaggtgagagaaagtagcagcttgggctaggtggtggtgctggagatggagagaggtagatgcactagagagggatttaagaggcaaaaaatacatgggatttggtcatgggttgggtatggaaggtgaatgagaaaacatcaaaggtgacgtccaggtttctggcttgcatgactagttggctagtataaccattcactgaggttggaccacctctgggcagcatgatcattagtttggttttgaatttattaatgtgagggacctttgaggcatctagacagagctgttaagttgtgtggatagatgaattttgcaaccagaggagggtctgggcttttggtataaatatttgtggagacagtatagcatactgtttaagaggataggcttggcataaaataaaacaaagttaaccacttgctagctttgcatccttgggttggctacttaatcttcattaatcttgacttttcttatccctgaagaattgtgtaatgattctgcctgcttcctgtagttgttgtgagggctgattgatatgattgtaggtaaggtgtttttatcgcattaccaagtacatagcatgcatccagtaagtgttaggtggtgttatttattcttttgtgtagaggaatcctgccttatttatcttttcttttcctgtaatattagggagtgatgagtcacggtagtagagtggggagtatggacagttgacataactggagaggtattatactaatattagcctggctgggatacaacctggataaattgcagggcgatgggcctggggggagagtagagtgatggagatgagttagggaatggttatgataatatagaaataatat

SEQ ID NO: 124209 - DNA, 1067 bp, Homo sapiens
aggattagaggagataatgtatgtaaagtatttagcacagtgtcttgcttaataaatcatagctattattgtactcattaatttatcagatcaaatgaacccctaatgtgtttctccttctcaactgaaatacacagaaggcattacttattacttgtttcgtgaccttttgtcttaccttggttgtccttttcttccaattccatagtttatcttctctcctacttacctcctgaacttatccccaacaaatgttacatatttcttttactttttgagttttcttggcctgttgatgaatatattgacctagcatagcccttgccattgcattaggtaccatcattgttggttttagtactagaaaaactcaacaaagaaggaatattttcttggtgatgctccagagtgaatttaatattgacaatcaaatttattcaagtcactagacaggatgattccttttgtgattgggatttcagctgggatagaactgagatttggatacagatggtacctggcagacgggaataaatgtggggctgaaatgccacagaagcagttagcagtgtgggcctatctgggggtggcctgaggaaggacattcatgaggggggagtaggtggggatgggaaggacaaaaaaccgcattgttaaattaattggcatgacaactctggcagtggggcctcacggagaatgaatgatatgcagggtgtggtgtatgtatgtgtggaaaatagaaaaatgtggtgtgtagaaactggaagaactgtctccctgggttattttaacgttctgcttcagagtacaagcagtttagctgtgggaagcccccacccttttccacaggagagggatggctctcatttgacacaagctgtcatgcttgtaggagtcaggattgttgcacccagaaatgcttgtggagggtcttgtaaggggttgagtgcctgtaagagcatctgggggcttagaccggtggccctcaaggtattaattccttatcagtgtgttcccatctacacccatggctggtgtggcctaaccaagctggcttacctttt

SEQ ID NO: 124210 - DNA, 1032 bp, Homo sapiens
cattgactacacaaggattcgtgatctgagcattaatagcctgtttttttcctaattgcatgttttatagtaatcctaacctttaatatataagatcctaacctttatatttaacgtcttaacctattgctctgtatttctttaatgccatggattattgcttacagttataaatgaaataagtaattttactttatattttcattgatattcaacgaataccaatttaaggagagaaacatagatatacttttaaagaatttaagcgtggcacttaagattctttttattataataagcatgtgaagaagctctttttctgtaatcctagttcccaggggccaaaatgatgattaattacagacaataggtttataaaagtaaccgtttccatcatagaagtgtcataaaagattaaagggtgtatcaacaaaatgaaccagcttcctgtgtaaaattattaatattgctaaataatgtagccttatatctgttacaaaagtaccagaaaaattgctggataatgtgttacaaattttttacaaattacatagataatcctcagttctgttgaatttctctgacattctgctcaactagtttttcctgtgcagaaaaatcttaacaggttgatgttacaggaaaagtggcatgcttttagaaaccatgactaggctgcctgaatcaaacatcctcccctttgagaggcctaggaaagaaccatctcgcttggttgtatccagggtacactctcatagggataaagagccaaccaaataaaagggcagacatatacttagctgtacctatctatcctaatgtgtgtatatatagtgaagctattgtacaatatttcttaatgtaacttaataaggtagttagttttttagcctcctaatggcttagtgtttataaaaatgatactcgttcactgcaaattgtagagtatataaaagtgtagagaaagtagaaatcaacagaaatccttttccctcgagataaccgttgtgaacattttggtgaacatgtttc

SEQ ID NO: 124211 - DNA, 1350 bp, Homo sapiens
aggaatattatgtaatgctgtaattacccatcgaaaactcatgtctgaattcttaacacttctggcacagagggtgtgtatacctatagttgtcgttctgtcgtatgttgaattatatgcggtgtattttgataccctatcactatgcatgtgtaaaaagggaatgatagtgcttttcctgtttgtccctctggaggctgtgaaaattagattactatgtggagcatattcagaatagaactgcctaaaaataacgtgttactggtatggtattcttattctgtgtgtgtttaactttctgcccgaagataattgggaagaataatgtggaaatctgtagttgaaatattataactgttgaacaaagagatgtcttccagaggcaaaatgacaaatgatatttaaaaaatattttcactttatccaatctgattagtatattgtggtgttattttgaattatttgaaatgaagtaatatatcataaaacagaattaggcttattttaaggtctacacttatgagctcttacaatttgcttttagatatatatattgaagttacttgtaaatgatgatgatgatttcattttagatcatgctaacattctagttcagatgatctgggttgcttgtattagtgtggcaagacccaaacttcacacagaaaggaaaggcagtatgatttctaaaatatttacttatatatataaaaaaacttggttaaaatcaaacagcagaaaaatgtattacataaaagtctccttcccctaatccttgtactcaaagataactggtatgattttttttgtgtatttttttcataaaatctttttatgttagtatatatttcaaaaattcatacaaataggatgatgcgctctccatttcatccctcttttacttatgtgccttagaaatctttccatgaccacacacatagatctattctccttttagtgactgaagtattccacatggactatacagttcagttagttcaggtcatgggctgttaggttgtttggttgtcttttttgtttgttttaaagtaagtagaagtgatcatgcagtgaacaactttgtgcagtttgacatatttttctaagaaaatcaaaaggtagattcctagcatggaaatgtaaggaatcatttaaatatactgataatgctggattacccaaaccaaaggtctcatcaatgtagtcttttacgatgttcaccgatgccgtttatcccctctcttgctactgctagacattatttaagtaggtacgtctttaaatgcatttttcatttaaattaatttatattttgttaatgacaaattaaatttgaagaaaaggttatat

SEQ ID NO: 124212 - DNA, 1885 bp, Homo sapiens
aacatggtgaaaccccgtctctactaaaaatacaaaaattagctgggtgtggtggtgtgcgcctgtaatcctagctacttgggaggctgaggcaggagaatcacttgaatctgggaggcagagattgcagtgagccgagattgcaccactgcactccagtctggcaacaaagcgagactctgtctgaaaaaaagaaaacaaaaaacaaaacacccagtctatggtgttctgttacagcaacagaatatagacaagtgcatgatcctaataagtgtgaagtggtattttgtggtttttacttgtacttcctcaatggctaataatgttgagcatcttttcatgtgcgtattgtccatttgcatatcttctttggggaaatacatatcagatcctttgcccgttttttacattagttgtcttactgagttgtaataattctttttatattagatataagtgctttatcaggtatgattttcaatctgtgggtcctcttttcactttcttgatggcattcattgaagtgcaaaagcgtttaattctgatgtccactttatcttttgttgtgcttttggtgtcatatctgaacacaagtctttaaaggatgaatttgcttggtgaaacacctttcctttggataccaggttcataagattggacacagtcaacatttttttttttgatctcaatcacttattccttgaagataatctcagatgcagcttattttaaggcagtcccaattagttgactttcagatgtgttatttggaaatacttttaaaggtattttgataagaaaatttaagttttacaataaaatgtaaccttgcaatgtagctttgcattttatggtaaacattagttactgcttactttacaggtactaaaaatcaactacttcaatttcagaatgtaactttctcatgccttattttatttcgaccagtattaagcctctttatgcttagaagatggtgttgaatctgtttcaggttaaaaaatactttattcaaactattattttcttaaaagttaatatgtctaaagtttttgaaagacactgatcactgagatgtttggagatttaaactggtttatttttggttatccatggaaaactttaaaaaatttctttattgaattatagttttaagtctccttattttattctcgatgattaatgtacagggcgtggcttacttataagtgtgactaaagttgtgcaaattaatcctagcagggctccatcctttaatgtcagtgccgtcagttgttctccccttattcctattattctggcattatatcttatctgtatgtaaattcttattctgtgggtgaaaagggatatggttcaacaggatccaagaacttaaaaattgccctttttcacatttctcataagtagtaagtctcctaaagcgaagtcagagtcattataaaggcatgataatggagtctgttatctatttggaaaaacaacttttattgccatttataataaatgtaaatggcctgccatttattttagaattactctgtttctaggccctagaaaggctctgcattttataattaaagttagtagaggctagaagaacttataggaatgtcataatgtgctgtaggggacagtgatacttttaaaggttctgacattcagccagtaaggtgcttctagttccagataacttcttttccccccaggaatagatacagaaaatatttttggtaaatctgccaagttttttatgtgattctcattatgttaaattttattatcagtgcctaaataatgctaacattttaagttaaacagttattcagcttaccactttgacattaccactgattagaattgaaggctaagttgagcctgggga

SEQ ID NO: 124213 - DNA, 1266 bp, Homo sapiens
tcctgcttaagaaattgggaactaggctgcttcctgtggttctgttgctttgtcgggggagggagggtacctgatttctactgaaggccaaaatgcagagtcaatatggccggttattggcaaaaattatgatatttagaaacttttggaatgtctgcaatgttttctagacattctagggaggtcactggtgtttggaaagtacatacaaatggtgtatgaaaggagtgtgccattttctgcagaggtgttcgttacatttcataaccttatgttgccatttaatgaggtcaaagaggtttcttgactgtgactatggaatgcttatcttttgttctgtcttgatctcctcctgtctgtgtctctcattatctctgactacttgtatgttggcagtggctttatttcctttcacactcagcctggattccaggctcatctctaactcctacatcagaaccctgaactggcttgtctgttttgtaatctgccctaccatgcatacccctaacctagcacaaacgccctacccttcccttctcttgtacccatgtggctcagcacttctggataaattagaacaactttgacgatggtattggtcagggttcgattatcgaggacagactctaattcttcctactttaagcagaaagcagtttattacagggaattaaatttcttggtgaattgttgagggtacttagaaacgctcctagcaggttgtgctagagtataattcccaaggctgccctgtggaactggactgccagggtggccagcatcctagcccaggcatggggctgctgatttggctgttgctgctccactgctggccccagaaccacaccaccttggccgctgtccacaagagtaaagtggctacatcacacttagtttctctccccacttagttcagtttcattcttaacccagttggaccataccatttgtgttttgcatggttcatgtttatcatgatctgaaggaacctaaatctagagcagaaccccaatgtggtttttcagctttccagactctgcagagctagaaggtgggagtagattgaagtgagtcaatctgcagtattttccacatttatggtttccgagtatagctggctcttcaagattgttttgtagtcctttcacctttccttgataggttgacttgtttgctgatgaaagcagcagttctcattctacgctggcctctttcattctcattagatggtggagcctacgcttgagagaagaagctgtcggg

SEQ ID NO: 124214 - DNA, 1039 bp, Homo sapiens
ctaaacacatacaaccaaaaaaaaaaaaaaaaaactagaaatgcatgtatattttcactaagtttagttagatcaaacaaagcaataaaaggaatattttgtaccaaagcctatggacacagtgaaaactgtgtgcaggggaaaaaatctacagaattaaatgtcttcaggattagagaatacaaagtaaaaagtgaacaatgaaactccctacatgttcaattttaaaaaatgttttaaaaatggtggtaaaatatatcctaatttttcatctgaatcattaagtatacagttcagtagcatcaaatacgttcacattgtcgtgcatctagtctccacagctacttttatcttggaaagctgaagctctgtacctagctcaggatccaattttttttctcgttagttgtataagaaaattccgacttacttaagtagtggcagttattagcttttgagaacagtttctcttgcagtttcaagatgtgctttgcttatgttgatatggaagcttaaaagaagaattgtagacagtttatttccaggctgaataaaaatgtgacagttgctcttgttatcataaatagaagataccccaaaatttgcaacaaatgttaaaactgcattaccattctcagaataggtggatatcgtgttcttcttcgttgttgctggactggacgtaatggcatgctgatagcacgtttcaatcagatgggcctgagccctgtctagtgtataatttaccttttcatatatactgcaggagtgtccctggtagtaagttctgagagaatgaacgtaaaagttcagcagtcctaaattcagaaaatgatgagtggtgagcctttgtagttaatgacatgattactgccagtcttactgttgtacagtaataacaagagatgcttcatttccaggtccacacaagcacaaattgacctaccacacagggtagtgctttggggacaacttatgtaaaaatctgaatagtacccatctgattatgactgttgtgctttattacagattttaaaac

SEQ ID NO: 124215 - DNA, 1033 bp, Homo sapiens
gtacctactaacagtaagtttagcttagggagaggtaagccattttaagtctatcagtatataatggatcacagaaggagagagtgggagacactcagtctatcagaaaacataggatggatgtgccacagaggaagaagttgtcacttaacaatgagtgtggaaaaaaacaaagtttatcagtgtctgtgtgggcgttatttatttggggacagcatcctaaggcaggcatattcccacagtggaaatggatgtggtgtgatgccatgaacttgtgaagcaagtgagtccctttgttgtgattccaaatttactcagcacataactgattattatctgctccccagtgtagttgtagtgggacagattacattgcccagaagagttcagtattcagtcttcttggtggttattttgttgtaaattaataatactgatagtatgtcattttgctttttataattgattgtctttaactttgccctgaggcatttttcctaatcaactctagaccatgatagagcctttgggccacaagactaacagtcttaccttgaaccaccagtcagtgaggtgtttgggaaaaccttttcctggtgatgtctcatcttttccttctacagtcaccaatgtcatatttactgtgttaagatgctaggctttgtactggcttgtttacttctcacgatttatcttgcagtatgatagtttgtgtgacactgaaaaaaattagtaggactgttaaaatagttttttccccccattaaaagtagaatgacaccgttttgcttctgaagaatttggctttaactggtttatattttgagctgggtattaaaggagaattatggtagggtaaacacaattagtgacatctggttgccccaagaatcaataatatctgatactacatacataaatagatatctatgttgtgataatatatcttagtttcactgggtaaaactagaagaataaaaaatttgaaaacagcttggttactgactaagctgcagcagttctgagagcctac

SEQ ID NO: 124216 - DNA, 3425 bp, Homo sapiens
aacatacctttctgaatagtacaacttgcagacagaaatcttaggatatggaagacttaaagaacatgatcaatgaacaaatctgacctcatggacattcatagaatgttacagttcctgtataatccattcttttcaagcacatggagcatctgacattgattacatataggaatataaagcaagtattgataaatttcaaatgattgaaatcatgtagagtatttttcttacggaattatagaaggaatcaaccaaaagataacaggaaaatccttgtatgtcaataaattaagaagtatatttcttataatgtataatatataattttataaatatataaatatatatttataaaagtttcatttaaaaagttttacaaaatggaaaaatctgtcacttaaatacaaaatcactgtacttctgaccctactaaatgtaaaaattgtcaggatttgggaggttttttttttgatgtccaaatacttgatacacgttccagagatccccaatatttttgtgaattcttcttaggaggctagtgatcatgtatgtgggattaggaaagtaattgtttgagctaaatgggggaagagatcattcctgctggtagcagggagggtgtgccacgacgagagatctgtggatttactgaaaacacgagatttacatccagagcttagttcacaggctgtggctcctgtttttattcatttagaggctgatagaccagctgtgcctgtagttacgtgttctttggccagacacctaaggaaatttgaggctcagacaagctgaagtagatatttctgtttccatgttgaataacagagccactcatgggctgtcacagatacactgtttggggttttaccattccttcccatttccattcctgaaggaaaaagagaagagatttttctttttttttcagattattactgtgttggtgacctagggaaaccctttttttttctcttctcttttcacaaagttctgaggagcatgaaaaaattgaggtattcacagtgtctggggaggaaatgagttctgtcctgtattttccgaagagtgggaatctaaatcggaacaggcaccaggttgaagaaataatttgtcacatcatggatgcaggaacaagctctacatgggaatactttgttgtagttagggtctgtcttgagggaaaacaagacataaagggtatgtgaaatgttttctggtgatcatatcccaccgtgtcattagttcttttaaagtactttttctatattatcccaatttagctttttttgcaccctgcagcaattctatttctattttgtttcctgttatcattgttcccttttctgagtagaggatagataggtaagtggtgtaagtaatggcatggaaagatccaagaaccattaagtagattatatccctttttactatccttttcttaaagtgcttgacttaattctgaatagccacttacaaactttgatgagtatctttcatcttgggggttattttgaaaattgatggcatttggaataaaagttgctataaccttagtgtacgtttgggtttataaaatatactgaacataggaactcacatgactcccaatttttgaagtaaccataatttctaaaaaaaattcaaatgagctgagttacatttataccactcctgggaattattagaatagcatatgttctctgtttatgctctttgtaaaattggaaaagtaatgtgtagctctttttagtagtgccctgtgtgtagtttctgtaacagttctgtaactgtaacttaccattccagtctatttctgaatggttagtggagctgcccgtcaaagccagacctattacaagggatgatatttcccctgtcatgaatagaaactattgatgactcgattaacatacaaggatgatacagttcatggttaaagggagcatgcttccttttgctggtgaaggaacattaactgtagatttcatctagaagatcactagaaaaagcagcctcccatgtttgagcgtgtcctgcatgtcagtttccatgcagatgctttctgtacgtcttcacgtcctcctcatccatgaggttggaggtgaaagttacgtaactgacttgctcagggaacacatttcatgttgcaaccgggctccatagccacatttcagaccatttttcttttctttttttttttttttgggacagactctcgctctgttgcccaggctggagtgcagtggcgagatctcggctcgctgcaagctccgcctcctgggttcacaccattcttttgcctcagcctcagcctcccaagtagctgggactgcaggcacccgccaccacacccggctaattttttgtatttttagtagtgatggggtttcactgtgttagctaggatggtcttgatctcctgacctcatgatctgcctgccttggcctcccaaagtgctgggattacagcgcctggcctgaccatttttcatttaaccagcattcagattattaagtcaaacggaaaaaaaaaacagggatataaacctattagaaaccaatgtgactgtttcatgccttacatttatgtctggaaagttgaatataaggaaaaagttgttttttgaaatagtttttcattggttccaatgattattcgagagttttccgtgaaagaagtataggtaacataataaaagttaaagttaacagtcttaacacttcaattgtaagaatattttgtggtgtcagtgtattaatagctcctgaaagaaaattgtcaaatgtaatcagtctacatttttttcatgtgtatcaaagctacccatttattaaatcacagaagttaattgtgtttcattgggaattaatattgactttataggtcttgggtagattatttaaatagccctgctagctaatatgttaacccctgcccttattacaaatacatcctgacggataagggcaaaatattattgactagattatgcttgaatatctcaaaatgaaaacagaatgaagcagctaaccaaggaaacgattggacttaaagtgtacgtacttgatcacgttaaagaggcctcactgctgtgtaacaatagatgcttaaaataatccaccagccaacactcactacatgtgaaagtggtttactttcttgtgtctgtggggaagctctaattatatgattataattaagctacagtttattttctcattttctctgattaaattgtggtgggaaatatctggccaaatctagtcttttcttagtcatgttatttgttaattccattgacacatcttattaaaatttgcagcaaggtgttttcctgttaaagtaattgaagatttcagagtatcttatatctaaaaattgtgaatattctctgaaactagacctaaagttcttaaaa

SEQ ID NO: 124217 - DNA, 1113 bp, Homo sapiens
aacttatttgctttatcttactatacacataaatgttttaaaattgctgtattaaaattaaaactattgaataaaatttaagatttccttgcaggtttttttgaagggcatagtcctttcaatatatactgctgaggatgtagagacagaacactgactttagaagtctcttcaagtcttttttccaggctgggcgtggtggctcatgcctgtagtcccagcactttgggaggccgaggtgggtgtatcacctgaggtcagtcaggagtttgagaccagcctggccaacatggtgaaactctgtctctactaaaaatacaaaaaaattagctaggcgtggtggcgggcaccggtaatcccagccacttgggaggctgaggcaggagaattgcttgaacctgcgaggcagaggttgcaatgagccgagattgtgccattgcactccagcttgggcgacaagaatgaaattctgtctcaaaaaaaaaaaaaagtctcttcatatattttttctgtgtagatattttaccgattcgatgttaatagtggtttatttctgtttctctaattctgagttttcaatttctggattaattctttccatataaataggtttgaagtcaaaattaaataaaaagttctacatagagaagcattctctgttttcattcttcccagtatcaccctataggtaaccatttttattacttttttgttgtaaaagaaagtacttgctttttcttccttctcatacacaatgtagtagtctatggtctctggtctcctcctttctttttttttttatttcacaatatattttggagattactccattatagcacatagagatcttcctcactcctttttacagttacattaagtactgggtaattttgccatgtgtacttttattagatcctgcagaattcccctttatggggattttattttgtactttcatcaacagtgtttgtgacgttcagtttcttctgaggcttgtcacaagagcagatttttgccagataggtgagaagtgctatttcagtgtagtttttatttacatttatggggatagttgaacatctttaaaaacatttaaagacttttgtctttttg

SEQ ID NO: 124218 - DNA, 1097 bp, Homo sapiens
gggcaagcttgccaactcttacatacagagtgttctgatccaaggaaaaagtaataaaaagtacccaattatagagcagcttcctgaaatcaacatttgttctttcttttacatctcctattgaagaataggatgttgtatataagaggatagcacaaaatgtttcctcaagttttcatttatgtcactgaagagttgactttaaagaattattataaattaataaaatgtaaccatttggaataagctatgtaaatgaatttgaaagtttgaagttgttgcttttctttagtaatgaaaaactaacccatgaaatgtgtggtagatttttcacttattaagagtaaatatgcgcatttatggcgtgcagtgtttcacttaagaaagtgggtatttcagggcagcacctagccactgctggtgtacagtgcggactgggagcacagtgccctaggcacaggcagcctgtgagtatccgtggcagttcgtttctaactagcaaaggaaaaggacttctaaaatcaatactggttttaaaatgtatcattactgttatttggctcagttggattcagagccataataaatagtatgaacatcggcctaagttaaagtttgcatttagacctgattgtgaatggaaagatgtacatatgacttgagagagtatggttttgacagagtggttgttaatgcctcagaactaaagaggtttcatgaatacataggttttcagtacagtctccttaccggcaggggaatatcagacaagtggtgtttttcagacagtgaagcagatggctctttctcttcagtacagggtgtaccaacaaagagagacagttacacaaatgttaacccctgagggagagagaaaacaattgcagtcagttgttctttataagtctgtatcttgacttcacagtggtgtgaaaaagtaatttcttcttttataaaaagcattaaatgcacaggagcagcctgtaatctgagtccaactaaaatggtggaagatgatgtaatcacttaaaaaggaaacagactgttatgtttgacatttctggagtaacgtggtggtggactacttgggcccgata

SEQ ID NO: 124219 - DNA, 1018 bp, Homo sapiens
attaatgtgcagtgattttaagcaagtattagttgaataacgttttacatgtttaatgatgctgcatacgcattttccgatagtgtctaccacggtttatcacagaggccagtgtgggctctcacatgtaataaagctaatctgaagttaatttgcaaaaaaaaaaaaaaattgtgcattgtgagaaaattttagaaaacaaacactagtggagacttgcctttacatgtcacaaacttatgctaaagctgtaattgttaaatcagtataatactgacccaggactagacagaaaatgaaataaagtctagaagtaagcccaagtacatatgggggtttagtgtgtgttcaatgtatttcattttaaagtagtgtaaaatagatggttggttatcagcctgcaagttggctcccagtgatcattgccttgtagtattcttatccgtgtatagactctccttacatgtgtagggctgacctgtgtaaccagtaggatagaatgaagaggatagtgtgtgacttccaagggtaaatcatacaagacattgtaacctctgtcttgtgctcccttgcatcatttgctcttgggggagctggctacctttcgtgaggacactcaagcaactctgtggagaagtccttgtggagaggaactgaggccttggtcaaccgccaccatcaacttgcctgccatgtgggtgagccatctgggaagtggatcctccagccccagggaagccttcagatgacggcagctctgggaggcatcttgcctgcaacctcatgtggatacagctaaaccagagccacagaactaagctgctcctgaatttctgactcacagaaatggtgtgagaaaatgctgattgctgttttaagccatgaagttttggggtaattcatatacagcaataagtaactgatcagatggattattcagtcagtggtgtggggatagccagctagaattggggaaaaaataagttggattcttactgaattctgcatcaagaaaatt

SEQ ID NO: 124220 - DNA, 1012 bp, Homo sapiens
cagggggctgtgtgtgggggtgcttcctagccacgctgttccaaactatatttttattttatcatttatttattatatatttatttttggagacagagtctcactctgttgcccaggctggagtgcagtggcacgatctcggctcactgcaacctccgcctcctgggctcaagcaattctcctgcgtcagcctcccgagtagctgggattacaggtgcacgccaccatgcccagctaatttttgtattttagtaaagatgggggtttcaccatgttggccaggctggtcttgaactcctgggctcaagtgatccgcctgcctcggcttcccaaagtgctgggattacaggcatgaaccactgcgccggcccccaaactctatttttaaatcaacttcttgttgagccactcttgcctgtatttgttggctctgagcttctcttggatcccttgagaactgctctcagtcatctttcgggggctacaattaacattgttctgtcttccaagagtccctcatagttttggtctcacatattttgtgttttctaggcattccataaaatatatggtctgctgatggcactggttttttgtcttgcaggattctttaattctacttaaaaacaaaagtccttgttagttcataagaccttgggtgggacgggaggtagacatttgtgctcagatgacctgttcttttttctgtgggtgttatcacttgcgtttcttcgagcatattcactttgacattttcttctgcttactgtatcagccatgtacccaggggtcaggagtgtacacatacacatgaggaaaccttgaggtcgggcagggatttggatccaggctgtgactccaaagcctgccctcttaacctctctgctgtctcttctgtttgtgcagtggggggccctctttcatgctgtttgtttacttcaaaggcttggtgtttcttgtatttctgttcacatttgtaggtaaggatctgcaactcagcgttgcgtgaagg

SEQ ID NO: 124221 - DNA, 1051 bp, Homo sapiens
agtaaaagtaaaatagtggactctaacaaattaatttttaagcacccaacagaaaatgtcactcttccacagagccaatgtctatactatggctgttttccagttttggagttctggaagtttgttagctaccattgctctttgagtaattcttaaaccttttataccaggtcacatttagaatagaatataaaaaccttggacacaaaatcaaagttcataccagatcaagaggggacaaaaatggactagaaggaaggttacataaagtggtactatgtcttctgcaatttgtttgttttcttgtaatatttgccctgagctcaccagcgaaataatagatagactccatagaagtcaactcttaaaaatgacttttctgtcattctttacctccatcctatcaagcacacatgaccttggttccattgtgcaggacttaggaacacactttgaatgtaagcagtttcttctagcattgctggaagtaaaaggatgcctcatcttaaggaatagagttgtttctggaggtcttgcttaagcgtacatttggaagtgattttttttttcctttacgttttctgttgtagaataaaaaatttctttccacaaaggaattattatacccaaaatatgtttaaaaacaatttaaaagtatatatatgtacagtggcactggctttcagagaaaagaataaaagtatatacatgtatcctgttaactgatttttttttttttttttttgagacagggtcttgctctgtctcctgggttagagtgcagtggcatgatcatggctcactgcaacctccgcttgccaggtttaagtgatcctcctgtctcagcctcccgagtagctggtgtgtgccataatgcctggctaatttttgtatttttttgtagaggtgaggttttgctatgttgcccaggctggtctcaaactcctgagctcaagcaatgcacctgcgttgccctcccaaagtgatgggatcacaggtgtcaaccgccatgtttggccaacaactgaaatatttttaaaagtatgtatat

SEQ ID NO: 124222 - DNA, 1717 bp, Homo sapiens
tattcttttcctcagaccacataatctcaatgtatctttgaatttgctgggtcttttttctgctcatttttgtcagctgtggactccttacatgaatatttcctttcagttatcatacctttcaattccagagttttaattttgttcctttttgtgatgtctgtctctttcttgacattttttattttgtgagagttaaagaattaaaggaaagtatgagcatgatggtttcctttaaagtttacgtcttaagttcaacatctaggcttcatcagggacagcttctattgactccttttcctgtgtatggtctgtacattcctatatctttgcatgcttcatattttggttaaacactataaattttaaattatttaatgtgtaaactttggaagttcaaatttgttatccccccagagtatcatcctgttgataaggctgctgttacttcgtatagtgacttctctggactaatctcataaagtttattttcttcattgtgtggggacactgaaatctctgttgggtttgattagtggtcagttgatgattggacacaaatcccttttactaagtctcccatccttctgtgaggggctctgtatatgtgttgtgtatggctctttcctcggcttgtatatggcccggtacatgtgtgtggagttccagatacccactgtggacatctcatttcacaggtctcccatttaaatttttggctggactcttggctgcccaactggtatggccgacttaatagctgtggtgttaatcaattgcagctgattgtttttgacaaatgccctagggtagagggcttctcctgcttggtgagctctgcatgacatcaagtaatgataatgccttgtgaatggggcttccctgagagctgtgaagcaggtcagacagtgacagtgctccagagagggcgcttttggggaagtctgaactgggtctgctccctctggtggctacaggactacacattttcacattgttagggaggctgctggttcttagcctactgtgaatggagcttaggagagagggatggagtagaccaagttaaaatgccatgaaccaagcctttctagccaagattcagcagctttcctaagataatgctttagattgttgtacagctttggttaattttcagaattttcaaaaaagttgattttgaaaattgtggcagcattttcattgtttttatgcatgggagcgtttccacagatcttcactccaccattctgagagtgcccccaacttcgaatggatgaatttttataacaagtgaaaaagtaagtccctgaaggttacatacagcctttacccattttatcaacttagaaacaatgaaaagaacgtatgtacttataaatacataaaaatatacacagtatttgtattacacaaaaatagataaacataaaactataaaaagtaaagtacaggattctggatagtggttacctcagatggtggcagaccaaaggatgggagtgggggttacctagaaatatatgtgtcataattaaggtccagttttattttgtagttggtgggttcatggattcttatggcgtaattaaaaatatatacacaggcaaaaacattttatggttgtgtttgccttcatgttaacacatgagatgaggaatctattatgcaacagagctttataaaggagcttcaacctcagttttcaaagccattc

SEQ ID NO: 124223 - DNA, 1560 bp, Homo sapiens
tgaactgatattctttttgggcacctgtttgtataaacgtatcaatttgacctgtacttgaattaactgtttattttttatatgttggacagtactacaaattgctctatttatgaactgtatgtttttcttcaatatgcagtttggaatcctgctgttggaaccttatttgcttctgtatgctcacccttattcactaatgtttgataataatgcattataaaatagcagtgctacttctttatcaaaggcttgcagtatttatttagcatttgcagtttcgaaataattaaacaatgctgatgtacagttcttattgcatttcaaaaacctaaccagttaattagcttaagtggttctctcagccctattgacagttggagacacatagtgctggcttgtcaggctgctaaaatgaaacataagaatggcataactgtggttagcttcttttccccctcacccttgagatatgagttggctttcttttgtgtgagataaaaacaaaaccagatcatatgaactgacacttctgcttcagattaacatgagccttgttattcaatttcatgttggtgtttctacactcctttgcctcactgagatttcattaatcctcatatccttaatcgcctcccctttcccttatgatggtctgttttaagattctattatggttttttttttttttttggatgcctttgaggccatctgaacaatactcttggttaacctgagaatggattacaatctgatcacatacttactgctgtgtttgtgtctcgctgcctgtacagtcaggtggctgttctgcctcttcacccttggctgactttcacccatggactttgaagtgttactgcttctattttcatcaaattttatacaaattacaccgtttttccgcaaatgtacatttagtgaagtttgtttggctccagaatccagtccttttgcaggacaggagcagaggaaatggcagtgaaggagagggaagtccacgtaggaagaaatcccaagactggaggtggattggagacagcaacagaagagaagagcgttggggatggctctgagttgaagctaggtgactgttgacccagagaaagaagttgagaggagaaccacgctttgtatttaggtgggctgtggtggggtggaggggattgaggtgtggagtttgatttttgacattcttgtgtttgtgttggtaagacaccttgtggaactctcctagcagagtttaagcgaatgagcgtatatatttgatgaggtgtatatttgagagtgacagcacagaggtgatcataacaggagccactatttgttgagtgcatactagctacagtgataagtgcttcacagacatgctgtctgtgcttcaatgtcctcacctgtaaaagggatttaatagtaggattcttgtgagaatgaaatgaattgatatatataaagtccataacaatgtctggcacataataagtaatacttaagtgttatcataatcacattttaattcagtatccctttggaaagaggtattattgcaggttgaacatc

SEQ ID NO: 124224 - DNA, 1030 bp, Homo sapiens
cctcagcaagatgtgtctttctaaaaacaaaagataagagacaataggagcccacataggatggaaagctagaaatcaggtgggttaaaaataatttcatctacactatcttccccttctcaaaagatttttaatctgtaaatggcaacttatacatggaaggattataaaatacataaaattactttttatttgtcttctcagatatatggcgtgttctttatcttccccttgttccaagtaattttgttaagcagtaaacaacgtggaagacaggttggtcaggagataagcagttgattccgtgttttttgaagagaacttttatgatagtaggaagaggagggcagtgctggtcctgtagtgcagtcgtgtagtactgtttgctgtgggacaagaggaaggaacagactggcaggaagggactgcagcatggaagggtgctaagtgcgtcactgagtgataagggtgctaagtgcaggaaggcccactggatgggcagggtgagagtgggttcaggttgtaggtgtggagttggacaggctggccttgttctagcagcaccatttactagctgtgccaccctaggcaagtcaccttctctgctcctcatttcccttctctctaaatggtgataataagagaagctaccctctgaagttgttaggattaactgagctgatacatagatgtaaaacccataggacagtacctagcacgttgcatccaacaagtgtcagcaaaatattagcctagccagtcacctgtggccattatcaacatctgtctccagttagtcaccacctttggtcaattctgcatttgaatatttcttaaagatgatttatcttctctgccctcatggccatagccttagtgtacagactttttaactctcaaataaattaattccgtttattcttttagtcaaattttactaaaatccattgtgcagaaaatgacctgttaattttctaaaatgcagatcttgccctgccactctgcttaaatccctgtcatggttttctgt

SEQ ID NO: 124225 - DNA, 1250 bp, Homo sapiens
aaaaatggaaatgtgtgtggtaaagtccgttattctgtataattggatcatatgtatgtgcacatgtgttcatatttatcgatatgtgagagatgatgtatagagtttggtaatagtgaggaagacctcttaccccaaactaaggtgactggttttgtcttgaaagtgggttatagtaagtaggggagtggtctcttcactgctgtttagaaggacttctctggacaaatgtgtggatgaggtattattaagcccaggatcttgaagatgagtagaatggtagcataataatctgggtgagaaatgtttggggcagataataaagtgggatgtttgagagagattttaagaagtagcagtgctagcatttgggatataaaggaagggaaggggtctaggatgatacgtagatttctagtttggaacaagtagacttgcagggatttggtttatgaaaacgaggggaggaatgagtttgggaatgggaagctagtgagttctgttttagacttaaatgtttggaggcttttagggttttgtggggacaaatgaagatctttattggttggctgaatagatctgaccttagctcatgtgaaaagagttggagattttgacattatcagtgtatataggtggtattttagtcatgggagtatatgaaattgcatagatggaataattgcatgaagagagaagagggatgaagatggagacatctaagatgtaggcaaaggatcacaagaagacactgagaaggaatggcaggagacataggaagaaaataggaagagaggagttttgcggaagccaaaggaggagaaagtttcataaaggaaacgatagtcattgcagtcagatggcacagagatttcacatcagctcatcctcaaacctgtctcctgggtttggcaataaagaggtcatcagtggctcaggcaagagaatgggaggcaaagtgagaggagtttataggttggctgctaagtggatgatacagtagctgggagatgatgtagggctgagcgagggtgtgggtatgtaagatgaacaagacgtgagcaatgtcctaaatctagggatgggggagagggtgaaaatataggagaaaggggcaattgttgtgaagttccaagagacaagcccggagttccaggaaaaatagggaccgctttcccactgagtctggagagaggaaggaacgttttaggatttaaggcacaggcaagtttgaggtagggcagagtagg

SEQ ID NO: 124226 - DNA, 1008 bp, Homo sapiens
ttgtctattctttgaagtaccttgttcatttcataggaatttggtactgtatttgtagtacctttttatactcctctttatgtaaggtatgctttcagttgtcatactttttgtatggctcatcacttttaaatgttgctggtttcaaaagacttgaaatgcacaaatcgtttgctgtttatgtattagtttttaacattatctgatgttgacaggcagtcgatatagtgctggatgtagccactccccagtgccatgaagaacccagtttctgcctgcctttctgcttctccttccttaatgtgttaatttttgttctgtgcttttgccttatagttgaagcatcactttcctgtttcaagaaggaagtggggaggaggacaaagggacaaaggagatgtctgtagaatgtattggctctcttttttaaaatcagggaagaaaatgcttttctaagtccccaccccataaattgcttcgtcgcatattgttgggaagaccttggtcacatgaacctcctggtcgatcatgaatcaagggtagtgagatggctccacttggtttagaccagttgtgatccatgtccttggcctggggtaggggccttcccttcctctccagtactgtttgaactgattgggattccttgaatagaaaaggagagagaaataatgtgtaggtaagagaaggtatctctcgtgtttattgaggcttttcaatatgtaatttgcttttaattttaagaaacttgcctgcctcttggatagcaaagaaagtgatttttatttgtattggtcttgcttttgccaaacattttaaaattaagtgatttggggataagtatttattttgaagtctattttattgtttattaagatatatttcaaagtggtataataaatgacattattattttcataaactattgcttcctgaagtgtttcaagccaaataaacatttatctttttgatgggaaaatgctttctaaatttccctcagccaagtta

SEQ ID NO: 124227 - DNA, 1026 bp, Homo sapiens
tcagtggcccgtcactataacattaaataagatcttaattgtaaaacacacttaagtgatacactttttcccaggagagagctgataacggtctttaagagcttggaccctggagatgcgtagtgtggtcttgaattcctgctctggtgctgagcagctgtatgcctttaacttctctgtcactgctgcctcctcattgaaatgaggctagcagtgggacctgtctcgtgggatcgctggagggtcagataagttagcatatctgaggctcccaggatagtgtctggtgtggaagcatgtgtatgttttagctgctgttattatcattagtttcaattccctggcaatagcactgtttggagtctcactgtgtattatttaacagattctgaataaagccattttatcttctttttattctttatagatgataaataatgttcctacaactcgaggtatcacgctgtgtttttaactttttttttttttagcattactgaaagaagttgtatgtactttatcttattttgctccctaattataaaatacagggaaaatcatattcttttgcatgaacaaatgagctatttgaaacaggttgcttggtgaaagtgaaaatttaaaacaggattcaggtcaagtataatatattggtttacacttaacagagttcatagtgatttttatatgtctcctttctttttgatgaagaatgtctgtgttccgactactttacttctccgttcattttcatttgttacattctgaaagcataaaacgtgccattggttaatcaatttagtctagtggaggtacacaaattcaaggtaaatttggctaatttctcctgcaggctagaagataaaatcctttccccccaccacagttaggttagtagtgcttgacgtgatcagatgcctcttcagaggtcacctgatttaattgtggttgtgaagcagccaatccaaatccccatattttaatttctatccctccacattctcggcacagaataattaagagtat

SEQ ID NO: 124228 - DNA, 1003 bp, Homo sapiens
taaaataatttcaacttttattttagattaaaggtatacatgtgcaaatttgttatgtgggtctgttgcgtgatcctgaggtttagggtacagatgagcccatcacccaggtagtgagtgtggtgcccagcaggttttataacttttcagtctagtcccacccacccttagtagtccccagtgtctgttgttcacatctttatatccatgtgtactcagtatctagctctcatttatacgtaaggatatgtggtatttgtttttctgttcttgcattaatttgcctaggatagtggcctctagctgcagccatcttgctgcaaaagacaagattttattctcttttatggctgtgtaatattccatggtgtgttcctaccatgttctctttattcagtccaccattgataggcacctaggttgattccatgtctgtactgttgtgatggaaaatattcatatttcagaagtaaggaaagaagagagggacgacaagacaggttatcagtgtttcagagcaaatgtctttagactgcctgtctcatggagtttgtatgtttttactctaaatctccagtctgatttttgtgtataggagatttacaatggacatttctgcattttagaagtagactatgttgtacagtctcctgttatttcttgggtgtgtctttatgtgtgaatttgtgttttctgttgatgaaacaagaaaaaatatatacttaaaacacccaaatatatctgtagataatttacatatcagttgatgaactattactgtttttgatagaaaatccatgtggcttaagcaagggaaaggtttgtttctctcttaaatgtagagaggtagatagtccagggttggtttggcggtcccacagccattaggacttgggcgtctttgtcagtcactgctcgccattcacctcgtgtgtctcgtcactgtcctaggtcagtgctctagtctgactatgatgcatttcagcatgcacgaaggaggaga

SEQ ID NO: 124229 - DNA, 1013 bp, Homo sapiens
cctgtttgccaggttggtcatattttctatccccaagttaggggctgtggggagatggaggccaggggatctcacttggacctatcaaggagttggagcatggctataaatactttttccagttgctgcttagtttttagcaattccttcaaaactagatagagagagttggtgcttagtttttagcagttccttcacaactagatagataggtaggtagatagacagagcttaaaacaattattagcaagtttccatgggattttaatgggaaaaggagagaggaaatgttgggcctttgcctttattacctggagtacgcagaagagggtttcttgaggaagttttaggctagaacagctgagtttctgcccgccttgaaagtccactatcagagagatccctgctgcctggagctcagtggagatggatggacttgcctggctcattaagagcagggccgtatcacatctgtctttcaaaaccttgcatctgacataattcgtgatgtgtaataggtgctcaataaagggttgtagattgaatgactaaatgaggcagcgatcaccatggcagtcatccacatcagggtgagtagtggaaatgaatgaggttaggaagaattattgcattaatttttagggctcaccaactcagtgcttacaggatccaaatgaaagaataaacactgcccattctaggatgataaatgacagccgaaatttggcctcagtataggggcagagagtggcagcctggagggcacatgcctcatctgatgggagctgttgccagctgcagccagtaggcataatgacatacctcctaattttttttagatttaagtaaaactctggatggtagtgtgaaatatctttacttttcatttcaaatttatgatattttgagtcacaaaaaaaacacatatgtggatcacatttgattgaaggccttctcattgtcctctctggtaaacccaaaagaagagggaggccgggtgtggtggctgacgc

SEQ ID NO: 124230 - DNA, 1041 bp, Homo sapiens
cagtagatcctattccaggaagttttattttactggaggaaagcccagttaaaatcccagtgttaatttcctgtcatgttaactaccaaagaacagatttccaaagtgtctcaaacatttgacacaatcatttccgttttctaaacttgatctgtgtttcttgggtgatacatgcattctgattcgaaattgaacaaagtatattcttaagtataactatatcctgtctaaggcagtggactcatggagtatgttttcatttttatgttaattgtcgagagtttataagtcattgtaaattagtctgagtgctttgtgtgagttagaaattgtctagtagagcaaaacccttttactaaactcctcctgtgtgcttccacttgctcagagccatgcaggcaacttcttacatgcagaggagggcgtaatctaagccatacgctggtcattgggtggacttccatgcctctatgcctttctcatgtgtgtttgcctctgcctgtaattttccatccattcccaacctcttttccttctcttccttcttatgaagtcctagttatgcttcagggatgatttaatatgtcagtccttctgtagagatccctaagaccttcttaccactgtacccatgaaactttatatataactatggatatggcacttatcaaataatatatttggtatttatttttctcttccacatgactgtgtatatcctaaagtccatgtcactaatttctgcatctaggcatgtatctgacataggggagcttttcagtaactgatggttgaattaggtggaattcctccaataagacatcaccccaatgcatgacttaggcaaataaggtattaaccctgtgtggtgttgaagaaccattaagcttaagagtattaaggagctaaatgccctcttatgttttgttatgtaatttaaacagaggaacaaaaaataaaattctttaagagaagaaggactagatatgtccgtaagccttgataaactaattataaaacttgtgggtgcagcacatcaac

SEQ ID NO: 124231 - DNA, 1051 bp, Homo sapiens
ataatacttataattaataattattattttgagacagagtccctctgtcacccaggctgaggtacagtggcgtgatctcagctcactgcaacctttccctcccaggttcaagcgattctcctgcctcagcctcctgagtagctgggactgcaggtgtgtgtcaccatccccggctaatttttgtgtttttagcagaggtgaggttttaccatgtgtccaggctagtctcgaagtccttacctcaaatgatccacctgcctcggcctcccaaagtgctgggattacaggcatgagccaccacttaagcttatttcacaaatgtttctattttggttattgggaacaaaaatttatatatatatatatatatatatgcatgcagcatattttaaaattctagtaaaaataccagttaccttagaagatgggataattgctatccttttttctttatttaattacaagttacttaggtatccacctttatattgattccaataataaaagatgcctcgagtttcgatgaaacaaaaatgaaggatcaatttttcattcttagtagactgttaggctttaaaaaggcaggtaagggccatttgcggtggcttgttcctgtaatctcggcactttaggatgctgattgcttgagtttaaagcaatctggagtttaaaaacagcctgggcaacatactgaaaccttatctctactgaaaattaaaaaaaaatagctgggtgtggtggcacgaacctgtatttctagctatttgctacttgggaggctgaggtaggaagatagcttgaggccagaagttggaggttgcagtgagctacgatggtgccactgtactccagcctgggtgacagagcaagaccctgtctccaaaaaaaaaaaaaaaaaaacaaaaaacaacaacaacggcggggcagggggtggcaggcaagatacattcttgtataaatattctagaagtttccagtgctgaccacagtatgaccaggcaaacttaggataaatgttgggggagaattggtaccagggatggggggagtt

SEQ ID NO: 124232 - DNA, 1029 bp, Homo sapiens
ttgcattttgttacatcttatgtaagtggtgatattagcattactacattgtaacacagtacacaacatctgaaaatggtcctgaggccttcaaagtttaaatgtcgtttaatacactttattgaagcaggtacagaactgctgtgtaattaatttcaagacacttattttctctcaaaagtgcttctaaaacaagtttccatgcttgaagcgttgagtgtcaagtatctgggagatttgcttttgtaggacggttcatttcccacttgtgccagaatgagtcattttgtgtgtaagtgtcaagcttggagaggttctaattaagtgcaaattacaatgaaattaataaatgacaccaatttttagattttaaaatgtgctttgagagaatgcaatgtgggcttagattgatggtaattctcatattttaagttgtgattcaatattatgtagcattaaaactcaattaagtaaaaaataaatgaagaatcaagtagagagaatactcatctctcagatgcctcagcttctccaatgatggcttaaaatctgttaaatgctaaggttgtaattgtccttattgttcactatattccaaaataattgcacatataattagcttatttagtgagagatactaaatcaccctgttcacaaatatactagatcgtcataaattgtacaaatgtaattgtaaatttaaggttttattttactttttgcagatgagctgcagactatatataaattcatgtatgtatccacttaccagaaattttattaaatcaaaatatatttgacccagcattttccgatccgtttacagtgggagaaggtaggctacgtaggttcttccctcctcaggtggcactagtcaagactgacagagccaccagcaactgatagcccaaagatatcctctcagcctaccgaaccagacacccctcaccttctacctggtgatgcagggaagcccagggaagtgcgttctgtcccacaggaggcaatagcagggatagagaaggatcc

SEQ ID NO: 124233 - DNA, 1028 bp, Homo sapiens
ctcaatagaatttataaagacaagattgatctccttgataagtcttaagcgaggaacgtgcctgaacggctaagtgcttgttgcagacattatgagcctgtctgccgcacatgaatccagctgtgtgtgtgcacatgcaggtgtgtgtatgtgtgcggcccttcattatttgaggcccctaaaaaatcacgtcgttgccaaaatgagttccagaaattcatccagtaaccagggcacatggggaccaacagaagactttgagcttaaatagtcctggaccccagatcgtgcaggcctttgacctctgttcgaagaaatcaaaactgtgccatgaagacagaaccagaaacctagagtcgtcctctggacctcgctccctcgctccctccctccctccctccctcccattgtctagcagagggatcatcactcttcctccacggtggttcttgaatacagtccttcctccattcctcttgccctagttctagtctcatcattttggcctaaatgacttggtatcttaatttttctgtctccagcgttttctccttcactcaaacgtccacatggcctcaatattcctacttttaaaacatcaatacgatgaagtcaccaaacttaaaaataatctttagttgtttctcattgccagaggatgaaagtccaaagtccaacccccttaggaagatatttaaaactttacacaatgtcattctaagtgattggttttttgtttgtttgtttgttttttgtttgtttgtttttttgtttttttttttttttgagacagggtctcgctgtgtcacgcaggctggagggcagttgcagaatcatagctcgctgcagcctcgacctcctgggctcaagcgatcctcccacctcagcctccgaaagcatggggattacaggcgtgagccactgcacccggccgcctttctttccttgtagctttttgatggctgtgcattatttcatgtcccactagactgaggctcagtgagggcctcttgcgtttgaaagccttg

SEQ ID NO: 124234 - DNA, 1030 bp, Homo sapiens
cctgttgtgtaatgagaagccaccctcacccccaattctcttctgctcttccacctcactccgtcttctgcagtttcatatcgtccaggttaaaaacatttaaattctgtttcctaggcacaattacatctggcattttagactatggattaattctaaagttgaaataaatatacactgtttatatttactatgtaaagattatctactgcacagctagacagtatagagagattatatttctttcttctacagatttttttcaccgggatttctaattgcctttccttttaaaaagaagtatttgcttgtgtgtgtgtgtgtgtgtgtgtgtgtgtgtgtgtgtgtatttttttgtaaacatggggtttcactatgtatatcttttaaaaatacatatatatctatatgtgtatctatatctgttgcttaaaaatatctgtatctatatatctttttaaaatatacacatatatatttatatatatttaaattacacaggtaaataacagaagaagtaaaaatcctgtttgaaagtatcatgaagtggtgtgagctaaaagctcatctgttgtagcagaaagtcaatagataatgtctaaaattggctaaaaacaagacatagcaatagatgcctataatttaaagacatggagctcaaaactaagataaaacactaacagatttaggggagattgccttagggagagggggtatggttttgtttcattttaagcctctctgtaatgttctttttaatttatgtgcacatatgaatttgattgaaatttaaaacaattttttaaaggaagaaaatataccaggatcatgtactacaatgagcactatccttgctattgaaatatctggattcaggtcacgtaatattctactgaaatgtttttgtgcagtctcaacagaaaatgcatagctttgccatcagaagacctatataaccttgaccttgttgtggtggtttccataagtcagattcaccttgcaggtgaccttgtgtgtgtatcaccattgc

SEQ ID NO: 124235 - DNA, 1022 bp, Homo sapiens
ccaggatgacttcatattccccaaagcatcttcctgtattgagcacaccagagggaccaggctcctaaggccttatggattgattaattgttaaatcatttaaagacccaattagcatttcatctctcctcctgaaatcagagtctaattctcatgggcctggagtacagagaaaacccaatttacagagctgacttggagaccctgaggcattgggagaggtttctttctataaaaccagttctgacagagccctcgtaaggagtgaagaatttaatactgtttcccccagagttatcaagccctgtcatcttcatcctcagagtgaagtcaaagaagatgggtttgaccaagtcatcatttgtgcattaaagggccaatgctttttatgtagaaaaaaagtacttatctgatcctcttctgccagagcaattccccctacagccacaatttcaccaattgctttctttcgagtctttttcaaaactgtttttctcacacacaccttgcttcatctctctcccgtactgttgggtttccgttactgttgttgttaatttctgatattcctgaggtgtcctgtgcctgacggtggttttccccctattctctttcaattacaaagtgactcagcactgggcttcgcttccattgttctctgggacctcttccatttatcagcctctgtgcttatcactgtctgtgagtcactctactgatcatttatctcctttcaaagctggcagagtaatgcttcgacgcaatctatccccattagataagattttctgaaatggattcagaatatattaaagcctcatttatctgttattgatgggttagtcaaggatctcacaaagcttcattttccaaataaccaaaacttatcatttaaagaaatagtggctggccgcagaggctcacgcctgtaatcgcagcactttgggaggccgaggcaggtagatcacgaggtcaagatttcaagaccagcctggccaagatggcgaaaccctgtctctact

SEQ ID NO: 124236 - DNA, 1095 bp, Homo sapiens
aaaattatttctgaagctcctctggccattagtctcagttaggcagccattgggagcaggtaggatgccaagcgggaggtacccccgctcctggctccgggcgcctctctcctctctcctctgggagctggaagcagaggatgcatcccctggccagcactgcctgagccctccacgcacctcccccaaaagctgttgttcataaattaggggacgtctttcccacctcacgcccaccactctgtctgtgctcacaggcatcacacgtcttgggcctgcaccatttctgctggcgtttctctgcagatcagcctctctagctatccgtttggtttttgtttgtatccacaaccatttgagcacactatattatcaatgttgatcctaataaattctatcaacactgctcttcctgaagatgctggaattgccgtgtttcagctctaggtcgacatgacaaacatgacgctgtgtttcagtaaattctgatgaaaaacagcttttaaacaaataaaattttctggcagacaagttgtaatattaaacaaagtctgctcttcccataggttcagagtagaccccgaggatcaaattatttagcgattgaccaggtgtgacccaccaaggtcagggatgtctcagttcccttgcacacatcaggaggaggtgctggaggaggaggcgctttgagagcagggtctcgtgcaccatgagaaacaaactcacccgtccaaacccaaagaatggactcagagacccggagaacagcgaaagtgagacttttaatgccggtcttgcaagatcgagtgtgtggtgggcaggcacactcagcacggccacaacaagcgatttatcccctagtgctcaggcccctctcccagttcctcataggctgagcactatggggtggggcgggggaggtcacagtcttcccggacatcgcctattggttgttgggcagggggccgtaggtgtttttttagggttgtcctgttgcattttgttgcagcccacaatgcactgcaatcctagtcagctcagggggtcttcaggtatttgacttacgacctaagtagctgggcaggctgataagaa

SEQ ID NO: 124237 - DNA, 1023 bp, Homo sapiens
agagcagcttagggttgggtgccctggaggagagcaccttggggtagggtgccctggaatagagcagcttggagtggggtcccctggaatagagcagcttggggtggggtgccctggaggagagcagcttggggtggggtcccctggaggagagcagcttggggtggggtcccctggaggagagcagcttggggtggggtcccctggaggagagcagcttggggtggggtgccctggaggagagcacagaggacagcagcttggggtgggatcccctggactagagcagcttggggtggagtcccctggaatagagcagcttggggtggggtgccctggaagagagcagcttggggtggggtcccctggaggagagcagcttagggttgggtgccctggaggagagcaccttggggtagggtgccctggaatagagcagctcggggtggggtcccctggaatagagcagcttggggtggggtgccctggaggagagcaacttggggttgggtgccctggaatagagcagctcggggtggggtcccctggaatagagcagcttggggtggggtgccctggaggacagcagcttggggttgggtgccctggaatagagcagcttggggtggggtgccctggaggacagcagcttggggtggggtacctacagcatgcacagctgcagatggcccaaggaggccagagctcccggtctgtgtgaggacagcaggtcttctggggcaggaaaccagcttccatggctggaaaacccagggggctgctggctcctgtggcaggaagcagagtgttgtctgtgttcataatcgagtctttgttttagtggctgtggttggcatggctgcagttgggccctcagatcttgcagattatgaccaggcagcaggctcgccaagccgtgggcactaactcaagctcccctggagcgcagtcactttacaaccaccttcctccccaaatgccagcatggacaaattagatccagaagccctgcacacagccatc

SEQ ID NO: 124238 - DNA, 1019 bp, Homo sapiens
agctgccctggcggagctgctcgggaggggtggggccaaagaaggggccggatggacgttgctggggtccctggagggagctggggggtcagaggtgcaggcagacagggaagacaaaggagggaaggaggagtggccgctgtggagctgctgtcctgcctggggaggccatgctgtcttttgcaagaattaaacgacttcctaagagagcgacggggagagccagactgcaggagggagggagaggcagagactgagaagccacagccctctggggagcagggagggactgggtccctgtggcatgctcgcctcgtgcccgcatcctaaggaaagatgaacccgtgttcacaccttgttctggtgaaggatggagcaggaaacaagcttcacagggaaatccacgtggggccccaccattcatcacagccatgagaccaccctttcagtgcacaggcagtgacctccagagacggggaagagacagatggccttccaggggtcagcacagggtgtgggcacagggcttccctgtgccgtgggtgactggctcagcagctgtctcccatgtcacctgcctgcagggtaccagattgcctaccgcctggccagcagcagcccccacaccttcaccaccgtggaggtcggcgccacagtgaggcagttcacagccaccgacctggccccggagtccgcatacatcttcaggctgtccgccaagacgaggcagggctggggggagccactggaggccaccgtcatcaccaccgagaagagaggtaagaccttgggggacccgggggtactgcagatgttgtgggcacagcttcctcaatcaggccctctggggtctgcggggtacctgggaggcttcggccttcccttcggagaaagagaagggatgtgagcatttacaaagcacccattgcacctgacatggagctggacacactatcaaacagcattgcattcacaccttcagcctcacacctgctctctcagacacgtgagcactgcgt

SEQ ID NO: 124239 - DNA, 1050 bp, Homo sapiens
cagaacttgaagtttcatcagctgaaagtttttcattttcttctatctcagagatctcagcccacttgcaagctttttatccttctgacggctccccccagctccaagtctttgttgacgttcagatcctgtcagcctagatgatattatctgcttccttcatccttgttctatctcaggcatagcctaaaaatcaagtctcttctgacggtcctggcattttctaaggttgtgattttatatattacactgctttcaggttgaatttttctttcactacttcaaagtccctctttaatcatttttcaggttttctccatcaggtttttgcgtgggaattttggagggttgctgccgtggttgtactaaggtgcagggtgatgcaagcccccaatttgggctccatttctcagttgacctccccctgacaccctgtgctccagccagactgaatgaccagaagattctgaacgttgcacacacgtttttcctttgcttatagtccccacacctctgtagctgcctggtgaactgctattcattctcagttcaagacatccttcccaggaggggtttctggctcccaggaggagcagaccataccccttcaccttggagtcgccactgccctgggctcatacatttctaacacttatctcagtgtttttcacttatttgcatatctgtctcttgaatcaactatgagctctttagacaatggaaacttcttttatcaaactttttcacctttgcaccccttgttgagcacatgatagacgtgtattcgtcagcaagtgctgcaattatgctgcgtaacaagtcatctccaaacccactggcagacaatgacaggcatgtttctggggttcacctctgctggttggctggagtgtgactgatcgagcctgggtttggttgagcctgtctccaggcctgggttccattcacctcttccctctgtgcctgttattcttctggggtcagctagatacctcaggcgtgttcttctcatggtggtggcctaagtgtgagagcacaagcccaactgga

SEQ ID NO: 124240 - DNA, 1393 bp, Homo sapiens
cgttaagttggaaaaatgtaccatatactgttattcaaacaatccacatgtctgaattgtggatggcattttaagagctttgtccacaccagccatgactgatgcatgttgcatttgcctgtattttctccaatgtcagtgtagcgcatccactagctttggttttttgtttgtttgtttgttttttgagacaggatctcgctctgccatcccggctggagtgtggtggcgcgatctcagctcactgcaaccttcgcctcccaggttcaagcgattcttctgcttcagcctcccaagtagctggggctacaggtgcccaccaccacacctggctattttttgtatttttagtagagatggggtttcaccatgttgcccaggctggtctcaaactcctgacctcaggtaatcctgccagcctcggcttcccaaagtgctgggattacaggcgtgagccactgtgcccggccaagacccagtgttttctttctcccagatgtgctcctagaccaggatctgtctttctgtttcactttttctgtaaagaatggtaatggcagccaggcacagtagctcatgcctgtaatcccagcactttgggaggccgaggtggaaggattggttaagcccaagagtgtgagaccccatctcaactaaaaatacaaaaaaatcaacccagcatggtggcccacgcccatagtcccagctagtcaggaggctgaggcaggagaatcccttgaacccgggaggcggaacttgcagtgagccgagatcgtgccactgcactccatcctgggcgacagaatgagactccgtcaaaaaaaaaaaaaaggtaaaatggtaattatgcggtgtcaaattttgataggaatgacctgccctgtgcctcggtgctgctcccgtgaggcccagccagcacagcaccaagggctctgcacagagggacggcctcccctcaccctggtcccgcatctgctgcagatttgaggtgggtgggactcattttctgatttgctggtgatgggtgaatatctctgcttccctgcagaattctatccggcacaacctctctttgaaccgttactttatcaaagtcccacgttcccaggaggagcctgggaaggggtccttttggcgaatagaccctgcctctgaagccaagctcgtggaacaggcattccggaaacggaggcagaggggtgtctcctgcttccgcacccccttcgggcctctgtcctcaaggtaaagttctctgagcgcccgtcctccagctgttaggaaagctgagctgccctggagtttagagatacgtggcgcagtcagccctccggatctgtgggctcaggctcagtgtacgggcatgcaactgatcacaggtcaaaaatattccaaa

SEQ ID NO: 124241 - DNA, 1014 bp, Homo sapiens
actccgtaggttgttgcgttcactgcagcacctcacatgataccgtcccctctcatggaacggagcctcccccatgcagcccccactcaaatggagttttaaaggctgggttcaggttacgggggcgtttctcaccgtctgaatgcggaggacagagacgagctccagggagcgtgggcgggtgacggcgctgagatgcgtgatgtctcggaaacgtcctcgcatccctcagcgcgggcgctgactgccgcggcccttgcctgtcttccaggagcgctccagcttcgcccacacaccccgggctgatgtcccctcgctccggcggcctgcagaccccagagtgcctgtctcgggagggctcccccattccacacgaccctgagtttgggtccaagttagcttctgtcccagagtaccggtattcccaaagcgcacccggtaaggagcgggcggccctcttgcggggcggggcggggcgggactcgtgggggtgcgggaggggtcaccgtccgctctccgccctccgtgcaggctcccccgtcagcgcccagccagtgatcatggccgtgcctccccgaccgtccagcctcgtggccaagcccgtggcctacatgcccgcctccatcgtaacctcacagcagcccgcgggccacgccatccacgtcgtgcagcaggcccccaccgtcaccatggtcagggtggtcaccacatctgccaactcggccaacggatacatcctcaccagccagggcgcggcggggggctcccatgatgcggcgggcgcagccgtgctggacctgggcagcgaggccagaggtaatgcagccgcggctggcagccttcgcaggaccctttgtggtggtcccggccggcaagtccccaaggcagcgccattggcctgggcctggggcttgaggaggatgattctctgcttctgcctctcgctgccttgtccctttaaatcagcatgagctgggcaggtggctcatgcttataatcccagtgctttgggag

SEQ ID NO: 124242 - DNA, 2132 bp, Homo sapiens
gctactcaggaggctgaggcaggagaatcgcttgaacccgggaggcggaggttgcagtgagccgagatggcacccctgcactccagcctgggcgacagagcaacaaaattctgtctcaaaaaataaataagtaagtaaaatattgttctaaaaccctagtaattttcttcccaaacctatttcacccatgggattttcctctagcaaacctattttttcccagtgccgacctcactttccccacttgtccgacctgctgcccaggcgtcgaggaaatcgattgtctcgttggccgagtgtggtgctgacttggttcctgtcccgcaggcctggaggagaaacccaccattgcgtttgccacaatccccgcggctggtggagtcatccagacggtggccagccagatggcccccggggtccccggacacacggtcaccatcctgcagcccgccacacccgtgaccctcgggcagcaccaccttccagtccgggccgtgacccagaacggaaagcatgcggttcccacgaacagtttagccggcaacgcttacggtgaggccctggccctgttctccatgccacatcccaagctctgtggctcccagtagtcagtgcggcatgagaatgttctcccagtatctcccgatcctccactcagttcaatttattgagcacctgctatactccaggcactggggtaatgcaaagaaaaagagggtggaaggggccacctatcatcccagcaccttgggaggccaaggcaggcagatcgcttgagctcaggagttcgagaccagcccgggcaacatagcaagaccccatctctacataagattcaaaaacttagccaggtgtggtgttgcacgctcatggtcccagctgcttgggagagtgaggctgtagtcagctgtgattgctccgctacctgccagcctgggtgactgagcgagaccctgtccctttaaaaaaaaagtggggggaaagaaaacagggtggaaggaaaacccagatctgcccactctctggagctcacactccatggggtgaggcaagaggtcaaaggaaggaggagagttggggtgctggggtgcaagggtgctgggcgggggtgcagggtaccagggcaccgggcgcattgtcagtggggtggctcagggcagtgcatctgtgtaaaggagtgaggcaagccgtcgatgtccagcaggatctagacagcaatgagaggggcctccacccaacaggctggagccagcagagacagggcagatgaggtggggaggggacggcagggcccgcagggagcagagcaagggtagccgtcctgcctggcaggggtgcactgacctccggttccggcttggtggcttagcccctgtataggggacttgaaaaaagcagctgggtcctaaccagaccccagagtaaccctcttcttcctccactccagccctcaccagccctttgcagctccttgcgacccaagcgagttcatccgcgccggtggtggtcacccgggtgtgcgaggtggggcccaaggagccagcagcagccgtcgcggccacggccaccaccaccccagccactgccaccaccgcctctgcctccgcctcttccactggagagcccgaggtcaaaaggtcccgggtggaggagcccagtggtgctgtaaccacaccggctggagtgatcgcagctgccggcccccaggggccaggcaccggggagtgaggtcacctgcaacgcgggggagtgggactcacccagcggcgaccccgaagctggacccggcagctcaggcggccgcacccacagacggaggagaacagcccgcggcggcctgtgggcatcggcggcacctggacacacccagccctttccatttgatcgcctgccttcccgtggtttaagacaaaaacacataaacaagttcagacaactgattgtatgattctgggaattctttgctttcctttccttctccctcggcaccacctcctctccccaggcctccctgtcgggcatggggaggaggttggagctcagcatcttgaggaatgtgtcaagacagcccctccgctccgcgctgcacggccagccgcctttgtccgggaggacagacagaaacgcagcaa

SEQ ID NO: 124243 - DNA, 1085 bp, Homo sapiens
tgagggaggtggctggacaggtgtctccctgaagaagaagggagaacacttttcaaagtgattccgaggcagtgcgggaggacacacgtgctgtgcagtggagtggggtcgcccgtggcccccatcagagtccccgtcccccaggacaagtgcagaacctctgtgggccccctccttccacctagatagagaaaaccccttgttcggtttccttcccgtgtcccgttgtttttctaagccccccgaattgagtcgtttctatggcactaacctttccatgggaaataagctctttgtggaagtccgtacctgttgccctgggtgaggtttcagagaaacgggggcaggatgaacacagccggctgtcctgggtgcagttacgtccgtggagggtgagagattgcgccccgttccacacttgtgtcgcctgctgttgtctgtgggccttttctttccgtggtgcctggtgtgtgcgtgcatggcgtgagagaacggggggtgggggttggaggtggctccccgacaccggtgcctgtgtggcctgagccggcgccctcccgggagcgcccgtcacggggggcctctgtgattacctgctgctgctctctcccgcgtggtgactatatgtcctcagggctgcctgtggccaccctgatgggagacctctgtttgcttctgggccactgcaggttggcctcctcaatacaagctgatgtctgcagggagcgccgcgtgctgggattgcaccacgtgttggtcacaaatcgaggtcgccttttggcctggtctgctcaggctggccctgacccacgtggtttcctggcttctgagacgcagcgcattcttcctgttagcggtagcgttctctgatttcactgcttcattgccaagggcgtggaaagggggtggtggatggagccgggaggtggcgagcacaggaccccggggctgcattctgccgtgtggggttctgcactgtctagcttctgcggggactgcaaagagggatgaagggacgtggtcctaggggtcggctcagactcggagcagggcagggagaggagggcaaggagaggaggcctggg

SEQ ID NO: 124244 - DNA, 1015 bp, Homo sapiens
ctcccggccctggtggacgctggcacagccctggagatgctgcacgcgctgctggacctgccctgcttgacggcggtgctggacctgcagctcaggtgggcccctcaccctctgccagcgctgcgtctcccagccagctggttccacacactgggccccctcctcgctgctcctgacccctacaccggggaccctccttcttccccccccaacacctgaccagtcctcccctgcaaagccacctctaggacagggtgtgtctgtcacccttggccacttgccaagggcagcccctgcaccctggagtgcctcacccgtcttcacgcccaggcctggagcctcccatgccaagcccttcctggcacccgaggtgctgtgatattagggacacctgccgtgtgtctccctgacgggggtgcccttgagtgcaggggccgcatcccagcctggccttgggcgtctgtccacgcaggtcagcaccggctgcatccgagaggccactctgggacacctctctcagggcccccagctgcctggaggccttccgggacccgcagttccagggtcttttccaatacctgctgcgccccaaggccagtggcgccactgagaggtacggggccctagggccagggggccaccagtggctcagagagcccggccacagccactggggtggggctcactgctcagccctaggctgaggccagggtgctttgtgtcccacacaaggctgcgtccccgtcatcaccattatagaggccctgcttctgcaccacgggtctgccgggggcggggcctggtctcagctctctctgctgcccacatcaaccctcataagcttggaggttggccctgtgggtgctccattttgcagatggacaaaccgagcctgagcccaggaagcaggaggcctgggaccggccacaggcctcctgccctcagcccacgccagcctttgtcccgatggctttactgtcccgggtgtgctgacgccaggggtctccccaaaccc

SEQ ID NO: 124245 - DNA, 1330 bp, Homo sapiens
acccaggtctgtgcagccgcggactctggccttggaccctgccttgtggagtgacttcccccatcacctgcagggctcaggagcactggccactcccagccagggccactgtggggcgtggggagacccaggtgggggcaggcccccggcacatgtgtctgggagtgggagagggtcccagctaggggctgcactgtggagtcagcggcagtcacagcccaccctgccctgctacgttcacctcccaccgtacccccgctccagagaggggttcaaggctggtcagttgccttgaaaaccgagggaaggtgtcctgcctgtcatcgagctgtgatgtcctcagtggcccagagccgggaagggcaggctctggggacaggcccatgtctgtgtccccccaggagggcagcccaggcatcaccctcccttcttccctccacaggcccctccctgagctgcttccactggcccagaggtgtccaggcctgcgcccgcctgcagcagctcctggagtggatgcggagcgccggcttcggggcggctggagagcacttcttccagaagctctcctgcaccctcaacctgctggccacacccagggcccagctcatccaggtaggggtgcgcatgggaggcggcgagtgtggggaggggcggggccacatgctgtgggtccctggctcacaaaccaagcctgggggccgggacggggcttcttggctggaaacctcaaagctaccgtaggtaatcagaaaagttgcttccattccatggctgtgtccacctgcggtagacaggataatggcccaaagatgtctgagacccgtgaccgtcttaccctgtgaccgtattaccccacatggcaaagaagcctctgtacgtgtgactacgattaaggaccttgagattcggagatgacctgggtatccgggtggcccagtccactcagacaagtccagaaggtcagagagaaacagaagaagaggggatgtggctctgaggctggaggaggggccaggagcacaggagtgcagtggcctctagaagctggagtgaccccagctgacagccagtctggaaacgggaccccagtcctacaaccacaggaactgaattctgacagcaaccggaagagcagggagacagatcctcccccgggggcttcatcttgctgtcagctctgtgagacccggctgagctgtggagccgcggagctgtgagagtgcactgtgtggccgtgaccgccaggcgtgtgggcatttgtcacaacggcaatgggaaaccgacatgcccctccctgcttccctcgctgctcaccacccccctccca

SEQ ID NO: 124246 - DNA, 1035 bp, Homo sapiens
gccccacagaggggcctgggtcctgtcaccgagataagacagcagccacttagatgcactggggaggggcgatgacagggccatgtggtttttgtcaggggctggggaacggtgaggggaggcttggtttgcctttgcaggaggggtaagtgttaaacccgcgcagagcccggggagggctggccttccttgctttctcccttcctcccgttacattttaggttggggcatctttgctgagggaggcgtccgtggttgcagggcgatgagcagtgtccctggctcctgtgcccccacccccaagttgtaacaaccaaagatgtctgcagacatggccagatgttccctggaggcagacctgccctctattgagagctgcagtattggacctggctgcctggactcggccacacgagcccctgcccactgggaccatatggctgagtacctgccccaggccctcaggcctgatccacagtggcgacatttgtttctcctgggccactctcggaggggctgggtgcctggcaaacccagggtctcagggatggtgacgtgcagagtcttggcattcatgcgttcctggagacagggacatcaccgtggctttggatgcgcactttgtaaagaggcaccctagagagtttgtaaagccgccgaggtttagccaggaaggttcaggctaaacaaagcctgggaacaccaccccagcactcactgggcttttgactgaaaaacagcccatccaatgtctggtatacagtaggtgcttattaaatacctgtggaagggttggtgccctgaggagaggaggcccctctgtgggtcttagctcctatgcgtctgcaagactcccgagtggggtccgttttctttgtgtgtgtgtgggagggtggtgtggggatggtgtggccgtccaggagtgtggatgtggcttgagcgacagaggaacctgcagccctggccacctggcggcgtggtgggctgccctcctgcccccagtgctgcgatggagctggcaggcgggtggcaggt

SEQ ID NO: 124247 - DNA, 1617 bp, Homo sapiens
ccaagaaaacgaagacaaacattcaaggcaagctgcttgtatcaatagcaaaaccctgactgaagagaaagagaatacatttagtcaaatttacatggaaacaagccttgttccttcaagcataatagctcataattgtgtctcatgtggaaagaatttagaatctatttcgcaattaattagtagtgatggaagctatgctaggacaaaacctgatgagtgtaatgaatgtgggaaaacatatcatggagagaaaatgtgtgaatttaatcaaaatggggatacctattctcacaatgaagaaaatattcttcagaaaattagtattttggagaaaccctttgaatataatgaatgcatggaagccttagacaatgaggctgtttttattgctcataagagagcttacataggggagaagccctatgagtggaatgattctggaccagacttcatacagatgtcaaattttaatgcatatcagagatcacaaatggaaatgaagccctttgaatgcagtgaatgtggaaaatccttctgtaaaaagtcaaaattcatcatccaccagagggctcacacaggagagaaaccttatgaatgtaatgtatgtgggaaatccttcagccaaaagggaaccctcactgtacatcggagatcacacttagaggagaagccctataaatgtaatgaatgtgggaaaaccttttgtcagaagttacacctcactcaacacctaagaactcattcaggagagaaaccctacgaatgtagcgaatgtgggaaaaccttctgccaaaagacacatctcaccctgcaccagaggaatcattcaggagagaggccctatccatgtaacgaatgtgggaaatccttctcccgcaagtctgctctcagtgaccatcagagaactcacacgggagagaagctttataaatgtaatgaatgtgggaaatcctactaccgaaagtctactctgattacacatcagagaacacacacgggagagaagccctatcagtgtagcgagtgtgggaaattcttttctcgggtgtcatacctcactatacattatagaagtcatttagaagagaaaccctatgaatgtaatgaatgtggcaaaaccttcaatttaaattcagccttcattagacatcggaaagtacacacagaagagaaatcccatgaatgtagtgaatgtggaaagttctctcagttgtatctcaccgaccatcatacagctcatttagaagagaaaccctatgaatgtaatgaatgtgggaaaaccttccttgtaaattcagccttcgatgggcaccagccacttccaaaaggggagaaatcctatgaatgtaatgtatgtggaaagttattcaatgagttgtcatactatactgaacattatagaagtcattcagaagagaaaccttatggatgtagcgaatgtgggaaaaccttttcccataattcatccctcttcagacatcaaagagtacacacaggcgagaaaccctatgaatgttacgaatgtggaaaattcttctctcagaaatcatatctcactatacatcatcgaattcattcaggagagaaaccctatgaatgtagtaaatgtggaaa

SEQ ID NO: 124248 - DNA, 1057 bp, Homo sapiens
tagttataatgatcatagcttactgcaactttgagttcctgggctcaagcggtcctcctgcctcagcctcccgagaaaccgggactacaggcgtaggccccacacctggctaattttttttttagtttttgtaggcacagggtcttgctatgtcgaccaggctggtgttgaactcctggcctcatgcgatcttcctgcctcagcctccagagcattgggattacaggtgtgagccgttgtgcccggcctgaagatggtttctaagatccttcacccttaaagttttaagtaattctgcctgctatgcaaaggatatgtttgaggagggcagggggtgacttaggaggatatcatccaacagcagtgaccagtgggaaggagactgtctcgccatcaggacttgtgtgacccacaggacgtgcatcatgcagccaagggagaacttaggtgacgcccagtttctggcttgggttctgggtgaatgtgataacatcgtggtgaaaaagccgagaaggagagaactctgcttggggatactgatgagttggaaaggccacagggatatggaggtggaggatgtgagggggagcggggatgggggtgggctgtccatagccctgaaagagagggcaccagggcctcccaggtctgggctggcagccacagttgaggttgcttttggtttacagtgtcgggctctatccgcctaagcacgcaatcaagtatggcttctccgcaaagatgatgaagaaggagagtctttacggactgacgattagggaagggggagaaaaggaaaataagcaaaaaatctgactcacatcttcatttttgagtggcagtcactgtctctttgatgttcaatgttcaagtttaaattcattgacggagactttcagttaaaaatgatggatcaaacataagcatttattttggttccatccccagaccctaataaaatgttaatcagtaaaatgtcaaaaatatacattttctaattttaaacatttcttaattttttatttttgtagagatggggtttcactttgttgcccca

SEQ ID NO: 124249 - DNA, 1057 bp, Homo sapiens
cttttgaagtgatcaccagtccagttaattaacatatctatcacctcaaatagttacctttttgtgacaagcacacttaagatctgctgtctcagcaaatttcaagcacacaataccttattatcaactacagttactatcctgtatgttagatctccagaaaaagttttttggtttcttttcttgagacagtatctcgctccgtctcccaggctggagtgcagtagcaggatcaatcttagctcactgcagcctcaacctcctgtcctgggctcaagcaatcctcccatctcaccctcctgagtagctccctgggactacaagggcaccaccatgcctagctaattgttttatttttaatgttatttttgtagagatggagtgtcagtattttgcccaggctaatcttgaactcctgggctcaagcagtcctcctgccttggcctcccaaagtgttgggattacaggcatgagccaccacatccagcctcagaaaagttttataggatttaagtaataatattgtctgtattttattgaccttgtggcatcttcctgtgccaagcacttgatacaaacagtgtgaaatgatttgctctgtgctgatttgtggagggcacgcggggaacttgctgggaactcgctgggaacgtgggagctggtttctacattgtcactgtctgcacgtatcagctcttatttctgaatttggcttttttgcaggtccctagctgttggtagtaagtccggttataaatttttctccctttcttctgtggataagctggaacagatctatgaatgcagtaagtgtttgctttatttttccccttcttaaaaaaaaaaaaaaaagttgtacttgaattggaatgcgatctaaaattcagacgctgtggttgaagtccagacaccctcttaccagtcctctgcttccaccttcatctccccaagaggtggcaactggtgacacctgtggccgtctgccctgatctgtgcatttgcctacataggagggcaggtaccgagggagctctgttcatgagggtcttcagtacat

SEQ ID NO: 124250 - DNA, 1038 bp, Homo sapiens
gattgttgatggaaagcagctgtatccttggcgcttctaacattggtctgcatggtgttctagaaggaactaagattgtgaagccaacgcaggggtggatcacctgaggtcaggagtccaagaccagcctggccaacatggtgaaaccccatctctactaaaaatacaaaaattagccaggcctggtggcagtcacctgtaattccagctacttgggaggctgaggcaggaaaatcacttgaacccggaaggcagaggttgcagtgagccgagatcacaccactgcactccagcccgggtgacacagcgagacactgactccaaaaaaataaaatacaataacaatagaaggaatgagagcgtcatagtccaggagtcagtcaactggagattggggcaggtattgcactggccgttgcttcacgtttggtttcgttttgtctctcgcctagaggctgatagtatgcctggaggagtccctgtacatccacaacattcgggacatgaaggtgctgcatacgatcagggagacgcctccaaaccctgcaggtgagctaacttgtgaggagagaatcccatttttctgattttgcccttgaaagatagctataggtgagagagattttttctttttataggttccgcagatgagacagattttaaaagtattgatcccaaaccaagctgccttcctactgatgctggtcatgtgaccacataagctcattggtttgatcaactttcaagtttgaggttactgatcagttcaaaccaaaggcctttaatctcttgacaatactggtatcacctaaggtggggatttggggttgcagaactttcctaacacagcaaacaagattgtatccaagctattatttgttcctaatgctctgttaaatgaatgctgaattatgtctgacatccaagaaggaactctcaggtggaagtttgcatctcgtcctccgtgtgtcatttgcaggcctgtgtgcgctgtcaatcaacaacgacaactgctacttggcgtacccagggagcgcg

SEQ ID NO: 124251 - DNA, 1080 bp, Homo sapiens
ttgagacagggtctggctctgtcgcccatgctggagtgcagtggtgcagtcctagctcactgcagcctcaacctcctgggctcaattgatcctcctgcctcagcctcccgaggagttacagtcatgcaacaccacacccagctaattttttatttttgtagagatggagtcttgctgggttgcccaggctggcctcaaactcctggccttaagccatcctcccgcctcggccccctaaagtgctgggactacaggcgggtgccccgcgcccagccccactgctctcttctcagtagcagagtaggtctggctcattctgcttctggatctgctgcggcgttcagagcagtgctgagctcctcgccacgggaatgtttgaaggaacatagaaaaccttagggataaattgctttgctttttctaaagttggagcagcatttccttggatgcccagccccagtaaatcaagtgggtttggcatttgtttggaccgtaatggtgttttaggaacagctaattggcacttgcggaccaagtgtcagccctggggcgtgggcggtcactgtgcggtggccactctttattggtgtccctttttcagagagctgcaaacatgattccggctcacgacagtcctttagcggcactggcctttgacgcaagtggaactaaacttgccacggcttcggagaaggtgagtctgcttttccccgggggagcactggtgccaaggcgtccacagactttttcagttctgttcacacagccaccttagaggcaaggtcctatacttaccagctccgggagaagcaaagacagccacccacttgtcaggccacaggcgtgtactgcccgagagtgagcggagcttgcagtgtgccactgggacgggagagctggtccacatttgtagtagaaaatacagaaatgtccagaggagacagaagtgccgtgtgtaaccacaccgctcacccagtgtgtttctaaatgatgaaactaccacataacagtaaagaacccagacagtgatgaaatgtgaaaaagcaaagacagaattctatccagccagtctgaacacat

SEQ ID NO: 124252 - DNA, 1023 bp, Homo sapiens
tgcagtggtgcagtctcggctcactgcaacctccacctcctgggttcaagcgattcttctgcctcagcctcccgagtagttgggattacaggcatgcgccaccacacccagctaattttgtatttttagtagagacacagtttctccatgttggtcaggctggtctcaaactcctgacctctgatgatctgcccgcctcggcctcccaaagttctgggattacaggcgtgagccaccacgcccggcccaggcttttatttttaatagtttaaacttcagatgactcagaacaatagaatgatatgccacttttgccctgaagactgttagtgttgagagtaagtagtcatttaaaataggtttaaagagaagattgaacattaagtcaacaatagaacaggggagtgtttttctatgctcgtggcaaaaagtgtggagatgatgttcaaggggggccctgggggaccccagactccttggtggcccagggcagagctgtcctggagatagccgtgtggcgcatttgcagtctgctgtgaaagatgggaaattcctgttttaactcagctcaaattcttcttttctcttttccttccacaggggaccgtgattagggtattttccattccagaaggacaaaaactctttgagtttcggagaggagtaaagaggtaaagtacgtgaatgtccagaatggattctggaggttgtatttggatttcagttttatgttatctatgaacaaacaagtagaacccccaggagaattccacacgagcatttctagcccggctgggtcaccgggtaagatctgggcgtcggtcttgtcatgggaattgaagagcactttcagaaaagcaaattgggtttttgtttgcgatcccaccagctagcgtgagagttgtgaagagctcacgcaaccaggtgggccctccagtgcccggcagctcccagcctgctgtaagggacggggcggcgacgtcatgggtagcacaccctcccctttaaaggccacgctctgag

SEQ ID NO: 124253 - DNA, 1261 bp, Homo sapiens
tccagttcatgagcccaccctgagagtctcctagtgtcattttttttcctggtgttatttttgagctcttaaccagcttgagagagtttgtggcccgtccatgagggagcctctgtttactgtgcaggcatcattttgacatttatgaatgtcagagaacaaatgacttcatctcgagctgcctaaggctgcaaagagttcattagaaagcaatcagaattcagaacgtcttagtacaggcttcagtttataaatatacaccagtgtttccaaaacacagtcctcagtgtgtgtcatggggtctgtggtgtgtccccagcctttgaagggtgacttcgtcgtctctttgcagcctacacagacgacctgggtgctgtgggtggcgcctgcctggaggacgaggccagcgccctgcgcctggatgaggacagcgagcacccgcccatgattcttcggactgactgaacttgacctgtgacctctgacccggggagcagagaacactggcttcacagaggactttgtgcattgctgctatgaactttgacctgagtcgggggagaggatggcagagactttattaaaaaaaaaaaaagattgtagtggtagtctaactccataacgctgaggaaatacatcattttcacttcagtggcttttaaatcctgcttatgaattttagctttttgtttgtttgttttctctttttgccaaaattaactgtttggtgaagcccgcaaaacctcctcgctttgcatgcatgaacgtgccaagccagcataggggagctagaagccactttccagccacctgccgttgggttttttcatatctgtacataatgccgagtgcgtaaggaaaccgtggcgtcgcgcacagtgggtctgcttgtcaaggccagttctgcagtgacaggcccaggggctgcccaccaggtgtgctgggcagacttcagctgggacagaagtccgatctccctagggccccacctggaccattttccctccgttttattttgttaattaaattctttccaaattggatcgctctgggatttcttccatggtggacttttgtttctgatcttgttttccctgtggatattggaggacagcgaggttctttctgatactaaaaacctttctttcaggcagcaaatgaacttgaaaggttgcctggactcgctggagcaaaggaaagcgattttgtttgtataattaaatgatctgttcttctacttcactcttcctgttgaaaaact

SEQ ID NO: 124254 - DNA, 1389 bp, Homo sapiens
gaggtggaggttgcagtgagctgagtcatgccactgcactctcacctgggcaacagagtgagactgtctcaaaaaagaaaaagaaaaagaaacggacatgtgacaccatggccagcaagcaggaaatccaaatgcgttattttacaagcgtacttaagagagaggcgggaccgttcggcttcagctctgtggtgttggagatgtaaaaagaacgtgcagggaaaccgtgggacttctgtttgggtcgcctccctgctttacatagaattctcttttttatgacttatttcttactgaaaatatatcatgataatcattggccaagcagatagggtttttctgacgtatcttttagttctgacccaggtcataacccttcacctatgtcataccttttcaatctgtgggtttttctgaagcacaaaaacaaaacaaaaccaatctcagggttttgagatgtgaccagttcttacccttccctaataaccagctaggaaagtctctaatttagaaaaatgaggccgggcgcggtggctcatgcctattgtaatcccagcactttgggaggccaaggcgggtggatcacaaggtcaggcgtttgagaccagcttgaccaacatggtgaaaccccgtctctactaaaaatacatgggcatggtggcatgtgcctgtaatcccagcaactcaggaggctgaggcaggagaatcgcttgaacccgggaggcagagtttgcagtgaacagagatcatgccactgcactccagcctgggtgacagagcacagctctgtctcaaaaaaaaaaaaaagaaaaaagaaaaatgaaatctttctaaagttcagaatgtgaagagactgtcttgattcctcacctctacatcgtttctttctatagttagttataatgtaaatagattcctcttaacacttcattttaggtgaagctgtttttggtgctgccagtgtgcgtgcatgtgtgtgtgtgtgtgtgtctgtgagtgtgtgtgtgtgtgcctgcctgagcttcaggtgaacatactgattacattcccccaccaaatctgactgaaagcccattgctatcagcattttataacacgctaaagaattggacgtggtggctcacacctataatcccagcttcttgggaggccaaggcaggaggatcgcttgagaccagcaatttgaggcaaggccagtctggaccacatagcaagaccccctctcttaaaattaaaacctgtgttctatttttttgttgcctactcacaggctgaacatctcatttgtttttgtttgtttggtttgtttttgagacagtctcactctgtcacccaggctggagtgcagtggtgcgatctcagctcactgcaacctctgcctcccaagtt

SEQ ID NO: 124255 - DNA, 1074 bp, Homo sapiens
ggtgggcttcttccagcctttaccacggctctccttcatactggggaaactgaggcactacattcagcactcagtgctgtgctgtcctctctgttagcctcaaactccctacgacgagcacagatcctttctgcattcagataaatgaatacacgttattagaaaaaaatcataggctggatgtggtggctcaggcctgtaatcctagcactttgggaggccgaggcgggcagatcacaaggtcaagaggtcgagaccatcctggccaacatggtgaaacgccatctctactaaaaatacaaaaattagccgggtgtggcggcgggcacctgtagtcccagctactcgggaggctgaggcagaagaatcgctggaacccaggagacggaggttgcagcgagccaagattgctccactgcactccagcctgggcgacagagcaagactccatctcaaaaaaaaaaaagaaaaaagaaaaaaatcattttaggggaaaaagctagcctgcctcaggcacacacagggctgcccacacagtgcaagcgtctccatcacagatgacttagctccttcctttcctcccgaaggtcagggctggcagatccaaattgaagcaagaagcactgaggcaagaccacaggaagaacttcccgccataagggtggttggccccaggaccaagggccatcgtggctcaaagtgccacacagacctgggttgagatctgggttctcccactttctgcctgtgagaccaaggggtttctcactttcctcagctgaaaaatgagtgataaaggcagcttcctcccagaggacactgcagcgcggtgcaggcacgcgtgaggctcactcatgtcacctgttacttccaactgctccccaagtcctggcatcgtaccgccaaagtattcctccactccatctatttctcaccgtgcccactgccaccatgcaggccaccttggttgctccccgggacagcagtctctgagccattctcctcccctctgaccccttctccctagatagcagtgaggatgagcaccttgagacacaccaggtgagggctggg

SEQ ID NO: 124256 - DNA, 1155 bp, Homo sapiens
acacccgccagagtgtgcgcgcccagtgactgcaccccggccctcatcacccaccggcactgatcggggcaccgcctggcccagcctccaccagggacccctcctcatgaactctggagccctgagaggagaggggcagccccccaccttgtcaccctcagggcttccccttctgtcctcattcttagagactgcttctcccaaacataacgcgttagccatgaaggagtcggagccctgggtccgaatggacccgcctgcggtctgcatcagcctctgggaaaccacagcagtgatgccagctgggcacgtcaggacctccccacacacccacacgatgccacaggtcagggggctgtgcctgactagggagccctcccattgccttcctggcccgggatagaagaggggaggtaagtctgggggctacgaagccgggcccccacaccctggctgaagtcagcttgacctaggtcttgaccctcatccagcaagggactcgacagacccaagggtccctggaacgtagggaggggctgggggtcagtccagcccgggcctcccagaacaccaggcccgtgtgggtggcaccctgaggtcaggggatcctaagggtgtccttccagagacggtgtttccagggggaggaccgcccccgcttccagatccccggccccggctgtgactgccctgtttcacccctgctgtgtcccatcccccgtctgtccactaactgtaccgcaccggccattaaaagatgaaggcagaccgctgcaccgccgcctgcaagcagagtttgtgcgtggacgggggctgggactgccatctcgggataccggtggaactcgggctgccccgcataagccggtcctcagtcttcccatctgtgaggtgggccgggtggatcagggagcaggagggtgtcctcacactgggtaggcttggtttgtgggcagcgctgggtagtggggtgagagctgggagcacttagggtttgtcgctcaccttgaccgcccgccccccccaccccttcgtgaggatcagggaggatggccacatgcagcccatttgaaggggaaacaaagtgggcggggcttggcccctgcccctcagggactgcactgcatcctaggagtcagagcctcctggcttcga

SEQ ID NO: 124257 - DNA, 2399 bp, Homo sapiens
aggcggtgtagggcagacctgagggcgaggcgttctgggtgctggagcatcagcagccctgcccagtgggtcagccctgtcctggggcctggggtcgggtgcagcagcccccgggctcacccaagcccctcctctctcccccacacagcactgggaccagaagtccagccgcagcctcccggcggccctgcgggtctccagccagaggaaggacttcatggaggtaggtggtggtggtggtggtggtgggcgggttggggatggctgcttccttccgggcagctcagacagggcccggctcagcatctgctgctctgtcccccatggtctccctcagcctctgacctcctgtccctgccactctcagtgcctggctcctgttctctgtctctctggtctgtgcgtctgtctctgggtcttctctgctctcccagtgtctgtctctgagtctctggccattcttgccctctgactctctctgggtctctcccaacctctatctttcagtctctgtgtctctctgggtctctctcgatctcggtctctgtctctctgcgtctttggatctcttggtctgtctatccttgtctctcatttgctctccatctctcggtctctgtctctcttttgttggtctgtctcttactcagcctctgtctctgacttggtctctgtctcagtccctggggctccctctgcttctgtctctgtccctgtggctccctggggctccctcggcctctgtgccccccacctgccatcctgatatccccgcgtgcccgcagcgcgcgctataccagtcctcgcatgtggacgaaaatgacgtgcagacggtgtcgcacaagtgcctggtggtgggcctggagcagtatgagcagatgctgaagaccaagaagtaccaggacagcgagggcctgtactacctcgcgggcacctacgagcccaccacgggcatgatcttctccacggacggcgtgcccgtgctctgctgagcccgccgggccctgcgggccacctgtgccccgagggcggccagggacccatctccatcactgccatggcgcggagaccacgtgcgttgtgtgcatgcgagcgctcctgcaggcgtgtgcatggggccaggtgtgcacgtggatgcccgggtgagtgtgtgtgcatgcacgtgtgtgcacgcatgtgcacatgcctccagccccaccttccaacccctcagtgcccccaggacaggggcccctcttagctatcagggtatggccggaccggcccttcctgcccagcacgttgcaagcacttggccaggccggccctccaggctgctgctgcgtgggggcccgggtgcccccaggtccatgcagactggggattcggtggggaggggcgcttctaaggaaccaaactgacgctcactctgggcttcccaagcacccttagcatggagcccaccccaaggcctcccaccgtgcatgggacagggcagcccgatgccagctggcctacctgactgtgccaggggccctgcccccaccctctcaggatggcctagacttggggaacagagccgggtggggttgcagcccggagtgtctgtcaaaggcaccaggtggagagggcccggcacaggcccaccctggtccaaaccctcacactacagaaaaccccaatggtgctgaaactgtcgcccggccacgcctggcccctccccacccaggagggaggtggcacttcttaacctgtacagttttattgtaccaagagactcgccccgcccctgtatcataagcctttaaatggagtcaactttttaattatatatataaagataaatatatataaatatatatataaactttttaaaactgtgaaaaatagctatgaaattataaaaaaaaacattctgacgtgcagaatattattttttatttcctgttagattatagtgtctagcaccggcttcaccggcctcccagtccccagcacaccccccgcccaccccaccaagtgtactgtactcaccccccaggatagagaagtgtttgttagggagagaagagggagaggcaggagccggcccaagcccagggtccctgcttgggccccagaaagcacttaaccaggccccaagccttcaagggaaaccaaggcctcaaccagacaatcttgagggaaggaaaagccagactttgggtttgttttttgggggaattattggtttttttttttatgtttcttttggaattttgtttgttggcaaattctgtgtgatcttttttcataaaaaaaaagaaaagatttaattggaaaaataaaattgtctggagtggtttatttcaggggctggagtaggggtggtgtctgggggcattctgccatatcagggcaccaagaagcaggattcgact

SEQ ID NO: 124258 - DNA, 1031 bp, Homo sapiens
cgagctgtcgctgacacctatgatcctccttccagagagagtaaggagctggctgacctggcccgcctgcaccctaccagctgtgctcctaacggcctgaaccccaacctcatggtgacggggggcccggcgctggcgggctcaggtcgctggtctgccgaccccgcagcccatctggccacgcacccctggttgccccgctcgggcaacgcatccatgtggctcgctggacacccctacggtgagtgtggggcacagggtctctccccttctctgagggaggggtgggagggggcgggtgcaggacaagagctcagggctggctcctgcctgccgtttcctggggggcctgggcctgcctcccgcattcgtcggaagaaggaatgataatggcctctgcctcgtggggcccctctgccatgcctgtttggggcagatgcccaatgcgggtggctctggggtgctctttgcagccagccagcacccctgtcccttggcttccccactggaggccccaggaggttcaggacttgggaggtggtgctgggctggggctgcccgaggacaaaccgcttgggggctcccagcactgactcaggcctgggcttctcctcctaggcttgggtcccccatctctgcaccagggcatggcccctgcgttcccacctggcctggggggctccctcccgtcagcctaccagtttgtcagggacccccaatcgggccagctggtggtcattcccagtgatcaccttcctcactttggtaagtggaccttctatgtggccaccatgggccagactggccatgcccagcgagatggtctctgatgccaagggcttcctgctgaggggtggcggccggcagatctggggctggggaggcggaccggggttcagagagaacatctgttgccagtgttgtaaagccttggggtccttgttgcaatgagctcctgcccaaaaactccataaagagaagcgagacaggcagccctgggtgggggctgggattccccttacctggcgcca

SEQ ID NO: 124259 - DNA, 1058 bp, Homo sapiens
aggacccgcgcgcccggggcgaggaggcctcggggccacggggcgtggtggacctgacccaggaggcgcgcgccgagggccgccaggaccgggggcccccgcgcctggctgagcgcctgtcgcccttcctggctgagtccaagaccaagaatgcggcgctgcagccgtcggtactgaccatgtgcaacggcggcgccggggacgtggggctgcccgcgctggtggccgaagcggggcgcgggggtgccaaggaggctgcccggcaggacgagggcgcgcggctgctgcggcgcacggagaccctgctccctgggccgcgcccctgcccctcaccgctgcccccgccgcccgcgccccccaaggggcctcctgcaccccccgcggccacccccgccggcgtctacaccgtcttccgcgagcagggccgtgagcaccgcgtggtggcgcccaccttcgtgccttccgtggaggccttcgacgagcgcccggggcccatccagatcgcatcccaggcgcgcgatgcccgggcccgcgagcgcgaggctggcaggccaggggtcctgcaggcgccccccggctccccgcggcctctggaccggcccgagggcctgcgcgagaagaactcggtcatccgctcgctcaagcggccgccccccgcggatgcccccacggtgcgggccacacgcgcctccccggacccccgcgcctacgtgcctgccaaggagctgctcaagcccgaggcggacccgaggccctgcgagcgtgcgccccgcggcccagccggtcctgcagcccaacaggccgccaagctcttcggcctggagcccgggcgccccccgcccaccggccctgagcataaatggaaacccttcgagctgggcaacttcgccgccacgcagatggccgtgctggccgcgcagcaccaccacagccgcgccgaagaggaggccgccgtggtcgctgcctcctcctccaagaaggcctacctggaccctggggctgtgctgccccgctcggcggccacctgcggccggccggtcgctgacatgcactctgcg

SEQ ID NO: 124260 - DNA, 1048 bp, Homo sapiens
gtgaggctgaggtggagggaaggccaagccaccagcctcggaagcccagcgggaggtagcctcggagccctgcctctgcgcaccttctgcgctcgctgggagctgcctgacttctgcacgccgaggctgaggtcggggaggaaacagcaggaggacagctgccgcccccttgaaccccgtgctcacccgggagggaaaggtgggggccggtgctggttctggctgtccccctcccccacttcgagtagccgcaaggagacctcggaccccaggccaacgcccagagccaagcccgtgctaatcccattagccacgaggtgggagcagctcccattcactctctgcttggggctgggccggattacacattcctcaagccagcacatcctccccctcccgcgttttctttgtggggtgcaggtgctacattttcccttctgacgcacctccctctcttccttggctgtcggcaccttaggtcttgccagcgttatcagtcccatctttatttgtttatttttgtaccgggaagtcctgagcggttgagccacttgcttggggtcacccagctagggagaggcacattaaggttgggctctgcggacgtggatgagcgctgtcagggcttataaagcccctcctaggccgagggaggttccctggagagagctcagagctggaggggccctcggagaaagatccccggggaggaatcccatccaagctagtattgacagccatctgctgtggaaggtcctctggaagagctggtttctgccttttgggtcaagatggaggggtttggcctctttctctgcagaagaggaggtgaatttaagaatgaatggggtttgggatcagggaagggtggtttttaagtttcctattaccttgagccttgctacattgtgaacaaaatattcacagcctgatctgggagatgggcatgtaactgacaaacacctggggcttggctctgtgctctgggcttgggaggcctggactcagttgtcctcacaggctgcaattaaagagctattagtaggat

SEQ ID NO: 124261 - DNA, 1023 bp, Homo sapiens
cagggagatccactcggccgggtcctcctgtgcactcgcggccggggctcggcgactctccttcggtcggccacgggggtgcgggcagactcggctcccagggctgggaaactcctggtcccggagccaaggcggtggagagtgtcgcgcggctcggctaccttttccgtagcgtgcttggccctcgtgagccgaaagccggtgtggtagcccgagccaccgggggcgattccaatccccggggccccggcggcacgagcctgggctggagttttcaaaatctgggcgagaaaagaacaaaccggcccccgcaccccgcgagacacccgctccccgagctcgaatctttttcttggcaaacgctacttttggcgctcgtgggccctcctgggttctgttcccagctccaccactcgcgccgagccgggtccctggcagttaccgagcgccgggggatgcgggagtacgccgggggatgcgggagtacggtgaccccagccttgggaccctggcctcggggcgggcgggatgcccctttcttccccgggagaacggcggccctgggaacctgcaccccggtaggagggcggcgaccccggccctcggggaccccttgttttccagcgcgaaagagggtgcggaggtgcggcagggacaccgaaaccggaccatcgcggtcccgaacctagggggaaagaagagagcgggtcgggcagggcccaggcggcggaggggaaaaccctgggtctcacatcgagctgctggaggaggtggccgagaaggtcccgcggcctccaccatttcccgagacgggctgcccaggcgcggtggggacggtacccgggcgggcgctgcgccggggcgggagactctccctccagtcagtccgcggccgctgcagccagaggggtgggaaggagactcggggacctccagacctgcccggcggccgccccaggacacctggtccctccttcccgggctgtccctggcttttgtgcttggcgtcccaagtctcgactt

SEQ ID NO: 124262 - DNA, 1026 bp, Homo sapiens
gctgcggactcagcgttttcgcattgcccgttctgttttttttaaatcaatttttaaggcaactttttgggaggggggaaaaatgagcgagttagtgcccattcgttctattttcttttctccacttttagaaaaaagtggggggaggcttcgagaacgaacgggggggtgtctaatttaattccaggataaatttgaggaaaaaagttcagcctcttgagggcagtttcaagttgcccttcctggagcttcctgcgttagtttctaggctgccctcttttggaagctgtagctccgctggggaggagggaggagtgagaaggaaagaaaggaacaaaaatagccggagccgaggggaacaagccacggtgtccgcgtttggagctgggcgtgcgggtctcagtggcggcctcggcattcggggcggcgggaggcgcccggtgcatccccgggacggccaggagcaaagacggagaggagaggggggttagagaaaggaggtattgtgtctgtgtgccttaggggaggaggggactgcaggaatcgaataaacgcagtcgagctgcgcggggctgctggaagcccaggcgggggaagggggccgtgtgtgggggcgcagagcgcccttgagccttacgcagaggtcttgtgtgttcctagttaagccctcccacgcccgaggccccatcgcttcctctccaccctctttacccaccaatattccaagcccagatcctaattccccaccgcattaccccgccctggatttggggaatgtttttctttattttaatatagctcaaggaaaaaatacgtatatcttgagagatttggggtggggaaaacaaaagccttgcggagtagaaaaaacaaaggcttatttttataaatgtttaatgttttcaccccctggatgctccgagacgccgtaattgtgacggcggggtacgtgtgccataaatcatttagttgctaataaaaattctgcctgtttgccctggatttgccaatggcgtttgcattttt

SEQ ID NO: 124263 - DNA, 1050 bp, Homo sapiens
cgtcttaagcgccggtttccgcaggtcccgtgtctggcgggcgcggctaaaacccggagaggctgtgcccgggaaagccacgttcgccgtcccctcgctgcgacaggcccagccgcgatacagcgccaagtctaggtcgggccaacccagccaggagctgcccggacctgcctgaaagaccagggacgcggcgccagcgccccacaccccaccgagaccagggcgcaaggcgggcagaattcggactgatgcgccaggcccagccccgatggattccagctcctctcggccccgcctccggccctggcctcttcctccagccggggtcgggtcctccactccactgtttggctgggaaaggaccgagacgcgctcagtgcacagggggccggctgcggccataaatctccgggcgggccctccttcccgctgctcacgccggggtgctccgggccggtctcgtgtcccgggccacgccgcgcaccctgctcaccccatcacggcctggggacccggagactgcgcagggaaccacgccaggagcttctccgttcaccaaagagagggaacggcctcgttcctcggtgtcaacaccatccatctctgagggcgctggaccctgaggtggcccgagcttcacaggatcaccgccttggggtaggggcgcccgggcctggcatttcctcctaggaaggctcggtgagactgggatgggcatgcggctctccgctcgagcccaactccggtgccacctgcaccacggaggggtgaccccagggtcagggtcagagcggcttctcagaattcagcttgccacctctccgcggaccctgccttcatctcgtgcctcctcagagccctctgcgggcgcatgaagggcctttttttttttttttttttttttttttggcacaggtggaccaacggggggtgtgactgtgggcaccgtgcgcggaggcggaggctcatctggttcccaccctccgtgccgctggatgccccaggattttctccaaccggggtcccggcttggagccctccttggtgcga

SEQ ID NO: 124264 - DNA, 1483 bp, Homo sapiens
tctgcagcagagggggcgggctctatccttgccatctgctgcccccagaggccctgccaggacatgggcctgagcggtttcttctccaagaggccctcctgggacctgtctgtgcacagggcgggaagacacttgctgcttcgacccaggacggcagccaggacgggctgagctcctcttgcgctgcaaacacacaagggttgcctgccagctcagcagcgccctccctcaaccacaccctgggtccggacccagagccacaggccgttggacccaggggaccggggctgggctcaggcgtgggcctggagggcttgtggaggggccagacctagagccgtagggctccaacagctgagggctgggcccctgccggccaatgaagctccagaccagtgctccggccttggcggtgccagcagtgctcctgcagggatggagggtgctggaggcctggatgcggggaccttgatcccccagcaggcagcgctgtggcagcctcccacctcctcttcccctgttatctgctccttttaggatctgaaaattacagagccttttttttttttttgagagggagtcttgctttgtcccccaggctggagtgcagtggcacgatctcagctcactcactacaacctccacctcacaggttcaagcgattctcccacatcagcctcctgagtagctgggattacaggcacctgccatcatgaccggctaatttttgtatttttgcagagatggggttgcaccatgttggtcaggctggccttgaactcctgacctcaagtgattctcctgcctcggcctcccaaagtgctaggataacaggtgtgagccaccgtgcctggcgcattacagagctcttgtaagaaaacgtgtgaaattcatggacaaagtgaggtgatgaagtgtggggccactaaaccaaaggcagaggagacgtcggccacttcctgtggacgtgggcagagcgctgctgccagttcctggtagccttgaccacgacgctggggggtctttgtgatggtcatgggtctcatttgcacttgggggtgtgggattcaagttagaagtttctagatctggccgggcgcagtggctcacgcctgtaatcccagcactttaggaggctgaggcaggcggatcatgaggtcaggagatcgagaccgtcctggctaacacagtgaaaccccgtctctactaaaaatacaaaaaagtagtcgggtgtggtggcgggcgcctgtggtcccagccactcaggaggctgaggcaggagaatggcatgaacctgggaggcggagcttgcagtgagctgagatcgcaccactgcattccagcctgggcgacagagtgagactccgtctcaaaaaaaaaaaaaacaaaagaagtttctagatctactgggcatgatgaacacaaaccccacagacactgaggaacccagtggtggcagtgactcgggctcctctgctctcta

SEQ ID NO: 124265 - DNA, 1055 bp, Homo sapiens
tccgctgaccgcctgtctctggttcagcttccaggccgagcggcccgcgttaaacgtcgtcatcttccctctgctccacgagggcctgaccgacgtcatccgggacgtccccctggtgcacctggatgagatcaccttatttaagagcagagtggccgaggaaccgccgaacctgtggtggtgagaggcggagccgccgcccatcggtctcagtcacctcgagaagctgcaggagcctgggacgccagggacccttggtttgtcacaagaggaagggggcctctctcccggccagccacgccccacctggctcctggggctcccggcgtctccacggctctctcatggggactgttgctctgtgaagtttaggtcgaggggatgcgttctgggtgacatgagggggctcgggggacggtcgatgtggggggctggctgaaccaggctgacccttggggcctggctggggggtttgtatactgagccgcaatccctgggggccctgtccacgggcctggagggcccgaaccccctgccacttccgaccgggaagcgtgtcccttggctgttgtgtttgtggtcacctgccaccggggccccgtggatgggcggccacatgctgtccccctgaagtccagtcggccgggctggtcaccgtgtatctgagtgtccccttgcatggtcaagtgtgacatggggaagggcctgccagtttagtggctgcagacttgggactctccatcccattaggacacacttgagcccactcatgtctctggggcttttctagccagatgatgcctgtggccccagagaggtcccctgaggttgggactgctggttggagcctctcctgtgacttttcagcccaaccagcagggcccgtttctaacgagagaggcctcctccccctcccacccaccccacggccttcagcttccctgggaaggtccatgcgcgttcctggggaaatcgatacacattcggctttgttagaataacgcgaaacattaaaacccagaaaggattcttaaggctggagtagcaatcacatg

SEQ ID NO: 124266 - DNA, 1114 bp, Homo sapiens
tcactccctcctacggcgtggtgccctgctgcaccagcctagagaagctgctgctctacttcgagattctggaccgcacgcgcgagggcgccatcctctcgggccagcttatggtgggccagagcaacgtgccgcactaccagaacctgcgggtcttctatgcgcgcctggcccccggctacatcaaccaggaggtggtgcggctctacctggctgtgcttagcgaccgcactcctcagaacctccacgccttcctcatctccgtccctggcagcttcgcggagagcggcgccaccaagaacctcctggactccatggcgcgcaatgtcgtgctggatgccctgcagctgcccaagtcctggctgaacggctcttccctcctgcagcacatgaaattcaacaacccgttctacttcagtttcagccgctgtaccctgtcaggcggccatctgatccagcaggtcatcaacggcgggaaggacctgcggagcctggccagcttgaacctcagcggctgcgtccactgcctgtccccagactcgctgctccgcaaggcggaggacgacatcgacagcagcatcctggagactctggtggcgtcctgctgcaacctgcgccacctgaacctctcggccgcccaccaccacagctcggagggcctgggccgccacctctgccagctcctggcccggctgcgtcacctgcgctccctctccctgcctgtctgctctgtcgctgactccgcgccgcgcgccgaccgcgcgcccgcccagccggccatgcacgcagtgccgcgcggctttggcaagaaagtgcgtgtgggcgtgcagtcctgtcccagccccttctcgggccaggcgtgcccccagccctcctccgtgttctggtctctgctgaagaacctgcccttcctggaacacctcgagctgattgggtccaacttctcctccgccatgccccgcaacgagcccgccatccgcaactcgctcccaccctgcagccgcgcacagagtgtcggggactcggaggtggccgccatcggccagctggccttcctgcggcacctgacgctcgcacagctgcccagcgtccttacgggctccgggctggtcaa

SEQ ID NO: 124267 - DNA, 1094 bp, Homo sapiens
cttcgagcatccctagccgggcaggtgggaggcacggggttgcggatcccgcggccgcggttcggacccgccggcgacatggccagctccggagaggtactgtccgcgactgtctccgctctgcttctgcctcggcggcctcggtctccctgggttcttccatcccgacccgggttcccttgcatcctttctatcccgacccctaccccgccccgtccttcccatcctgaccctggccttgcccctgctcccgtccttcccgcatcctgtccccaagactcctaccctgtctcggaaggcacaagctgtctcccccttcgctcgtgcattcctgatcgccagagttgtccccgtctctccgtcccctgagggtccaggctcctccgagacccctttctcagtgccccggttccttggctgggcccctgcagccctgggacattccccctccgtgcccacgtcccactccatcttctatctctggatgctcagtttcagccccagcccacttctccctggagcctgcttgctgaatgacgtggggggtgggtgatggaggaaaagccatttcacctgagggacttacgacgtaccctggaattctttcccaacactccccaaatctgggtccgatggagaagcccgccgcgtccctgtaatgtggtgcaaagtattgtctctgcagaaaggggtgcagcggggactctagactctgactagtggcttcccgttgatgcttcctgcctatctgtatgggcacctgggttggtatctgtcacctttcaggtctcagatcgttgggtgcacttcgcagatttaggagcttgcctgggttctagggagcaagagtgagaggctcaagtgtcttcctcagagtgatggggcagggtctctggagatggctgggggtcgctgtgctcaccgcccttctacatttgaagtgaatgcggcctagaaatgaccccagtggcttcttgattgacaaggaacggtgtgtggctcaactgcagattgataagattgaaatgaagattccagttagctgtgtgtgcttggggtcagggaagaaggggggtcctggtaccttggtctta

SEQ ID NO: 124268 - DNA, 3443 bp, Homo sapiens
gcgctggtcctttgggcgctaactgcgtgcgcgctgggaattggcgctaattgcgcgtgcgcgctgggactcaaggcgctaactgcgcgtgcgttctggggcccggggtgccgcggcctgggctggggcgaaggcgggctcggccggaaggggtggggtcgccgcggctcccgggcgcttgcgcgcacttcctgcccgagccgctggccgcccgagggtgtggccgctgcgtgcgcgcgcgccgacccggcgctgtttgaaccgggcggaggcggggctggcgcccggttgggagggggttggggcctggcttcctgccgcgcgccgcggggacgcctccgaccagtgtttgccttttatggtaataacgcggccggcccggcttcctttgtccccaatctgggcgcgcgccggcgccccctggcggcctaaggactcggcgcgccggaagtggccagggcgggggcgacctcggctcacagcgcgcccggctattctcgcagctcaccatggatgatgatatcgccgcgctcgtcgtcgacaacggctccggcatgtgcaaggccggcttcgcgggcgacgatgccccccgggccgtcttcccctccatcgtggggcgccccaggcaccaggtaggggagctggctgggtggggcagccccgggagcgggcgggaggcaagggcgctttctctgcacaggagcctcccggtttccggggtgggggctgcgcccgtgctcagggcttcttgtcctttccttcccagggcgtgatggtgggcatgggtcagaaggattcctatgtgggcgacgaggcccagagcaagagaggcatcctcaccctgaagtaccccatcgagcacggcatcgtcaccaactgggacgacatggagaaaatctggcaccacaccttctacaatgagctgcgtgtggctcccgaggagcaccccgtgctgctgaccgaggcccccctgaaccccaaggccaaccgcgagaagatgacccaggtgagtggcccgctacctcttctggtggccgcctccctccttcctggcctcccggagctgcgccctttctcactggttctctcttctgccgttttccgtaggactctcttctctgacctgagtctcctttggaactctgcaggttctatttgctttttcccagatgagctctttttctggtgtttgtctctctgactaggtgtctaagacagtgttgtgggtgtaggtactaacactggctcgtgtgacaaggccatgaggctggtgtaaagcggccttggagtgtgtattaagtaggtgcacagtaggtctgaacagactccccatcccaagaccccagcacacttagccgtgttctttgcactttctgcatgtcccccgtctggcctggctgtccccagtggcttccccagtgtgacatggtgtatctctgccttacagatcatgtttgagaccttcaacaccccagccatgtacgttgctatccaggctgtgctatccctgtacgcctctggccgtaccactggcatcgtgatggactccggtgacggggtcacccacactgtgcccatctacgaggggtatgccctcccccatgccatcctgcgtctggacctggctggccgggacctgactgactacctcatgaagatcctcaccgagcgcggctacagcttcaccaccacggccgagcgggaaatcgtgcgtgacattaaggagaagctgtgctacgtcgccctggacttcgagcaagagatggccacggctgcttccagctcctccctggagaagagctacgagctgcctgacggccaggtcatcaccattggcaatgagcggttccgctgccctgaggcactcttccagccttccttcctgggtgagtggagactgtctcccggctctgcctgacatgagggttacccctcggggctgtgctgtggaagctaagtcctgccctcatttccctctcaggcatggagtcctgtggcatccacgaaactaccttcaactccatcatgaagtgtgacgtggacatccgcaaagacctgtacgccaacacagtgctgtctggcggcaccaccatgtaccctggcattgccgacaggatgcagaaggagatcactgccctggcacccagcacaatgaagatcaaggtgggtgtctttcctgcctgagctgacctgggcaggtcggctgtggggtcctgtggtgtgtggggagctgtcacatccagggtcctcactgcctgtccccttccctcctcagatcattgctcctcctgagcgcaagtactccgtgtggatcggcggctccatcctggcctcgctgtccaccttccagcagatgtggatcagcaagcaggagtatgacgagtccggcccctccatcgtccaccgcaaatgcttctaggcggactatgacttagttgcgttacaccctttcttgacaaaacctaacttgcgcagaaaacaagatgagattggcatggctttatttgttttttttgttttgttttggttttttttttttttttggcttgactcaggatttaaaaactggaacggtgaaggtgacagcagtcggttggagcgagcatcccccaaagttcacaatgtggccgaggactttgattgcacattgttgtttttttaatagtcattccaaatatgagatgcgttgttacaggaagtcccttgccatcctaaaagccaccccacttctctctaaggagaatggcccagtcctctcccaagtccacacaggggaggtgatagcattgctttcgtgtaaattatgtaatgcaaaatttttttaatcttcgccttaatacttttttattttgttttattttgaatgatgagccttcgtgcccccccttcccccttttttgtcccccaacttgagatgtatgaaggcttttggtctccctgggagtgggtggaggcagccagggcttacctgtacactgacttgagaccagttgaataaaagtgcacaccttaaaaatgaggccaagtgtgactttgtggtgtggctgggttgggggcagcagagggtgaaccctgcaggagggtgaaccctgcaaaagggtggggcagtgggggccaacttgtccttacccagagtgcaggtgtgtggagatccctcctgccttgacattgagcagccttagagggtgggggaggctcaggggtcaggtctctgttcctgcttattggggagttcctggcctggcccttctatgtctccccaggtaccccagtttttctgggttcacccagagtgcagatgcttgaggaggtgggaagggactatttgggggtgtctggctcaggtgccatgcctcactggggctggttggcacctgcatttcctgggagtggggctgtctcagggtagctgggcacggtgttcccttgagtgggggtgtagt

SEQ ID NO: 124269 - DNA, 1024 bp, Homo sapiens
atctgcaccgtggtctctgaagtctccatcgtgacctcaaacctcgctcgtccttgctcctagcgaggcttggggtcggggtgtccgaggtgggggacatccgggggggttaggtggctggcgcggggagccggggttgtgaggggtgatgtcctcaggcggcggcgctgcggggtgcggcgaggacaccggtggggtgagagcaccggcggggcagcagcgggggccgcagcgccgggtccctcggcccggggcccctcccgcgcggagccaggggcgggacaggggggcgtggcctggtggcgctgacgtcacctcgcctataaaatgtccggggcgccgctagctgggctttgtggagcgctgcggagggtgcgtgcgggccgcggcagccgaacaaaggagcaggggcgccgccgcagggacccgccacccacctcccggggccgcgcagcggcctctcgtctactgccaccatgaccgccaacggcacagccgaggcggtgcagatccagttcggcctcatcaactgcggcaacaagtacctgacggccgaggcgttcgggttcaaggtgaacgcgtccgccagcagcctgaagaagaagcagatctggacgctggagcagccccctgacgaggcgggcagcgcggccgtgtgcctgcgcagccacctgggccgctacctggcggcggacaaggacggcaacgtgacctgcgagcgcgaggtgcccggtcccgactgccgtttcctcatcgtggcgcacgacgacggtcgctggtcgctgcagtccgaggcgcaccggcgctacttcggcggcaccgaggaccgcctgtcctgcttcgcgcagacggtgtcccccgccgagaagtggagcgtgcacatcgccatgcaccctcaggtcaacatctacagcgtcacccgtaagcgctacgcgcacctgagcgcgcggccggccgacgagatcgccgtggaccgcgacgtgccctggggcgtcgactcgctcatcaccctcgccttccagga

SEQ ID NO: 124270 - DNA, 1062 bp, Homo sapiens
cagcgctacagcgtgcagaccgccgaccaccgcttcctgcgccacgacgggcgcctggtggcgcgccccgagccggccactggctacacgctggagttccgctccggcaaggtggccttccgcgactgcgagggccgttacctggcgccgtcggggcccagcggcacgctcaaggcgggcaaggccaccaaggtgggcaaggacgagctctttgctctggagcagagctgcgcccaggtcgtgctgcaggcggccaacgagaggaacgtgtccacgcgccagggtgagtggggacgctgcccccgcctctcctggtccgtgcacaaagcgcaccccacccgcgcccctccagcctcccgccctttctcgctcgcggcgccgctgcggtccggagcactgcccattgcgcccccgctaggcacgcgggctaccccgcctggagggggcgaggagtggggctttgcccatcctcgggtgccgctgcccacctcccaccccgggctgggatcatgggctcccctaggccccgcggagtcgcaaccgtacgtgcaccctcctaacccccccccccgcccaatcttggctctccccacgcgcgctgatccctcggatcagctgtcccagctcttgcggagtgggagcccctcacccatttcctcgtgcccctccccccgccggctgtcctggagctcgggggtccgaggcaagggtcgccacccgcaagggcgcgcctccacccccaccggcagcctttcgcgggcgagatgggggaggttagccaggcctttgatcccggcggggcgcgcctccacctccccgtctgcccggccttcctccacctcctcccgctgccgggcggggtcggcctccgctggtgggggggggcgcggggtgtcagcccttccccccagcccctcctcccgcgtctgccccgcgctcgaggccgcggcctttgtgagcaggggggcgggtcgcctcgactgggtcctccctcgccccctttgtcctgctccatctctgcagatgggaaaaccagatgcggcggggcgggggaggggatcg

SEQ ID NO: 124271 - DNA, 1754 bp, Homo sapiens
agcctcagcctcctgcctcagcgatcctcctgcctcagcctcccaagtagctgggaccacaggtttgcaccaccactcccagctaattaaaaaaagtaatttgtagagacgggggtggggtgggggtcttgctatgttgcccaggctggtctcaaactcctagactcaaacaatcctcctgccttggcctcccaaagtgttgcgatcacaggcatgagcccctgtccctggcccctattatttctctaactggggaaagtcatgtgggaacagatgtagcttgccttggcctctgaccggccctgcctgcgttcctgggtgctctctgctgcttctcatgtgtgccactgtggggactcggccgcccaccccaccccgtggtgttaccttgcgtgtgtagttctgtgagctcagggctatggtctgccagaactagggggcgtggggccccagtaccagcccaaggcctcctctctgcaggtatggacctgtctgccaatcaggacgaggagaccgaccaggagaccttccagctggagatcgaccgcgacaccaaaaagtgtgccttccgtacccacacgggcaagtactggacgctgacggccaccgggggcgtgcagtccaccgcctccagcaagtgagtgcctcgctcccacctgtcaccgcccccaccaccttgcctgggctaccccgcctgaccctgtcccgccatcccccaggaatgccagctgctactttgacatcgagtggcgtgaccggcgcatcacactgagggcgtccaatggcaagtttgtgacctccaagaagaatgggcagctggccgcctcggtggagacagcaggtaacactaaagccccagttccctggagccgtcctggagtcctggagggtctggccatgccgtggtcacttggtagccccagccaaggcctgctctgtgctgggcatccccccggactggccccgcactgtcctaccctggggactgctgtgtgaccccagctcctggccctccctctctggtcaccccagcctccaccccactccctgccaggaggctcactgactcccctctttctgggacaggggactcagagctcttcctcatgaagctcatcaaccgccccatcatcgtgttccgcggggagcatggcttcatcggctgccgcaaggtcacgggcaccctggacgccaaccgctccagctatgacgtcttccagctggagttcaacgatggcgcctacaacatcaaaggcaggttctcctgtgggcagctgctgggcagggaacccctcggtcggggctggggtcagtgctgcggggagcgccctctgcatccacactggaccctggcttggctcagggccattccaggccctaaagggacaggtgtctgatggccaccaggggctctgggatgcaagcagcccctttccctcttgtctgtgtggttggggggacttaccttgcccacctgacagagaggtgtgtggaggggagagcagggaggggaaggagagcagggaaggggagggaggagagcaggggaggggagagccgggaaggagaggagagcaggggtggggaggttctggaaagggtgtgcaggggaggacgcgcctcggttatgggactggagccccttcccaggaggacccccaacaatccagaggtgcctgttaggattcagaacatggtttttttgtttgtttttttgagactcactccctcaccctggctggactgcagtggcg

SEQ ID NO: 124272 - DNA, 2339 bp, Homo sapiens
actatgtgtgggagccaccatgcctggctaatttttttgtatttttcatagagacgggtttcaccatgttgtccaggctggtcttgaattcgtggcctcaagtgatccgcccacctcagcctcccacagtgctgggtttataggtgtgagccaccacacccggctaattgttttgtatttttagtagagacggagcttcactatgttggcaaggctggctcgaactcctgacctcaagtgatccgcccacctcagcctcccaaagtgctgggattacaggcgtgagccactgcggccgagcagaacacgttctaggacccttgttcatgtgtccatcatggacaggaggacgtgcgggccatagggaccctggctcattccggagccgggactggagggtggggcgtcacccttgggaacacccgtgcccaccctccgctgcccagggtaggggtggggagccaggctttgggccccacttgataaagtcccctccccagactccacaggcaaatactggacggtgggcagtgactccgcggtcaccagcagcggcgacactcctgtggacttcttcttcgagttctgcgactataacaaggtggccatcaaggtgggcgggcgctacctgaagggcgaccacgcaggcgtcctgaaggcctcggcggaaaccgtggaccccgcctcgctctgggagtactagggccggcccgtccttccccgcccctgcccacatggcggctcctgccaaccctccctgctaaccccttctccgccaggtgggctccagggcgggaggcaagcccccttgcctttcaaactggaaaccccagagaaaacggtgcccccacctgtcgcccctatggactccccactctcccctccgcccgggttccctactcccctcgggtcagcggctgcggcctggccctgggagggatttcagatgcccctgccctcttgtctgccacggggcgagtctggcacctctttcttctgacctcagacggctctgagccttatttctctggaagcggctaagggacggttgggggctgggagccctgggcgtgtagtgtaactggaatcttttgcctctcccagccacctcctcccagccccccaggagagctgggcacatgtcccaagcctgtcagtggccctccctggtgcactgtccccgaaacccctgcttgggaagggaagctgtcgggtgggctaggactgacccttgtggtgtttttttgggtggtggctggaaacagcccctctcccacgtggcagaggctcagcctggctcccttccctggagcggcagggcgtgacggccacagggtctgcccgctgcacgttctgccaaggtggtggtggcgggcgggtaggggtgtgggggccgtcttcctcctgtctctttcctttcaccctagcctgactggaagcagaaaatgaccaaatcagtattttttttaatgaaatattattgctggaggcgtcccaggcaagcctggctgtagtagcgagtgatctggcggggggcgtctcagcaccctccccagggggtgcatctcagccccctctttccgtccttcccgtccagccccagccctgggcctgggctgccgacacctgggccagagcccctgctgtgattggtgctccctgggcctcccgggtggatgaagccaggcgtcgccccctccgggagccctggggtgagccgccggggcccccctgctgccagcctcccccgtccccaacatgcatctcactctgggtgtcttggtcttttattttttgtaagtgtcatttgtataactctaaacgcccatgatagtagcttcaaactggaaatagcgaaataaaataactcagtctgcagccccaggccggcctgtgtgtgtcttggggctgaggtgggtgggggggctgaggtgggtgggagggctggcgggacaggtaggcgccctggctccccagctcagtgctgggagtgtgcagtgggagggaggccgtggctccagtgggtgctccggagctcgtgggcccagcacacctccttaagcgggggatggagcgctgggagggggtggactgtggcccatgcgacccccagagccattaggaggagttctgtggtgagaagtggctgtggctcctcgtaggctacgtccaccatgcgggggacctcgggggtgtctggcggtggcacgctggatgttgagaaggcgcagcccagggaacactcaaaccaggagaccccacattatcctctagttgacatgtgcccttcgactaggggacttggtggtaggggcagctccgcccccatactgcgagga

SEQ ID NO: 124273 - DNA, 1116 bp, Homo sapiens
tatttctcatcactgtcataaatatcattgtgtgttaaaaaaaaaaaaaaaaaagtgaagttagtggggtgggtgtgatcattgatctgtcatcaaaactgacctcggtttcttcatcttcctcttaatagccacacagccaacaccatgtgagcgtgctatgcagtgtgatttttactgcatgggactgggaggcagtgctttcctattttgcagatgagggagatgatgtgtaggtcactagcccaggatccctagcttggtgagaccaggatgtgagcccaggtcttccaaccagtgtctggctcctgccacaaatacatggtcgttaggtgcccatagggtccctgagccccatgaaccaggtagcccttgcagaggggtggggacctcgccagactctttccccatggatgaatgaagctgcaaatagtagaaaggggccctggcagttttgctaccccagcagtgtcccagacagggtttcgatgtcactgagggctttcccaagcagggcagcacagtccagtacacacggcctgttggtgcttgttgctacatgtcttcagcagatcccaccaggcccctgggtgagcacttgaccctgacgggacgcaaaacatggccacattctgcccccatctccaggtccttgtgggggaagtgctccagatagtggtatttgggtgctgggcttgtctgacctgaggaggtggctgcagaagccagggccagccctgagcccgtgaagtctctgctcctccccagcacactgtcctgcctccctgcccttcccagccacagctgcgcagcatgtgccactccaagctctgctgctccctcccccaacttcctgttgctggggacagcaaggggtgggggctaagggtctgccgttgctcaggcgatctgtggctaatctgggaataatttgaaactaaatcttaagctctttggaagcctctcatgaaatcattgcaagtttattaacaacagctgtggccacacatgacctggatcccagccccaacccacccccagaatctcagaggggaagcaccagtcgacttgcaattcccagtcagctttctaaggggaggaaaagtgcaatgaaga

SEQ ID NO: 124274 - DNA, 1510 bp, Homo sapiens
gttggtcaggctggtctcaaactcctgagctcaaatgatcttcctgctttggcctctcaaagttctgggattacaggcgtgcaccaccatgctcagcctgttctctccattttaagcctacagggattcctataacaaatagagcagtccttttctaaatgctgagtactgggcactatgccagggtactttatattttgtctgtaattctcaaaacaccatgagaaagttgtgttttcacagtttaaaaatgaggaaactgagtctccaggcaggtgagtaatttactgaaggtcatacaattaaaactttgaagcagttctcagactccaaaacctaggctcttttcactgtttaatgtcacaaaaaagccataagtgatcattttatgtgaaaataaataaatgcttaatggccatatttttttcctcctcatcttccctcccagctccaaattatgttttcttatttcagtgaagaaaaaatgactgctgcccgcattagaaaatgccacaagtgtgggactggcctcatcaaatctgaaggctgcaaccgcatgtcttgccgctgtggtgcccagatgtgctacctctgtcgagtttctattaatggatatgaccatttctgccaacatccccgctcaccaggagccccttgccaggagtgttcaagatgctctctctggaccgatcccactgtaagtagacacatggctgcctattgctttatagggagaaaatagaaatatatttttatgacaaatattttgaatatacgtaacaaaatttgacttaggagaagaatataggaaattacatagactgataaccaaagaaaaaatttgagaaactaattatcagctactcctcatgctgctcaaagcagcatgccctaacagttttataggcaaattcttttaattcttcaggaaataaaactctgtgccctctgaaatattccagagcaaagtaaggaaacttacacatgtatctgttcaaagccagcataacgctgattccaaagcctgacggagatagccctaacaaagaaaactacagattttcttatgagactcacttataatctagattttaaattatgtaaataaaatattagcaaatagaaagcatgaccaagtgagtttgttctagaaatgcaatgatggtttaatattaacaattctattaacgtaaatcattatatggtatctgtagatggtgagaagacatttaagaaatcaaatcaaatatttcttcttgatttaagctttaaaaatacagtattttagaggaggagcaaggctggcaaggaaattaaacacatagggtctgtttggggatcggaaagaaagcaggtgaggtttgcaggtggagagagccacagggaggtgacagcgattggcccaggggccggcctcagatctggagtgtgatgagagccatttcagggcattgtaggggctatgtttcccaggtcacactagctactacgctggggagagagaggacag

SEQ ID NO: 124275 - DNA, 1017 bp, Homo sapiens
cgtagatcccagtaggagaagcactttattggttgcatggaggttctgattactcatggcacttactgtagtcaatcccatgaagatgtcagctccgcaaagaatccttgtctgactcacctctttctcctctgcatgcacatgcatgctcccctgccgtgtgtgcgtgcacattacactgaacccccattatgctgtgcttgatttgccccgatatgtaactctctcagtagagtgcactccttgagggcaaggaccaagccttcttcggctgttatgtgcattcttgacctaggaaaaatagaggttcttggattcccttagtaaaaggaaagaaagttcactgaatctacctgagctttgactttgctgaactttattgattctcaggggttgcagcataaactcctgagatttaaggggttccatcttaaaatcagtgtctttctggccttctgtatgtcatttgggcgtatgggtggggaggaccagcatctttgacaactagaagacacagatggcctggaagcccacggtcctgtggtccctggctgagcatttgcgaatagtcaagtgtgtgggccttttacctcaagagtgctggagatttatagtctcaccattttattttattattttttttttttagacagaatttcactcttgttgcccaggctggagtgcaatggcaagatttcggctcaccgcaaccactacctcctgggttcaagctattctcctgcctcagcctcctgagtagctgggattataggcatgcgccaccacgcccagctaattttgtatttttagtagagatggggtttctccctgttggtcaggctggtctcgaactcccaacctcaggtgatccacctgcctccacctcccaaagtgctgggattacaggtgtgagccactgcacccggcccagtctcaccattttttgaggtgacagaacagagagctgaaatttctgaagctacttctggattggcaacagcgtaatgccctgtggca

SEQ ID NO: 124276 - DNA, 1066 bp, Homo sapiens
cccagtgagctatgatggcaccactgactgcaccccagcctgggtgacagaatgagaccctgtctcaaaaaaaaaaaaaaaaaagtcattgctgtagtaacttcggttccacaacctgtattgtatggagcatctatggggagcaaatcctttggaaggggcttagtcacagcctcccctcctgccctttccaggctgtgagaagctcggcaggaaggcgggagaggccccaccttcagaggcgcagctcagaaggcttgagagctccccgtgaaagggatccctgcaggtggggttctttgggaatcaacctcatgcacagccattgcagaggctcttcttcagcatctgtttactctgggctcaggccccaggcagcctgcaaacccaaccctcctctccaccttacagctctgcccaccctgctcctccctgttcctggtgcctggaattctttcccccagatagcaccagactctctccctcgcctttcttaagtcttcacttacatgcaccttcgcagagaggccttccctgaccaccagtttataatcgtgaactatttccccctctccaccccagtgcattcttcctttatttttttctcctcagcacttacaatcatgtcttaactgtatattacacttaatgtgtgtccccactgcagagcaggacccatagtccttagtaggagctcacatactggtttcggattttttttttttttttttttgagacggagtctcactctgtcgcccaggctggagtgcagtggcgtgatctccactcactgcaagctctgcctcccaggttcacgccattctcctgcctcagcctcccgagtagctgggactacaggcgcccgccaccacgcccggctaatttttttgtatttttagtagaaacggggtttcaccgtgttagccaggatcgtctcgatctcctgacctcgggatccgcctgtctcggcctcccaaagtgctgggattacagatgtgagctaccgcgcccggccttggtcttggaatttttatataaatgtccacatgatgccattgcctaggcg

SEQ ID NO: 124277 - DNA, 1023 bp, Homo sapiens
caacaacaacaaaaaaagaagtgttgagtaaccagtgagctgacaagcccaccacgtggaggactcgggtaggagacttgggcttgggggagtggatcgcattctatgatgacagagctagctgggggcagggcgggggacaaaggaaccacttccctgttggaccttgaaggctgcattagagcatgaagagacttccggaagaggacacagagtgttaaagtagaggggagcgtgtgtttccagggcgagctctgaggaggctggaagcttcagggccagctcgtgggggagatgtcccttgtgtgaagaacgtggacttcttcctgattgcagcaggaagtctatccatggtcattaaacagggtagtgaaatgatcagatttagcttgtcacatgattattctggtagcagaggactgaggatgtaatgatcccagcaagagactcccaggaccctaagggactcgctgtgcatacagggtccctattgtgtttcttaaagccgactgtggagccgcctggctcacctgcccagggactctggccgcttagcagaaaggcgggtgagggacctggaggagcatgatagtctctcctgctgagggtctaaagatgctcattcccacagggccagttgttagaaatgcaggcactcacacagatacgctcttctctcagtggtgcctgcctttctttttttgtttaattgttccttgcagtagcacattccatgggagattccatgacagggctattctctcgatttcagtggttttgattttgtgtctgttgtcatagcgcctggagctaagccttatcaaataattgcacatctggtgatcacttaggcttccagaaatgtgaggcagggaggaccctcaagggactctggtcagcactcctactgctgagaggcttcaccgcattcccccagactcaccaacagcctcgttacacttgttacggtgtgtgtgcaccagtgcgctcagcgcctgcatcctcacaacccagccccttgtg

SEQ ID NO: 124278 - DNA, 1826 bp, Homo sapiens
attgtcaaaacggctgtttttccctcctggaaaacagaaaaaagaatatggcaagatgttaactgtggcatgacagtccgggattctggacacgacctacataatcttccttgtatctctttgtgacttggtttcctcatctgtaaaatggtgagatcatgatctctgcctcacccactgggttgtctgaagattaaaggaggggatgtttgcaaaactcttagcacctttaaacttaggtccttggaaatgctagtggattcacttatcttctccttccttagatgcttggaaagtaagacactggcatttctgtcattcttgatttcctggtcatttgggggcacttaatttctctgtgttggtttcctcctctgtaatgagatctgttaatctcaggatttcacaaggggcaggcagagaggcttgtcacagccttttagaactagaagaaacttaagatgtcatttaggtccacaagtgccaatatgagagtctttctacagtatctttgtccaaaagtagatgtgagtggactctttggtttctgaaaatcccacatcatgtccccttaatttcttttctttcttttcttttctttttcttttttttttttttttttttgaggtggagtttcactcttgttgcccaggatggagcagtgacgcagtctcagctcactgcaacctccgcctcccaggttcaagtgattctccctcctcagcctcccaagtagctgagattacaggcgcccgccaccatgcccagtttatttttgtatttttagtagagatggggtttcaccatgttggccaggctggcctcaaactcctgacctcaggtgatctgcccacctcaacctcccagagtgctgggattacaggcatgagccaccgtacctggtcttcctttaatttctagattttgattttgaacctggtgtttctataacattcacttgactgtggtgatgaatccaattagaataatcagggctctgcttttatcttttaagatagggatccccagtccccatccccaggccacacaggaggtgagcactgggccagtgagtgagcattacgacctgagctctgcctcctgtcagatcagcagcagcattagagtctcaggagcgtgaaccctgttgtgaactgctcatgcaagggatctgagttgcacactccttatgagagtctaatgcctgaagccatctctccacgccctgtccgtggaaaaatagtcttccacgaaactggttcctaggaccaaaaatgttggggaccgctgttttaagatcttctgtaggtaatatgtcattgccgcaaatagcgctacctttgaaagcttgtttgacaaatcttccaaacccagctcacatgtatttaaagaaatagttgacaagtgcagttctaagtgagcctcacaatttagaacatcagtttaggaacactggcgtgcattgtacagatttggcttccctgcctcagctttcctaaaggcactgatggttaagcagcacttaaccagagaacagataacattcagactcttaagccaccactgtgtgactgtccgcacatcatttactctgactttcctcatcagagaaatggggatcctgttttctgtcccagcccccttcagggtggttgtgagaagcaaatgaggccgcaacaggtaagggctctttgacagaggtgtcagaagcccccacagaaaccacgtggcagcagtggtgttcttgagagtttggagaagcacgctccattttttttttttttttttttttttaataacagagtcatactctgtcaacccaggct

SEQ ID NO: 124279 - DNA, 1043 bp, Homo sapiens
atccagccaggagcaatccagccagaacaggaacactgacattactaattactgcttataactgagaagtaaggagcagtgagtaaagtgggtcacaagacagtgtcctagcagtcaaatgctgccgtcggcccgagtggcgaggtgtcaggtggcttgtctccccttcaccatgggtagacctggcagagcaccctgttggcatgagcagaagtgctgtcacgttgatcacccaggctcaccgtctacacacacggttagagaaatgggtgtgcttctgtcggaacttaaaaacatggcagatcaacccgtgagaacagagttctttgcacggctgtgtgagctgggaagagacgacaggcagaaaaggtgctgcagggggtgtgtggaggtggagcttcagcctctcctggctgtgtgctggataagccctgaaccacagggtccaagttgactcatctgtaggttgtcttcagcccccaaatcgcaattccatgatgaatgtgtacattttacacatgtgcgtatgtgttattaagtgtcaggctggtgtggcagagctgtcctggcagaacatgcgtgtgtacatccctgcaggctgtcggggcatgagctctagtgtgggctgtattgcaggagcatcagcagagaagggcgagatcttcactctacctctcactagccctgggcacttcccactgcctttgtggacttctgtttgctcttctgtagaatgggataacagtgccagtcctgcttactatttagggttatgtgatgcttgcagatgtacagggaaagcactgctgatgggagctgctgaagtttctaggggaggtgaaggtggcgcctcctcccctggtctaagtggtagatggtgcagggagaggagaatttcattctgtggcagcagctgatagattccaggtctttaatactacctgggaaaccttaacaaagcagtcagtcaccaaaactgacctagcttctgagcattgctaaccatgcttttagagaaacaggaagtaaaaaggatctttaaa

SEQ ID NO: 124280 - DNA, 1046 bp, Homo sapiens
ttgtatacccattgtcattaacttagtcatgtctgaacatgagcaaaagaatttttgttttgtttgtattaagagaacttgaaaaatagaaatgtgattattaaaatatgcttgtgtattttcaaactccaagctatttcttctggtgtgttggaaggcttattttaccacctaaaaaggagtgccttgcctcgggctggaggcgagggatggcgttttgtggtgtgtggaaggagctggaactgagcagctctgcctttctcctcgctcgccttctgcacgggctctgcttgcagcacaagctctggcactgtcggacaggatacagccagtgagaaaccttggaccagaagtcagggccccgcgggaattagtatggcttttagtagttagaattcaagactgtttccaactgctgccttttcccacagagtatgtctgactaacaaggatgggttctgattcacccggcgttgctatgaccgctttttaaaaatgtctgctttgggttgtgaaatcagcaaataaagttgttactttcctagtatgtgtaacagttagcttttggtatgtgaggaacaagtaaaaggcttagtggcaaatccttgtctgcttagaaggcagtgtacatataaacaactaaaaaattcccatttggctgccagcctcgattcatagttccctcttccagctcccaagcaaatatttttcaaatagccgtgctaagccttttccaggcatgatttgcgggcttacttgctgtcattctatttttcagcaaaactctgggtaggaatgtcggaaattataccttttgaaatccctccttgaaaacatggagatttgtaggtatgcagaggcaattgtaacaatataaagtattgtatctcttccactagagtaggagggcctgactgtcggcccctggggtctgtctttcattacttgtcttgacttccgctgtaaaagcattaagtgggaaggtagcagttctgctgaacaagcagacattgccttctgtaagagaagttatttaaaacatcgaa

SEQ ID NO: 124281 - DNA, 1892 bp, Homo sapiens
gtgtgtgcagatgtgcggcctcaggagatgaacggagatcctagaaagggggaactgcctccagttttgtgaacctgctgccacaagagcatggagttcccctaaagtgggcaggtggaaaatcccatcagggaacagaagatgactcatcactcaccactcaactcatttctaccagctccccagtgttctgccatgtaaaggggtagatttttcaacctgatttttttgctaactgatacattctataagaaatgacagctctcctttagtccacgttattcaagttcagagaagggccctgtgcaacctggggagagccacgtgctgggggaggctgtcgtgtgtgtgctcccactctcagggtctgcactctctgtccacagcactgctgtgctccttctctcaggtttcatgttgatttcttactcctactcagaaggtttagaatctcagggatgacattcagaagaaatgagtacaggaggggcctagaaacaaagacggcgatacgctatactagagaactccaaattagttgcagtggagagatggaaatccagggtttgtcttcttggtgcattgggcatgagtttttgtcctactgggagggcactggtcatcctgcccacccatggcagcgggcaggcttggatgccagggctgctcaccttggactgtccttgtggaaggacacacctacttgtctctttgttgttgttatttttggtctctactaaaacacactgtctgtagtactcacagaaaaagattctctgtggatttttaacgagtttctatgggtacttaattaaaatttagtggctctttttgtggttttgtgtactagttagctattgcttctcaggcttgtcacagcctgtggggatcagaagcttggagtggccctctttctagaaaccacacaccacctattaagttcctttgtatattttactaaaataatttaatgacatttttctgtgtctgtggcctcatcaagggagagatgcatgttagaaatttcacaataaaaatccctcaagaattgatacctacaaaatacctttttataagaaatgttttacctcctttttgtcattgcactgattttgtgttgttaggtgtcagcatcctgatttgttgtcatgatctcattgtgatgtccttgagaaggggctgtgtgtgagtgcacgtgtgcggcttgtggtgtgtgctgaggtggaaagtgatagtgttccctctttgcattctcagcacagagcactgcagggtttccagccttccaggtagaagagaaattgttgctatggtaataccgcaagcatgaaaacaccccctgtccccgtgggtgtctgtgtcagggcggggaatgtggagaaggggaacagtagcaaagaggagtgtttagggcatcgagcaagatgagagcaaagcctaagctgaagctgctgttgggtggaatttcttgtgtttatccttgaattcaaggtcagattccagttgcaatgtggtagctgagaacgtaaaaggccttttattcctcagtgtcttccctgactttgagacaaagataaagaatacagagggtctctgtcacatctccagttcccagaggccacatggccttcccacagaccacagttagaaaatgtgcgtctgtatctgtggccagtacatcactgcaagtggaatcaaccacccagccccagaaagcctgctgcccttcatgtccagtgtaacaggctaaggcagcagtccctgccatctcttctgaaactaaataacagttcgtgctctgtttctgtacaattcccctgggaagatggactgtgaatatccttggtaatgcagagccgtgatgagaaacgaaatccaatctgctgaggtag

SEQ ID NO: 124282 - DNA, 1029 bp, Homo sapiens
ttttgggctcagtaccaaagcaaatcgctacgtgcatttagactttatctaagaagtccatgttattagcgcatacgcttttacctttctcagttgtgcaaattctccttatgccattctttgtagcaagatggctaaagcagtcgctaatccttgaggattcctgatatttaagacatgagccacaagctaattttgacccgtgtgagactaagggcacctgctttctcattgcagtgtctttgccagtaatataaattccagttggcttttcaggaacttgtcgctctgaaatgaggcgtttatattaatacggcattaatataaacgtattaatataagacggcctctggaggaggacttgaatggctggaatcagtcctctggaatccctgaagaataagacactgtatctttgatgaaatggagagagtctttgtttcattgatatgatggaatgcttttgtcaaggctctcagctcccttgtgtgttctcagataaagaattcattagtttgttttcagtgtgctgcttttaggaatgaattgggtgtgtttggtgtgagactgaagagtgttacataaaaggagatttgaaggtgatgcttctggaatatgtattcttagggtcagaagtttcactgttgagtcttttctgccttgccacagccataactttgctttataaactcagagctgtgtaagtcaagttttccagaaacttagggccacaaggtggaggtttaggcacactcatgaagcaagcgctaacgacgagagaccatcaggtggtgagagtttaatcagagtaactgaagaacatctggtgtagtcttttcgtggaaactgcaaatgtgtgtgtggttgtgtaaccacccatcttttcccaatgtcacttgtatttatttatcttttctcacctgccagctttcttccctgcttgtttttctgccctttctaggttcccatcctattctttgtagcatttgctgtttttaactttacagccgtgaagtacaaccaaaattc

SEQ ID NO: 124283 - DNA, 1041 bp, Homo sapiens
aagattaggagttcgagactagcctggccaacatggtgaaaccccatctctgctaaaaatacaaaaattagccaggtgtggtggtgggtgcctgtaatccagctactcgggaggcttagtgagctgagatcgcaccactgcactccagccttggtgacagggcgagactctgtctcagaaaaataaataaataaagtttatgttttttcaaagagcgtgacctttggagtcaagcagaatgcattgggccatgcccccatcagccatactagccctgtgatcttgagcaatttaaattccttaagccactgtttcttcctctgtaaaatggaaataatcatagcattgttttgaaagctaaatgaggtgatgagtttaatgaacttattgtttgacacatggtaaatgcctcataaattttagctagttatttttaaaatgtcgtctttttccatttgttttctttggtgtttgtctttcatgtgggaagcattcctcatgtctgacactttttgttcatgttaaagagctgtttgaaagctgtgtgagtagtggggcttatagaccagtgagtttgactctaggtgcataggagccagttagcttttatattatgaacctgaatggctctgaagtctcttacctggggtgattcagtctgcctcctgcctggtgggtgtgagcccattttccaacattctgaaactgagggggaggaaaggtctggagagttctctgttcattatgcagactccatttcagactctgacttcaggccacccctcagctctgctctcctctatgagtggtttccagtccagagccgtgtggtccagctgttcaggagatcttcctcatttctctcagagtcagccaattccttctgaagcgggtaggaactagaggctccacccatgtccctgttttcagtttattactttgagtccctgcccctccccaccactcagctctgctttccagaggttctccagctttctaatatctgtagaggggaacaacttctccccagcatctcctttt

SEQ ID NO: 124284 - DNA, 1088 bp, Homo sapiens
ttcaatagtcccttaaaataaagcgcagacctcgatagacccattcacactccttatgacaagaacaaaattcaacttttgaaagttttttgggtaacatctctcatactccttatccttgctgtttataatcacattagcatctgagtacagatgttctagttccctttgcaccatgggattgaatatgataactttatataaagaattactctaaagaataccagaaaaaaaacacgaaaacctcgctgttttaggtatggattaatactgtgttagtatcttgagctagatttatatagcacgaaacagcatatcattgttttatggcccctaaaatgggttgctttacctcagaatttgtgtggggggtggcagagagatgaggatgggagacaaggctccccctctccttaagtgcaggacatttcatgtgtgtttcttgactgcctgcaggatggccagctgattgagtgtcgctgctgctatggggaatttccattcgaggagctgacgcagtgcgcagatgctcacttgttctgcaaagagtgtctcatcagatatgcccaagaggcagtctttggatctggaaaggtaagaactgtgtaatatgtcccatgtatataggacacattcctggagtctaaggagaccatgttgatagataagtgtaagtgcctctttgagggtgaggtggagttctgctggtatgcttatgtgtacattacctgatgtatgtgattatgtgggttctctgagcacagcagatttcttttcagggcacagtagaattcttccacactcccacgcctagccgcagaggagcacctccttcgttcatcatcttatttgtattcagagggaaggttacctcagaaagagagaaccttgcagcctattggattaaatatatattaaaataacataacttactttacacaagatcatatttctctctccaaagtgagtttctctggacaccagcataacaaacacagtatgggaattttacattgttttacaccaccgagtttgtggtattttgttccagcagcaatagaaaactaacacagtgattaagaagatga

SEQ ID NO: 124285 - DNA, 1122 bp, Homo sapiens
gggctagactcttggaagtggcattgatgactctgtgccagtgccccaccagtgtggttgtcttgttttgcattctcaccagtaatgtgtgggggtgcccactaccacacagcctcgccagcgaagtctgttgttaaacttagtttttgtatgtttgtttgttttttgagatggagtttcactcttgttgcccgggctagagtgcaatggtgcgatttcggctcactgcaacctctgcctcccaggttcaagtaatcttcctgcttcagcctcccaagtagctgggattacaggtgcacgccaccatgcccagctaattttgtatttttagtagagatggggtttttccatgttggtcaggctggtctcgaactcctgatctcaggtgatctgcccacctcggccttccaaagtgctgggattacaggcatgagccatcccacccggccaaacttagtttttatttgttcagtttgtttttgttgatgctattctttgctgttcaaagtgttttatgtgtcagccttttcccttatttattctacattttgagtcatacttaagaaatattgtcctgtattttctagctctctgatccacttaaaatttattcacaggtaacctttttgaactgctaaactgtgtaattgaagagatcgcaatactggagttatgtttatggaaataaatactaaatggttagtgtcatttttactaaatttgtgtctgaatgtgtgccttttttgttcttcagcatgaagactttttgcttgccctacagatgaatgaagaacagtatcaaaaggtagtttgaaatctcaccttgtttattctgggcattttcatgggctgttttctcttaccatgttttgtcagcatttttgatggcaaatttgtttttggataacctcctgtttggtgagtttgcagttcagccaagttatagtcagatacgtgatctagtatagtcactcttataccacactgaatcagaattgaagggaagataatagatgttcctgttaaaaatcattacctgacattcatcagatacactcataaaggaaagtttacaacttagatatcactttagagttaacgaggtatgtctaacctcagggc

SEQ ID NO: 124286 - DNA, 1123 bp, Homo sapiens
ttttttactgtaaatgtgaacacacagttttccacttcttacttgttcatagttttctcgacaaagagtagctgcttttcttaaaattttccagttttgtagtttaaccaataatagtttcagtgacttcattacattaacacccaattgatacataaacttcagaggagtttgccttaatcagtatgttcattgctttttaaatttttttgtctttcacaaagatagaaattcagtgcagttgtttgtttattggtttagtttttctgggctacaaacatcttaatttcttgataggccagttgtaatgtgtgactaaggactatattcttcaaccattgcatttgaagcaatgggcaggtgtgggatttggaagcagtatgaaagtaacatcatttgtttctgcagactttgtaattttcttctggaaaacccagattatccaaagagagaagacagaatcattataaatcccagtagcagtctgctggccagccaagatgagacaaaggcaagtgtcatgttcatgttttgcagtcactgcctggaaatgctgtgctttgttgttgttgttgttgttgttatctctgtgggaagaaagtgctttgttgggacaagtttttaaagactagccgagggacataggatttcagaatatatctatacttcagtgcgatctcccagtctgagccactttgaattctgtctgtctttaacttctatctttccttgtaattcttatcttccttttcccacaaagaattgaacgaattctccatatctttaatcctacaaagcaaattcctaaagcaaaacaagaattggccaaaactcttaacattttattatgaaaattttcaaacctacagaaaaattgaaatattttacgttgatcatttatatacctaccactggtactagttaacagtttactgtatcctctttatcatacatatgtcctctgtctgtccatcagcacaactttgttatgtttcatttcatgataatgcatttcaaagtaaattgcaaaaacatgagtacacttccctctaagtacttcagcatgcaggtcattacccagagtggaatatcttttttcttttgatgtgagatttgtatacag

SEQ ID NO: 124287 - DNA, 1033 bp, Homo sapiens
gtgtctcaaaaataaaaataaattataattcaaactatatctcaagctttaatctatgaatgactactttgattcttacagatagtatatagtgtaatcaaatttcagtgttaagataaatgtaaagaataggtattgttaagggagatggtgtttttgtttctttcctgtcctatctcggaagctcaatataagtacataaggagggataggcataggaaagaaattgaattattaaaatttcattttttcttagacaaataaacctcagagatcacgacccaatctcatcaaaccagctgcccagtggcaagatctgaaaaggttgggagaagaaaggcctaaaaagtctagagcagcatttgaatcagataagagcagctatttttcagtgtgtaacaacccattgtttgattctggggcacaggatgattctgaggatgactacggtgaatttctggatcttgggcctcctggaatctctgaattcactaagccaagtggccaaacagaaagagaacccaagcctggaccgagtcataaccaagcagcaaatgacattgtcaaccccagatcagagcagaaagtcatcatcttggaagaaggtagccttctttacacagaaagcgatcctttggaaactcagaaccagtcatccgaagactcagagacagagctgttatcaaatctaggagagtcagctgctctagcagatgatcaggccatcgaagaagactgctggttagatcatccttacttccagtctctgaaccaacagccccgtgaaataacaaaccaggtcgttcctcaggaacggcagcctgaagcagaactgggccgcttgttgtttcagcatgaattcccagggcccgcttttccaaggccggaaccccagcaaggtgggatttcaggcccctcttctcctcagcctgcccatcctctaggagagtttgaagaccagcagttagcaagtgatgatgaagagccaggtccagcctttccaatgcaagaatctcaagagcccaatttggaa

SEQ ID NO: 124288 - DNA, 1040 bp, Homo sapiens
tattttttaagtcctagttttcccgctagtcagcagtagagtgtgggcatctttctgtgtcccaccgactgcgagctggagacagcagtggtacctctctcgggggggttctgaggatcgaatgaggtcatgtctgtgaagcacctggcccatgagtgctacgtaatgtttgttaaataaacatacgaccttctgaggtctttctggggtaggcaaccgtttaccaccctacagggtgtgcctcggtcagcttttcacggtgagataggtcttcgcccttttttcatctgaaatgtaaccggttttctatcttctgtttctcttctatttgaggagcagaagggggcctgagcattcattgtttgttttcccagaccagtgaagttttcgtttgaatactgttgttcagcgtcgcacagtaaaatgaatcttactggtattttttgtcatgacttgccagcctctgtccacccaacgttggatttttgccgaagactggacagcatcgttgggccccagctcacagtgctggcctctgacatctgtgaacagtttaacatcaacaagaggatgtccgggtttgtactttgctttcggttcactttcaggcattgaacggcttttgaaatacacgtagttttcacttacaaatacgggtggtattaacagtcctgtgttctcgtggactgtagaggatggtgctacgtgccattcaggcctctgtctgaaagggtcccggggacagtcaccctgagtgtttctgccccacgctggcagctggggctgggccttctggtaaataccttccctcagctccccccgaatggaacgtcccatttcaccagcccagattgttacgttcacttggacagtagtcatcggcgtggtcttggtgtgcacagactgaaagcattttgcctctcgttgtgtgaaaatgtgtaggggaaactggctgggatgtggggcactgggcctgggtactcagtctggcagcctgaagtgtctacactgagtgggagaggcgggattcactcctccgg

SEQ ID NO: 124289 - DNA, 1166 bp, Homo sapiens
acagtaagactccatctcaaaaaaattttaaaagaagaatctagttgtatccggcccgagtgctactgtcttcgtgacatgttttcacaggtctgagaaagaaccccagtttaagtttatctacttcaaccacatgaatctcgccgagaagagcacagttcacatgaggaaaacgcccagcgtgtcgctcacttccgtgcacccggatttaatgaagattctcggtgacatcaacagtgactttaccaggtgattccagccacttctccaatcaggcgtcccctttctaagacgagaaaagacacagaaaatcccttcaagccctttccatggggttcaagcgtgaaccaccttcatgggcgccgcttccaaacagacccgggagccctgaagtcaccggttccctcgcgcggcactccctgagccttttaaatgccacgtgcgcccgttccatttcctgttcttggtttggaacgcttattctcacagtctggccgtatgagtaacgaacgattgcattttgaccctcgtcttgcagagtggatgaagatgaggagatcattgtgaaggccatgagtgattactgggttgttggaaagaagtctgatcggcgggagctctatgttattttgaatcaaaaaaatgcaaacctgattgaagtaaatggtaagtaggatttggtatttcaggagaatttgagaagttgtcttttcattgcattaagaaacatggttaaaaaataggtaaatagaacaaatcatgactgttgagattctaagcaggtgcctctgctccacatttgatccattttctgttccttggaaaactatgacaagaccttcctgtagcacaggaaacttggcaatggcagaaagaaaattattttctacaattctaaaaaaaaaaaaaaaatgactttatattaagaaatgtccccctttttttggagacaggttctcactttgtcacacaggctggagtgcagtggtgcaatcatagctcaccacagcccccaactcctaggatcaagcagtcctcccacctcagcctctagagtagctgagaccacaggcatgtatcaccaaggcatgtgtcaccagacccagctaatttctttttttttttttgaaacagagtcttgctctgtcgcacaggctgggctcaaa

SEQ ID NO: 124290 - DNA, 1203 bp, Homo sapiens
ggtaggttttgtaggtggattttttcccctcttctacttgttaacatttcttggctgggcacagtggttcatgcctgtaatcccagcactttgggagaccaaggtgggcggatcacttgaggttaggagttcgagaccagcctggccaacatggcgaaaccctgtctctaccaaaaaatacaaacattagcagggcgtggtggtgtgcacctgtagtcccagctacttgggaggcagaggctgcagtgagccaagatcacaccactacactccagcctgggtgacagagcaagactctgtctcaaacaaaaaaaaaaaaaaaaaattcttgcctagtcttctgggatttaaggtcaaaatcaatgcaaatctctcttcctaattttacccaagaagaatttaattatatatcatgtaaccttttaagtgactgcctcttccttcctcactgttgtgtccttgttgcagaagaggtcaagaaactttgtgcaacgcagttcaacaacatcttcttcttggattgacggatgacggctcaccgagagcatatctaaaaaacactctgcaaacatttggtcacatgcaagttagtggtcatatgacggactgcattcaggacaagggtaaagcaatacttgctttgaagaatcacatttcgactcggtctgctgatctgaggtttttagattttaaatatttatgtggaattaattaaaggtagttggctatatcgctatcatttcattcttttgacattatgtgaatattttactggaaaataagactaataaattgttaaaagtttttaaaattctggtttggtgttgagtctctctcctgctgcctatttatagattacactggccaccagctccgtgacccaggctggaatgcaatggctcactgcagcctcaacctcctgagctcaagcaatcctcccacctcagcctcccaagaagctagaaccacatgtacacaccaccacggtcggctgatgttttaattttgcagagatgggggggtctcactatgttgcccaggctggtctcgaactcccgtaatccagccatgtaggaaacctgagatgcagtgggccaaggggtatgttaaaacactgtgacgagttcagtgctaagaactgtaatgctcaggaaatcttacagcacgtgccatcctaagcctgtgtgtgtgtcctcgtgtctc

SEQ ID NO: 124291 - DNA, 1649 bp, Homo sapiens
tgcctcccgggctaaagggattctcgtgcctcagcctcccaagtagctgggatgacagatatgccaccacacccggctaatttttgtatttttagtagaaacagggttttaccatgttgtccagaccagtcctgaactcctagcctcatgtgatccccctgccttggcctcctaaagtgctgggataacaggcgtaagccaccacacctggcccatattatagttttattttgaacattgaactgtgttcatctgtgtaattagcatgtggatctcctcttttgtgaagtatctgttcacataagcacgtcctctcaccatttcaggatagtccctgaccctcttctccgtccacgtttgcttaggtaacttaataaaaatgcatgcagcggatttggaaaagcccatggtagaaaagcaggatcaatccccttcattaaggactggagaagaaaaaaaagacgtgtccatttccagactgcgagaggccttttctcttcgtcacacaacagagaacaagcctcacagcccaaagactccagaaccaagaaggagccctctaggacagaaaaggggtatgctgtcttctagcacttcaggtgccatctctgacaaaggcgtcctgagacctcagaaagaggcagtgagttccagtcacggacccagtgaccctacggacagagcggaggtggagaaggactcggggcacggcagcacttccgtggattctgaggggttcagcatcccagacacgggcagtcactgcagcagcgagtatgcggccagctccccaggggacaggggctcgcaggaacatgtggactctcaggagaaagcgcctaaaactgacgactctttttcagatgtggactgccattcaaaccaggaagataccggatgtaaatttcgagttttgcctcagccaactaatctcgcaaccccaaacacaaagcgttttaaaaaagaagaaattctttccagttctgacatttgtcaaaagttagtaaatactcaggacatgtcagcctctcaggttgatgtagctgtgaaaattaataagaaagttgtgcccctggacttttctatgagttctttagctaaacgaataaagcagttacatcatgaagcacagcaaagtgaaggggaacagaattacaggaagtttagggcaaagatttgtcctggagaaaatcaagcagccgaagatgaactaagaaaagagataaggtaaagttttaattttttactttttctctttttatctaaaatttttatttttattttttatttttttgagacagagtcttgctctgttgcgcaggctggaatgcagtggcatgatcttggctcactgcagcctccacctcccgggttcaagcgtttctcctgcctcagcctcctgagtagctgggattacaggtgcacgccaccatgcctggctaatttttatatttttggtggaaacagggtttcaccatgttggctgggctggtctcgaactcctgacttcaggtgatccagccaccttggcctcccaaagtgctgggattacaggtgtgagccaccacacccggccaggtaaagttttttcttaagagtattttgaggctaggtgtggtggctcacacctgtaatcccagtactttggg

SEQ ID NO: 124292 - DNA, 1023 bp, Homo sapiens
aaagctgatttcataacttatgaatcttaacctggacactgtaatgtttttaatagcacttgtgataaatacaagtgaatgaaataatagatggggaaatttctattgttaaaagtgaatttggctgggcgcggtggctcacgcctgtaatcccagaactttgggaggccaaggcgggtggatcacttgaggttgtgagttcgagaccagcctggccaacacggtgaaaccccatctctactaaaaatacaaaaattagccagtgtggtggcacttgcctgtaatcctagctacttcggaggctgaggcagggagaatcacttgaacccaggaggcggaggttgcagtgagctgagatcgcgccactgcactccagcctaggcgacagagtgagacgctgtctgaaaataataattaataaataaaataaaagtgaatttaaacataataaatatgttttcttttttgccttagaatgcgttgatatcaatgttactccagataaaaggcaaattttgctacaagaggaaaagcttttgttggcagttttaaagacctctttgataggaatgtttgatagtgatgtcaacaagctaaatgtcagtcagcagccactgctggatgttgaaggtaagaaaaatacagtgtacaaacagcttctaaagcttttagctaatgtgtttccttattttttccaagtaaacttttttttgacatgaaaacaaagtctcttatattattttatcatttttaattcttttttgagacagggacttgctctgtcacccaggctggactgcagtggtgccattgtagctcactgcagcatcacactcctgggctcaggccatcttcctgcctcagcctcccaagtagctgcctccaagtacctctagttttttgtaaactgtaaacggatgaagtcatataagatatatgattagaagaagtctgcagtgactgcatttttaactcccttgtcatgtctgtttttttgagatggagtttcgctcttgtcaccca

SEQ ID NO: 124293 - DNA, 1001 bp, Homo sapiens
aatcaaacacaatgtacgtttcagttttttaattttcatttttagagatagggcctcactctgtcaccgaggctggagtgcagtggtgcaatcatggctcactgcagccttgaactcctaggctcaagcgatcctcccacctcagcctcctcagtagctgtgactacaggcacatgccatgacgcccggctaattttttttttaaattttttgtagagacagggtcttgctgtgttgcccaggctggtcttgaactcctggtctcaagtgatcctcctgccctcagcctcctgagtagctgggattacaggctgtactttttagttgttttaccaggatgcatggcacattgggaagtgagaggactgtgaccaggagccaaaagctctgcgttcctttctgtagaatataggaagacacctctttacagatcattctgtcaacagtgcttcccttgatttgtgcgatgatgtgagaaccttgcgttggatgttgtaacttgagctgtgtaattcctataatattaaagtaatgtagaatattgtgtttgtgttttttaaacaggagtatgccaaaatggtccaggtcttacatgcatactgtatcatttcagcaggcatccgtgtaagttgcaccaatcagcttggacaaggaaaacgacagcctgtggtatgcacaggtggaagccccagcataaaggaaaatatcggctctgtgtttgggcagaagcaggtagtgatggccggttacttcaacgcctcttattgctctagtgattatagcgggtttccattgtcccttccagtagaatggagaataaaatcttagaattgattttttttttttttttgagagggagtctcgcactgctgcccaggctggagtgcagtggtgttgtcttggctcactgcaacctccgcctcccagattcaagcaattctcctgcctcagcctcccgagtagtgggattacaagcatgctccactacgccaggctaattt

SEQ ID NO: 124294 - DNA, 1058 bp, Homo sapiens
agtggatcttattgaagtttcagacaatggatgtggggtagaagaagaaaacttcgaaggcttaagtaagttgactttttctaatcctattataaaataattgggtcacatgtctcagaattttgagtaacactgtcttgggaaatgcaaaaacagttttttaaagccagttactagatatcatgtatattttgttgttatagcacttgagatatcttagtccttactttacactctctttcagctctgaaacatcacacatctaagattcaagagtttgccgacctaactcaggttgaaacttttggctttcggggggaagctctgagctcactttgtgcactgaggtgatacaatatttttatccactcacttgaccccttagagaaacctctctgaaaattaattggaatcattattattttcagttttctatctcaacatctcaacttctagcttctgaattctgttttgtctcgctgccaatctaagtcatagtacttctgaaatgtgagcaataaatgaatgaaatgaagcaaatagtattgttaaaaagatggttacccttattaaaacagtaattctcaattttaacctaacatgtagataataaatgatagttaccattggttttcattatcaatttttagggaaacatttcaccaaagcactatttaattatagcacagatatgaaatttttataaataattatatatatatatatatatctttttttttttttagacagagtctctctttgtcacccaggctggagtgcagtggcacagtctcggctcactgcaatctctgccttccaggttcaagtgattctcgtgcctgagcctcctgaggagctggtactataggcatgcaccaccactcctggctaatttttgtatttttagtagagatgggatttcaccatgttgcctaggctggtctcaaactcctggcctcaagtgatctgcctgccttggcctcccaaagtgctgggataacaggcatgagccaccacgctctgccctacatatacattttaattataatatttgttag

SEQ ID NO: 124295 - DNA, 1020 bp, Homo sapiens
aggagttcgagaccagcctggccaacatggtgaaaccctatctcttctaaaaacacaaaaattagctgggtgtgatggtgggcgcctgtaatcccagctacttgggaggctgagataggagaatcgcttgaacctgggaggcggaggttgcagtgagctgagctcatgccattgccctctagcataggcaacggggtgagactctgtctcaaataataacaataataacaataataataataataataataataatgtaggggacttgatgaagggaaaggattagagagattctgaaaagaaggtagttttggccccaatgatgactaaattttaactttcatatagtaggaagtggggcactagtaaatttttaagcagaaaaattatttgaccagatttgtgatttcaaaaatagctctggtgatagagtggaggatgtattggagcagggaataaggggagataaaacctttataaaactcttaaagctagtacagcaagagctttgagggtctttgctaagacagcagctggcagcttcagtttggagtggggtatcaaaggcaactgtgtataaggaatagttatataactggtacccaatttctgagatgattttgacttaaacattgtgtatttcccagcatactgttggtttttctaattatgttgggaaattatgttactttcatttttttttttgctcgttgcccaggctggagtgcaatgccgcaatctcagctcactgcaacctccgcctcctggatttaagcgattctcctgcctcagcctcctgagtagctaggattacaggtgcccaccaccatgcctggctaattttttgtatttttagtaaagacggggtttcaccgtgttggccaggctggtgtcgaactcctgacctcaagttatccacccatctctgcttcccaaagtgctgggattacaggcatgagccaccacagccagccatgctttcacttttcaagaaagaagacaccattgttgccaaagatt

SEQ ID NO: 124296 - DNA, 1077 bp, Homo sapiens
aaaaaaaaacacccagacacatcagactatacgctgtatgcttacctatatgaagactattgtttaggggccgggcacggtggctcacacctgtaatcccaacactttgggaggtcgaggcgggtggatctcttgaggtcaggagttcgagatcagcctggccaacatggtgaaaccccgtctctaccaaaaatagaaaaattagccgggtccagtggacagcgcctgtaatctcagctactcaggaggctgaggcagagaattgcttcaacctgggaggcagaggttgcagtgagctaaaatcacaccactgcactccagcctgggtgatagagtgagactccatctgaaaaaaacaaaaaaaaaaacaaaaaaccagactatattgtttagggataaatagttgacaaaataatagagacaagcaagacataattaccataaaaatcaggacctggggttgggggtggagagggaaggtttaagtggaaagaatggagtggtgacaatgtgtgtcaacctgggccatggtgaccctggggttcgctttgtaattcctcaaaatgagcatttatgtgctattcacttttcagagggtagaatctctgaaccaaaatgtttaagcaaccatatattaaaaaaagaaaaaatatggacagatttgtattttaattaaaacatttaaaaaatagagacaagggtctcgctatgttgctgagagtggtctcaaactcttgggattcaattgatcctcccgcctcagtctcccaaagcgctgagactccaggcgtgaaccaccgcgcccgacctggaaagatacatacatatatatatatatatattttttttttttttttttttttttttgagatagagtttagctcttgttgcccaggctcgagtgcaatggctcgatctcagctcactgcaaactccgcctccagggttcaaacgattctcctgcctcagcctcccgagtagctgggattacaggcgcctcaccacacccggccaatttctgtatttttagtagagacgaggttttaccatgttggccaggctagtctcgaactcctg

SEQ ID NO: 124297 - DNA, 1005 bp, Homo sapiens
ggctgcaagataagacagtagggtacaagggagggtgacttcctttttgaatttaattgtaaaagtaataatcattgtataaaaatttagaaaatgaaaatgtatatattaaaaagggaaaaactattttttgtttgtttgtttgagatggagtcttgctctgtcatccaggctagagagtgcagtggtacgatcttggctcactgcaacctctgcctcctgggttcaagcaattctcctgcctcagccgtccgagtagctgagattacaggctcctgccaccaagcccggctaatttttgtatttttagtagagacggggttttgccctgctggccaggctggtctcgaactcctgacctcaggtgatccacccacctcagccttccaaagtgctgggattacaggcatgagctactgcgtctggccaaaaaagggaaaaactaatttgaccacatggagatcatcactgtgggtatgtttgagagatgacatgaatggtcttccagtcacacagggtctggtgttttctcatgttggtttgtgtgtgacatgtgtaggggaggctttgcaggctttggggagcactgcagtgtgtgtggagtgagctggagtcgtgtctcattctcataagggccgtgagcttagtgggttcaccagctttagatcatgcttctttctaagcagcctgacttttttccagaagtgactgagcagaaaagagggtacctgggtcagaagtaatctgttgctggcggagttgggcagaatggtgatgggctggttgacagggtgatttctcaggagtacctcgatcgtagtgcagtcttctctcatgatggcttcatagagtttcgagtgaagtgctgcagatgggccatcttccagggacttggcactgtcaaccaccaggtctctgcttcctttcctggttatattccccatgagaaaaacttaagacttcaggggaaaatgttgttatggaattggtcagtttcagtctctt

SEQ ID NO: 124298 - DNA, 1074 bp, Homo sapiens
acttgtttatgggaaaacatgttggttatgtaaagtcaataccctgacagcaaaactgtttgagaaactagttaacgcctccttttcaaggtaaccacagaatcctaggttctcgttttggtggcctctcaaaacgtttcgaagagttgtacattttaaacctaattctttttactttgtcactcattcaaattgcctaggggatatgaatgatcagtttcacttatttgttttaaattagggtcagtttcactttctcttctgtatctttgaatcaagtctacagtaagtatttggtttataaagtttaaggccagtcgtttggtttacttaagtataattaagacgaaggttttgtctttttaaagcgtgtgtgttttctcttataacggaaatgctatgagaacgtggattacattgtttacgaagaagcagagcgtaacagtttctctttaaacgtgctaatattattacctcaatgtatgcagagtgccacagtgtctaaatagtgaaactccacaaatgaagaaagaataatgcattctagcatttgataacaagggagacataccatataagagactgggaattttaaagctttgagtaagactagtatttaaagcaaaggaaacacttgtgaagtctcattcctccacacagatccaacctcgattcatgttcatgttgtttttttgaggcaagatctccctctgctgcctaggctggagtgcagtggcgcagttgtagctcactgtagcctcaatctcctgagctccagcagtcctcccacctcagcctcctaagtaggtaggactacaggcacatgccaccacacccagctaattttttttttttttcttaaagagacagggtctcactgttgcccaggctggtctgcaactcctgggctcaagccatcctgctgccttggcctcccaaagtgttgggattacaggcttggtccaccatgccccacctgtaggttgttgttttaatgctcttgtaacttttatatatcatcagaagctgttgcttacaagttctgatatttgtaacagtaatatttagaagctt

SEQ ID NO: 124299 - DNA, 1019 bp, Homo sapiens
acactcagctaatttttctgtttttcttttttgtagcaatgaggccttgctacattgcccaggctgttctcaaactcctgatctcaagcgatccctctgcttcaacctcccaaaatgctgggattacaggcatgagccactgctcctggcttggttttatcttttcacagctgtgatattccccccccagtgtgcttgcctgattttatatacaaataccctaggatctgcagagtggacccctctgaacctggtatctgatgaaaagtgagcaaagaattttgtgttctcctaagttgtggtggctttgactatgaagctctagctgtattgataatagtattggtttttccatccctgtgatgctccggtgagaccgcagggaagcttgtcacaagagaactaaaatttctgagtctcaggggaggaaggttaagacccactccccacctcgaaattcttcttttttgacagaggctgaaatatgaaattgcagaggtgatgacagagatcgacaatctaacttccgtagaggagaggtaacaatttgtggctacacctttaagctatttactcttttctttctacctccatcctgtagtcaaacttgcagaaagtggggtgagagtggttgggatgtggggagcctgtggagttgttaattcctctcctctccccctactctgcgtggaggggtccaggggtgtttccctggatgttacctcccattgcctcctctgtaagtcatcatctgcctttataggttcaggcataagcacaggcacttcagggttgacccgcacagaaattacctgcctgcgtcataaggaactgtgctttattaaaatcactggtttgcatcattagctttttctgaagtgtctcaagttatcaaatgtgaacagcaatggtggctgcaccacccctgccgccactgcggagactgggggcccctccgtgagggcctgtgcttcgcttccttgagcccgttgttgcgggggaaagtacactggagggcc

SEQ ID NO: 124300 - DNA, 1085 bp, Homo sapiens
ccaggctggtctcaaactcctgacctcaagtgatccacccacctcagcctcctaaagtgctgggattacaggcatgagccaccgtgcctggcctgaaaaaatatttttgttggatgggattctattttatgaatgtaccgcaatttattcgtgttcttactgatgaatatttaggctgttttctggttataaagagcgctcctatgagtgtctcagatacagtctcaatgggagcatttctttaggataaatacctgcgtatggaattgctgggtggcagcatgtacccacctcaaccttgctggatgttgccaatgtgttctccaaagtagttaattatttttttcttctttcagtgcctgaagacctctcattagaagagagagaagaacttctagacattcgtcgaagaaaaaaggaacttattgatgacattgaggtaaaaaaaaaaaaaaaaaaccaaaaatccaaaactctgttttttgcttttgagtaaaatagtaaaagagtagcctcacaaaaatgtaaaaaaaaaaaaaaacccaaaaacaaaaaataacaaaaaaaaaagatgtttagtgtgtgcatataagaactacacaaagagacagagtgaaaagttatcaagttgggaaagcaaagactccacacaggcagtgagaccccgggtagaaatcaagacatcgtagaactgaggtcagcagtagccagctcgcaaacccagggccacaggcagcgtatcatctaaagcagcagcaagccacgagcgcattgctctgtcaaattgtgcactgagaccctctttcgttaactaatatgtttttttgtttgtttttttctttttgcttttttgagacagagtctcgctctgttgcccaggctggagtgcagtggcacaatctgggctcactgcatcctttgcctcctgggttcacgccattctcctgcctcagtctcctgagtatctgagattacaggcacccaccaccacacccagctaattttttgtatttttagtagagacagggtttcactgtgttaggcagattggtcttgatctcctgacctcgtgatccgctcacctc

SEQ ID NO: 124301 - DNA, 1018 bp, Homo sapiens
tcccctcccttgaatcaccagatccccatggaagtgattgagaaaaagagagatgaaaagctgaatcagaatagatagtgggatcagggtgaagaaataccagggcctgactcatcactctgtttccttagaactcagtgcagggttgtgaggaacatatggagatgtggtgttggctgtgctaatttgggagagcagagagcgagggaggcctgatgaccctgagtggccacgggcagccggggtgggcttgtgcagcagcgatattgatgagcagctgaactgggaggccagaggacacacgcggcttcaacacgctcaaaactgctagagcttctcctgggcgccacagtcctccttcctggtgcattgggtggcatcccacccatctggagtggaagccaggtctagacagggagagttagatgcagaaactagaaaacaaaagcaacacgataggctcagagaaggaggctcccagagctgacgttcccttgaagatggaccacatctctgaataggcagtgcagtttatatatgcatcctccagcctataaacttagagttagaaaacagcaacaataaaaacccaccaacgtttagcagcattctgaggaggaggtccagctattcttttttttttttttggctgggggggggttgggggaggatgggtctaaatactattgttcagaaataaagaataaagcaacatgtttccaaaagaaaataggagggggatataatttttgaggcagaggaatagtataatttagaaaatagtaattatagaaatgagaagtaaatttcagattgaatctactttgtgctgttcttaataaacttcaagaaacacaaataagtggttgaaagatgagataaagcaacaggccaagctgaaaactagggcagagagagttataaaatgaggctgggcactaagcttatgcctgtattcccagcgctttgggaggctgagatggggggatcactggagcccaggagtttaagaccagga

SEQ ID NO: 124302 - DNA, 1017 bp, Homo sapiens
tttaattcctatgggactttgttgcctttcagtttttcgagaacagttcttgagctaattggagggtagctggctagtttggctcattgggattgtcttcgtgtcctgtttgggcatttgtctgattgatggtcctgaatggaccatccctggcagatgaggtgaattaactataattggcattcttctctctgaccccttcactccctgatcaatgtaggtgtctgtgcttcaggtgaagagatgctgagccttgttcataataaaatacatgcaaattaagactagattgagctcccacctttcaccttcagacaggtgataacccccaagtatacaaagtctgtttcaagtttgaaatatttgaacggcaaggtcgtttcaaacatttacgggtaagagtgtaaagtagccacaggcagggtcagcccatgtcctgttggctcagatccgtttcttgccctttccctgcagggactcacccctgcaggcaacatttcccaggcccttggtcagctggcttccggctgggattggccactgggagccactggcaggaggaatggcaggaagaaggacaaaaacaggttatttcccttaggcctgcctcagggagtgtctctggcaggtaccttgtctccttttggctccagctcctgccccttggtcctagcctttgagtcttggaaatacctcctcccttttaccctctatttgagaagtggtaacagcagcttgctcttgataatctttgtattatcatttcctgtttggcttttcagtttttccatcacccctgtcactaattccttatattaaattccctctatatcagattcttaaagggatggtttctctggatgtctctgtttctctgggtggaccctgatagatacaggtgctttaggcagtagctttaaaaattacaggcgtgtaaatcctttgacccagcaatccagttctaggaatttaacctgcagatatatttgtacacgtgtgagataacataggtacaag

SEQ ID NO: 124303 - DNA, 1034 bp, Homo sapiens
gcgagaccctgtctcaaaaaaaaagtgtccctcgtgggtttggttgcatgagaatgcttggtgttcaattcttgaggttattagaagattgaactttgaaatcatcccgcaaccttgaaccaaaaggtgaaattgtccactttgatagatgacaacggaaggatcctttggttcaatggacagcttgtaaatataaaacagttgctggaaaattatattagagatgagctatctcctccattacaatgtttgcttttctttaatgcgattgagttccaacagaaaggcttgggaggggccacaagcaatgcttcaggagttactggaagagagatatggggagtgagagaggagatccatcgatgtggagcaggggccaggggaggccttctgcccaggaggcctgtgctgaggaccctggctgtgcccaagggaaactgaattcagagctcctcctgcatcataaatccaggacagctggcagctctccaaggaagactggcgctaaactccaagggcatcagccgccagattggccaacccctacaatgccctttgagagctgagccccaggtgtgttgaatcgggattccgttccaacctcatgaccacattcatttacaagccctgcattttgttaatttaaaaatgcactcaccaggagggaaggaggagaggctccattaaatataagacagctgaaaggctggaattcttctgacatgcatgtcttaggaaggagaaggcctgaccttgttctttttttttttgagacagggtctcactctgtcacccagactggagtgcagtggtgcaataataactcactgcagcctctacctactgggctcaagtgacgtgacctcccacctcagcctccccagtagctggaactacaggcacatgccaccatgcctgggtcgctatgttatcggggctggtctccaacttttgttctccagcgatcctcccacctcagcctctcaaagtattggaatacaggtgtgagccaccgagcctggccaggcctgact

SEQ ID NO: 124304 - DNA, 1014 bp, Homo sapiens
ggtctcccaatctcatgccaccctcctcagcctcccaaagtgctgggattacaggcgtgagccaccatgccggcctaattttagtatttttagtagagaggggtttctccatgttggccagggtggtttcgaactcctgacctcaggtgaaccgtccgccttggcctcccaaagtgctgggattacaggcgtgagtcactgcgcctggctggaaataacttcttaaattgtcttttaaccattaagttttgcctcgaatgtggctacttgccactgtcacttttttttttaattttttttttagagctaaggtctcttgaataaagctgaaaattcttatgttgaaaggtacttccttctgttattttatcaccttcctggttttgtctaatctcagcgagattacagtcatatttcttgttctttttaaggtgcatttaacaatttcaagcacagagtctttgttctgtggtcttgatgttttgtgtactcccggacatattttgggactctttaaacagaagaatgtttgctttaaatattcttaatgtctttaaacctactttgtcatattcagcttctaaaattttcatgtgtgctgatgagatattttatttagagtgttttgttttaattaagcccatcttaagagacattcaatttttgccaagaatctgctttctctcttacaaaccagttatatttgtaacattcataaactaagttattagcaaaggcgaaattttagctgcaccccggctatgtcttgcagattcatggcggaattaaagagagtaagggcaggctaaaacaaaacacgatgacaaatcaggatgctataaacatgcatgacctttattttcaatattttcttaaatgcggtttttcctttttttttttttttttggagacggggctcactccgttgcccaggttggagtgcagtggtgcgatcttagctctctgcaacccctgcctcctgggctcaagccattcttctgcctcagcctcccg

SEQ ID NO: 124305 - DNA, 1544 bp, Homo sapiens
ttcccaaactttgcaacccccccccttatttttaattgtaaagacgggtctcggccgggcgcggtggcttactcctgtaatgcactttgggaggctgaggcgggcggattacctgaggtcaggagttcgagaccagcctgaccaacacggagaaaccccgtctctactaaaaatacagaattagccgggcgtggtggcgcgtgcctgtaatcccagctactcgggaggctgaggcggcagaatcgctggaacctgggaggcgcaggttgcggtgagccgagatcgctccattgcgctccagcctgggcagcaagagggaaactccatctcaataataataataataataataataataataataataataataaaggggtctcgttatgttgcccaggctggtctcgaactcctggcctcaagagatcctcccatcttggcctcccagtgctgggattataggcatgagccaccacatctggcctgcatagacgttttatgttatccttgaagctaaaaatggattggaagttaacagcgttttgataaatgtaccgtattttggccagaggtggaactgagttgtgagggtgaagaccagggaaaataaagtggaagacgtggaagcacaaaacgtctcagaggcctggaaccattcagctgatcttagagtatgctcacaccccagcaccctggagaccgcctttgctgtaaaaaattggtatctcttttttttttttccctgagacagagtcttactcttgcccaagctggagtgcggtggcgccatctcagctcactgcaacctctgcctcccgagttcaagcgattctcctgactcagcctcctgagtagctgggactacaggtgcccgccaccacgccaggctaatttttgtatttttaagtagagttgggttttcaccatgttggccaggctggtctcaaaatcctgacttcaagtgatctgcccgcctcgacctcccaaagtgctgggattataggcgtcagccacagcgcccagccaagagactgatatttctacatcccttgaattccagttgcctttttctttcttttatattttcctttttggtagagacagggtcttcccatgttgccaaggctggtcttgaacttctggcctcaagtgatcctcctgccttgccctcccaaagcactaggattacagtcagaacccagtgagcccagcctcagatgactttttctagtggaaggaaaggttgtcaactcgagaattctttctcaaagaaagctggccaagtcctgagcccctcttgcattccatttgcatacctctgtgctgaaggagggaccctcctttggggagtttacagttggacggtccttgggttgctccctggcgtgcagaatgaaccagtctgagcagtagaaccaccacactgcaggtgccgtccctttctaacgtcggtttggccatatcaaagtatgattgtcccagtagcaggtcttcaggtggctggtgcctgacacaggtgatggtaattaacatgaaacctaaca

SEQ ID NO: 124306 - DNA, 1066 bp, Homo sapiens
ttattttttttgcatgaacctctcgatccccttttgagaattgggttgggaacgcggcggtcaagtcgatcatatttgatgcatgcttgattgtacgggccgctttggtgcccccaaacttttctttaaaaaaatttttttttcatagacggggtctcgctgtgttgcccaggccggtctcgaactcctgggttcaagcaatcctcccatcccagcctccaaaatgctgggattacaggcgtgtgccaccacgcctggctaatctttaaaagttttttgtagaaatggggtctcactgtgttgtccaggctggtctcgaattcctgcgctcaagtgattctcctgcctctcagcctccaaaagcgctggggtgacaccgcgcccggcctctcaacttattttcgacaggttttttgacttacacttctgccactgttaggattcttaaaattgttttcgccctttccgtggagaaagttttgaagatgctggctgggaggagccggctgtaatgggggactgttttttcttttctttctttcttttttttttttaaacaacgtggtgtggtcattgacaaaaaaactgttctttgcttaacgcgttaggtatgggatgtagcagaactggccccctgtgactccaggcattgcttttcatgattgtccgtgatggttacaggccctagaggaagacaaaacttgtcttatgcagtttttttctcccatagaaacaagaatctcagtgtaacccgagcaaaatcgcgcgtctcagcgttgcttgtataggttagtgttagcgaggaagaattactaccagtttaatcaaactcaatgcaactggtacatgttgcagtaaagtccaaggaaagttctggcatcacggttaactggattgatattcttcaaacttatcattaggacagattttggttcttgcaattcagatgcaagaaggataattagacagctgatttttgtaagatgcccatctgtcggatttgtcttggaagtgtgaaggagtattagagtatgtaggctattcaggctttttttttttttttttt

SEQ ID NO: 124307 - DNA, 1049 bp, Homo sapiens
agcctctcaaaaagtactgggattacaggcatgagccactacgcctggcaattttttgtatttttaatagagacagggtttcaccatgttgaccaggttggtttcgaactcctgaccttaggcgatctgcccgccttggcctcccaaagtgctgggattatgggcgtgagccatcgtccctggcctaaacaacagttttattattttattttttatttttttattgcttattactattttttgagatggagtctcgctctgtcacccaggccggggtgcagtggcatgatatgggctcatggcaacctctgcctcctgggttcaagcagttctcctgctttggcctcccaaagtgatggaattacaggcccgagccactgcgcccggccacaactattttaatagtgttgttttggtgttggttgattaaaggaatgggaacgaatgacttgaagccctctctgtttcactctttatacaaagtggagtccagattgggctagtggcctgtctagcccaatgtctgacttggacatacattactgtccaggagtttcttagctgaatgtgaaaaatgccttccgtgacatcatccttacaggaacattctttacatttattctttacttctgttgaacggtggtggcgtgaaccatgaatttgtttaagcttttcagctgttttgtgtgttttcctctcaaggcatggggtttcatatttttgacctgtggtaaaggtatttgaattctgcactggcctccaaatgtaggtgtagtatatggctctgatctttgttgatgattttatacataatgtggttttttttcttgataagccaaaaaaattatacataatgtgtgtgtgtgtgtgtgttttaatttcaaatgatagttacagtaaaagtttggagttgggctaagtgggaggagcatcaggaagccatttttagaaaccttaaattcaccctttataactttctgtctttttgcattagtcatctgataccttagtactgcctactttttcacatctccatcactacgtagctc

SEQ ID NO: 124308 - DNA, 1035 bp, Homo sapiens
ctcacgcctgtaaccccagcactttgggaggccgatggggtggatctcctgaggtcaggaattcgagaccagtctggccaacatggcaaaaccctgtctctactgaaaatacaacaacaaaaaaaaattagctggatgtggtggtgcttacgtgtagtcccagctacttgggaggctgaggcaggagaattgttcgaacccagcaggcagaggttgtggtaagccaggattgcaccattgggctccagcctggaagacagagccaagactccgtcttaaagttctcttaatggaaaaatgaagaacataatagcaacataagttatttgctttcattgtggttatttctacaggacagggcaggggaagcacagataggttaaaaaaaattgtagcatcatgagctagggggaaatccaatgtagaaatggcatgaactttcttccagccgactcatgttcgtttcctagagtgatgacattgctcgatgattgaaaagaggttgaactgagcagttaattatataaagttagaaattccaaagaagtagtaactaccagaaattctccagcagtatcagtcaagacttgtggccaaatacggcttccattcttcatgagggaaaggccatggaaaggctgtcacattgcccagtgcagatgttgacttggtttgtggaagcgcagcgtggacaaggaatgaatatacactaataggagtggaataacctttttcttttacctatttgaataaattaagtaaaagttttaatcagaagacttaaagaggagtcgattttatcttttgattgcactaagcttaaatataaggttgcactttaagaattctgtagtttaataatcatattcttataagacatagatttgtaacaaatagtgattggtaataaaatttcagtcagtatcagattatgccagtaccttgaatttcttcccggttgagcctttctcagctaaagatgtcattcaggaaaggaagtttagaggattttagacacagctggttgcctttata

SEQ ID NO: 124309 - DNA, 1491 bp, Homo sapiens
aacaactgcacttacttcatgaggtcttgttcattgatacatctttagcacctagtgtgcttctggtgtagcacacggttgatataaattgaaattgaattaatgctcacagtagtttggggatggagctggtagttctgcattaattttgcaggtgaaaaaaaaaggcatgaggaagttgaaacttgccaaaaaatacagccagtacgtgctagaattggccctgggtctcaaatctgggcttctgactccaaagcttaggctcctgctcatacaggtttattttcacattctaagcttttaacgaaatgtatgtccaatgagtcatttctgtttagaaagcctttaggagttggaagctacttcctggtgatgtaatgtttgactctctaaagtctttggaatggggagttccaacttttgttaagccctcaataatgtcatgagtgaatgaatattggcaagactggctgggcctgtaatctgccttgagtgtgagggaaaatggaaaagcgcttaactttatggtgaattctaatttatagtagttgagattgaacgacaaaaatcttaaaattatgatgctgatgtgtcattgtgaccttggtaaactgacagcacagcagagagaagggctcattaaggagagcacttggctaactgaaccctcaggatgccagagacttgaattctcatgtaagcccttaagcttgccttgtcaatgctgtaaaaattggagacctttatgttttgctaatgatgtggtgaccttagttattaggtgatagcctcttgaaaaacattccaggtggttgggagactttcagccaccactcttctgcctggcggcacactggtaatattaggattagtctctacccattgccagttgtgcaggtggtgctcctttctctgaagtatttctacacacttctctgtttggcaagtttaactcccatcgtctctgagctgttaattaaatgtctgggatgtattgtgatagtccctgcttatagacttatggtgctgtgtgaggattggggctgggggaggtggcatttaaatacagctgaatcaatgtgatggcagttacgtgtggtagtttattgactaagcactttctctcaagagaacagtcattgctgattgccataggggaggctgtagggatgtggtgggattttgagctgtcccacttaaggcagcagaataagttacttaaagaggaaggctgtgtttgtatattagtgttaattaaaatacctttaggctgggtgtggtggctccagcctgtaatcccagcactttgggaggtccaggtgggcggatcacttgaggtcaggagttcgagaccagcctggccaacatggcgaaaacccatctctactaaaaatacaaaaaaattatccaggcgtggtggtggacagctgtaatcccagctacttgggaggctgaggcaggagaatcgcttgaacctgggaggcagaggtt

SEQ ID NO: 124310 - DNA, 1046 bp, Homo sapiens
cagagggtagctctagtggccagctagctctcttgctgaaaatgagcaacataagtacatgaaaaacccaacaagtaggatttgaaagcggggctaattgtacccttatttcttctggggataaaagtcttaaactttgtttaaagtaaaatgtttttatttctgacggtgatttgtttcacttaaatagcttgttgtttgtttctttcatttctcttaagttttgggttgggtttggtttgtttcccgcaagttttgcccgtgccgccttcctccttgtgcctgcagggacatttgctggtgtggcagcctccaggcccgtccccagcctttttcttggcacaccttctctaggatggctgggacagtgacttagcttctacacctgtgactaaccattttcattccattctacagctttgacaattattctgccaatgttatggtagatggaaaaccggtgaatctgggcttatgggatacagctggacaagaagattatgacagattacgccccctatcctatccgcaaacagtaaggattgcagctgacttttaatgtgtcttttagagtatataattctcgagcgcttaattagtgcatgttacctatggacttgcttatattgccatcatttgggtattgagtaaatagcaaacagggtgggattggttccatgtaaacatccccctagatgcaagcccaggggttttgtgttttgagcgttaccagctgttccattgttgggcattttacagtcttccatttagctttagaataaccgtatgaaagagctactttttgtttttgcaaaccagtttttaacaccaattagtttgaaggcaggtttgctgtgtgacatttttgtaccacagaatcaaattaggcagttaagattcaggtttctttaaaccaagttagtaactaatctcacaggtttaatacattttttcccacaaaatacataatttgtatggattttgtgaaccatacaatagaacctaaatttattcaatgtagattgaagttttggttttgtaaaatg

SEQ ID NO: 124311 - DNA, 1025 bp, Homo sapiens
agcacacctgggttggccggagggattggggttggggttgggttgaggtcaggaagacatcctagagaaaggctggctttgagccctgattgatgatgaggcagcctgtgattgattcaaccagtacttcgttgtagggggtaatatgggtgaaataacttagtggttaagtctgctgtattaaaaatcagtctataatccccagacaattcaaattcttcagtatcttaggaaactcttctatacccagtggatgtttaataattcagattgtaaatggatttaaaaacatactggctggtagagtaggagacttcagcccactggacacatgtggaagggtgtggtgtcattctgagaaacaagagccaccctgctgtgactcagggggtaccgggcagggtgaggcctctctaaggaaggcctcacagtaagtcaagggtgacttggcaggagtcccactttgtgttctgaggaacacacagataaggaaagagaactctcctcagcttgaacaaagctgtagagtgtgacgcctggtatcaaagtaggtgttgtcctcatagggctagaacttaaacttcatgtttcctctgtgtgagactgtggactgctttcctataaaatatttgaggagcaaggagggagtgggacatggttcttgccctcaggtagttcacagaaaagtcccataaactgtgtaagacaccctgtgctagcaagggggtgagccgggcgcttaaggagcaagaggggcgagcacccacccagcagtggaagcattcctgtctggactccttcagagataaggaaattatcttgacaactcaggggcaggccacagatgctcagataccagtgtctggaaggtctcatccctttgagccacactgtcctaagaagaactggatctggtagtaacatgctggcacctgggtctcttgttgataaaggggaaacctctaaattttgtactacatggaatgtggtccctgattgctggctctgtggtctgcagacctgtt

SEQ ID NO: 124312 - DNA, 1048 bp, Homo sapiens
gaagagcagccctggctacacttaccaccgaggagggagtggtgtgtgatgcaggagtaacaaaggcgttgaaggcaccacgtgtgtaacaggcacgcgggagtctgggttagtcagaaaggggaaagcagtgctcaggttgactggaaacataggccggtgaccggagacagcctgaggctccagaacacacaagtgacctgtgaggaaggaaactgagagaccctggagagacaccggtggtgccctctcaggtcctcttgagtgttacgaggacggggaagaaatagagcctcccagccagggtcagccagcacagcctctgtatgtgaagcgtcaggacagcgacggccgggaggaggggatgctaggaagtgagtaccagaagcactagacagggttttgggaagctatatttagctggggacgaagaaggaacaaggaaggaacaggcagatggcatagcacgaacgccgggtggaaagtggaactgctcgctcctgtcgtgtgtgtctcttctccatcaaaaaagaggctcttaaaaatcgaaagcatgccacagatacgatcagaggctctttggaagctgcatttttgtaactggttctcgatgatcctctcccatggtaaagatttggcaccatatgaagtccttgggaggacaaatcttcaacagtagcccatagatgaaacccagatagctgtggaaactaatgtgctctttgaatgttaagtcaggaaagcttgagtggcctggcacggtggctcacgcctgtaatcccagcactttgggaggccgaggtgggcggatcacgaggtcaggagatcgagaccatcctggctaacacgttgaaacctcgtctctactaaaaatacaaaaaattagccgggcgtggtggcgggcacctgtggtcccagctactcgggaggctgaggcagggagaatggtgtgaacctgggaggcggagcttgcagtgagccaagatcgtgccactgcactccagcctgggcgacagagcgagactccctctcaaaaacaaaaaaaaaa

SEQ ID NO: 124313 - DNA, 2999 bp, Homo sapiens
gggctaggtagtttattctcatttctgaacagatgatgaattttctcagatgaccctaagaaattgttttaccaaaaacaaagtgatctatttgctttgggaggaactcccttccttttgtttctcttcccttccccccttcccctgcggttgtagagcccgttctgtccggtcgtggttctgtccagccatgatccgggagtcctagcttgctaatggaacacctgagatgttccttatggctcaaggcttgaattgaaggtgggaaccacctgaagcctccgtggggaggccttgcctgaggttaggtgtctggcatgagtgccgccggctgggtgtgatttaggtgaaggacatctgtaaaggagcgtgtcacaacctctgttccttcttcacatctagtggtatcctgaggtgcggcaccactgtcccaacactcccatcatcctagtgggaactaaacttgatcttagggatgataaagacacgatcgagaaactgaaggagaagaagctgactcccatcacctatccgcagggtctagccatggctaaggagattggtatggaatcctgtgtttttcctcctccttgtacctcttttattgtagtgacagagactggagtccagtctgggaaaggagggtgtgtgtctcccactcagggcctggtgtactcttggggaaccagctggcaaggccctgtgggtcttaacgtcagcgttggaaggtggaagcagggctgggagccggcagaaggcgcccgggccccaggagctgcctcccgctggtggtgtgatcagaagagagtggggtcgagtgtacattgccgtgtggtcgtgtttcctgtaggtgctgtaaaatacctggagtgctcggcgctcacacagcgaggcctcaagacagtgtttgacgaagcgatccgagcagtcctctgcccgcctcccgtgaagaagaggaagagaaaatgcctgctgttgtaaatgtctcagcccctcgttcttggtcctgtcccttggaacctttgtacgctttgctcaaaaaaaaacaaaaaaaaaaaacaaaaaaaaaaaacaacggtggagccttcgcactcaatgccaactttttgttacagattaatttttccataaaaccattttttgaaccaatcagtaattttaaggttttgtttgttctaaatgtaagagttcagactcacattctattaaaatttagccctaaaatgacaagccttcttaaagccttatttttcaaaagcgccccccccattcttgttcagattaagagttgccaaaataccttctgaactacactgcattgttgtgccgagaacaccgagcactgaactttgcaaagaccttcgtctttgagaagacggtagcttctgcagttaggaggtgcagacacttgctctcctatgtagttctcagatgcgtaaagcagaacagcctcccgaatgaagcgttgccattgaactcaccagtgagttagcagcacgtgttcccgacataacattgtactgtaatggagtgagcgtagcagctcagctctttggatcagtctttgtgatttcatagcgagttttctgaccagcttttgcggagattttgaacagaactgctatttcctctaatgaagaattctgtttagctgtgggtgtgccgggtggggtgtgtgtgatcaaaggacaaagacagtattttgacaaaatacgaagtggagatttacactacattgtacaaggaatgaaagtgtcacgggtaaaaactctaaaaggttaatttctgtcaaatgcagtagatgatgaaagaaaggttggtattatcaggaaatgttttcttaagcttttcctttctcttacacctgccatgcctccccaaattgggcatttaattcatctttaaactggttgttctgttagtcgctaacttagtaagtgcttttcttatagaaccccttctgactgagcaatatgcctccttgtattataaaatctttctgataatgcattagaaggtttttttgtcgattagtaaaagtgctttccatgttactttattcagagctaataagtgctttccttagttttctagtaactaggtgtaaaaatcatgtgttgcagctttatagtttttaaaatattttagataattcttaaactatgaaccttcttaacatcactgtcttgccagattaccgacactgtcacttgaccaatactgaccctctttacctcgcccacgcggacacacgcctcctgtagtcgctttgcctattgatgttcctttgggtctgtgaggttctgtaaactgtgctagtgctgacgatgttctgtacaacttaactcactggcgagaatacagcgtgggacccttcagccactacaacagaattttttaaattgacagttgcagaattgtggagtgtttttacattgatcttttgctaatgcaattagcattatgttttgcatgtatgacttaataaatccttgaatcatacgactggtaatactggtgtttttgagacttgatgaacaagttcctggtgtgtgtttgtttgccttgctttaaagtcctgggttgttggagacagtcattttcaatgcgtgtctccacacaggagggacagggagtgccacctccaggggagaactgggtgagcccaaatacggcaggagtggaggtgacattcatgtttggacctgtcgaacagtggcgaagctctgagggagaagcgcctatcggggtgtgtgtgcacatcctggcccagagctaggggctgaagatggagatgttgggaccctagactggccctggaagagtagaggttggtgaaccacatgcccttaagatcctttccagaggctgagtgcgtggcttacgcctctaagcccgacgctttgggaggctgacacaggaggagcgcttaagcccaggagttctagaccagcctggacaagaaagagacctacccaaaaaaaaaatgcaagagcctg

SEQ ID NO: 124314 - DNA, 1031 bp, Homo sapiens
ggagaaaaccccagcccgcaccctcaccacagttccatttgtacatccaggaagcccagtttgaaaaacaaaccacgcctgtaaactgagttggatgaaaagagctgccttgggggtgggaggctaaggaactgttcacggtcttctgggtgggccctggattcccgcacttctggagcagtcctcagacagccaagggatccatccacgggccagggcttcccgaggctgtctccacggtcgctgggtctcaggagtcgtcctatcacctgagcgtgctcactacttctgctaccattatggccacaatgacttcccataaacttaagtcattgagaccatggaattctgttcccatccgattcctgttgatggacattcgctgttttggcgtcatgggaactcctcggatggtaagtcagtttaaggacaaaagcgtgagtccatcgttcctgggacagtttccagtggccctggtcaggccacgtccacactggagaccccttgtgctggacaggagacgcaggccgctctgtcggagaccacgctgtccaaggcccgcatcaggatgtctggcatgtggtcggtgagcatcttcggacctatgagtattttgctgaattccgcttcgtgtgaccacttggcgctatagtgagcagcagagcagcagccaaacctgaagcagaaaaggagagacagctcccacgcggccccagggctgaccccgcgctgctcctgcctgcccaccacacccaccacgccgcactcaccgccccgaggcgccctcctcctgcaggtggatgatcctgccgggagggtagagaggggggtacttgggagaagagtccagtggggagtcgctggagaagctgtaggccggggaccagcgcgtcagtaggctctgctcccccagaagaggctgtgtcaggacttcctggtcgcccccgtccagctccgtgggcaagttgttggggtttcctccaaacagttcgtaccacaaaccgtgcagcaagatcttgtactgagggcga

SEQ ID NO: 124315 - DNA, 1037 bp, Homo sapiens
ctctgtgataccttcatgagaagagccctgaggcaccgaaggggaagggcgtatgtcatggtcccagggccatatggagaagaagtgcccgctgcatccgggcgcaggctgcaactctgcccagcggacacctccctgttccttctgtggcctttactgttagggcagggcctgggttaaccactgattcataaggaacttttttttttttttctttgagacggagtctccctctgtcgcccggctggagtgcagtggcgcctcctcggctcactgcaatctccgactctctggttcaagcgattctcctgcctcagcctcctcagaagctgggactacaggcacgtgccaccacacccagctaatttttgtgtttttagtagagacggggtttcactatgttggccaggctggtctcgatctcctgacctcgtgatctgccggcctcggcctcccaaagtgctgggattacaggtgtgagccaccatgcccagcctcataaggaactttctagaagaaagttgcttgcctcaggcaggttccaggagagctgcatcttcctcggtaacagaaccctccgtggtagagactcagaaactgaacctggaggagggaccccggacatctgcgtctgggctggggcccgcagtcaccgagccttttcctctctctgtcttgcagttggatcatcatcgctgccacagtggtttccattatcattgtctttgaccctcttggggggaaaatggctccatattcctctgccggccccagccacctggatagtcatgattcaagccagttacttaatggcctcaagacagcagctacaagcgtgtgggaaaccagaatcaagctcttgtgctgttgcattgggaaagacgaccatactcgggttgctttttcgagtacggcagagcttttctcaacctacttttcagtaagccgaggggatctggtttggtctgtttcttctgtttcagtaaatgcttctgatggagccggtccctctgttcccataaaaccgcgtttgagaa

SEQ ID NO: 124316 - DNA, 1882 bp, Homo sapiens
atgccaccacacctggttctttttaaaattttttttttatagagatggggtcgctctcactttttttgcccaggctggtcttgaactcctagcttcaagggatcctcccaccctggcctgccaaagtactgggattacaggcatgagccactgcatccggcctttatgttatagtacccagaatttcataggcctccctacataagctatattttactatatattgattagggtgaaagtcataataacaaaaagccactatgaatttagtggcactttcaatcaaatttgtatttttaaaatacaattgcttatttcctataccttactatgtagaatcttgtgtgtgggagacttctaggaatgggaagaaggaagctaagtttgtcaatatcagtaaccttttgttttcttttcttctctttgaaattctagtactcaagggaaagaagctcagtttgccagcataagtgccaaagaccatcaccagcatctgtccttcagggtgctcggacagaattcttaccacagcaaaggcataagatgcttgatacggaaaatcagaaacttaactcttttgttgcagatagtcatcagtggctctgtaaaaacgcagaggaaaagagccagaaggtttctgtttaatgcatcttgccttatctttttttattactgtgtacaaagatttttttacacaaagaaacttaatgctgtattaataaattcagtgtgtagcttcaattgggatagttccaaaagtgaagattttgtgaggaataagtgcaaattttttttttattttaaaaaattctttgaaactcttaagtctttgtgtctgcaatgaaattgtactccttgacagttgatagattatatattcttccatccctcaaacttgcattccactatatttattttttggcaaaagatgagctgtatttgtttgaaatctgagacactatgttcaattggatgtatctgttcaaatttattcccacgtgacgtggaagtccttcgttggatgtcacaacactacatttaaggttggtaaggatgacttggaggtccatggttttcattaccaacattttaagattctgaatgtcgatggagtctcactgaagagtcaccaaaggtgcctgccctcctcccctgctgggaagtgtcagttggagactgtcccaagggtgctgaagaatccagtggcaggggttctggctgctttccatctgagtgtgggatgggaggggtgttcatgatcatttggatatagcaatctactctgagaaatggaacacaaggagttacctatcactttcacttataattccaaaagatgactacaaccatgtccatgctcagattcaaacagttttccatatcacttttgggtggtaagatgatttaattacagttttttttttaattggcagcaccactaaccattccttacattcttttttgtatgtgtggttttctttttatttaacccgcagccgacatcgtagtttcttgttttgttttgttttacagagctgttgcatgacttatgttaccatcctaaaaaacactatattaaacatggaataaattgtctttttatgaattaggctttttgaacatcctgtgttgggatttttttgtttttcaattggcaacaaaagctctgtagggctgcagacatttaaagttcacataatcatctgtaagacattatgtattttgtggaaatactagaatttttttcctgattttgccattatatggatttgctattttttgattaatgcaaaagtatatgactttgttttttatgtgatacaccataaatattaaagtgttgaatactaacagtgctgactacaagaaggatgtagtattt

SEQ ID NO: 124317 - DNA, 1005 bp, Homo sapiens
tcctactgattctgcattatgacgagttgtataattatttcattgtatattatagtaataacagaagtaaagtgcacaatgattgcaatgtgcttgaatcatcccgaaaccatccatccaccctgctggtctgtggaaaaattgtcttctatgaaaccgatcactggtgtcaaaaaggctgggaccactgggttatgcagttgccaagctgttgttctattttgggccgacatgccccactccccactcatcttaggctgctttgtggtaaagaaagcaagagtgtttcctctgagctcctggtgggcagtgggtcgtgatggaagcttgccatttctcttccagatcctctggaccttctccatctacctggagtccgtggctatccttccgcagctatttatgatcagcaagactggggaggccgagaccatcaccacccactacctgttcttcctgggcctctatcgtgctttgtatcttgtcaactggatctggcgcttctactttgagggcttctttgacctcattgctgtggtggccggcgtagtccagaccatcctatactgtgacttcttctacttgtacattacaaaaggtatgttgggtgcgacctgcgttgtttctagagtgacgtgttcttttaggagtgcccttgcccagcactcttctaatctggcactctctcataaactggctccagagaaacactttcatgattggccaataacattctggatcaggatgttgtctttttaaatataagaaccctttttcttttgcaatagcttttcctaaagtgacacattttcactgtaaaagattcatctggtgtttcagtgaacattaacaccagatacctctctatgcatacacagacacatgacttaaactgtacattgctgttctatacactgcttttatcccctcacatttttcatgtcactagaaatctacataattttcagtagccacagagtgtttcattatgtgcatgtaccataa

SEQ ID NO: 124318 - DNA, 1110 bp, Homo sapiens
cttttctcatcagtgttacaaccaaaggatgttattggcagacctgctatacacacaataagtttggttgcctctcagatgcattaggctaactgaaattggacccagaaggcaacatactatgtgactccatttatgtggctttctagaaaaggcaaaactatggacagagaacataagtgtgattgcactgcaggaggtgaaggaagcctgggggagtttgactgcgaagcggcagcatggcagaattttggggatgatggaactattctgtgtcctaattttggtggtggttatgcctcagaactgaacacctccaaaaaagagaattttactatatttaagttttaaaattccaaaaacaaagctaaggaaaaaaatcttgcctttccaaatacatgggtgattaaaaaagctggggggtgctggaacagtggcaaggtattgacacctggtgttttttcttttatttgtaggttatctaccttgcctgctcctatgccacagtgtacctgatctacctgaaatttaaggcaacctacgatggaaatcatgataccttccgagtggagtttctggtggtccctgtgggaggcctctcatttttagttaatcacgatttctctcctcttgaggttagtttaaaaggttacttagggccaggcatggtggctcatgcctgtaatcccagcattttgggaggccgaggcggagttcagcctccactttgggtggatcatgaggtcaggagttcgagaccagcctggccaacatggtgcaacaccgtctctactaaaaatacaaaaaattagctgggtgtggtggcacgcacctgtaatctcagttactcagaaggctgaggcaggagaatcacttgaacccaggaggcggaggctgcagtgagccgagatcacgccattgtactccagcctgggtgacagagcaagactgtctcgagggaaaagaaaaaagaggttatggctgggcgtagtggctcacgcctgtaattccagcactttgggaggccaaggtgggcacatcacgaggtcaggagatcgagactatactggctaacatggtgaaaccccgtctgtactaaaaaataaaaaa

SEQ ID NO: 124319 - DNA, 1053 bp, Homo sapiens
aggtcaaggctacagtgagcttgatcgtgcctctgcactccagcctgggcagcagagggagaccctgtctcaggggaaaacaaaaaagaaaaatctgaatgtaagagacaagttataacactaaatgacagcagaattattgagaaatttgttcctacttaaggtgatatatttgagaagtaaaaggttcgtttgaatgatacacatcctggcataataaagcccctttcctgtggtcgccctttatagtgagacagaaaagcctgttagagcctcccaaaaggagcatgtttgggaatgggaagggatagaaaaactacaactgctcttgttcattcagagccatccctagacctgggccttgaccccacgcacccctccttccctgtctgcactccctgcacagtgtgatccacaggaatcccaaagctcttcaggcccttctaatacttcccttctgtttctctaggtatttctgggaaaagccagcttctgtttgcactggtcttcacaactcgttacctggatctttttacttcatttatttcattgtataacacatctatgaaggtatggtatgccatccacaggaatgtatttcatctacagtgcacaggtctatggacacttaatttatgtcagctgtgtatttttaattaaaatgctccaaaaataatgtcttaatatgctgttcttgactttaaaactttcagaccaccttgtatatataactgggactaaacgagctatcagtaagcatacatttttggtttcaaaacagtagttaattaaaatactttgaagttagaacttttttattttaggttccttaagtatgataaatctaaagctcttgataactctgtaagtaagagcggtaactattatattttcaagccgtgggaaattacagagtccccagagaaatccagcaagttggtacataacaaggaacgaaagcaggactcctagttgcagtgtctcatttcgctgctgtgtgaggaactgtctataggcttctatcttttttctttgccactgagtcagttttac

SEQ ID NO: 124320 - DNA, 1045 bp, Homo sapiens
cctctgcctcccgggttcaagcgattctcctcagcctcctgattagctgggactacaggcgcttgccaccacgctcggctaatttttgtatttttagtagagacagagtttcaccatgttggccaggctggtctcggtctcctgacctcatgatccgcccgcttcggcctcacaaagtgctgggattacaggcgtaagccactgcgcctggccgtttgttttttactattcactgttttcatttgagagattcaggagcatataaggaaaatatgaaatacttcagctaaaatgctaacgaaggaagtgaaatagatgagttaacttcgtgtgtgtgtgtttgccaagtattcccgggacattattaaattgttcttgttctcagacttaggatgatttctgtcctggtttgtgtgttttcctgattttaagtaaatcacccagatcatttattcagaattaaatgctaactttgacaagctgctttatttttccatactaaattataaaagttgtttagagtcttttgaaagagtaagaatttgatatgagtttctcaaatgactggaataggagaaacgtgcatccagattgtgtttctcattttgaaaatactcataccaaggttcatttttaggattttagcactgattttgaaaatgctgttttagtctcggaaccatggtgctttttaccccataaggatcagggatgaggctgactcgtgtggaagctggagattctgtgttcctcataggcagattccagaacagctgcctttaaggaccgttttaaagtgggggcagtgagttgatcatgtttgaggctgcattctcttgtggctgtatctgctgttgtcattacagaagggtgtcaacatggaatgtgagtttctcctattctgaattatcattgcagctcgatccacggtatgctcaagttgtcactttatttttgtcctaaacactgacctacataacctcggaagaacaagcggtggttttagatgaagggcttcctattcaaattttcctgtaggccaatg

SEQ ID NO: 124321 - DNA, 1138 bp, Homo sapiens
ttaaaaaatttttgtagagacggggggtggaggaactctcattaggttgcccaggctggtctcgaactcctaggctcaaaggatcctcctgtttcggcctctcaaactgctagaatttcaggcatgagccaccgcacccggccttctcttacactttttcatacaataggcctgtagagctcttttgatatgtgggaggaaagaaaagatccccagggagtgttatttcaaaaaagtaaaggaaactgctggcacccgaggagaagccggaaacccggcagggaaaatttggcagagtccggggtcttcttgcaagggagtccctgcgagctgacctgctgagcctgcgctggggcgcgccccctttaaggggcggggcctggccccgctctcccagggtgccccgcgcgcgcgcgcgccggcagttcggccacgtccctggccacgtcgcgggcgatctcgccatcttcgccgcttcctctcaggggccgccgcctcctgagccgcccagccccggggccgccgcgctgcgccgaccgccaccgccgccgccgccatgaacattttccggctgactggggacctgtcccacctggcggccatcgtcatcctgctgctgaagatctggaagacgcgctcctgcgccggtgagcggcgggggaaggcccggagaggctcgggcgtgggggccgggtctcgccgaggacccgccgacctcggccaccccacggctcgcggggcctgcgccggcccgacacaccccctcggccggcctaacgggtgcccggacccggggggcagcggcctgcgggccctcggggtgggctccgggccgggtgtcgcagcgcgggaccccgctctgcagtcggtccccgcgtgaacttgagctgtcggagcgcacccggctgcgcggggccctgctgtgtctgaaaagttggcgtgggacggggggtccgacaggcgtggcccctctctgggcttgaatgggggcgcttctccggccgggatctcccgtgggggtcccggggttgcaggaaacccgcgaatcaatgggacgggcgggaggaggatgggcaggatcgtggccggctgcgcctgacgtggcagcccagccagctcgggaggtggggcgggcgcc

SEQ ID NO: 124322 - DNA, 1087 bp, Homo sapiens
acctgggccaatgcccagtgatctgggtgtggatgctggaacctgggattgaacccaggctggggaaggagcggccttcacattgacattccccgacccatcccctctgctcacctctctttccctgaagacactgacaggtgccttcgtcagaatcagactagaaatggagttggcgtgaaaggaaagaccagtagaaagaattcccctctttattctctgctaaatcacttcttcacccatatagggaaacaaaacttactatcacccagattgccagctgtatgtggagtgtctgatttgtttgggagtggaggaagtgagaaatgaaattgagtctttctctttccttttgtttcagatattttcctgtataattccagaatgtcttcagagagccgtgcatggattgcttcattaccttttccatacgaggtatttctctttcagagtttaaatattctcctcttttctgctttgattattaattgttgagatcctctagcttcaggaagctccttgtggtttccagcatggtgagggaaagaaggccggaaagaatcacgagtcctgagttgggagcctctactcgtagttaatctgccttttgagatggaggttttaacttgcctacttttaaaaagcgatatttacagattgtgaatttctgttaaatacatgcaaaatgtttcacatagttttctatgtaattcttactattatctcaagcccaaaggaagtggttggccgttggttactttctttagtatcatacaatttcttcaagaagaaacccccatgaacaagccatgcctgttttctttcagaaaccacaccttcattgtcctgcacctggtcttgcaagggatggtttatactgagtacacctgggaagtatttggctactgtcaggagctggagttgtccttgcattaccttcttctgccctatctgctgctaggtgtaaacctgttttttttcaccctgacttgtggaaccaatcctggtaagttgaggctcttagcatacagcatggtgacagctccactgtcttactaatagtgctgcaaacaaggagaggcccccc

SEQ ID NO: 124323 - DNA, 1050 bp, Homo sapiens
gtgacgtgatcatagctcactgcagcgttgacctcctgtgctcaagtgatcctcccgcctagcctctgagtagctgggaccatgggtgcatgccgccaccacctcagatttgtcttgtagtcagattgcaagtgctcaatacccacatttggctggttgctcctgtactggacaccacagttccaaaagcttagtttggaactaagcagctgccattttcctctgatgacacatccagtggacagattatgaaaatctcagcaggtgtgcggtgtccttgtctcgtcaagcaccatcccagcacgtgcccccttgtttctgtgcaggtgtgtgtaactggtgtgtgcaccgtttcgaccatcactgtgtttgggtgaacaactgcatcggggcctggaacatcaggtacttcctcatctacgtcttgaccttgacggcctcggctgccaccgtcgccattgtgagcaccacttttctggtccacttggtggtgatgtcagatttataccaggagacttacatcgatgaccttggacacctccatgttatggacacggtctttcttattcaggtaattatgctgtaggtttctgacttcaagtttcagaatcgcaaaaaagacatttatttttccagtaaaagcatgaagttaggtggggtgtggtggctcacgcctataatcccagcacttttggaggccgaggtgggaggatcgcatgaggctaggagttcaggaccagcctgggcaacacccaaatgtccatcaactgatgattgaataactggtctcctgtagagaccttgtctctacaaaaaatacaaaaatgagccagggccgggtgcagtggctcatgcctgtaatcctagcactttgagaagctaagacaagcagattgcctgagctcaggagcttgagaccagcctgggcaacatggtgaaaccccatctctactaaaatacaaaaaaattagctgggtgtggtggcacatgcccattgttctagctacttgggaggctgaggcacaaaaattgcttgaacccgggagggag

SEQ ID NO: 124324 - DNA, 1038 bp, Homo sapiens
agcagccagatcactgacaggactctgagctgctccctgaaggccaccattgctgtcactgccccatacaggagacactgagcaccgggaggacacgtactcagggaaggggtgacgtgtggcagtgtgggatagaaaaaccgtggaattttatctaaattaacatgcaggaggcaatttctccaaagcatgttggagttccagggaattgtagacttaagtatttctgcagcctctcccttgctccagggtcctgggcactgggatgtgacagtgactgagatgagactcccagtccccctggtgtggatgttctaggaaaggggacagaaaatagctaagccaggaggcgtgatccagaccatcaggtgggcagtgccatgggccttggggtcaggcttccctctctccacttcccgcccctgtcctcgaggccaagagtgctcctgacctaatggtctttgtttgcagatgacctcattccacctatggacttgcttgaaatgattgtcacctggatttttgaggacccaaggttgattctcatcacttttttaaatactccgattgcggccaatctgccaataggattcttagagctcaccccgctcgttggattgatccgctggtgcgtgaaggcacccctggcttataaaaggaaaaagaagccccccttatccaatggccatgtcagcaacaaggtcacaaaggacccgggcgtggggatggacagagactcccacctcttgtactcaaaactccacctcagcgtcctgcaagtgctcatgacgctgcagctgcacctgaccgagaagaatctgtatgggcgcctggggctgatcctcttcgaccacatggtcccgctggtagaggagatcaacaggttggcggatgaactgaaccccctcaacgcctcccaggagattgagctctcgctggaccggctggcgcaggctctgcaggtggccatggcctcaggagctctgctgtgcacgagaggtgggtgcctccctggcccaggcctcctggtgcggggac

SEQ ID NO: 124325 - DNA, 1048 bp, Homo sapiens
agcgaagcctttcctgcccggccgggagccgggtgcgaacctgctgtcgccctgggcgttccccgccgcagtggccccgccggccgggaggccggagaccacgtgcgacgtgtgcggcaaggtcttcccgcaccgctcgcggctggccaagcaccagcgctaccacgcggccgtcaagcccttcggctgcgaggagtgcggcaagggcttcgtgtaccgctcgcacttggccatccaccagcgcacgcacaccggcgagaagcccttcccgtgcccggactgcggcaagcgcttcgtctacaagtcgcacctggttacgcaccgacgcatccatactggcgagcggccctaccgctgcgccttctgcggcgcgggcttcgggcgccgctcctacctggtcacgcaccagcgcacgcacaccggcgagcgaccctacccgtgttcgcactgcggccgcagcttcagccagagctcggcgctggcacggcaccaggcggtgcacacggccgaccgcccgcactgctgtcccgactgcggccaggccttccgcctgcgcgccgacttccagcgccaccgacgcggcgggggctgcgcggaggcgggtggtgacggcccccggcgggagcccggcgagacggcggccgccgcggggcccgaggacacggaccctgggccagagggatctgaagttggcgaggcggacggagaggcggaggccgcggccgaggagagagaggaggcggcggtggcggcgcccacccccagcggcaaggtggaccccgcgccggaacggcgcttcctggagctgggcaacggcctgggggagggcgaaggcccctcctcccacccgctgggcttccacttccccgtgcaccccaagtcctggctgcacccggacagcttcccgatcctgggcctacccgacttccgagagcggctgccggtcgacgggcgcccgctcccggcgcccctggggggcccgctctccctggtggagggtaccgggctggcgtgcgaccctttcggcggcggcggggccgcgggcggc

SEQ ID NO: 124326 - DNA, 1092 bp, Homo sapiens
attttgggtcctggggctgtacaccttgccctggtactggagtaggtgagccctggatgagccacatggtgctggggcctctgaagaaagggctggggatgtgtttggaccaccacgaagggtacctggcccctcactctggcctctggaagcctggccaacatattcacaaaaagtaatgccccaagtcaggtgtttacactacatcaagtgtggggcagcgtgggggccaccaaggaatacggtgggcatgggcagcacggggccacactggcctggggccaactcctcatgggccatcctaggacccattctaatttcttaaaagagaaaatcttttaaaaaatgtttgcagaaacaagttggacctgaggccgcgcagagcctccccgacgggttcccaggagtggcgacagcatggagtccagtcagaagttcagtttgtccactctttattaaagccaggccctcctgctgacagctgcaggacagctgctggggcccaggagggacggagacagcagatcctggccatacagggctagagctgagattcccagagccccccaagcccaccttgcccttggccctttctgaggctcctgtcccgcagggagaggagaaacccagggccgaggtcattacccagcaccccaatgcctccctgggacccctgctctcctcaccaccccgccccgcaacctcaccaacctcacccagccaggctaactgaccgccaccacccaggccctcttcccacccaccaactaccgtgcctcctacccgcccccagccctggcagcctggctgctgcgctcagcccccaaggccatgtctacactaacgtggagggaactaggtctattagggaatgcagctgcaccaaaaatccgtttcctggccccattcacagtggccccaaaagcgtgaggggaatggggcttcacatgaactacaccccagctgcccgcccagtggcttccatgggcccagtccagagggtaggatgcccaccaggcaggggccttgcatagttgggtgcctggtttgtcactgagccacggctcaggtccacacccccccgaggtggac

SEQ ID NO: 124327 - DNA, 1031 bp, Homo sapiens
ttaaactcatgtaagcagttcccaaagaacataggacttatgtttggggagagggttgtttttattacagtacattacaggaattgtatgttcacttcgaatcatgtttgaaaaaacgttgtatccttattttgtaattcatatagtaagagtattctaaacagcactacattaatatcatttgataggtataaagtatactttttcttgcactcttctctaggatttaatgcattgatcattcttaatgaacaatatcagctctaaaggaccaatgcttttataatgttttcaactgtatctgagtcagccagagagataaatatccatgtataaaatagatagaaaactttgcttggtaatttaaaattaataatgccagttttccaagagtgagaaaatcattgcactctatacagttttaagatatacttaaaatattcccatttgtatctatttttttttctactgttttttatttggacacttacataacagtgcagagcacaatgctgtgtaacataggaattcactgtgttttcatttgatgtcgtactggttttaaaccttgtgctctactccttcctgttaatgaattaagaacacattctaacaagggtctgtggcagacattgccgagtgactttctaacataggaattcactgtgttttcatttgatgtcgtactggttttaaaccttgtgctctactccttcctgttaatgaattaagaacacattctaacaagggtctgtggcagacattgccgagtgactttcttagtcactcccttactctgctggcggagtttggttatccatttatcctcaaaaggaagtgagataaatcctgattagttttaaccagtgacactccccttctcgttgccagcagttgatttacagtggtcacagggcccaattctagacataaaacaaaggatatacctgacagactacttctggaaaaggttttctcaaaggcccaaggattcaagcaaagggaagtggaatcttgtggtgaacagtacc

SEQ ID NO: 124328 - DNA, 1048 bp, Homo sapiens
tctcactctgtcacccaggctggggtgcagtgacacaatctcggctcactgcaacctccacctcccgggttcaagcgattctcctgcctcagccttccaagtagttgggatcacaggtgcccaccaccacgcccggctaatttttgtatttttagtagagcagggtttcaccatcatggccaggctggtctcgaactcctgacctcaagtgatccgcccgcctcagcctcccaaagtgctgggattacaggcgtgagctaccacgcccggccagggatctgatttgtaaggtttgtacactaaatgctactcaggagtgggaaagcactcacactgagaattaagtgatggtagtatgtcagggtgggtctggcttaagcaaatggtcaggagattgaaagatgggaagaataattgctaagcttatcaagcatgtgttttgtgccagatgctgctctgagcactgcattaactgctgcaatcctacaaccaccttatgaggtaggtgccattatctccatttggcagatgaaggatactgactacagagaattgctaagtagcttgccctaggtcacctcaccagaattcatgctattaaatatactgttcaaataggaacaagtagaatttcatggtcagaatgagtttagcattaaatcatagcatcattagaatactgaagtttccagttgatctcatcgctatcctcacaagataagcctatagctctgtggactattttatatttcctgtaggatatatatatacattcctgggattcttcatccaagtgaaacagaattacagggcgaatgccctggttatagggctgttcctttaaacatgaggagatttagtttattctactatgtggaatgaggaaagaaggcaaaatagtttggaaggatgtagtctagtgaaaatgctaccacaaaaatcttagtatacagtgctaatgccttaaattgtaatctctctcaacttggtatgaagtgatgtggtataaagtacagctttacctccccctaaatgaatccctaattga

SEQ ID NO: 124329 - DNA, 1109 bp, Homo sapiens
tttgtttgtttgtttgtttttgagacaagtttcgctttgttgcccaggctggagtgcaatggtgccatcccagctcactgcaacctccgcctcccgggttcaagcgattctcctgcctcagcctcccgagtagctggggttacaggcgcccgccaccacgcccagctaatttttgtatttttactagacatggggtttcaccatgttggccaggctggtcaccagaattcctttttaaatcttgcatttaatgatggcagattatttcagtaggatccagtattcattcaccatgagaatctcatccactcagtcacaaggtagccatgtgtgagtttcaaatgtgcagatcggtccccctcctgatcattttccaatcccttctgaaggcttaaagggacagtctcccacaagatgtacttcttggaactttctgtgtaggttttgggcgggagatgaccgccttggcaggccagaccgctcataacgccatggcttgggttttccttccccagatctgcctccgctttcacagtcctccagatttttccaagagcagcagaaaatgaataaatccctggtgagtgtttctgttcatgtatttattctctactctgatttacaatacaccttaggaggagattaagggttcaaagtttaaaatgggaaagtagaaatagatacaagatttggtcagacagaacagtagccatcagcaccaagcctttttatcatattcatatgcgcagatagcgtgatccttaaagagttcttgaagtcagagtacaagcgtcttatgttcttggcatttatcacaaaaaatgataaataccatccattccttgacttacattgaccgtaagcagaatcacttttgtttttgcatgaattttaaagattcctctgagatcattatcaacagctttcctaaataataacccttgaaccattgcaattcttgcctttctttttttttttttttttttttttttttttttgagaccaagtattgcgctctgtcaccaggctggagtgcagtggcgctatctcagctcagtgcaacctccacctcccaggttcaagtgattctcctgcctcagcctctggag

SEQ ID NO: 124330 - DNA, 1349 bp, Homo sapiens
agaaaatatttcggtacattgtcttaaaaaataaaccttttatcttatacagttgttaaaatgaatgacattgtgttatggataaaataagtgaaggggtaaattaaagtgcagactaaccgataagcatgatctctgatgtaaattaaaagctgaacatacatatgtgatgatataggcattacccaacgatacgaaagcagttacttttggggagagatagtggtagagatggtaaagaaaatttactcttttctgtctatgattttctttcatttgtttaggtttgttccttttgttttctttacattttctgatgtttaaaaaaatacccagtataccttattaacaataaaaagtaacctttgtcaaaagcacaaagattttccctatcagcacatgtagatcattgtttttaacagctactactattctatgctatggctctatcttttttttaaaaaactggttcctcatcaacagacagacgtcttatggttatggctgtcgagcatcttggctgacttctatgattatatctgtaaaataagtttctgatcatgaagtgatatatcaaggcataattagttaaaaatttaaaaagatgttgtgaaatgcccttccaaaagacagtaaaagtatgtattatgagaaagaatacaggactaccagttttcttgtatctgtgtcaataacagctgttaataaactttaaaagttttgccaatatgttaggttaaaaataatatctcttcatttgatttacctttgtgagtgaaatttgaacatcgttgaccattttttactgtgaatcttttattttctttatctgtttttgtatttggttaactatcttttttattatttatgatactttttggttctttttgctgtacattaaaaaaatatatttcataaagaaatatgccctttaaccagcgacttcattgccagaagtttatccaatgaataaactcatagtgttttaatagtcacagcttctgagtgtgggagagatctcaattcgtaatatcaaaatgcaaaaatatattttcttccagttttgttttaattccattttctaaaatactgaaatcttagaaacatttgaaattgttactagaaagtaaggatccagctggttttgtttttttttccccaaaagattaattaattcaataccatttcttcaataagccacctttttcttgatttgaaatgctgtttattatgtattaaatttccacatgaatttttgttttccatagagtctttatttcaacctgatgaagtccctttataagattcatctggtagagaccaccagggacacatctgtaggctgacaa

SEQ ID NO: 124331 - DNA, 1042 bp, Homo sapiens
aaaacttcagaaataaacagttcataagttttaaattacatgctttctgagtagcatgatgaaatcttgtttcaacctgcttgggacatgaattatccctttgtccatcatatgcacgttgtatatgttactcacccgatagtcacttagcagctgtcttgattattaggttgactctcgtggtattgcagtgcttgtgttcagttcaataaagttaaggttcaataaagttaaaataaaggttcaataaagttaacctttattttacgtaatgaccctagggcacaagaatagtgatgatggcatattgtcatgattttttttattatttaatatcttattgtgcctaatttacaaattagactttctcataggtgtgtatatttaggaaaaaacatagtacgtgtaaggttcagtactatctgcggtttcaggcatccactggggttctgggaacatattccctgtggataaagggggactactatagtgaatttctattttcccttgtatatgcagtttcttttgaatgcctcagtccttgatgtttggctcctaaaaaaaaaggaaaaggacaaaaatgaagagggttggggagagcaccagcctttaagttccttggcagttacctcagctagagggggaggggcttgcatcagtgggtggaggtacaaccacaatggctgccagcccctgcacctatatcttcgtgatcagaagtagcagtcaacagtcagaacacccattcctgatatttggaggacggggtccttattgcccaccctaactcccacagctacatataagctgctccacaaacacgtgcacagttgcctgcctgtgggagtgagggtggggtggggtcggtagctgctgctgagcaaataactgaaattgactgaaatcagccacagtttaccttactgtccaggactttttcttgaagtttgaagttttcagtatactttgagagcttcataatagttgtatgagatagattctaccagcgtaagtgttctctgggtatacagactcattcttg

SEQ ID NO: 124332 - DNA, 1059 bp, Homo sapiens
gagttaacagcaaagaaagaaaaacaacacgacaggaagccctggatccacaaaggatcctggtgggaagaataggaaattctgtgtgcaatactgacatactcatccataccccaccccaactgtgactgtcctactaattaatctggttttatggattttccataatgtgctgttttagcagcaaatagaggggtaaactcatagataatagctaaatactgttagaaattaactttccgttatagctaaatgttaccagaatttttactccggttatgtatacagctttgattttataacatcctgctaatttttgttcttacagaaatacactttcgggaaatggcctctaaatcctggctgaattttttaaccttcctctgtggatcagcaataggatttcttttatgttctcagctatttagtattttgttgggagaaaaggttgacacccagcctaatgttcttcataatgatcctcatgcaaggcattcagatgataatggacagaatcatctagaaggacaaatgaacttcaatgcagattctagccaacataaaggtatggtttactttattaagcagtaaacataagcagtattttagtctaaattttgtcatattcctgtctgtatctgttaattaaaatgggctatatattccagatattaaaaataattcttggtttgcctcaagagaagggaattgctaaaactcagatttatttagggaataagatattaattttgaattcgtttttaagtagaaatagttcagaacccatgatttggggaagggcataactattcagatttgatttgtttctgaaaatgtttttctaggttcagttttgttatatgtgtgtctttggtttttgttacttgttttggtcatagcttttgcttaagtcttgttttcctagagaaacttgaggtgtatgtaagtttcgatttatatttttataattagttaatagaactaatcttttttttcctcaagaggcacaaagaacaaggaagttaaaaaccaaggatgcgttctaaagacttcattttc

SEQ ID NO: 124333 - DNA, 1383 bp, Homo sapiens
gctcttcagaaactcgttcagagcagtgagaaatttctgtcagtaatctattaaaaactggctgctttcttttatgaagtgccaagcagagactatttaaggcagcatttagcatgcctatgaagcaccaggagaacttattaaaatgctgattctgagtcagtaggtctgggcctaagattatgcatttctaacaggctcccaggtgatgctgctgcttttaatcagtaaactacagtttgagacgaatttagattataatgtcaactcttactagctccagtgatgtcctagataacactgacatgaaaccaataaatcagagtgtcagttcacattaggatgagtttgctttcctttggctaaatcactaatagagggataaatagggactttgaaattaggacagtgctttcttcagtataatttattaatatttggattttacatctatgtaaataaccttttaaaatgttttgtttaatagatgagaacacagacattgctgaaaacctctatcagaaagttagaattctttgctgggttatgaccggccctcaaaacctagagaaaaaggccaaacacgtcaaagctacttgggcccagcgttgtaacaaagtgttgtttatgagttcagaagaaaataaagacttccctgctgtgggactgaaaaccaaagaaggcagagatcaactatactggaaaacaattaaagcttttcagtatgttcatgaacattatttagaagatgctgattggtttttgaaagcagatgatgacacgtatgtcatactagacaatttgaggtggcttctttcaaaatacgaccctgaagaacccatttactttgggagaagatttaagccttatgtaaagcagggctacatgagtggaggagcaggatatgtactaagcaaagaagccttgaaaagatttgttgatgcatttaaaacagacaagtgtacacatagttcctccattgaagacttagcactggggagatgcatggaaattatgaatgtagaagcaggagattccagagataccattggaaaagaaacttttcatccctttgtgccagaacaccatttaattaaaggttatctacctagaacgttttggtactggaattacaactattatcctcctgtagaggtaagtttagaaattttattactatgtcaatacttggactgactgaattttgttgataaaaacatgttaatatgtgtatgtttctttagtaccaacaacaaggactcttccttagtctttttaaatagagtggcagtataacaaaatagatgagaacagggacatcagcaatcagcagtagtcacttagcaaatagctattgatgctgttatatgccaggcactgaga

SEQ ID NO: 124334 - DNA, 1933 bp, Homo sapiens
tgtactgtttgggttgatacatatatagatgaagtgtattgggttgtagacacctaatgggcaaggctttgtagtcattgaatgccctagaggtatgtttccgagtatgagccacacaaaaaattacagtgagaaaatgaggaagagaaagcagatgttggagaaggagatttctccttgtatagctgctcctttgatttgaagaaatctcagtaattttatccgctaaagagtgtgagagaatattgtttcatttaaaaatactttccacagtttcacttggtttcaccaatttcaattggttttaaatcattaggatgtctaagtaaactattgatttcttccacaggtctagtacattaggttcctctgctttaccttgccatctttaatgtttgtattcttttaaaattagctggtcctttataagtatgtaaatattgtagctagcaatgtgctgtttattaacaatacctgtttccactacttttttagggtcctggttgctgctctgatcttgcagtttcttttcactatgttgattctacaaccatgtatgagttagaatacctcgtttatcatcttcgtccatatggttatttatacagatatcaacctaccttacctgaacgtatactaaaggaaattagtcaagcaaacaaaaatgaagatacaaaagtgaagttaggaaatccttgaaagaaaatcatgaatgaacaaaggtaatatgtctagcactgcactgaaaaaggacttctgcatttctgacatagaacactggaatcccagtgaggaattctaagtgaacattccttatagaaacctttcacatgaatgactataaactgaagctttaaatgagctgtgaagtgtgttaaaatgtgttttgatacagtaatatataaatatgtctatatatatgaggaacttgtgttttttaaatggtggccaggtagaggaactagaaaagagattttgttgcctgttttctgaccatctgtgttattgtcactgagaaactaaaatagtaaatttactaaaactacactgcaccatgttagtaataaacagatctgccttaaagaaaagaaaattttagaaagaaatattgttgctcagtgttgttaatatagctcaagaattgagtttatatttgcagtatgctataaatgatacccccctaccacacccacacacacagtttttgtctaatgaaaatgttgctgtgattatttataattggtagtatttcttccagaagaagctaaaataagactggcacttaccctgaagtgcattaataaaaccacactttaaaattatcatgggccttgactatattatatacttgattctaattagtcatcttttacgcaatctctgttgtctcttttctaaatgtgtttagccactcttgaataccattctccactattaacattaatttactcaaaccgttcatagcattctgtaaacatgtattttacatatttgttcccaaatttgcccattgttcattatgggtaactaataataaatttaatgctgtttcaggatgcttttcttataacagtgccactctcaggaattactaagtgacattttaaattgatattttaaactctttccaactacatagttatggtttatttcattctcatcctgttgggatgagaacttgtttgtgcctttcataacttgtttaaagcagagttttaaaattagtttataggatctgaggtggctattagttacagtggcaagattatttagaaagcaagattttgatgagaattaaaaacaatagaaaatgtagagtgcttaaacaaaaatgttatattttgaaagagtagatacttaatttataaataacagtctgaaggttggtgctattttgggataattgttttgctaatggataattctaacaatg

SEQ ID NO: 124335 - DNA, 1257 bp, Homo sapiens
acccggctaagtaatttctatttattgtgccaaaacatgtcaaaatcatgacctctttgaatggtatatttgagaggatgttcatttcattggttaaccatggactactctgtccacgtagtgaaaacatgcaccagtttttacctattatcatggtagtatcatctgccaaaatttcaaggcattcattttattctttgaacaactcttcaccatggtgtggacatgaattttcatatgtgttacttgactagaagtataaatggtttactatagatatccaaaaaccttgagatttgctcataggaaatgaatattgtgatgaatcctgggctctagagtcagacttgcttgggtttaaattcttgctctaacacttactgtttttgtaaccttgagcaattttaatctctctgtgtctcaatttcctcatcttttaattagggatgataatactacctacctcacaggatttttatgaggattaaataaatgtaaggtttttagaacattgatagggagcaataaatagaagattgtattattattctgttaccttggagtgtaagtactgcatttaagtgaatgaaaaatttgctttgaccagatactgaaggaaataagtaatagctagtatttatccaatgccaactgtatgctaggtactgtgcttagataatctgtgtataatagtgttaatcctcaaaatttgggtgttatacccctattatagataaggaaactgaggctcagagacaaagtaactttgtcactgtcacaaagctagtaagtaacagaggtaggatttatattcaaaaccctgtgtgttcattggaaccgtatcaggcttggggctattcatgtagcattatttccatttttatgtatatgatatatgacgtctgatgcattggccagtaatagtcaaattaacccagccaaattgtcacagtgattcttaaactgtggttctcacacttgcccaggatgttgttaaatgcagatctgaagaccccaatctcagaaattcaaatttaagcatggggcccaagagtatgcattcttaccagataccttgggcagtgactgtcaaaagtctggtcccaacaaacagcattaacgtcacctgggaacttgttggaaatgcagcctctctcggggcctcatctcagatcagatctactaaatcagatactctaggggcaggggcaggggcaggggctagcagttgtgtttaagcaaactctgcaggtgtct

SEQ ID NO: 124336 - DNA, 1063 bp, Homo sapiens
aaagcaaaagaaaaataaaaaagcaattctccaagtacttcatagagcacataaaaccagatttcatgatgatgatgtattcactatcttttagattaagatctttgttatttggtaaatgatttcagtatggttttaaaacataaggcttttgatgtcttatgttctctaataatggtatgcttgtattttctagtgggaagttcatagataaagcagatttttgtcccagtttgctttcaaatataaatttcagagggctttttcttactgtaatgaggtatgaaaataaatcattgatcagctcttaatattttttgaatacagaattggatttgagcagtaaatttgctaactggttattttcacaattttcttgaatattaatttttcacttctttgagactgtcaaactatagttactaccaggttgatgcactgtacttgaaagaatcccttgattaaattacatctagcattttatttgccatttcaattttcagttcattagactataattctttgacagtttctgcctggtgtttattgcccttctttgtttgctttattactaacttccattttctagttactcttaaatgctgccttcacaaggttaatttggctgttaatagtgattagaatttttatcacttaattgataattttaagcctactaactagggttccctatgaaattgaaagtaaaagtctaagaataatgcctgctggctctcgagatacttgccctacttaaaaatctataatttaaaattaattctatgtctacaattattaaaggaagtaaagttatttgggttcttccactcacccttttctcaaaaacaacaacaaaaaacaaaactcattttatttttctactttatagtaggcctgacagaaacatagtgaagcaatctgggaggcaacctgtggtagattttatgctaaatgttaatgtaacctctgttgattttttaaaaatgtgtttatatataagatttgaaataaaaactttaatacaggctagaataaggaattttacaaattctctttagagcaa

SEQ ID NO: 124337 - DNA, 1034 bp, Homo sapiens
tcccatcctgctgtcaacctgatccagtgtgatgctgacctgagaccctgtggacttgacttttatccttggaaatgaacatttgtggaaggtgtttctgctatttgagcatcagcttttcccactgacccctgacttggtctgtccctcccatctctgccactaaaacagcctacagccgatccctctaattggcccctgattccctgtgagaaaggcttgacaacttccttggatgcatcctctgcccaggtgagtgaccccaccctcctggaatctgaccatctaatctaaagttgcctttgccctttctcccaggagtctgagaatgtcctcatacaaactggactcacagctggccctgatattctagaatttctaggcagacatgaaaattagattgaagctgtgaccttcatttcacacatataaaaagaatgtgtgaggacctatgactaatgaaagcagcctcatttcttcacagtcgttttccaaataccactaattgccctatgctttcaacgcaaacacagagtattactcaaactgccacagaaatgaatgagtagagagtaccacacctgggtcactagcacatcttgaatgacaaggtttctgttctgctctcttgacatcctacccttggaagtgacaagattggagtagacactggctcagggatcgtttcctccctatctgccctctacatgtatcctatcatctagatttccagcactttcttctttgctacctgaaagaatctaaccaataacatgagtaaaaagaaccagactcggtagaagcaaacatgactatcttgctctttacaaagccaaatggttgatagacttccctgtatgtgggagagagaaaggaaattctgacccaaataagttagaccttttctgtaggatgccagaagaagctgagattccaagcacatagtgttttggtttcgattttggaagaattaaagaagactcagttagtaattggaaggggacatgaggaaattgagaatagaaaaccacatg

SEQ ID NO: 124338 - DNA, 1010 bp, Homo sapiens
ctctcgggagcgccgcggccgcagcgaggggccggagatagcctagttgaaaggcccgggcgtctcggcggggagcgcgttccgcgctgtagggtaatcgcgccgggcggccggccgcctggccgggcctcagcgggagccaccgggggctgcgggcggccgtgggacctgcggagacctcctcggggcgcagggaacacgctacagccttcgccgcggcgggcttgtggggagcggcgtcccagcctttcccgggaggctcagccaggtgcctggagcgggagagtcggactcagattcctgctttacctagaatagcaacgtgccctgttcccgttgtaccctcttaaatactatacttcttaaacggcctgtctcccggtgagctctgttctcttctcatatgagtaatgaaaattaagaggatgaatgaaacctcacacatgttgtggactttgctgaataggttagcaaatgactgcaggccttttgtatattttaagggaaatttggatatgtgcagtgcatctcctcgaagatgctgatggtggaaatttcttgaaaccgctctcgtaatttgccacggtaagaaaagtaaaagacaacatcaaaaagcatgtggttggatcctttgtacactgagtagtattttaatgtgttggacttcactgtccagtagccacatgggattgagatgtgctataagtgtaaaatacacatcggatttcccagagttggtgccaaaaaaacgtaaaaatcctcaataatttttgcattgattacatattgaaaggataatgctgttgatatgttggctaaataaaatgtgtttttaaatttcattccacctaattttactttttaaatgtggctactagaaatttttaaatcatatggctcacactgtatttcttttggacagtgctgttgcaaatattctggtgaatgaacacagaatcagcatggctttcctttgctgagaaatcactgatgggaagtgagacttgtta

SEQ ID NO: 124339 - DNA, 1167 bp, Homo sapiens
tagtcacatttctagtgctcagtagctacatgtggctagtggctaccatattggacagcatgaacatgaaacatttctgtcattgcagaaagttttattgggcagtgctgctttaaactattgcttaggaatatgattcataagttttccccccttcaaagggataatacttattaatttgcttaccacactgaagttgttataactctgaagttaagctgaaggtactagtaacagtgcaattaagataattgatcatgggaaatatagccaggatgggattctcagattcctaccagctcattttattggaagtggttgttctttctccttttttttcaataaatattttcttgaattcatagcagatagagagaagaaatacaaatatattgaaaaagagggttcttgaatagagaattttctgactttctgaatagtttattcaacgtaagaattatattttgctgatattttaaaactttttatttttaaacattttcagtgaatggacctgagtggaccctttgatcacatcagtaaacatgagcggtaccaaacctgatattttatgggcaccacaccatgttgatagatttgttgtgtgtgactcagaactaagtctttatcatgtggaatctactgtgaattcagaactcaaagctggatctttacgtttatctgaagactctgcagctacattactgtcaataaattcagatacaccctatatgaaatgtgttgcctggtatcttaattatgatcctgaatgtctgctggcagttggacaagcaaatggtcgagttgtacttacaagccttggtcaagatcataactcaaagttcaaagatttgataggaaaagagtttgttccaaaacatgcacgacaatgtaatacccttgcctggaatccactggatagtaactggctagctgctggtttagataagcacagagctgacttttcagtgctaatatgggatatctgcagcaaatatactcctgatatagttcccatggaaaaagtgaaactttcagcaggtgaaactgaaacaacattattagtaacaaaaccactttatgagttaggacagaatgatgcttgtctgtctctttgttggcttccacgagaccagaaacttctccttgctggtatgcatcgtaacc

SEQ ID NO: 124340 - DNA, 1014 bp, Homo sapiens
gagtttggggtgggttgaagtcagggaagacctaaaggaagttattcttgatgatcttaaagttcccttccaactccagattttgtgattctgttacatactactatgatagacagcaaaaatttcgcagaataatgaggacaattatctttaaaataataaaccatctatagttcttttatggattaattatcaacataataaatgcctttttaaaatattttaaatgattatggatattgctttgaaatttgtaatagatgcagacttcttagttaaatatttatattttagtaaagtcttttgttttaaaatgttttccattaggaatgaaattgttcaaaatgtagttttgaagtacaaaatacatagtgaaacagattgctttagaaaaatcactttaaattttccagttaaatagatacatcgaaaagttgaccaatgaaatgaaagaggctggaaatttggaaggaattttgcttacaggccttactaaagatggagtggacttaatggagagttatgttgatagaactggagatgttcaaacagcaagttactgtatgttacaggtcagtgcagtttgacagcagcttttaaaaaagtaacaatattctatattttctttcctcagttgaaagtaaatatgcacttttgcttgcttaggatctttagaaggcatttagttttaacctaatcagttgatctactgaagacttgtgccttatcttactgtccctaagcctcttcattgagttatccagtttttcctttcagtctgagaagggccagtcttgactgcatctgaatttatgtaaagctcaaattgaatagagaaactctcttcagtttctccaattgttgacataactgcatcttctacaagaaagattggcttttcctgatctcaactatagtcttacttgaagtgctgaagtctagttataccacagctctcagctttcattttctctttttattatcattgggggtatttggggtaaccaatttatc

SEQ ID NO: 124341 - DNA, 1049 bp, Homo sapiens
gttgcagtggctcatgcctgtaatcccagctctttgagaggccagggtggaaggattacttgagcctgggagtttgagaccagcctgagcaaaatagtgagaccccatctctataaaaaatttttttggccggacatggtggctcacgcctgtaatcccaacactttgggtggccgaggctggcagatcacaaggtcagaagatcaagaccatcctggcaaacatcgtgaaacctcgtctctactaaaaatacaaaaaattagccgggcgtggtggcacacacctgtagtcccagctgcttgggaggctgaggcaggagaattgcttgaacccgggaggcagaggttgcagtgagccaagatcatgccactgcactccagcctgggcgacagagcaagactctgtcctaaatttaaaaaaaaaaaatgtttttaattaaaaaataataataaataagaaaatacatagagaaagtattagcctagaagtcaggtcccttgacttctagattttgatgctgcttctgctgtttgtcagttacctagtaaatttatatatatatatatatatatatatatatatatatatatatatatatatgaaggcaatacgtaatgttttaaatgtacattttagttttgatttaaattttaatcaaggatttttattttatacattgcatactgaccactcttttatgttactctggtcctaataaacagaaaataacaatttggaatatatacatatacacacacacacagtgttcgtttttgtttgtttgtttgttttgttttttgagacaggatctcactctgtcacccaggatagaatgcagtggcatgatctcggctcacggcaacctctgcctactgcctcctgcctcctgggctcaggtgatcctcccacctcagcctcccaagtagctgggaccatagggtttcaccctgttgccctggctggtcttgaactcctgaactcaagcgatccacctgcctcagcttcccaaagtgctgggattacaggcatgagccaccatgcccagccta

SEQ ID NO: 124342 - DNA, 1047 bp, Homo sapiens
tttcttctttgataggcttggagttatgggggataacacagattgcttctaaatagtttgggtttatctattagcatttagccaaagtatgaattttattttttactgtcactcatgttaacaaaggtggtgtgaacatgtcgtgattagatatcctatgtaaccttaaactataaaggtaatacttatgtaagaactaatttaaatgttttgtatgagttaaatgtttgaataacattatttaactttattcggggagaggatatgtttacagtttttacactgaatattctgtaatttaccatgcaattgaattactaatgaaatgttaaaagagcatatcatacctctgcctcagttctcttctaagtaagctttttatgtagtcacgcaattaagactgtcaagacatatttgaatttcattttgaatggtgccagtggccctgtgctcctggttgatacagcatttatacccagtttgtcttactagctaatttaaactctgagcacatccctgtcaccttcacaactataaatgaaatatcttgccatatatgtagaaagtaaaaggtatgtgtttcttaacttctccctaaacttcagcttggcagtagtttataatttgatgcttttgatgctttttttctctgggttttagtttctatatttttccaaatgccattttgaaaagttgcattatagatagatataagtaaacaggtgggcacagtggtgcacacctgtagtcccagctactcaggaggctgaggcaggaggatcacttgagcccaaaagtgtgcgtacagcctgggaaatatagggagaccctgtctcttaaaaaataaataaataaataaatgtatgtctgtctaatttggatttttaactgttatttgacctatttttttagggaccatgcagagtgccctgtgtcggcatgcacgtgtaaatgtatgcagttggatacaacagggaatctggtacctgcagagactgtccagccataaaatgttaccaccttaagagaacccttcaagtgtggagc

SEQ ID NO: 124343 - DNA, 1050 bp, Homo sapiens
ctgtttgagcaactattttattatgtgatttgcggatgaaccaagccctaagtaatacaggtactgaactggaaataatagtatttggattctatttaagttctgtcatttacttgctgtgtgattttgagcaggctacttaccatttcagcctcattttccttttgtgtgaaatgttaatgatatcatggtgtcttcattacattgttgcaggagatgaagcaaaaggaaactgtacacagatctgcactgacaaaagggagtacaaagaacttgtaattcttttgctgaccctgggcagttcagtgaaatgcttgggagaatgattctgaggtagcacttagtttagctggagagaatttggggatcactaatgatgtatgttgtaggcaaaggaatggtgtgcaccctgccagggccacatataggccttccctcaactcagactggaaggccgatctatgcttatatgatcagtccaccagaaagtctattcacacccactaaaagctgaagtgtttaaagtgtgcattaactagcagaacattattaaagagaattgctgccaaactctggttgtcagttaaatttgaaaaggattcacttcctacaaccggtatttccatcaaaaatgatatgtacttttatgactatacatacacacacatatttttaatgataagtattaaatacatgatattcaaggtttacactatagtgttactgatttaaaggagtaattgctctgaaaattttaagtattctaagtcaaataactaagctgtaaatttatggaacgacttatttttatttctggcatccatcatttcctgatgcaccagctgaaaatatgcttggcagcaccaaaggaaaactgtaacccctgaaatagcttgttgatggatggcttgaagaagttgataactgagataagcagccattgtccctgttgctgttgctatgttaggggttcttaacccatgttgagtttggagggctgcatgcagtggtctggaaacttctgacactacatgtaaaattttaggtttg

SEQ ID NO: 124344 - DNA, 1574 bp, Homo sapiens
aaaatgatagtttgtatgatagaatttaaaatatcagtatttactactgtcctgcaaagagcattttgacttcaagccttgcatgacattcactatatgaagagattacatttcgaaggagaagatgggaactctgctgcttattttctttctcatcttacgcatttcagatcattttgctggggcatagattctctatccagtgactgaggaagtaaattggatttttatctctaaagttttcttagaaagagctttacattttagtgacccttttttgttctatgtatttaaagagactgacaaatccctaatttattctaatctttatcgaattaaaatttgatggtattgaagtgttttctgatacatggagttctttctcaggagggaaaaaggtggttcaccagctgccaaacaaaagtcatgaagattttttagttaaaattttatctggctagtagctcagtttagccttgactaatcttgtattaaaatactcatgcaaatgtggaaggaaaaattttataactgttccaaaacttaggaatgacagtttaatgctagaaactgaggtgaagttagattgagaaaaaactaagcttctacacatagtacagtatgttgataactgcagttattaacagctattcctctttacccctggggttccattctgtaaatgaaacagagtacttcgccccctttttctgcactctcgcacacatatcaccatcttcccttactctggaaagcagctagtcagcaggtagagaagggactggtggtggtggtggtggagggtgatggggaggtatagtctagtcctcaccaggaaaataatgtgggcaggaatagagacaaaaattggtgctgctagtagtcatgaggagaattataacttttttcttgtactcctgcagaccacgtggtagaaataggaggagaaagacattccaagagagaagaatgacactgaatgaaagcccagagaaaataggcaaatggattgaatgctatgggcacccacctgcctctaagctggtggaaatttatattcatacagtctttgtggaagacaaattgtcaatatgtatcagaagctttaacaaggtagatcgattccctttgccttagaaattccacttttagtaatttatcatcaaaacacaagcaaatgcattttttgtttgtttgtttgtttgagatggagtcttgctgtgttgccaggctggagtgcagtagcgtgatctcagctcactgcaacctccacctcctgggttcaagtgattctcctgcctcagcctcccgagtagttgggactacaggcctgcgccaccatgcccagctaattttcgtatttttagtagagacggggttcaccatgttggtcaggatggtcttgatctcttgacctcgtgatctgcctgcctcggcttcccacagggctgggattacaggcatgagccaccgtgcctggccaaaatgtggcttttaaaatggtatatttcatgtgaacctttttgttatgtatattttatgtgtctaaaatagctgtaggaggaaaaacattt

SEQ ID NO: 124345 - DNA, 1098 bp, Homo sapiens
aattctgtacaaacaagagatggtaaatcagtgtactgtgtttaagtggtacactaacctttccatattcagagaagtacctccctgggtcttgaacattaaaggtgtttaataagtactcagtttgacttggacttgagcctttatttttgaagggaataaagtttcttcttccagtgtacctcagagggacttggtaagcatgaataaagccatctgtttgaaaatgtatgtcatttttggaaaagtgctacagaacctaaaatacagtcacaagtattatttcaaatgtatagttcagaagtagaatacttagaaattgcttgttaatcttaattgtaaatagctaaaaaaaatatagcttgcaataaaggacacaagagcattaaaatataaaagtcacaaactatacatctctgagaataaagggggaaatgggatgtaaaaaccctaggctggtggcactcacagttggtatacagcagaatgactttggctgcttgtcagaagcgaataaccctgggcctcttccccatcacttctgattttataggtttggagtgtgtcccaggcatctgtgtttttaatcatttccccccctaacttactctccccatctaaacttgagaaacacccagactactgtagtattatggtactatagactactgagtattagtacagtactatagtgctgactagtaagcttcctaattgccaaacaaaagaaaaattttcactgtcatcaaaagaaataaactttcttcatggtaattataaaaagactttttgagaaaaaaaagcatcttcaatagtgattttgtagaagaagccaatttgtttttttgtgtatttttatttaaacatttttattaaaacaaggggcattttactgaagaattaagagccttcagtgaaggctaagtgcaggtgtgctgccttctagtaatccagactaggtggttagtatgagttatgggttgaattctgtccccccaaaaaggtatatttaagacttcacccccagtacctatgaatgtgaccttattttgaaatataatctgtttgcagatggaatcaagttaagatgaggtcata

SEQ ID NO: 124346 - DNA, 1935 bp, Homo sapiens
agtagcacacgatacccagttggtatgtttgtcctttatttggatggaaactccagaatctctgggtagtcagctgaatgccaatttaaacctcagaaagacatcagtggtcttggtgtatagtttcaaagataccactaggctttaagtatgccctgaagcctgacattttgggtgcttcactgatgcatttcctttgctgatcttatttattggtttagtgagaatatcttcaatgacatgacagttgctatcttagaaagcaaggccaaacaatctaaacttcatattcctgattgaaggaattcctcctgcaattccgtacattataattgtggtcccttgttagaatagatgttgctcatgttttgaattaatatgatgacatgaaatgagtgatacacagaaaacattagcaatatatggtagttatgactttgccatctagtatgtcaccagacattgtacagaattatcccaggccagtttttaatactagccagtcatgtcaattgaagttagatattctcccaaaatattattttcagctctgtcactaaacttttctttatttataataatatatgactttttatagttgtgcgttgtatgggtctaaaatagtccatttgtattagtagctttgagctatcttgaatctagatagcatacaccaagacagatttcccacatatttttaaaattgattatagacttctgtcacacataatatgaacatctctctttagagaagaaaatatgagtgtaatttcaggttctttcagataatcatgagattttaatttccttggattttcaaaggaatgtaatctcttttcatttttttgttataaatagttaaggattaacagtgtgtgctttaattacaaggtatgtataaggttattctcccccccgcaaccaaccctttttttaaacttttgatgtttttgatcaatgtcattattatcaaagttctttcagagttactgcagggctataggcttaagttctttttgagatattgttcctagttttgtaatcgtaggagactttgttagctcatgacatctcagagctttgagccccctgtggtatgattttgggtgtgccaggtcaaattagactgttatatttaccctagtgtggacgtgaatcttctcttagttcccagaaattctttggttcctgtgccttggtgttgtagctaacctttatttattattaagatttttaaattttaattaaggtctttaggtttgaaaccttaagaatttcatgataataagaagcttaatacttttgaaattatcttttctatttaattaagctgtattttggtgcttttactttcagagctaaacctctctccctattcagtgttcacccaagtaaatttgaaagatgttattcttcattatattcaaaagtatataaattttactgtacatttgaagtttcatcataaatactcaagatcacaaggaattttgttaaaataaagcccttcgccatatcatgctgaaactaaatgcctatcctcaaaggcttttttgatctctcttgttttccattcttcccttaaaatagttacctatcatttccattaatttgcattaaccaccttatcatatcttgtggtctttaaaggaaaatgatatgctagctaactttatttttttcatacataaaacaatgtgtttaaccccaagtgtattaacaatgctttgcaatttcctgcaatgctcaggaaatatctaagactactataccaaaaagcagattgaatttgaattctatttttacatagtaaatataaaattgtattttatagtcctaaaattatatttaataaatatagtgtgaacagggtattattttagtagtttctgtcatgaaatacttatgcctcacaaaaccaatagtgtaaaaaaa

SEQ ID NO: 124347 - DNA, 1044 bp, Homo sapiens
acatggaaagacactcatcttattatttattgatcccaattgtttgcatttacttagtaagaattttgataccttttcttctagaatctcagctctccccccttgtgacatctgagaatgttgaccagttcctcttttgtattccatacacccctctcttctgtatcttttctttctattctgaacgttgcttcttatccgtctcctttgcaggcccttttccctcagtttccattcttgtgcttttttatacagtgggcgctcaataaatgtttgtttaattgaattgcattgcttttgaaagatcagttgcaggtttttcaggagactgattcataggcagttagggactaagggcgtgccagaattcagaaagtagaaacctatcctaaatacagttccttgtttcgggatgtattttttacacagtaggtcactcttccttggggaatatctgtactgttgatccgttcatcattgttcagcagtggcaacaccaggagaacaaattatttacattggctgtgtcatatgggtgtgtctaattcggagaactttcaaacaaaataatgaagcttccccagcttctaacttgggaagtatgaaaagttacttaaaaaaaaatcttgactcttgtttaagtacatcagtgactgattaagtcacaacacattttaatattttcattcgaggtttcttgctaacattcttaccaccactaccactaaccccaccccatgtgtgtaagttacttttcctttcatttttcgtgggtcttgtgtgttaaggcaaagtcaagaactttgctcttctgataacttaacattgattgtgtgactgctttgtgcaaattgctatgggatgcctcatggaaattacaaaggtttcgtttgcttctgcccttcaagagagacttgcttagtgggagaagtagatgcatatgcaactgctccagggcaggcgatgacaaggatcataatatagtgcagacagagacaggattccctgtcttagagtgatataaacatcactcgaagactgagt

SEQ ID NO: 124348 - DNA, 1019 bp, Homo sapiens
tttcatattctgacatgattttaaatgtaatgaacgagcattttacaaaacaattttgtatactttccttgatggaaaatattatgacacaaaggtatatgttaattttgttgtcaccaaacctagtaaaacattagaaaaagcatgtagtatcagcttctggatctccttggtcacataggattaagaggcaaggcaccctcaagtcatgtgtgactgactcatctctttcctcacatttaattatattcactaggagctgtcagagagtctcctacctgtcctctcctttacctttcctgtgccaggaccagagatcaggcccttatcttccctcattggatttactacagagtcttccgacaaaccttcttccttctgacttttgcctttctggtctattctttacacagcactagagttttctactttaaaaaagaaaagttatattattttcccacctctccctcaaaaatctactatgttatttgttccttaagaggcatttgccagtggacctgcaggtctggccaagcccctgctaggactgtgtctaccttgtacgttgtgctggaatcaacttgccatttcctaaacatgcgttgtaatcacacggctctctgtctgcttgctaaagattgagtgtggaataccttttttgtagcagctgctctggaggttagccctgcccttcatttccagcctagaatgtgactgtttgccctggagcctttccaggttctcccatcagaagttcattctctgcttgaagcacgttcatactatattgattttttacctctattaggtaaaaaattatatgttttggtttctctcttttgtatctttctctttcttttccctttttcgtttcttttctttcttttaacatgcgtgtttttcttctttgctctgggtgcccaaaaactgtgagccaacttcaaagtgtggaaaccacagtcatactgattcttaccttcagcatgttttggttcattttccttgtcccagactttcta

SEQ ID NO: 124349 - DNA, 1046 bp, Homo sapiens
agacatccttggatagacaattgacaactatgtagaaatgtgactggacaaaatggatatgatctaatattaataaactgagtggggaaacccagcaagacctgtttgttcacattcttctcgcctctctgtgcagcatttctttcttcaggatatgaggcaggaccctctctggaatgagggtcgtatagcccaacattcagagtagagtcctgccttgggccatgaaaagagggcaggagaaggtcagaaagagagagtttttttctgaggcctaaagcaccccgacattatataacaaatgctgtgggagttatgagccagaaactgtggacgaaaaccagtatatatgtatatcataatatcacacaggacatttaatcgatttcattgatctatatctctctgcttatgtcaataccacagtctcatgactaatattgcctaaaattttgaaatcagagagtgagtcctccaactttgttcgttttcaagattgttttggcaattctggattcctggcaattccatatggattttaggatccacttttttacaatgaaatcagttgggattctgataaggattgcattgattttgtagcgcaatttgaagagtattgccatcttaacaatactgtcttctgatacatgagcgtgggattttttttttccatttatttaggtcttaatttttttctattatcctttgtagttttcagggtatgagttttgtacttctttcattaaatttattcctaatcatgttattatttttgatagtattgtaaatgaaattatcttaatttcatatttggattgttcattccaagtatatagaaatacaactgatttttgtatattgatcttgtactctgcaacctgctgaacttatttgttccaatagtattttaatgaattccttaggattttctacatagaaaatcatatcatctgtacatagagatagttttccttcttccttcctaatttagataactattattattgtcatcgagatcttgcttaattgccctgactagaacc

SEQ ID NO: 124350 - DNA, 1035 bp, Homo sapiens
tcctccagattccatctgctttgtttgtttgttttgggagaaaacataagtatgatcattagaaaagaatctataaccctttctgaaagagaagataatctttggtctctagaaacaatagctttgcattttaaaaggcatgaagtgaaatgtccttatactctgttggatttgggaagcagcatgaaatagtggttaagcttatgactccagagttagacggtgtgacttctctgtacttcagtattccccatctgttaagtggagattaaaatagtacctacctcataaaggaaaaattaaattagactcaggtagagagcttaaaacagtgactggcaagtaagtgctcattcagtgtgaactgataacggtggtagtagaaataggcacactatcggaagcttaagaccgatttgatgtaaagttaatgaaacgaaaatcagtaacagctaatataatttatttattagtatgtatcagggctcgtattttaaaccaccttatttttaccctcaggagtgaaccataaattatttagtttcttcagagaattctgattatcaactcacctgcaaagagggcagaggagggaaaaacaaaagctctgttgggctgtaagcatagtttctatacacttaaaaacactttgggaaattatagctgttcacttttaggtcactttggcagttgaaaccatagcaatgatttctagaaggctaaaggaaaatctggtactgggttttaaaagttgactacctagaaactttggtgaaatacgtaatcatctgggtcctagagagctgtgtgatgttgcttcttcctctcagtcattccaggcttttctcttccctagttcggccatcagaaaaaccagcctgacccatggaaaagtcacatggtggccaggaaggaagtgtgtgaggttcttccctataacatccggttttccatttctgacagttagcagacggattatgctcacactttcacttcttgtaaccagtcatttccacctctagctaatggctttct

SEQ ID NO: 124351 - DNA, 1038 bp, Homo sapiens
ataacaagaaggccagtttgtgtttaaggggtctgtgggtggtcagtctgagttaaagtttaggattcattttaaagcctaacagagatttggatgaatgtaattctaaagtaaagtaaagagctgcgttcaaatctgggaatatttatatagcccacattgctcaatcattttgatgtattaatgccacatttaccgttattcaacctcaaagttcacaaggcctaaatgttttaaatgtatgtatttttagaccaacaaagaaaattcatccagtgtgactgtatcagaccctgagatggaaaataaggcaggccagactctggagaacagctcattaatggccgagctcctgagcgatgtgccgttcaccctggccccgcatgtgctggcagtacagggcaccatcactgaccttcccgaccacttactctcctatgatggcagcgaaaacttatcacggttttggtatgatttcactcttgaaaattcagtgctctgtgattcataacctttatgtctgtttgcaccttaacagctttaaaatatgttcgcctattttatctaacctgtttgatgttctttgccgtttcactgtttaaggtcctcagcaaggatcataaagcaaagaaaatagcattatgttcactactctatttttaagaaaaaggtacatttgtatacaaattgaacttaagttctacttcctttctcccatataataaatatacaaattaggctatgaaggttttaggaaaggactcgattccttcagatggtctctcaaaatataacacctcaaatttatcttagaagaactgtgaaaaagaattgtggcatttttcagtcactacagctccgaagtctgagcaagaagtgggtgtgaagtctcctctctggtttgtaggaagttgaattggtgttattcctgcatttttttcttccacagtgtttatgaatgaattcagaaaaaaagttgccagttagcttaatttcttcagatgcattgatgtggaaatttaaaacttgtcctaaaca

SEQ ID NO: 124352 - DNA, 1020 bp, Homo sapiens
gtttgtgctctaccggagattttcatggtaaatttctgaaaacttatttgtggaacgtgttcgtttttttccttccatttttaagtacacttaacagttcagttgagctgttcaaggatctcaagtttctttttttgttaggtgtcaaaggtaatggtgagctggtggatgctgtgggtttcccttagtgttttctgttttgctttggttttgtttatgtctagggacacagtgcatgatttagttgagccctgggggagaaaaggaagattagccaaaacagggacttaaagctcataagggagagtggaatagctaatattgttagataccgaactagagctacagatgctgctgctgcattgtggagggaacagatcatactgggtggaaaaatctctgcttggaagggaaacactgtcaaagtctgtacattgtttatgtggtatgtggaatttttttttttaatggagctttcttgatgaaggtgttagagttggagaaagtggttgtctgcattatgatacattgcagtcttggtgtttttgttttaatatttcagacccgtaattagcatgttgctaacgcacttgttttctgaccacttgatggtgaaccagtgtaggatgtagtgcagtgggatgagtacatgagcagcaagaaatacatcctgtaatctgtatgcattgggaggaatatgctcctgcactcctcccccaggtcaagccagctgctgcagaaactgacatcctccagcaaatcctgaatgaatgaatgaaaacaacgtgatcgccctaataatgaccacaactgaacacacatctttggctgtattttatagaaaaggccaccattttctaacagattaatgccatatgcaactcctttgcacattttctagaactgtatgaaatgagaagtaacagaacgaacagaaaacagttacataaattttttagtgatttcgcttcaacagtgcacaaattgagttttgggattttcttgtagggactaagaggc

SEQ ID NO: 124353 - DNA, 1020 bp, Homo sapiens
tcatgcatttcatctggagtgatgattataggagaaaatatggaagcttaaaaatgtttttatgattcttttaccaaaaaattatgaaaccactcaatttctaaataaattatatcattatctgcgtcttaagcattcttaatgtgaatatttgtagggctaaggctagagtaatagagaattgatattcagattgtttcacaaggctgaggaaaagctgaattctataaataggaatagtcaattttaatattattataatattaatttatacaacccaggaaaaaatgataatttcctttatttttgtagtatagttttaaataatttaaatggttaccataatagaaatacgtaaattgccaaataccttgctgtatatatagcagacatggagttttacaaattgaaactgttttgtttgtgctcatgcatcatcctctttttgcttgttttttttcttttgtatttttaaaacttcaaggtttgttatttacattcattcctgtacttctgccattagtaaaatgtcatcctccctcttgtttggttctgaagggtattgcagtggtgaatgacaggctgctgaatgaatcctcaggctccctgtgatgtgtttgtaatagacgtaaaatcataaagtattatgcaaatagttatttttttgtaatggtaatacataaagtctacctttgagataaatagagcaactcaaatgagaaaaagcaggatgttagtgttaaaattaatgatctttaagctaaaatcattagtaacaaccaaaagaaaatatagtaaagttgcttctttttgaaacctcacagaccagaacccatggatttaaacatagaacaaatacagttttactgtccaagatagtaagtaggaaatgcaaatctttgtgtgcgtgtgtgtgtgtgtgtgtgtgtgtgtgttttgtaaagatagatcattaggattaattataagttctaaaagatgtaaaaacagtcatatttagaatactctggatggagaata

SEQ ID NO: 124354 - DNA, 1048 bp, Homo sapiens
tttaactgtatgtaaagttctgtgtgtatatatcgaactggaaatcattttattaattacagtactttttacagaaggactgccgtgtacgtttctgtaaggacttaatgcaaattaggatttgtactttggggaaatgttgaaggataatggcgtccttgtgatttttgttttacttgtgataagtcagactacatgtgaataagaaaataagggagtaactgggctccacagcagtgagtggaatggaaataaatgacagtgttcaacaaatggctagtcggagagggttttccttagtctgaaattttaaaaaattctaaaagtctgttttattaaaatgttcacaggtagttaataatctgccaaagagtatagtctaatgacttagttcttcttaattttagtttggtcttttctccagaacttaacatttccagacaccactaagatagactttctggcagcccctgtcctagtctgtgtctggcactgctttttgtcttcagtatataatttattcttttattaagtgtctaagaagctaaatcactgacactctttttgtgctacatactgtttaattattttaacgagaggttgaaaatatctaacttctggtttctgccaaaagtaagtggaggaaagggaacacaagtactcatatattgatatagaaagcctagggaactgatggaaggcagatactacctgtatttccctctgctcttcatttggacccttgaaagtgaccataagttgactcatcatttggctattctggaagaatttttgtgcttattctgaaagacaaattataatggattagcagtaattctgaaaaatctaaggattttacttacgaacaaattgtggaaaagtatttcattgtagcatgaacaaacatggcagatacctttaagcagtgttgtttattccaagtgaatgttactaaggcacataccaagttcatgaatacctcagtgacttcccctatactatgctgtgtctctagttttaggtaggaaagaagaaaacatatatttgt

SEQ ID NO: 124355 - DNA, 2493 bp, Homo sapiens
actgtcagggggacagagcagtaagtaagcataattagactacaaatatggttagtgctgtagattatgattttgtgtatatttgtatatttctacaggctgattttaatttgttgttttcgtatatacttaaggacccagggaaatgtgtgtatgtatgtgtatgagagagggagggaaggaaggagggagagagagagggagaaagagaaagagagtaatagcatgcgcaccctaaagttcacattcctttttcagcaatcactggataatccctggctcctgacattttctccatacagagtagaggttcatgatcactttttcataatactttaggtaattttaatatactgagggatagtgacttaggatttgctcacttcgtataagataaaaccaatgatgggcacacatttacctgtgtaacaaacctgcacgtcctgcacatctatcctggaactttaagttaaaaaaaaaccagtgaacacccaactagacatattcctgaatgtcttccttgtgattcaggggaagtttactatttatagtgttatatttccttctcggaagcatttattcaatgctgaacaccttgactgaactgtttacctcagagttatttggtaaggtgtaagtttgttgtgtgtgggtttggagaaaaatcaatccgtttagatataaatcctttcttctgaatcatataatatagttttagaatggcaatcctgttatctgcagtttaattttcttaacaaatgtatcaattttctctgctggggttggctttataatttttgagtggaagattatgttggtatttaaattcaaacttgaaacaagcattgaaaagtataattactgcatttctattggctggaaatgagtatttttatagttggtacctgtgtatggcaagttaaaacagacatgatccttacacattctacaagtttacaaatctgaattttttaaagtatcattataactgtctttggatattttgctcatggtttttatcttcttcttgatcctgttactgtctgtataaaaagttttaaagtgtattcaatctctttttcacaaaatagaatatatcatactctcttagtacaggaattcgtattcaatttacatgctttgaaaaagtgacctagtgtggccaggcacagtggctcctgcctgtaatcccagcactctgggaggctgaggcaggcggatcatgaggtcaggagatgaagactatcctggctaacacggtgaaaccctgtctctactaaaaatacaaaaaattagccgggagcagggggaggggggggtggcaggcacctgtagtcccagctactcaggaggctgaggcaggagaatggcatgaacctgctaggcggcgcttgcagtgagccgagatcacaccactgcactccagcctgggcgacagagcgagactctgactcaaaaaagaaaaaaaagaaaaagtgacctagtgtatttttctgtgttactgagaataaaactaataaaattcaacaaattttactctatataattgcaagtttgagtcatgtgttttaaagattcatatgtaatatatgattagaagcatagttatgaaggtaagagtattgaatgatttaaatttacactcagagacttggtacagaaatggagttggtttcttcacttattggcatgatggttccagcctttatggttaagagatattcagacctagagtgtcattggattgagttcttacttcctactagcataatctttgactttttctcctcactcatttctcccatccttctggtcactatatcttgtcttaccttctcagaattatctactgaacatggtggggtttttttgcattctttccatgtcctaattattacttcttgcttggacttttggaattgtcacctcttaagtcttttcccatgccagttgtcttgcatctttaatgtaatcattatactgctataagtacagtctttctttaaaaacaaaacaaaaaaaccccacaaaaactgattttaatgaaagatttctgttggttccttggtgaattaggggtaaaagactcatctcactatcctccactgtgtaccttgtgttcctgccaaactgaactcactttctttgggtatatttttcctgtcaggaatacttgtgcctctaatatacatgatttttgcctgaaaaccctagccgttctttgcaaacagctttccaatatcatgcttctctgcaaaatattcctgacgtttccaggtaaagagaagtgtggctttctttgaatattcaaagcactgtatttacacctttacatcgtactgtcactatttaagacacttgtcatctcatctgaaatgtcagtttcttgagggcaggaattctggactgttcaggatctcattgcccaccaaatgtatttctctacttgaatgtttctatttcactctaacaaattgcctgacattttactac

SEQ ID NO: 124356 - DNA, 1037 bp, Homo sapiens
atgattgacagagtctcgctctgttgcccagactggagtgtaatggcataatcatagttcactgtaaccccagactcctgggctcaagcgatccttccacttgagcctcccgagtagctaggactacaggtgcatgccgccatgtctggctaatttattttttattttttattttttttagaaatggggttccactgtgttgttcaggctgttctggcctcaagttatccttccgctttggcctttaaaagagctggggttgcaggagtgagccaccattttattttttaaaatgcgtatctctgaaaagatatccttgaaactcactatctttgtatgaattagttcaattagattattttcctcatgatattaaattgagaacaacagtaccaagataatgggagtcttcttggagatgagatgggagtgacggacataatgctttttggggagagtaagtagtagtctttcagtaagatgatgtttggaatatgagaatatagtctttcatctccatatggccccaaatcccaaaacctagaactaaggcagcactggagtctctgttgataagagtttacagtttacaataaggtttttgtggttaagtctatgttaaaaggatccagaaagttcaactagtgttacgtgttttaatgctgatgagcagagttttttgttttgttttgttttgttttgttttttactatcaggtgtattgttattagtagatacttagtatcatcagtgtgaaattacataccaccttgctttgacaaatcttaagaactttcgaataagttatgggagtcctgaccatcctttaaggaaaacagtgcactcctctaaaagcctattcaaagaggtcacattgaggaattatatatgttttctagtctttttgaagtacttttttttaatgtcttcggagaatttcatttagaatactcttggagtgaatctgtcttttaggggtagatacgacttttgaaaataaccaaatgtcattaagaacctaatgtggagagtaaggt

SEQ ID NO: 124357 - DNA, 1050 bp, Homo sapiens
ttattttgcattgagcaaatcagtggtatccagacatatttcagtacagatttctatttatcatttgctttgcagcagtagattagcttggctggaaatcataccttactcaggttaaatagttactctttttcctaggcctttccccttcatctcttctacatttaaccatggatttaactcttcaccctattgctagacagttacgagctaatttgtagttattacataagcaaagtgtttaagtgtgtgaatcttttgtttataaattgtatgttaaaatatatttggattaggaattctacttttcagtttagatatcatgagaagggctattcacttgtctaggagactgttgtgttttctgtattatatttagctgttctttattcaaataggaaataagaatgcagataattttccaaggaaggatgttacttttcagaattagaggaattataggcatacacctatctaaatacattttacatggcataatttgattgtccttttgtagagattccataatattaatagccataatcagctttttcttggccttgaaaataattttagggatgctttgttctttactgacatgtccagtagttggtaaggtagtgtggaaggagcctggttattctctttgttctgtaagaggcccttctagatttaccccattgcaaggagaagatcttcctcaaggcttctatcttttctacatggctcttcttcaaccccctcagtccattatcccatcatttctcatggtaaatatctttctccataaaaggaactactatttcttaatgctttcctggttcttgctatagacttccataggatgcacttggaactttgtgagtgtcaggcttggagggagagaataggcaaaaacctattgatggttttagtgtgaatcctccaatttcagttactttctcctctagattgagcaggagctgatttctttactaggttacttagggagaaaacttacctctctaaggctagccaattcaatgacgttggaggaatattagaatttat

SEQ ID NO: 124358 - DNA, 1019 bp, Homo sapiens
tgaaattggcttcttctttatcatctgtctcatcagttctgtccttgtaatgttttatgctgctctactcttttgatttccattcttcatttagtgaggaagaggataagtttaatatggcaggcagtggaatttccaaatagaaataactagcaaaacttagaggtgtgggcctggacagttagagatctggacacagataattaattcagaaccatccttctagaggagttagattcacaaatatgataaaatgtaggtatagaaaataaaatttaaaaataattttaaaaagaaaaaaatttaaaaaaatgtacttatagagtatgaaagaagaaggtcaagtgatggaggacttagtttttggaagggtgcacacacacaagaaaaaaactaatatattcatctgaaagcagcaagaggaggagggagttaatatttattaactgtgtaccgtgtactgtttgttttataacctgtttcatttaattctcaaaagaccattgcaacattacacagatggaaaagcagtcactcagggaacttaaatgatttatttaggagcatagagctagaaagtgttggagccagatttctaacacaggctaatctgttaaccaatataagctccatttttattattactgaactgggattataggataatacaaacatacatatgtatgtatgtacctagtgctgtgacactgcactaaaaaatggtagctattctttttagattaccaaaccaacatatgaaatgaatgctatgtgctgacactatcgagagggaaacattatctagttttttttttgtttgtttgttttgttttttttgagacaggagtttctgtcttgttgcccaggctggagtgcaatggtgtgatctcagctcactgcaccctccgcctcccaggttcaagtgattctcctgcctcagcttcctgagtagctgggattacaggtgcctgccaccatgcccagccaagtttttgtatttagtagagatggggtttcac

SEQ ID NO: 124359 - DNA, 1096 bp, Homo sapiens
gttggaatgagattgacacttgtctgcttatttaaaacaactttcatatttcattggtttatagttaggatctttgttagttttgtagactagcagtccatacccccttttttgagcactctatgtaattgtaaagatagggatattaatgtgctggtcccttaaaatgtgtagttgttctcaggcagaagtattggtttgcacattgtctcagttaaagtcaatgtcacataatttgtcttttctctttctcactgccaacccacacagcccttcttcaggcatgagcagggctgccccactgtctgcctctgcttctatgttgtcaacccacagggtagcgtcggcttaaatattaacgtggtcggtagaataaaaatattctctcagtgcacagagaacttgtggtgactgaagaaaagaacactcattaatttgttgacttcaaaatgtgtgccctttggaaaactgctggaaggcccaaatcctgaattaaaatgctgattacaatatgcacgacattaaacagtcaagaaataaaaagagcttaatccagggatggctgactttataggacttggggacgataagctctagcaccctgctgcttgggggccggttcactccctgtggtaattctgttagacaagtaatggctaagccgtggtacaatgttatcaaaaagcagaccgctcgtgacaacagcaacgattctcaaagagccattgcccagaaaatcacccccattcagtgtcgtaatgacattggctttctcctactaaatagctaatataatggaaaaccaatatttgaccacagtttataaaactattttaagtaaaaaagttagtgacattttgagacacgtgaaagtggctctcaaactgccttatgaccacatgtggcaatctgacctcaattcgttaattataacatggagaaatctttgtgtttcccaaaattgggccaagaaaaatgaatagcagatacctgaacaaaaaagtggtgttacaaagcagaagacagttcaatgaattcaactcacctaagtctcataagttggccttacccaaaagatccctctccaggacaagac

SEQ ID NO: 124360 - DNA, 1036 bp, Homo sapiens
cttagaagggcacacttgtgaggagctgactggaacaagacagggcaaatgtccccagcattccctggctctctgcctgtgacctgagccccagctttgcactttctctggtttctggaccctatctggtcctttgtcaacactagatgctcttctagataggaaatcccctggcttttctctcactgagggagcttacctatgaaattgccctgggatacatgcatactaaggcatcatcatatgaaagtgttggattttggcactgtgttttctaccatgcagaatgtctgttttcttctctgtgaaacagagaacagcttcaagtacaggaaatgactgctccatctccatttcatgcccctttacaaagaaggtgcctcttgtcattttaaatactgagatgaacttttcaacatatgtggtgcatggttccctttctcatacattgagaaggaggttgaaatgtggatctgtatcattttctatggagatataatagcttgcaggaatgcagttaatctttgaactggccgacctaggaaaacaaaatggatggcctcgtttctattctctactccttttccacacacaaaaaaaatttagatgacagtcttatcgtaaaacaggcttatacttttattgtatttctaaatcgactttcagatatattttttgtcccacaggaaaagttgctgccaatattagcctttttaaattttaaagagtatatgtactagataaattttttgatgcagaatgaagacaagttctcactgaaggacagactgtagaatgtgatctgaatctagtaaaactggctattttatggtgaaccagtttaacccattcctggtgatggtaatagtgctagctatcattttagtgagcacctactatgaaccagatacaatgctaggtgttttatttatgttaattccatctcatgacaaccttcagtgacgtcaaggctgggattttccttgtcatgtaaaagatggaaggaaggttccggaaggttaaggggctgcccact

SEQ ID NO: 124361 - DNA, 1056 bp, Homo sapiens
aagaaactagcacatgggagactatgaggagaccatcctaactgaaagaaagctcatgtttgggggatggtagggagcaagatgggaaagttaggctaggatcccattttagaagatcttcaaaattggtcagagaggttgatattagaagtggaaagaaataaggaagttcttacaataaagaaatacgctggtccttctcaagaaataagattcttgaaaagaaggataacatgatgacgtgggtgttttaggaaaattactctgtgcagagagagaaacagagctggcagtttggaagtgtgacaccagtatccatctggtgtccatggcagacaccaaaatcaatcacaggtctgctctgccgagacacagcctgagaaccatcttcactggccctccagtcagccagtactaatcaatcagaattggccatgaaacctgattgcctcctatgtgtgtcagacaagtgaacgataggcaggagaaggacaggagaaacaaggtgaaggccccaggctcatgacttggattttagtagttctgagaatataagaaggataagtatcctgagatgtttattttgtatttataggtttgtattttaattagggccagaaatagagatctttttgtataaatcattattcagttctagaaatgttttgctttttctttcaggatcattgtcactggtatacagtttctaggcacttgctgtttaaaaaaaaaaacttaaatatttagttaaccttgaaaatagtaactccaacaaatgatgtgccaaaagaagactctcacccattttaatctacaaagatttggatgcacctgctctgtccactcgtgggagttaggttgtcagaatatgttaagccactatttttggttttttaagaaaaggttttgttttctgttattttttaaaactgggttttagattgcaaaatagcaaacaaaatttaaaacaaaatgaaatcgtctcatctctggtggaggtgggaggaacttctactttgtcagtgtgtgggctgcgaacagaacagaatgtttatc

SEQ ID NO: 124362 - DNA, 1125 bp, Homo sapiens
catttttttttctcatcaacattataacaaaatgacattattcaaggacctacttactgtgtactgcaaaccattgaacagttaggtgaattctatggtatttgaattatagctcagttaagcttgtgtgtgtgtgtgtgtgtgtgtgtgtgtgtgtgtgtgtgtgttccccttggctcaaaattctaatatttaataaacaagtccatgtgctcagtatcaattttgcttgtggttttataaaccttttcaaattactcccctgagcctttgaatttcctagctaaggagctctagtttttttagtgtaaccttatgtacatccatttatcaatcaacaagtacatatttagcacctgtcttgagctgcaacagccaaattgttttaggaataatagtaatagtaggaagagaggagcaattactacaggaattattaataataattttaaatagttggaactgcagccattccgttgggagaagcacaatagtgacttaactgtgattgtggtgacagggagccaacaattgagtccctgctaatgggccaacaggggaaggggttgaaaaggaggagtgagtggtttacattacaaaaggattgtctgagagctgctcaagtgtggttatgaggggaggtcaggctggagacagaaaggatgataaccgtggagctgtcaagggcatgtcaggggtttaggcaagcgctgtggcagctagacagggccggctgagagcagacatgccctggccctgcctagcgttgattgataaaaaggaaacacaatgagaagataattgagcaaaccaggaggcctggaccagtgttacaaaatttaaaagtgagtcttgggagccatcagaaccttggctgaaaatattcctggcttcactttgaccagagttggaccattttgtggaggaataaaactaccgaaaggcgagtgtgtgtgtgtgtgtgtgtgtgtgcgtgtgtgtgtgtgtgtgtgtgtgtacatgaataaaatgctgtaattggcagatggattgaaaagagtacatccttgacatctattgaactccttcctcctggctgcacatatactaaacacacacacacacacacacacgcacacgcacaca

SEQ ID NO: 124363 - DNA, 1002 bp, Homo sapiens
gtaataatatatctgttagggtataatgatgttatggtaatattaagaataaatgttcagaaaccaaccaaataaactgtacttttgttcttttgttacctctctagaatggttttcatctaggctttcaatgatgacatatcacattagaatctcaagctgatagataattatcaggttggttcaaaagtaattacgggtttttccattacttttagtgtcaaaaaccacaattacttttgcaccaacctaatatttttctttatgtggactcaaatatgatataatggaatcctgttacgatacaactcactattagatcgatataagtatgttgcatattgttttgtatgccacaaaacatgatggtgaaagccattaatacttaatgtatcacagtaaaatacaaggatattgtgtgacttcccaaccctcttgcaccagtatttttaatacatgtcctgtgtttataagatttgtattttatcaagtcatcttttaatatataaaattttattctgaatggcactctgtgttgataatggccattttgaaatttaagtaaatatttccacgattaatttattctgttgatttacctaagcaaatagcccctgaaatgccttttgggactctgactggaaagaaaacattgtctttagagagggttgccaagctctgttaatgaaaagcaagccatttgttttctttgcttcagggtgtattctgagtgtgttggtaattgtgccattgcagctgtatttcctgactgttagttttatgcttgatgaaggatgataattaatgtgttaaacactcggtgcatcctgtttggagggacaagttttttgctacagaattacagagatataactcatgccccaagaagcacaaagttttacttctactgaacctttctgtaagaaatagagttataattcttttacaaagttattttattataaagatgaattgagtcttcacttcatacttgaaaaatat

SEQ ID NO: 124364 - DNA, 1121 bp, Homo sapiens
agagaactgtgcccccagcagagtctttttctttctttctttctttctttttttttttttttttttttttttactgcatcaggattcaatacaatgagaatctactgcaatccaaaagcgcgaattgaaccttgaaccttgagatacatgttcctgggagatgaattgtggtgaacttgagtctaatgattggtcctgctcctttaaaatacttgtttgacattgctaaaggggagattgtacaagtcccataaactcagttacttttaattattatattcaaatatcctcacttgagaaggtgtcctcctttcctctcttacttctgaaatgtatcattttattctgagagtattatccaacataaaattgaatttttctgtaagactacagcaatattttctaattgaaaaagcagtattaaactcaatgatttttcatctcagtagggatacgtgcacagtgtctgattctcagtattggatctgcacatggagtgtttttctctctagtggttacagaggatgaatgcatattgagataaagaagtgattttggttccaaaaggattttaaggatgatgagagaacagtgggtacttcattgccaggtcatgtctttgcaagaagaaaacgaggcatgaactagctaaagttcaccttgaacttgccttgctctttatcgttcaagcaatttgtatgtgtttcatcaccttgcttgacaagacgttaaaacattcaaatgcatttcttttgctttaaaccatttttttgattctgagatgtgtataatgtcagtgcatacatacaagtaccaaaaaatgctttaagaccctggcccttaaaatgaaggttccaagaggaacccaagaaagtccactcaccttgtgctgcacctgacctggctccagacaggacacctggccaaagaatttgttcttcattatcctctcccagctggccgcccgcccattgattggcactagctggcatgttgcatggtgaatgcgttcacagtgagcactgttttgctctgtcaactataagcacttcaggggaaggagcttttatttcttatgtatcctcttttgtctagccaaatgttttgtacacagtgtgccc

SEQ ID NO: 124365 - DNA, 1040 bp, Homo sapiens
ctgggtgacagagcgagactccatctctaaataaataaatgaccatttcctacaacttggagaataagagaagatagatggggtaacagaaataaaactaagaaataaagggtacatttatttgagtgaagaaaattttaaaagggccttcaaaaccacaggagctcctcaagatatttatgtaatagaatataacttatctagggttgagaggaataataatcaagacgtttgtcacttaagtgcatctggaggcatatgaaattagactcttgatagtggcctatgcttggctatgtccttggtgttttaacctcaggcttcaggctggaaatgtgttttctagagcagacatggagcacaaaatattaaatgaactttgctgtattcaaaacgcccaacagtgtagcatcctccctgtttggcagggaaagggctcagcatttggaaactcagcagtgcattaagtattttaataatcattgttgacatacaaagcatatggcctttcagaatcattgggtcaagtgttgaagttgtcttctaggtttctaaaattaccttacaaaattcaaacaaaatgaaattagggtacatttcaaactacgctaattcatgagctttgtgttatagcaagtgaaataagttttctcctaagatataagagaatctatgagtaactgattatgttaacgtaaaggaaaaagcaaaattgacacccctgcagaaaaagttaattcgcatttcgttagaaaatctagaggttccatataagtaggccagccttacgaataccttatatttactttgtacctcctagtcatgcctaagacccacctcaaatatcccatcatttcagaagccttcattgtctgtttccttacagtttatatcagttgtctataaccacaataatgctgtgaaataagcaaccataacactcaatggcttaaaacaataagcatttctcattgcacacaaggctatggtaagcaggaccattctcgtctttgtgggctcacttgtgtctgtggtcagct

SEQ ID NO: 124366 - DNA, 1067 bp, Homo sapiens
ctgaagtggctttattcatatcagacaaaaacatacttcagcacaaggactattaccagaaataaggatatttattgaagataatagggtcaatttataaaaaggatataacaatcccaatgttgtctacaactgataatagaatataaaaatagaataagaacttaaaggaaaaatagacaagtctacaataatagttgaagatttcaacactcatctttcagtaattaatggaagaaatagacagaaatcaataaggatatagaagactgtcagctaccttgacttcattgacatttacagaatgttccattcaacatcacagtatatgttcttttcaagtgcacatgaaacattcaccaagatagactgtgtttaggtttataaaacaggtctgaataaatttttaaaaatcaaaattatgcaaagtaatctagttatgacagaattaaactagaaatcagtaacaaatatatatctgtaatatcccctgaataattggaaattcaacaatatttatccaaataacttgtggattaaagaagatgtcacgagggaaatcaggatatattttgaaataattgaaatcagaacacaacatatcaaaatgtgtgggatacagctaaagcaatgtttagagggaaattaaaaccattaattattagaaaataaggaagttctcaaatcaataatataaatttttatcttaagaaactaggaaaaaagaacaaattaaacctaagtacacagaagacagtaattaagagcaggggcaaatgaaaccataaacagaaaacaatagagaaatcaaaagctggccttttgaaaagatcaataacattgataacctatagtcagattggtcagaaacaaaagaaagaagacataaatcattaatacttagaattaaggaggacattactatagacagtacaggcactaaaagaataataaatattatgaacaactttaagccaacaaatttgataactcagtgaaatggacaaatccctttaaagacaagctaccaaaattcactcaaatagaaataaataacatggtagccc

SEQ ID NO: 124367 - DNA, 1020 bp, Homo sapiens
gagccagctgcccacctgcccctcggactgcaggctcggagctgggggttcagtgaggcctcagagctaccgctggttttatagttgagctcagctatggggtaaataggcttttgtggcctggcctgggaaccgaaccaccatttaaaaaaaagaagaagaaaaaacctgcctccatgggaaaatgtattctgcattcccaatagccagccaacaaatgttagaatgactgtgggggctgtcttctgtcttcatgcccctagcagagcgaggaggcgaaagaatccgcctgtgtgttctgggttctgggtccagctctagcactaaacccaacataggaccttagtaagccctttaacctctgtgtatcacatcatctgtaagacaataggattgtactaaatgagttataagcctccttctagtataatgaccccaattgatcaaagctctaccctcattttattcattcagaggcattttactcagggcacatgctttgtgcaggctctgggcttggtgggaatacagtcaaataatacagatcccagcactcacagggtgcagtgtttacttggggagacagatctttaagtgaatgttcataagtgctatgattgcaatgggcactgggttctgtaaaagctcaggagggtctgaatcagatgaagtctttgcagaggggttggctcgcgggctcactcccctgatttctattttaattgactcctctcccagggtatcaaatctggttcactgggaagcatagcttctgcatctaccatcctaacagtttggcatggtcccctggcctcatcaaggaaagtcttgccctcctctttgcgtcactgaaagatagaatacagggatgctcccaccaaaccatagtcttgattcctgtaagtactgccctgaatgcttgcttcttctctgccctagggagccatggccaaaaaaggttctctcttgctctccttggggccttccctgccctgaagagaggcaggattggcagcaact

SEQ ID NO: 124368 - DNA, 1063 bp, Homo sapiens
acctttgtgttcagggatttttttttcccctctgtggtctacttttagttggatggagtctttgaaaaaaaaattgtcttttgagcataattttgcgtttataaatggataggctaggaaattatatagtggtctgttaatttgtacctttcctactggatgtactttcacagcttttatattatttctgcttttagttcgacttcgtggtgagaaatatttaagtttaaataaatacatattcatgatgtgtttatgtcctgaaaagttttcagttacgtttgtgcaaaataagtaaatatatttacacacatccccaaaatgacagacatttaagcacatttctctcacatccttttctgtttcccaagctagaggctgatcctcagctgctaccattattcagtctccacatgcaggaggcctcttgtttctaataattctacttccaaagtgtctcttgaattggttccctcctctcatccccagtgctcttatctgagctaggatcttcctcaatttaaaggactataattggcacccctttccacactaatgctagtccaattctgtaacataaagtgatcatgtctttctcctggctaataactttctgtggcccttccttggacaattgacaagtccaaagttagtgtggccttctaggccctccacaggctggctctgacctacctcccccaaccccagcttccctctagaataatttccctcccgcctctcttccctgctgctgccacacacatacatgcacaccctgtgtttccagcctcattaaaatctgtgccattcaccccattcttaacacactctgacctttgcaggctctgtttctcccaccagaaattcccttctccctcttttgtgcctgtaaaactttgaggcatcatttaaagccacgtgaccctcagggagcctttgccgacttcccaaagcaaggctgttacccttttgcactgttcctgttgcactttatacatgcttcttagcctgccacttggtagatattcaataaatgtttatcaaatgagcaaataggtaaata

SEQ ID NO: 124369 - DNA, 1048 bp, Homo sapiens
ataataggaaaaggtggatggatttaaaggggcagggctgagctgtgtgcagttggaagttcctcctgacagcgtgattcaccccaagaccacgaggtattttatgagcaaagttacaacgtgtgatatatgtgctctttgaaggcagagtaaaagggtatgatttaaaagtagaagtcagcttcttgtagcagattacatcagctgaagttgtgagcttgctgcagagctttcgcagcctgaatgcccttgagagagtcctcctgtggtcaattaagtgtcttgtttttcttgaaagtcagaaatgggatggagggtaattattctaaatgggataaaagctgtgttaggtgtaagaaaatagtcctgaatcctctaaagagatagtatagaaatgtatacgtgggcatttataggagtctgagtcctcatagacaaggacaagcggaccagtgttttaatgagggccatttattaaacggctaatgaaatcctacagcatttgtctagtgtttcatcaccataattcaaaaggatagctaaaaggtattataggaaatgagtgatactcactggtatttgcaggtgcgtatctatttaaaatagtgttaggttttggagactgttcatgcactaatcatattatcaaaggatatgtggtgagaaggtttattaacaaatgttggtggcttactcggtgggaccttattagggccatcagtcagtggtgctccggtgtcctgattgtgaaggtttgggtctatggcacttggtcaaggactggtaaacagcagtattgatatgggggatgggtttcctgtgaacaaagacttgggttaattaatttgacagtatcattaattactgctgaaatcattggtttttgtcagaggtcaggctcttttagcaattgagggcaggtcccatgagagttggagacactaagtaatgcaagagtgtcactgctcaaccatctcaggctgtaggacgaaggcctttcctttctgcctgggccattcagctctctggattaaaccagtttctgctt

SEQ ID NO: 124370 - DNA, 1097 bp, Homo sapiens
ttggagagtgatctaaaatggcctagtcggagagatgctaatcacatacgctccattcctcctcaaagggccaaatgtagaaatgggcagtggtcatgccttggccatcctccatgaacacgggattggccccagcttcaaatgagcactcagcccaggctcaagaccacccccaacaacgcggatggaggtgcttgccagtggtccagttagtagcagtaaactaagggatgggtacatggataatcttctctggctgactaatcagttggaactacatgcatttcgattattattcagcaaatattgatggagcatcttctacattccaggtactgttctagactcacgagtctaagattggcagaatgtcaaggatttaaattgctcactggcttagttttgagagtgtggctttgtcctcttgtctaggttggccttacgaaatcctttgtgtcgatttcaccaagaagtggagacttttcggcatcgggccatctcagatacttggctgacggtgaaccgcatggaacagtgcaggacggaatatagaggagcactattatggatgaaggacgtgtctcaggagcttgatccagacctctacaagcaaatggagaagttcaggaaggtaggaggttttatgagggttagcagaaggggtacctgctggaaggtaatgaggtgtgatttgaatccctctggtgaagaagacataactcaaaagcaccaaggatgcaattaatcatcgctggtgtctttttatgtgacagaataccaattaatgtgatacataattctctaaaggataagatagaagagacagctggaaattgctgggatttcataactgcttttaattgaagtcagattttcttataatgtgcactttttgtaagattgtcacatttaaatgccttttcatgcataactaaaaatcaagattagatcaaatgaatctgggaggttagaacagactactggggaaatcttttaaaatcgctaatgcatattaaaattaatagaataataatgctcctttgttttgcgatatgttcagaagcagtggggtttagttgcagggttaactcatgcag

SEQ ID NO: 124371 - DNA, 1263 bp, Homo sapiens
aaaagtcatagtaaaggaaatagtcaacagagtgaaaagctaacctacagaatatgagaaaatatttgcaaaccatatattggataagggatcaatatctggaatatatagagaactcctgcaataactcctgcaaattaagttgggtcaataacaaaatgacccaatttaaaaatgggcaaaagacctgcatagacatttctccaaagaaaatatacaaatggcaaaaaaatatgaaaagatgcacaacatcactaatcagagaactgtaaaccaaaaccatgagatatcacctcacaatgcttcggatggctattatttttaaaaatggaaacaaacattaacaaggatgtggagaaagtgggacccttgcataccatcagtgggcttgaaatggtgcagctgctgtggaaaacaataggcagtttcctcaaaaaattaagtagagaactgtataatccagcagtccaaattctgtgtatttgtgcaaaagaattgaatacaggatctcagagagatacattaagacctcatttaatgtcattgatagttcttggaaactgcaactttaggcaaaacgacataagccatttttttcttatcaatattattatgaaacagtgttattctggacctgtgtatatcactttgcctatagttgcagcttccaagaacctgtcaatgaatttgacactgtatactgtgtttattgcagcattattcccaatagccaagatgtgaaagcaacctaaatatccattgacacatgaatggttaaagaaaatggtgtgtgtgtgtgtgtgtgtgtgtgtgtgtgtgtctgtcttcaacattgcatatacaatgcaatatcattcagccttaaaaaggaagtcctgtcatatactacaacacagatgaaccttaaatgcattatgctaagtgaaataagccaatcacaagaacacaaatactgagtgtttgcatttttatgaggtatctaaagtagtcaaattcatagaatcagaaactagaatagtggttgctgggggctgtgggaggggaaaatggggagttgttcaatgggtgtagaatttccatcatgcaagatgaaaaagttctagagatctgttgtacaacaaagtgtatattgttagcactactatactgtacacttttaaattaaaagaataaacttttttaccataataaaaatattaatcaaaaagtaccaactatcctaatagttcatggtgacattgaactcaagagaagaatatgata

SEQ ID NO: 124372 - DNA, 1051 bp, Homo sapiens
atccatttaaagttgtgtagtcactcaatcacccaggctggagtgcagtgaggggatcagagctcactgtagccttgtgtgcagttgtgtggaatgctcaggtaatcgtgtccacgtcaaaaatccaaaaggacaagctgtatgatatctcagaggtaggaaaaacacccattaaaaactcatcaaaatcgtgttactttaattaatacctagcttttgaaaagatggaaggctaattgaacttcccatcctccatgggaatgcccatttctcaaccacttgagaacaggatttgatgaatcaggattttaaaaataataattaatatggttaattatgcctggaggaattgttccagtttttttcactgcttctactgaaactattttaatatttatactcaaatacacttctctccataagaaattgtaaaaatcattattgacataagaggaagtgacagagacaaacatctaggaaaaatgatgaaaacatactttgcccaaaagaaatgcacagacatccaattatttttttaccttagtggctaaaacctctgacaaatcagtatttcccctgttcatcaggcaagtggaggaccccatgtgggagccctggctctgaagactattggctttgtgctctcaggccgtgttcctccctggatcacaagtcccatttcagaaggaaggggctttattcagttcttcctcatctctttctaggctctaaattatatgacttctgttttttctgaagttacacaccagagaaataaacccaaatacctgcatcacttcagatcatttgaaaagaaatagtcagtctaataaactgagtaggagacacacatttccacttctctgaagaaaagttcactacaattgagttctgtaaaattattgcatgatgtgtaagttttagtgtatggaagaacaaaatattgaagactggtcatatttccagatgaaactgatctctgaaataacaggaaaatggaatgaggaagaagttacgtaaattagtaccatgcaattggaagctaaatctg

SEQ ID NO: 124373 - DNA, 1155 bp, Homo sapiens
gtatcgtggaaggactcatgaccacagtccttgccgtcactgccatccagaagactgtagatggcccctctgggaaactgtggtatgatggctgtgggctaatcagaacatcatccctgcatctactggagctaccaaaggtgtaggcaaggtcatccctgagctgaatgggaagctcactggcatggccttccatgttcccactgccaacgtgtcggtcgtggacctgacttgccatctggagaaacctgccaaatatgatgacatcaagtaggtgatgaagcaggcatcagagggctccctcaagggcatcctgggctacactgagcaccaagtcatctcccccgactttaacagcgacactcactcttccaccttcgattctagggctggcattgccctcaacgaccactttgtcaagctcatttcctgatatgacaatgaatttggctacagcaacagggtggtgaacctcatgacccacatggcctccaagaagtaagaccccccagaccaccaaccccaacgagagtgcaagaggaagagagaggccttcagctgccggggagctccctgctgcactcagtcccccaccacaatgagaatctcccttcctcacaatttccatgcagaccccctgaagagggaggggcctaaggagccccaccttgtcggttaccatcaataaagtcccctgagctcacctaaaaaaaaaaaaaaaacaaaagaaaataaaattatagccaatttcatttaaaataaagaaacaaaaattaaaaataacacactgtcataaattaatgtaagactatactaaaatcacatttcattatacattggggttacttttaaagtgtgaagcttgtttaatgattaaatatcttaaattagtttattatgtgaaaatattttgttgataacaataaggataattatctaataatataaaaattctaaaattttcaacaatttctaagtataattttttagaaactagaaagaatgaatagcttcttaaaatgctgttttaaattgtctattagaattcagtggacaacatttgtcataataataacctagaaggattcatgttaattttagaaacacaaattgctaatggtgagaatacattctgagcaatgcatcattaggcaa

SEQ ID NO: 124374 - DNA, 2729 bp, Homo sapiens
gtaaatagtatgcaagactacagaacttctttttgaaagtgttacctgtaatgaattttaagttaaaagactctgcatgaacgtgacactgactgcataatttgtttacaagaaattatgtccaacaaggtgatctaagaaattcaaccacttgataaagtttgcttcctcatttgaagaattcatctttatatcttgctgcagtatctggcaactttccactctcctcccttcatgatagtaattatgaaaagttattttcatcccaagtagtctacatggtaaaaggaaatttttgttagtagcatagacttggtgcttttttaaaagaacaaaagttttaaatgaaagacaatttaagactactcaagtcattataaaagtcaattatcaaagttaaaacattatcacatatatattaagaaatcctagctcattgaactcgcctgcagctctcgggttcctgtggctttcttctttatcggagccagggctacatgccagcaaccatgtccaagggacctgcagttggtattgatcttagcaccacctactcttacgtgggtgttttccagcacggaaaagtagagataattgccaatgatcagggaaactgaaccactccaagctatgtcgcctttatggacactaaacagttgattggtgatgccgcaaagcatcaagttgcaatgaaccccaccaacacagtttttgatgccaaacgtctgattggacgcagatttgatgatgctgttgtccagtctgatatgaagcattggcccttcatggtagtgaatgatgctgacaggccccaggtccaagtagaatacaagggagagaccaaaagcttctatccagaggaggtatcctctattgttctgacaaagatgaaggaaattgcagaagcctaccttgggaagactgttaccagtgctgtggtcacagtgccagcttactttaatgactctcagtttcaggttaccaaagatgctggaactattgctggtctcaatgtacttagaattattaatgagccaactgttgctgctattgtttacaaaagttcagacaaaaaggttggagcacaaagaaacgtgcttatctttgacctggggggtggcactttcggtgtgtcaatcctcactattgaggatggaatctttgaggtcaagtctacagccagagacaaccacttgggtggagaagattttgacaaccgaatggtcaaccattttattgctgagctcaagcgcaagcataagaaggacatcagtgagagcaagagagctgtaagatgcctccgtactgcttgtgaacatgctaagcgtactctctcttccagcacccaagtcagtattgagatcgattctctctatgtaggaattgacttctatacctccattacctgtgcccagtttgaagaattgaatgctgacctgttctgtggcaccctggacccagtagagaaagcccttcgagatgccaaaccagacaagtcacaaattcatgatattgtcctggttggtggttctattagtatccccaagattcagaagcttctccaagacttcttcaatggaaaagaactgaataagagcatcagccatgatgaagctgttgcttatggctgtccaggcagccatcctgtctggagacaagtctgaaaatgttcaagatttgctgctcttggacgtcactcctctttcccttggtattgaaactgctagtggagtcatgaccatcctcatcaactgtaataccaccattcctaccaagcagacacagaccttcattacctattctgacaaccagcctggtgtgcttattcaggtttatgaaggtgagcgtgccatgtccaaggataacaacctgcttggcaagtttgaattcacgggcatacctcctgaaccccaaggtgttcctcagattgaagtcacttttgacattgatgccaatggtatcctcagtgtctctgctgtggacaaaagtacaggaaaagagaataaaattactatcactaataataagggccatttgagcaaggaagacattgaacgtatggtccaggaagctgagaattaaaaagctgaagatgagaagcagagggacaaggcgtcatccaagaattcacttgagtcctatgcattcaacatgaaagcaactgtcgaagatgagaaacttcaagacaagattaatgatgaggacaaacagaagattctggacaggtgtaatgaaattatcaactggcacaataagaatcggactgccaagaaggaagaatttgaacatcagcagaaagagctggaggaactttgcaacccaatcatcaccaagctgtaccagagtgcagaaggcatgccaggaagaatgcctgggggattccctgttggtggagctcctccttctggtggtgcttccttagggcccaccatcgaagaggttgattaagccaacccaagtatagatgtagcattgttccacacatttaaaacatttgaaggacctaaatttgtagcaaattctgtggcagttttaaaaagttaagctgctatagtaagttactgggcattctcaatacttgaatatggaacatatgcacaggggaaggaaataacattgcactttataaacactgtattgtaagtggaaaatgcaatgtcttaaataaaactatttaaaattggcaccataaaaaaagaaaccttaaaaatgatttcattcgattatca

SEQ ID NO: 124375 - DNA, 1758 bp, Homo sapiens
tccagcctgggctacagagtgagactctgtctcaaataaaaacaagggagatagattataatttcatgtctattttagataactgataacatgtattggtggattatgggaaacaggtaaatccatagtgatttctagctgtaagtacttggatgcattgtgactgtgtttagggatatggaaaatctttgggacagaggaggtttgaagtaacagggcagaaaatcaggggcttagttttgagccaaaatttgtccaattgtaatcttcattttatcattttagtttgaaagttgaatcgtttttgataactttggtataatcaaagttattgataatcgaatgaaatcatttttaaggtttctttttttatggtgccaattttaaatagttttatttaagacattgcattttccacttacaatacagtgtttataaagtgcaatgttatttccttcccctgtgcatatgttccatattcaagtattgagaatgcccagtaacttactatagcagcttaactttttaaaactgccacagaatttgctacaaatttaggtccttcaaatgttttaaatgtgtggaacaatgctacatctatacttgggttggcttaatcaacctcttcgatggtgggccctaaggaagcaccaccagaaggaggagctccaccaacagggaatcccccaggcattcttcctggcatgccttctgcactctggtacagcttggtgatgattgggttgcaaagttcctccagctctttctgctgatgttcaaattcttccttcttggcagtccgattcttattgtgccagttgataatttcattacacctgtccagaatcttctgtttgtcctcatcattaatcttgtcttgaagtttctcatcttcgacagttgctttcatgttgaatgcataggactcaagtgaattcttggatgacgccttgtccctctgcttctcatcttcagctttttaattctcagcttcctggaccatacgttcaatgtcttccttgctcaaatggcccttattattagtgatagtaattttattctcttttcctgtacttttgtccacagcagagacactgaggataccattggcatcaatgtcaaaagtgacttcaatctgaggaacaccttggggttcaggaggtatgcccgtgaattcaaacttgccaagcaggttgttatccttggacatggcacgctcaccttcataaacctgaataagcacaccaggctggttgtcagaataggtaatgaaggtctgtgtctgcttggtaggaatggtggtattacagttgatgaggatggtcatgactccactagcagtttcaataccaagggaaagaggagtgacgtccaagagcagcaaatcttgaacattttcagacttgtctccagacaggatggctgcctggacagccataagcaacagcttcatcatggctgatgctcttattcagttcttttccattgaagaagtcttggagaagcttctgaatcttggggatactaatagaaccaccaaccaggacaatatcatgaatttgtgacttgtctggtttggcatctcgaagggctttctctactgggtccagggtgccacagaacaggtcagcattcaattcttcaaactgggcacaggtaatggaggtatagaagtcaattcctacatagagagaatcgatctcaatactgacttgggtgctggaagagagagtacgcttagcatgttcacaagcagta

SEQ ID NO: 124376 - DNA, 1189 bp, Homo sapiens
aaaccacaaaacaaagcagtaccttatattactagcctctttttgttgcaggatctctccctctaaattacagcagttcattcagcaagtagggaaggtaattcttgttaatcctctattctgttggcgattcttccacgtacttagtagagttaaggcaaaaacttaccgaattggaagtatgtatcagaaggaattcttaattattcactttgaaataaaagaattttccttataggttccaagtagtagactgtactataatactgctcttctgaaataaattgaatatttttaccttgccaaaactatcattgaaggctggaattttaggtacagtatttttctgtgaatgattttatgttgttaaatattcttttaaaaattcatatctgtaattgttactgtagaaaaccaaatacaaagaattctaaaacctttgtaccgtctctgtgtatttgagattacttaaaatatctttttttctgttccaagttctactcagtgaatgtggattacagcaagctgaagaaggaacgtccagatttctaaatgaaatgtttcactataacgctgctttagaatgaaggtcttccagaagccacatccgcacaattttccacttaaccaggaaatatttctcctctaaatgcatgaaatcatgttggagatctctattgtaatctctattggagattacaatgattaaatcaataaataactgaaacttgatatgtgtcacttttttatgctgaaagtatgctctgaactttagagtataggaaattaactattagaatttaaagaatttcttgaatttctgtagtttgaaaatacgactttaagctgctttagtaaaacacttccattttgtgtatagactgttggtaacttcactagagcatacataacaactggaactggaaattatacaaaagtaaattgggaaggatactccagcatctgacactggcaaaatggaaacctttgagtttctcttactggctgttgaagtgtgtgcagtttttaacaatggtttttacttggcatctctttgttgtgattttcaaggttataagttgctttggtcctaggattgaagttgaaatctgagtttatcagtgctaaccatggtgctagtagtcaagagatcttgagaattttggctgctgagtcttggtgcagggtg

SEQ ID NO: 124377 - DNA, 1073 bp, Homo sapiens
tcccagaggcgccgcgcagctccctcagcggcagtcacagctggccagcgcgcacccggcacgcgcgcccccagggcctctgcgcgcggacccggctctcaggcgccgcgggagaggccccctactcacggagcgcgcggcccgtgcgcccacgctccgaccgcattcctcagtacgtggcacccttggaaagtgcctgtctggtcaatcgaagagtcctcgtttcgaccaaaaaaattcccctcagaaatatgcatggcacggcaatgaaggcatttcactatgaagtggaatgatgatggtccgaccaggtcaggacgaacatatgaggggttagatctaagcaggcactattaaagacagtcgcatccgggccctcctgccgcaagctgccctcccagccaagggtccttcaggtaggaggtcctgggtgactttggaagtccgtagtgtctcattgcagataatttttagcttagggcctggtggctaggtcggttctctcctttccagtcggagacctctgccgcaaacatgctccgccagatcatcggtcaggccaagaagcatccgagcgtaagttcgtgaccgctctcctaatgttttcccttgtccttcttgcgtcggggtgcgcctctttctgttccctgggaacgtcctcatttacagccacttaccgtccgtcagaccagaccctgcctcgcctagtgtttgtcatcttagttgtcccaggcctctgtgaccctctacgccatgcattgtggggttttgtctgacaggaggaaggagacggacactgctcggaaaaaaaacctagttttttctagttagtgaatattggaacagtctggtggccgctctcttttgcaggttgtgcggtccaggagggatagatgtgcgctgtgtgggtcagagactagcataggtcaggttccctatgtgttataccatctctggaggttcttgtattcgccgcattgcaccaccaggccttttggtaaataagaggggtccgtgatcttggaatcctcactttgtctggacgtcgttgcttttgggaaaatttcgaagtg

SEQ ID NO: 124378 - DNA, 1956 bp, Homo sapiens
ttgttttgttgcttcattctttctttgctttgctgggcgttttgtccaattctttgttaaaaacgccaagaacctggacaacttgcagtcacgatcctctaccggtgacaatatcatttaaatattggtagtggcttaaggtagcaaacatccctttgtggaacgtttactcagtaaatccttaaaaaacagatcagaaacaaaaactggcctcccagggatttggactcaggaggtgaattaggcgcggagagggcggagcctttggggtttatgggcggaattgcacagggtttggcggggatctctgctccgccttggcactactcggctccgctcgcctccgcgcggctccctgggctttcactcggctctgttcggctcctgctcgggaagggtgcgcgggggcgagtcctgcgcatgcgccctcaattcctgctgctctcagggctgcgctcagcctcgtgttttcacttccttttcagagctgtatccgggtcgctgctttccctattgtctgaggcagccgccctcgcgctgtgcaatttctggtctttcgttgcttctggtccaggctaataaagtttttctttctttaattttttttcttctagttttaacgggagaaattaactccccggggccgccgggttgactgcgctgcctgggccggaggtcttctccggccagggagcgctgtgggaaggggctcgagcggccagggccaggcgaggccgggggggcggggggttaggggaccgcggggctactcttgggagcgcccctgtccggctggctgcgcgccggttttaaatagcatctttcggacttgtcttcgcggccccagtccccgacctcggcgctgcctgggctcctgcagcctctccctaagtcttctccaaacgaccacctcacggattccttagtaagtgtatccgaggcctctgcggcgagaggtccatttcagccattctagaagtcagggccggtgggagcagggcaggggtgggagagtcctgcgggaaagcaggattggtggaccctcgccctccatggtccgcgggaatgaagcccgcttgttttattccctgatttttgccgtttttattgactgttacgatgtctaagtgggggattacgaggaaggtgcagaaacatctcgaaaagatgagcaagagggtcagcttcgattttagctggtctgagttggcgttggcagcatcagggctggagctgcctttgaaactgcccgtggagctgtccagccctccccaccctgcttctgcaccccaaccttctcctgaccccttttgctgagaactcagttagacaaaaattccttgtgcgaggtcatctttatgttctcttagcaccacaactctcccctgtgtttggtgtgattatgaatgacaatgtaatttttttctcttcacagtggatcgcagctccaagaggaggcaggtgaagcctttggcagcttctctgctggaagctcttgattatgatagttcagatgacagtgattttaaagttggagatgcctcaggtaaatatttccttctctcttcccctttcccagctttctggagttaggcttatttttagactttttaaatcggttttgattaaaatgccaattttaagtgaaagcacgtaaacttcatttattttgtccatttgatttcccattttgcctttagatcctgtcactagacctataattgcttctgttttcctcagagataattagcagtcaggggaaggactttttccaaagatgcaaaaggatttctctgttttacaccttaaaatatatttatgcttatattatagaggaaaaaactgaaagatatcccgaagtagaaaagtatcctgagaggtgtgtggaccattaatagtccctgagcagggttcttcttttttcagatcacttgacaatctcttaggggagttttg

SEQ ID NO: 124379 - DNA, 1116 bp, Homo sapiens
ccagtagcatctttcctacctgccccagcctcacctccacctccacttccactgttgtggcaactattgtttccagacattgccagttgtcctctgggggaaaaaaatgttcccgtttgagtaccactggctcatacaaaccaagatgacatagctggaactagaatcggaagtggaggatgagttgtgttgactgattggctgtcttcaagacatatacggttttggtcaaacatagccctgggatagctgtaaataactagtagaatagtgattgatctgttatctattgtgtatatttatagtactaacactgttgtaccagatcaatgaacagaattagattgatgaaattgatgaacaaatttatattgcatatattgtatattagcataaaactaaattaaatcatattgattttgttatggggagaacattggatataatggtattgatggttgatattaattaaattaatttttattttattatttgatattgtaaagggattcttgaaggttggtgttttaaattctaattttaaaatttattttatttttttgtctggccattaccactcagaggagtttttaaaaattctgtaatggtaaaaaatttcttaactgtctgttagttgaaatagctgttgcttggagagattctgatatattgtatgtttgagaaaggttatcttttatttaaccaaatgggaagtaggatttcaattttaaagatatatttttttcaaacgtaagaaaggtttattgtagacttgaaattaactctttctgcctaagataatttctccagtatatttctttttttcctttcctttctctctcttttttttttttttttggaacatagcacagagtcattctttgatgactaggaaattttgtctttgcagcctatggaaaaaatagccaagggccttgatttttctcattgtcattattacccagctatggttgtaaataaatatggtttatctccattcctccagtgcatatgtacaaaaaagaaatagtgactaattagatgaagaagttatttttcagatatcagagaaagataagatttgatgtattgctgatccctatagaaagataaaat

SEQ ID NO: 124380 - DNA, 1046 bp, Homo sapiens
ggggatgagatccagtaccaagtagagagattgagtagataagagtaaccatagtaattagggaaaaaaggatatatgggtccagatgtagctaggttgttagatgtggtagttggagcatgtgtaagttatttttaaaatgtttcttgttttctcagtgaaataggaagcaaagccattagcagagagtgggacagtggggagttagagatttggggaggcagagttgtataaatttatttgggagaataaactgaataaggaaacatatacctaaaatatatatgtatacacacacagacacatatatgtatatatacacacacatacacagcaataagaccacttgatattagtggtaatgaatataaagagctcattaatataaatatattcatatgaatatgatattagtggtaatgaatactgttactgagaaaagtaaacatggttgaatatatgtgtatttttcttctccaggtgtggttcagattcctgggagtaggtaaagaatatgttaactcaggagtagcagctactttggcagtgtttgttacattgatcactgatgatcacaaacatgttactgctgcttatatccatgaatgtcattgctgatgtgtgatacagtcatgatgagttctgtcagttttggtgattctcttatgatgctgagggcactatctctatttttctctgcttcattataatgctgagtaccatctctacttcttaagtcattcttaggtctacttcttagattgtggtcattgactatggatgtatttttttaggccagcacagtagttttgagtaattgaattggttgctaacatttagacattgggaaatcgtacacatttaggatttcaagcttcttttgcaaagttctggcggcactagggttttttgctgttgttgttgttgttaagtgatggagtgccccaggcttgcctcaaactcctgggctcaaacaatcttcttgtttcagcttcctgagtagctgtgactaaaggcattaaaggcatatgcctgcccttgcagta

SEQ ID NO: 124381 - DNA, 1056 bp, Homo sapiens
accctaggttggggttcaggctttgttggagaaattatagttaaaccctactggatggagagaaggccctctgtgttgagagggccatggaaaaatgatcttcatgttgggccagggctgtgaggtcactgagggactgtgtatatagctggggcagagcacaggaggaagtactccacccatacctgctgaaaagcccctccgttctacgagacctcctgccattgagtttatagctccctctaccattgagcttagtgttatgctcactctgagaagaaatgctgaagaaattctgtccattattgcagagtaggtattgaagcatgcgtgagaggcaattaataagtggcacaaagacctgtgttctttttactacattcacactcatgtttgttaacacatttgagcacttgtcatcataacggtgttgccatcttccatgttttttttttttttacaggagactaccatctagggttggtgactaaaattaagagtaattttcaaccttttgtatttcgtggagatcacgctctgcctcttcctctccaatataagagggggggtgggtacttaaatttttattttgtcacataaggatgttttagtattttattaaacatgctttatattaaaaacaagattaacagcaaagcaacctatataaattatcaccatcatttcccatattttaacataaaaactagggtatattatgtcctaaaataaaggataggcttttaaatttaataaattttactttagtaaagtaaaacaaattttctcttatttttatcatttttgcctcaattggtggactgatccttgagaaatgttgccatacaagattgctgggatagcgtagaatctaccattgaatcttggagaatcccatgtgttgatgttcaggacaaatgactaaagaatcttacctcttcttccttattgtctatccaaaaataaaatatataacaaatgatttgatgtattgacatgaatctgtggtctgtatcataggcataggcattactctaagttgggcctgagagtggc

SEQ ID NO: 124382 - DNA, 1049 bp, Homo sapiens
tcatgcatagattttttttttttttttttggtaactcttccagtcctgagaattgaaatttttggtgataaattgtggtgaataagtaaggcagttttggaaagacagaacttccttttagggaagagaatttattttactgtttttcttgttgataatttaaaagttctgttaggacactgtcaagtagtggttacttcatgctatcataatagacaaaacaactggcaaagttgtttctgaatgaagaaaactgaggcctctttaccatttaggtttactgagggatttttttttggatactgtggacgttacataagtagacacctcctgtgatggtgcaatctggcaaaaattcttttatatactatttgaacacttgtgctaatgtctacacttacctgtaggctgtactggaaattataggccttcacaatatttccaaggacgtaatactagtttgattaaaggtataaaaagccaagaaaattcgagaagccttttagtatatgagcttcaaatggaaaacagggaaaaagaaagaatattgtatataaagaataaaaaaggttttgaagttcaccatcacatgagattaattagacttttttccttctattcttgatgggagccacaagttctacatagaaaatgatgtgatttaatgtaagaaaaccagtacattcttgtcattaaatttttattttatatcttatggagagtaagacttataaacctgactgtgggaaattttttggcatgctctccttttttattttttatttatagttttactatttgtgggtacatagtagatatgtatattcatggggtacatgagatgttttgatacaggcatgcaatgtgaaataagcacatcatggagaatggggtatccatttctcaaacacttgtcttttgagttacaaacaatccagttaccctctttaagttatttttaagtgtacaatttagtttttcttgactgtagtcaccctgttgtgctattaaacagtaggtcttagtctttccactttttcgactcatta

SEQ ID NO: 124383 - DNA, 1038 bp, Homo sapiens
tttgagaatttttctgttactttgttgtaggagtgtagcttttgtgaagaccctcgctttgctagaactggggtttgcattagctgtgatgcagggatgtgcagagcctatttccatgtgacctgtgctcaaaaggaaggtctgctttcagaggcagcggcggaagaggtaggtttatttaaacccatagttggtgaacatgttcacaagatatcttttgactctatgtcctataataagtgtaaataataaaagaaattttaacatttattcttaaagttcttgccaagatcactgttctaaaactttaagagtaaatgcctatgagttttgtcagttttaaagctagtcagacgttcagaaaacataatttttatagtgagatctgacagataaaatgaaagataatccaagttgtcttaaagcattaaaatgtcggcatttcagccccatgaattatagttaaaaaaaaatagcatattttatacgagaagctgaaactgtatttgggtaaccttgctctatttttctttaaataaaatcattactgtgtctttagtatctctgttactatctctttactgttacttttaattccataatattcctttcagatttattggctttacgttaaaaaatcagttgttttcagtgtttggggactggttaagattcgttcaagtattctgagtttaaaactattttcattacactataaaaatgttacttacttttctgaactctgttctttcatgagtattagtggagacttccagagattacatacagtataacagaacccaccgaatatagaaacaattttgagaatccagctacctttttttatgtcagttatctagacattagtatgtaaaatgtaaaacagtgccactctcctcactcaatttttgtgtgtatgtgaattgtatttagtaaaagtgtatacttcggtaatggacccattatttaaaataaattaatgaatattgcaaaaaattttcagttttaatttttaatagggtaactgtctaaaatata

SEQ ID NO: 124384 - DNA, 2766 bp, Homo sapiens
actcatggggatcagtacagatatctttccagtggacaattcagatactagttctagtgtggatggaaggagaaaacataagcaaccagctctcactgcagattttgtgaattattattttggtcagtatagacactggtacatgcacattttcactgagaacaatttgttaatgaaaatgtttgatatactgttaatttttagaaatttattagccatgctgcatatatcatagagggatgtttattttcctaatatgttgtgggtttttacaaaatgctaggttcatttatttgtaaatatacttaaaagttttaaactatgtaggtttatcaatgtgatcatctttatagctagtttcttcctatgtcagtttttacttcctactaaagtaaaattcgatatttcatttaaatagagagaaatatgcgcatgattcaaattcaggaaaatatggctgaacaaaagaatataaaagataaattagagaatgaacaagaaaagcttcatgtagaatataataaggtaagttagctacaaaatatgcaacataatgtgatagatcttactgatgatttcttttgtgaatgtatggcatttcttttatgttttgtttttaatttcttctggagctctttggctcttccctataactcctactcctcattagcttcattatcatcactgtctcttactgagcactttgtgtgccaggcataattttgatctctttacatgtattatttaattcccagcttaactttatagtgtaggttataatcattgcttccattttcagggagaaaactgaatcctgaagaagttaaataatttgcccaggttcacacaagtagtcaagtcacagacttgacaaatgaagtcagttggtgtgaggccaactcatgtgactctgttctctatttctaatcaataaacattgctatagagcttcactttctaagtttgtagaaaatttagaaacttttctttaaattattatttatcttgaattatattataatgtttggaataaaaatttccaaatttgaattttcatgtacctcttcatcgtaatgagaaaagattcaaaaagaagtatcttataaaagcaaaatgtggttaaaatgttataccaagtataacttgacatataaaacgggtattgacttattgttagaaaacattttaagtcataaaaaaatagtaggaagtacgtttccaataatcagctacactgtgtagtaaaaagagtacttggaattagattcagaggacctggggattcttgctagttctgtgatcttggccaactcacaaaaactctatgatccttagtttttttcattgggaaaatagtggaaatacatcttgagagagtcacaaggattagttagcagaacatgatgttatataacaaactgtaaaagaaggtataaacgtagttaccattattagtaaaaatgccagcagaaaacaaaatgcttacagcaacaaatactgctgaataattggatagccttgtctctcagtggtattgtggcttgaatatattaaaaatatatggaggccgagcgcagtggctcatgcctgtaatcccagcactttgggaggccaaggcaggtggatcacgaggtcaagagatcgagaccatcctaggagtttgagaccagcctggccaacatggcaaaaccccgtctctactaaaaatacaaaagttagctgggcgtggtggagggtgcctgtaatcccagctactcgagaggctgaggcaggagaattgcttgaacccaggaggtggtggttgcagtgacacaagatcgtgctactgcactctagcctgggcgacagagtgagactccatctcaaaaaaaaaaaaaaaaaaatagatcgagaccatcctggccaacatggtgaaaccctgtctctactaaaaatacaaaaattagctggatgtggtggtgcacacctgtagtcccacctactcgggaaactgcagcaggagaatcgcttgaaccccagaggcggaggttgtagtgagccgaaatcgtgtcaccgcactccagcctggtgacagagtgagactctgtctcaaaaaaaaaaaaaattatatatatatatgtggaatagaaatgtagatatttcttaaattgtcagatattttaatgaagtttactaatttggcttactttgtagctatgtgaatctttagaagaactacaaaacctgaatggaaaacttcgaagtgaaggacaaggaatatgggctttactaggcagaatcacagggcaggttagtttctttccaattgctgtctccttcagttcttgctccctatatgattttcaaagaacagatttttgatacaactgtcatttgactaaccgaagaattctgtttgatcagggcctaatcctttgggataatgatttctgcttgaaatacacctagagcattggaagctgcctactgagaacctctagtttaatttggttgtttcaacagctatcttgtgtgcaaaattttttcatttgctctaactgattgacctgtcatttgtgatgaagcttaagacttgaagcatgagtttttcctactacattcttctttcctttaatttagcagttttagattccctgccacatttttttctttcctgtccttatgctgtatttttttttctattctttggatgtataatttaaaattaaaaaaggcaaactagagatattcatttttatgttaatttggttttcagctgtataagag

SEQ ID NO: 124385 - DNA, 1618 bp, Homo sapiens
tgttaaattaactgaggacacagaaattaaacatttcaaaaagaataaacatattgataaaacaaatatattagtgttgttgtatgtttttaaatacttacttccaaatgatttaatctattttggtcattaaaatatgtcttaatttctcaaagaaaggcatgaagtcttaaattttatgagttttttatgctatcaatgagaaagataaagtaaaaattacagtagaaaaagacaaagtccttcaacaaagttaagaaagtttataataattggctaatttttttgaggtagttcatgtagagtgtgttgggagctatcctgaaggttaagtttattaaaatttagggtaaagtagtaagtagttccaagttcaggagatacacctgaataattctgaccacagtataaattttgcaatatgtcgaaaatgaaatcccaagcataagcgtaacataatggagtaaatgaaacaataaaaataaagaaaaaaaataacaatcttatataatgaacaaaaatttaattcaggaaaattcccttggggttgagggtggagttgaggactatgattttgaaacagtagttaaaaacttatagagctggtgatccttttattaattatttgaacctgtatgagtatctactgtgtcttactaattttttttttttaatatgagattgattgaggcctttttgctgtaggacttagaggtttttattaggttttttgttttgcttttgtcatatattggaaattaggaacctgagaaatacaatttttattttaaaaatcagtttatgatagatttccaacccatcatattttagtcgtttaataaaaaaagtgccatcttctaattttgataagatttttgaatagtattactctatgttatttatttctttagtttctgttatgaaatttttatttctaattgcattattacaatatgccaatgtctggaattttgtgaaagtcttctggaaggtaaagatatttttattactctaaaataatggatatgcaaagtccccttccttcgttttgccttattaagaagataatatcgtaaattgtctgcaaagttttaaagaggtaatgtagaggaaattaaatgttttattggtactatattttaatatttcttaggacaagataagctggatataaagcaatgccataaaatatttttggttataatgtgatctttaaaaaaaatacattgtttatgcactattcttcttgggttaaagaatttttatataaaatttcatatgtttaataaaagtaatctcataagctaatatctgccattttccctggcatctcatattttggaattggcactgttattgtttgaaaatcaccccccaaaagtctacacttttttattacattgcatcttaaatactatctttacatgctatttttttaactttcaaataagatattttaaataaggatttattttctctacagatatatttcagcgcttactcagacatacgtgtatgtctgttaggttctcttttaaaattaaacttcatgggtcacaattagtcttttatttaatatactgtgtttactttctcaagttcttttaaactgatgttt

SEQ ID NO: 124386 - DNA, 1031 bp, Homo sapiens
ctggaattatagtttggagtcttattcctcacttatattgtgctttaccttctaggtgtgtgcacaccgtctctctttctccccgcactcccaccccgtatcatcgtgactggaaagccacaggaagttgccacatagaaatattctgctttccctatttttttttttttttttttttgatacagagcccttgctctgtcgcccaggctgcagtgcagtctcggctcactggaaactccgcctcccaggttcaagcagttctcctgcctcagcctcccgagtagctgggattacaggtgcccgccactacgcccggctaacttctttgtatttttagtagagacagggtttcaccatcttggccaggctggtctcaaactcctgacctcgtgacccacccccttggcctcccaaagtgctaggagtacaggtgtgagtcaccacacctggcctgctttccctaattttacctaatgagaattcttatttgggatagaatcacttagtaagataattgtaaaaatgagcggttgccagtaaaaccagtggggctgtacaaaaattggctagatttaagctaggagaaaataaataatggaggaaagcattccagaggagaagatgggatgcccgtctggggcaataggtagattcaagcaaagtttatggagaactttatctgaaacagcacaatttgtggttgtttttattggagtataacattacataaggatatgagaagatacgttaaagacactatttttacaagcattactatctgtttaaaatgtagtaaaaataattacagaacttaaacttcaaagtatttacaaccattactatttgtttaaaatagagtaaaaataattacagaacttaaacttcaaaatatgtacacacacacaatctgaaaaaatgttagaaaagcaaatgtttcagcatacacagatagccatttattttgaagataatagcaattagaacataagtattactttattggatttatttttaaaggaccaagtgttatt

SEQ ID NO: 124387 - DNA, 1040 bp, Homo sapiens
caacatttaacattggtgaccaaccttcctccttaaaacactatcttttcttggttttgtttttttccttttttttgagacagtgtctcactgtgttacccaggctggagtgcgggaactgcaggtgtgtgcctggctaatttttgtgtttttttaagagacagggtctcactatattgtccaggctagtcttcaactcctaggttcagtccttccaccttggcctcccaaagtcctgggatttgctactgataagtacagttttttttaaccctagtttttatcagtagcaaaacataatagtttaaaaaaaaaactgtggttaaatgcttgaattctggagcctagttatttgggttcagattttcacccagcatttattagttgtaacttgtctagttacataatctttgtgctttagtttcctcatctgtaaaccgaggataataatcttttttacctctagaattgctgtgaggattaaatgaataaaaatatgtagtgcttattctccttcatcaactctctcctggaccgttgcaataaccatcaccttctctagtttgagtacctctagtctgtatccagttgtcttactaaaacatgaatttgttactattgtactcaaatttgtccagaggcttcccatttcttgcaaggtaaatctagactgtatagcatggcttataaggccctccaaacccagcctcagtctgtctttttgttttcatttccagctgttcacagctccaggtgacctaaatttagatcatcgcaggtcattttttctttctaaaactaacctgttgcttttatgccatcttgcttttattatactttatgttataccttctctctgaaataacctcgtctttttctctgggatgagggcttctcaatcacttatacttagtccatatgtcttggtcagtgtatgattcttagtgtataagcaccattttttaataattaaattaattttaatattccaggtccgaagccaatgcttatcacatagtatgcccccagtacataaccaa

SEQ ID NO: 124388 - DNA, 2189 bp, Homo sapiens
tcttggcaggaactattgacaattgactattgacaatttctctaaatgagctgatgatatgtctttactaaaaatttaaacacttggagtcatacaaaacaagtatgatccaacttctagttgaaaagccaactatattgtttttgatttttctttcatttttaaattaagcattctgtttcatctgttactcctgtatcaaggttttcatttgtattgattttatatttctttggacatatgaaatagacatttgaaatagacataataatgaaacgaggtgaactgaatttgaaaataggactggacacaaattttgaaatttgattgatttccccagcaaaatgttatttttaagtcattttggcctgggaattatagtaatgataatgttagatgcttactgtatcccagactatgttttctggtctttgactctactatcacattcagttcttacaacagtcctatgaggtatatatatctccattttagaagagaggtaactggggtacatagacactaagcagtgtgaaatagaaattattccagttatatatttaaatgatattatgtaaattaagttatgtattagaatataatttcttcccttccagaaaaatactaccatagtgtatgataaaatctactgaccttcacattagttgccaagatttattgagggcttatatgccagtcagtgtgctagtgccttccacatttgatctcatttaatcctcataacaactgcttgagatagatactgatttcattactattttatgggtgaggaaaatgagaagaattacttgcccaagattgtacaactggaaaatggtggaattataatttgagtctaggcagtcttaaccatacagttcatgcactaattaggcatactgcctcaccgcactacactgctttagcatatttgactttgttgggacaaaaaaagtagatacttcctcttaacaggcaattctaactatataagatacagaatatattgatagttactggtatgtgcatcagtgaagccctttgaaaacaattttttctacattaatttgtttactagttgcatatgaaataaatacaaagcccaaacttgatctttgatttaaaatactgcacagttttttgtcctgggaagataggagccaagagaagtcacattgcttattctagcttattttagtgaaatttaggatgtagggatattagcaatagctttttagtttttatcaaacttatcaacttgaatttaattgggggttaaagcagatttccatatctaatgtgtctatattcggatgcatttcaaagtgaaatacaaatacatattttcagttgtcttctcatctctattatttgtgcatgtaattaagagttaattgtatttctattataaatgatttggttgcttcctcttgcattatacttttccagtagtaaactacagacaaagtagttctcagagtatcagattcagaatgtgctcaaaagctcttcacttagagactgaagcactgaaaaaagttagcacgtgtgatcttactatttaacaagcaaattgacctctattatttcttatatgttgataaatacaacatgtctttgaaaattatgtttcacattgtattcttttgtgggggtgtttacagttttgtttttactttctttggaggttattcagtttggcatgatagctctcctcagtaacgctttatttgtctgtgtgccacttttcactttctttttctcaatggaacctagaagcattaaacacatctcttaattgttaatataaaaaagtgaactttttctgcgatgtgtgactacttggcatttttacctcatcttcacagatctaaatgtttgaaggaaatgataactttttatgtttaccccagtcaaaaaattttacttctaatcactaaaatttctccactgaaaataaagacaaaaaggtaacaaataattgtaaccaaacatatttctaatatagtctttttaaaagaaagtcagcttaggcacaggataagaatcatttgaaaatttcttccccgagtctctgtatttgagtataaccagcactgtaacacactgatcagatgtgcttgttttcagcacagttttatgttttctcaagcgatgttaaattgccatatttgatgaaaaaatagcaa

SEQ ID NO: 124389 - DNA, 1026 bp, Homo sapiens
aaagacttgtgaagcatatgacattctatttttgacttattagtcctagtgtgaaagcattaatattattagcatgaaatttttacttcagattttaagctcatgaataaagatatatctgtgttgatctctagatatttttagtaatacccaaatatattcagtccttattgttttaatataagctttctgtgttcagtataattttatttttctcaaccttaaatatgaacttaggaaataaggagggaagtacaaagattattgactatacaacctaccagctgaaagaaagatcttcatcaacatctgtatctttccagaggtatacagaattaaaatttgatcttcaagctttaatgatccagttttaagtcaacggcagaagtatgttgaatatttcatcactcaatcttgaactgatttagaagagactctttgctgaaattgaattgcacttatacatgtaaattgtcaacatgtaatttggaattttctgattaataaatgtggttttggacatcttttcgggtatagtgacaatggaaaatagtttaaactttaggaatagagtaggtaatgttatagataatcaaaagcaattgtaattgtaaagctgctgtaatctagtgatctctagttacagtgaggaacgctatgattggatgagatgtttgataaaagtaaaatgtgtatgaaattacatataaacagattattagcttattgaaagatctcataacattggaggaaaaatattcataatctttagcaaaactagtagacttttgtttaaaagaataagataggactagttgtcactatattagcttaaggaaatgttggtaattattactgttgctgaactctggctgcttttaagcaaaatgacagattgccattttctaagtggaatatactaatccattagaccatggccctcttttaatatttagtgagaaattactcgcagttgctttattttaggttttttgagaaactcttaggccttgttttggtatcact

SEQ ID NO: 124390 - DNA, 1028 bp, Homo sapiens
gaacaaagcagacatgtttcaggtatggaaatgtctaattcttctctcatgctgtgaagagttgcttgaccttattgtgtatttttatatgaattgttttgtctcatctttcattttcttgtttcacatttaatcttgtaatctggctgccacagatatagctaactgaattgatcccactctttaagtgactattaaatacagatttggatttggatatttttctaattttttaaaattaatttttatgtgtaaagaatatttttgtctttcttactacccattcattcattattggctgatacagaagtctgtagtggtattaatgaaataggttcaagccctccacgttagtcttatatttgtgaaatgattaaaaaccattttctaattattttgtatagaaactgctcatgtaggtaatttgcactaaaattgttgtaaattacaaggaataaaatattgtacttattgatactaaatgttattccgtattggtagaatgcagaattttgtgcaagcttgtattatttgtaaagtgatttaactcattgaccacaatttgtattttctccatctgttaagatgtttaatcaaaataattggccactattcaatgaaagaactcatcgctacctgttaatagatttgcgtagatgtttgagctgctagtgagatttttatttaagtaatgacagtattcaagactaatttttttgaacattcttgtgatggaatttttacacagaaatgaaaaagttggaaaatccaacccatcagttctctggatatttagttttttttaagtggacagacataatagtctatattttcagagtccagtttttgttttgctttatataaacttataggggctacaagtaaaatgttccattggcataaaagataatgtgattatcacaatcaacttgatcataaaaatgtacatccttgttcaagtctatgttatggattttgcttctttctaaagtttagcttacaaatggctataaattatttgcatagga

SEQ ID NO: 124391 - DNA, 1032 bp, Homo sapiens
cctttgtaaataactctctgacagaaaactggctcccattttccttaatgtatactcttgtatcattactctcctgatatgaaaccaatctcttatcaccctctactcctgcccacatggatacctactttgcttgtcatttgataacttttaaactgaattgttcaggaagaggagagaagggatgaggactgacatttgtattttttacaagttccacaggtgattttatgagattttatgagcagttaggaataagaactactgttatacctagttgttaaaaacttcagtttttacaaagttttgaagctaaaaattaactttttggaattttaaattttaaaacaatgtgtataacccaagtcaaatgtcaacaaattgacattttaatattatattgtatattgccatataagatataaagtagacttagtattgtaatttaaaaagtaggacatagctcatgcttcagtcttttccaggatattcttgataaagatctcaacaacttgtatctgctgaaacacttaaaatgatgataacttgtcttaatatggttacatgaacatgtataaatatttcttttaaaagtgcttcctccaggtcatatgtattcacagacgccactgaggatttaaatatccatcatgtactttatcgtgactatgtcagttactattgtagcttttcatctttgtttaaagctatgttttgtgagaagccatggagtatacatgacaggtcattatctgactactacaaggtgagctgtcttagcttggagacttctatttggttcagtcttatttgatctttctagtatgctacattttttgagtagtaataatttttgaattcatatgcataggaatttcatccaagtccttataggagattttctagaactacaaatgcgtgacagactagctaaggcgagtgatatttctcaataatcatttgtattaaaaatctttaagtagaggacatacgatatttttaattttggttttattttttatcttttctgca

SEQ ID NO: 124392 - DNA, 1004 bp, Homo sapiens
caggaggttgagactgaagtgagccatgatcacaccactgccctccagcctgggcgacagcaagaccctatctcaaaataaataaatttataacttcatttttgttgttgttgttcttaactgtagcattgtgtcagagttttgtagtcaatttaatagtattctgagattttcctttaagactcttgagtttgagctatcaatgttcccaagacccccaggagtcatgcatggccctagctctgtagaggcttgtgattcttcttcttacaaataaaggccatttttttcttgcttggaaaataacttattttgtaagtagctgttaaagtattgagaaagccactatatgagtgtattttaagacataagaacagtcattccaaggtaatgacagaattttatgttcctcagaagctgatccttgtacatttttccaatatacatttttcctcttctatttctgtatcctcataagatttaagaagtataccacaataaatcctaaatattttcagaatagtagaaaaactagaaggagagttaatatgtttaccaaaattttcataaataatcttcaggtagcagaactgtcaagctgttttggatttgaaaattgcttttgatcagtactgcaagatagacttaggaccttttaagataactgaataataatctggtcagtatccattgagcaaaaattggattgttttggaaaagtatgtgaagcttttaaaatttattgatcatgagcaattctaactgtacatacggtatattgaaaagggaatactttttatagtcagagctgagtttggaatcctagctcctctaatatttttggatatgtgaccaagggcagttcctgagtgtcaccaatcttcaatttcctcattggaacataggaacaataatatttatcttgcctggcttttgtgaggattataaataacgaacgtaaatacaagcctttaataatatacaataatatatttgtaatatat

SEQ ID NO: 124393 - DNA, 1036 bp, Homo sapiens
ggccaaaggttgttaaatgtagcatatcacacacatttcgcactttacttaatgatccaagtgtttattactatgaggtaaatgcaccatttaaagaattatggtggaattgtaaaacgttaaaaactctaattaatttcagtctgaagcatgcagtgtgctcattttgcctaaaacattttcattatcgtcagtattttccagttattaagataaattatttcttcattgtgcagcactagcatattttctgtattaaaaacacagttttaaatgctgttgagagttacatatctagcatatgtttttaaatgaataaaacaatatagttttttgaccacagatggaagccaagtagtgtatctgtttttctttctacacttgttccgtagctaccagcagttagaacaggttgagtgtctacatgttttttccctaaaagctatatatgtattcttacacttttaaaagaaacattattaaagtatagagataattctgactattaatttggatccagttataataactgttccttctctggttagtaaaaggaatatttaaaatctaaagaaaatatcataagaatatagaaacattttaagttagtgcctgtctgcaccgtctcccttcattttactgttgtaccaccatggatgtttgcctgctgtgaagaacatatttggtaaaataaaaacaagtgacatcttctctttgtattcatagagtcttgtaactcttacttatttctggaaatagtttgttcatatggccaaattataaagggacttagtaaaagaaagctatgttttctgattacgaaggaaatctatgctcacagtgggaaaacaagaaaatgtggcaaagcacaggtaagaaaataaaaatcaataatatcaacattatgaatattttaggtacttaggaatttggggtagaatgatggaaagcaaactgttaattatagctgtatatttcagtgtagaggctacaggtgccttgcatttgttttcttataaaatctgttcccatacat

SEQ ID NO: 124394 - DNA, 1121 bp, Homo sapiens
atacgagcacgatccattctggcctatgcgggtgaagaaggtgagtcgccagcttcagacgccatctaggttcgtttcaaaagttagtgtgcatcttttttgtgtagcctggaaaagatgatattctatgaaagtcaacaaccagaaattcagccatccaagatttaatatctgttgatgtgttgagcaatttgattctgtcccccaaaattaatcttgaaaatggatctctaacaaaggagaaagactttttaaaagtgaactcattttgctttttcccacccttccagtcattagagttctttgtaaaccaaagtgttaggcctttaagaaggtctgaaaatggctcccaaaatttcagatgtttcattgtttttttctgaatttcagaagtcagttttatcttttgaaaatcatattctaccttctcataaataagtatatatatccaatcataaagtttatttaaaatcacaagaatagctactgttcgaccaaaaattgcaattttcagtttctttgagtttcttgaacataggctccgaggtccagaaatctcatatgtaaattttgttcatttttaaaatatgttgctcctaaatctcttcaccctatagggtgaataaagcatgtttgtcacatattcagacctcacttgcaagctttattgccaagaaatacaaggctcttggtaattgtctctcaagatgatatccaaatgctaatttggcttctgtgtgactgggtaatataatgtcatacttaatcttgtctttctgaaaaataacacaagagtgagaaaagcataaaagtaaatcaagtttgttcatattaaggcatgttctttctcaagaatataagtgtatgttatttaaacattatcaagctaaatgactctttgttcacatttagcactgataaataattatttctatttgtaataagcataacattttatgttttccccaaattatcgatttggggggagttttgtgttgcctatactttttctatttttctgttcatgaagtattttagtgatagaaacatagtgttcctagtcaaatttgctatctgtgtgtgtaacaactgtgcacacctataattaccttggcctttgc

SEQ ID NO: 124395 - DNA, 1105 bp, Homo sapiens
ttgtattcgatttataaaaattataattatatataaatatataaattataatttataatttataaatattatagccagtaatttttatttgtgttttaaaatatgtaacattagtagataattattatgccctgtggtatgataatggatttttaaaatgttcttaaaagcaaattttaagattttatttttattttctatcataacaaatttaaacctcacaaattattttcagttaaaagtaattattttgattatatggttttaaactggttgtttgctgatattattaacatagtatgtgctaaagcctctggtacaacatgaaagctgtaataaaatttactgtaaaccatccatgaagggcacttttacagatgttgtgattatgtgagcctagaggctatattgctgtaattggcatcctgtgaggctggtgttctgcaattgttcctggaagctcagcgaacaagaagattggatttcacaacgtttacatttgttggctgttactttgcgttcacataatgaggaacattcacataatgaggaacattcacataatgaggaacagccattcttacttgccatactgttctttataatcaaatgcaaaaatacatcctatttcttttttttgcccactacagatttgttttctttaatatttttgaagcactatctattaaacgttactgaatgttctttcttacaacaaacattatatttattcttgcctcagtgcaaatgtacttaactttacttgtatccatctaaatctcccaaatatcattccattaatttttgaatcttccagtttggaagttcattttattacaattctttcagtggatacaatgggcattttattggaaatatttatcagaacaaatcctaaggtgtctatcatcatctttctcttctttcccaataagtaccttgagatgctttaaatctaaccacccctcccaacttgtgtaatattgcttctcatattttgtttgtgtatatttgtatcacttaatattagatattcttatcaattccttatacagtcaatggtgacttagatccactcacatatatgtactgtttctccaaactt

SEQ ID NO: 124396 - DNA, 1028 bp, Homo sapiens
tacacttttttcactaaaatattatacaaaatttatattaagattttattttacaaagttttgtgccaagcttatgttcctcaataacccactcataaaagctattataaaagtccttgcattactttccactaagttatcgctttttattttaagaccctttttatgtctaaccatcttcctgtgtttgccactctggtgcctgtacaatgttttcaaactgcaatgcttgcacaaatttccaagaagtacttttctagtagcatctacctgccagcatatccatgaacactatttctctaaaacattacttgtgaatagtttccattgattatgacatcattgaggcaggaatggtaacagacccagatggaataatgtggattacatgtatctgtataaaaacatacattgcattgcataacgattttaggggactccattcacagtctgaattaagtgaccttttattccccagtttgtgttaatcaaattcaactgaggaaaattggcaggcacttagtacctattttatggcaaggtctgtgtgtcaggtgcaggggaacaaacatgaatagcatggagttctctatcctgtgtaaataaactatttgaggctagtgaacttattacaaaaatagaaacatatatggatgtaaaatggaggagggagtaattctcttgcaaaatgagacagggaaggaaaactttcataagacacaagtttgaaagataagcagtttacacaatggagaaaggctatagagagacagaattccaggcagagaaggaacagttgtgaagaaattaaatggcatgtttccagggatagaaagaagtttggagtaacaaaaagtaggaaataatttggggtgggaagaagggtgggtatgagtttggagaagaagggaatggatggatgacacagtcttttcataataataagtttatttgctgttttctgattcatagaatctaggagatcaagtcatttgggtttataaaatattgccaggaatgaaagaata

SEQ ID NO: 124397 - DNA, 1045 bp, Homo sapiens
gtccaggcaggagtgcggtggtgcgatctcagttcactccaacctctgcctcccgggttcaaactattctcctgcctcagcctcctgagtagctgggattacaggcgcacaccaccacacctggctaatttttgtgtttttagtagagatggtttttcactgtgttggtcaggctggtctcgaactcctgacctcttgatacgcccgcctcagcctctcaaagtgctgggattacaggcgtgagccaccgcatcccgccgatttcatcttttaaagagaacatcttaacacttaatagactcagactcaaccatacccaatactttcagatgtgaaaatttggtaacatttagcatcttatatatgttgctgctgatatatgggggaaattgaacataccttctctaatgttgtgttatataatttctgatgcacatgtacttaaataccctcttttccttttcagaaagctgtatgtgatggcttctgtgtttgtctgtctactcctttctggattggctgtgtttttccttttccctcgctctatcgacgtgaaatacattggtgtaaaatcagcctatgtcagttatgatgttcagaagcgtacaatttatttaaatatcacagtgagtataaatttatatgaaaaatgtttaacttcattcttttatcctattaagcagcacctttgtccccattgagaagagatgtttgttaaatgtgacactggtcagtgtgctttctgtatgtcttttctgtattgacgttctctaccatttctggttctgctaaaaatagcaataataaatactggcaattctgtatatacagaatgatttagcatttgaaaatgtctttaggagggtaaaataaactaaaaaaagaaaaaaggtattacaatttacttttcagcatatgactctgaataacttctagcaaagtgttgacatagttgatttgatagattttataaatgtaacattttgatttcattgtatttgggaaatacagtttttgccacgtttaatagaccattcctttatca

SEQ ID NO: 124398 - DNA, 1046 bp, Homo sapiens
ttcttttgctatgcagaagctttttactttaattagatcacatttgtcaattttggcttttgttgccattgcttttggtgttttagtcatgaagtccttgcccatgcctacatcctgaatggtattgcctaggttttcttctagggtttttatggttttaggttttttaaatattaggtctaacatttaagtctttactccatcttgagttaatttttgtacaaggtgtaaggaagggatccagtttcagctttctacttatgacaagccagttttcccaggaccatttattaaatagggaatcctttccccattcttgtttttgtcaggtttgtcaaagatcagatggttgtagatgtgtggtattatttctgagggctgtgttctgttccattggtctgtatctctgttttggtaccagtaccatgctgttttggttactgtagccttgtagtatagtttgaagtgatgcctccagctttgttctttttgcaaacaatgtgtgtttcttaggacattgtttttgaaaggaccgtgtagccttgccactcatgaaaacaaaacaaacaaaaaccttagagaggttttctacctgttttacatgttaacgtttgtttgaaaagagcacggtttgctaactattgaattaggaaaagggataatatttattggccagccatgagatatatgtgagtgacagtgatctgccaggaagagtgatagttgttttttcttgcagaggttaatggtgtggttaaggttgaggtagagatgtctgtggtggtggttggaaagagggaggtttgtcaggacagtgagtgaaatggaatggtatgttaaagtggaatcactacttaattacagagaaaaaatggatcccgtggatccatttattcttattgctttctgtcaaaagttgccggtttaagggctttttctttaaaaacaacaatataggaaaatatacgtatatgtgaataaaacgtttgtaacacaatgctaattgtaaattgttttatgcaactggggaattgttgggtattttc

SEQ ID NO: 124399 - DNA, 2189 bp, Homo sapiens
gggaactgagccccacatccaattccttactcccttgacaaatagtcattaacagtaataagaatattattggtttgtaaattgggtgttatctaagccaataaaacattgttgattataggtttggtgttttgaccattagctgacatttgattaacctttttttctatgataagagaaccatggtcacttttaagcatataatgaacttttatatttttaacagaagataattgttttaaaatattacacttattatgtgtaattatgtctacagggctcactcagctatccatttttgttgtctgttggggaaatactccttaagaggattgtgtgcacaatattaagttatcattaatcaaatattctcttctgggagataatttttatgtgttaaagtagtctcactatggaaaaacttctaatataactattaaatgtctctcctcacttacattatttttagagttactgtgacaacaacatactttggccactctgaacagatatcccaggagaggtatcagtatgtcgactgtggaagaaacacaacttatcagttggggcagtctgaatatttaaatgtacttcagccacaacagtaaaaactggaagagatggatttaaagaagaaatatctattgatatttcctatactctcaatgaagaggtatttcctaataggagaccttaaattgaacaaacctaaagtttacacttctaagagtacagttaaaagtatgtggacctgcagttcttgtaactctccactctgtgttaatgatatatttgtactaggatcttttacttgaatctaaatttactggttgatttccttctccagcctatcccctacagggaaaagctgatacttcccctatagtacaataaataattatttaaaagtcatagctccagtcactactgaaaacataattttggtgataaacataatttgagaaacttaatttctgaatgtttttatagaaaattactgaaagtctattactcatggaagacttttaaagaataaccttttttcctgttttataaattcccattgttatatggtagtatttcagctacacaatattttagcttttagctagacatttatagcttttcatttgttgaaatggtaatcatctgcatgtttttgtcacttatttcaggttagtgattgcctaacacttataagccaaaataatctttgcaaaattccatacctaaaattttgaaagcccctaatgttttcacacatctttctgtattagttatagttttgtgaaatctttgtgtgatcttcaaacattatcatttaatgtacaatactgtaaataaactgtgcatggcttttatacagctttagtaaatgtcaaataaagtggtacagactcattacaacaagtttctcataaaaatacaataaataggaaaatgaaattcagaaacccatagactgggaataggttccagttacagcttggatctggcataaaataaatttgaaataaaatattttgatgctccatttttttatgttgcttttcatactaaagaatggtgtagacatgttttgcaactgttaggtacccagttatcaattttatcaatgttttagaggaggaaattatttttttggtagaaattgttcaagaaatccttaattgaatgtcattaaatgatggtggccaaaataaaacctatttagaaatttaatcactttgcacatcacttggaatatgatgcctctagtagttacttttttatagttttctacttttggttttatttaaaattgttttcaaatatagattattgacttattcaactttgctgttttatattttcagtatcatttttcatttttttttttttttgtcttttcacttaccaagttctagggacatttaaaatatgtactaagtgtaggagtggttatgataccaaaaaatgtagctgggttgagattaatttcgttctgttttctcatgacagaaatcaggtttccctttccccacccctaagtgcctaacttaggtctgaaacagcctgtttattagtctgactctctcaaccataaaacataagctttatttaattctgcctttaaacacactcaggtttccccttaattttcatattattttctgcaagttttcttgagtatcttcaattcgttgaat

SEQ ID NO: 124400 - DNA, 1717 bp, Homo sapiens
atttcttcaaaattatcttttagatacgctcatacaaaaatcaatccttgttttcttgcttgtgtcttttaaccttggaaaattacatcgtgtaaattaaacagatttttctgatgatctgtgcttcttatatactattagagtgcatgatagtatctcctgaaaaggatggaaagtagaagcatttgcttttagtcacttaattttgaatcttttttcttcatcttttgaattaattttttttattatatctacttttagtggagtttgagtcagaaaaaaacaagaatttgaaacaagtaaaaagatagaagagaaataaagatggtatgtgactactttcagagagagttaagtaactgtcagaataagcctggaacaaaacaggctgtaaattaataaaactacaaacacacattcaggtgaagcagaagtatagccataaaacatctagaaagagtgaatgaggcttttagcttttcttaggtcaatgtccagtgtgcttttttccatgggaataggataggtattaatacgcttttctaaactgctctcagaccttatccagaggacatggtaaagatatgttacagaaatttttctgatacttcctggaataactttaagttacaccctagtagactggtcattctaataaaatccagtactataacaaacctctgtatgttgatagcacattggccctttttagagttctttcctatgtttttcttacgtgatttcccacagttccatgagtccaacaaaggagagtgataggctccttatcttttagaagaggaaggaaaggcatgaagaagttgagggactggctgaagatcacgtacttactaagtagtacaactggagcaagatcaagtatctctgtctcccatatctgtgttctatcatttaaaatatatattggaaatccctgctgactcagattggtatgattaaaaatgagaggaaagttcaaatagttagtagtgacaaactaatactgctggactaagattttggtagcattgttttctaaaatattttaaatggagaatgaacacttataaaatgctttggaacataatctttagcttaattttctgttaaaatttagtaccccttcatcattccaataaagataagactgatccattgtctaaggaaattatttataaataatagagattaatttatttgagatttgaaataagaatagtatgaaaatattagataccacataaattgtttgaaattactgaataaccatcttaagtatggaacatttaaatggctatattttatttgtgtacagtttttctgtgccttgttaggccagtgaagcaattattttctctaagaaaatgacaataaaatataacacacttcagattgtctgatttacagtttggaaaggacaccgcaatgttcaaataggtaggagaccatcaaaaacacaattaaagtaacatattaggagacttgaaacttcagcctaataaatccttcatggttcttagccttattattgtgatataattctagatattttcttggagggcatgtgcccaactctcccgcaccccattttgtttgtcttttaaagttcttagaataaacagttctttatataataattatattttatttaagaaaatagtttgttaggtactttttaaaagatgtaaatttttaaatttacaaatacatatgggtc

SEQ ID NO: 124401 - DNA, 1647 bp, Homo sapiens
taaaatcgggtttcagatgagatgtttatcttagactattttagggaaaaattttacatgtttgagatggtggagtaaaaagactgttaaacatttcttttaaaaaattatttttacattacaacaatatatttatgatgtgttcagatcaaaaatttaacttctgtgtcccagatctactttcaaagtgagattttcacttgtcagcttaaatttctgactagaactaacatttgtgtatttttgtgcttagtcggaatacaaatttcacagtggatttttgaagtttgtccttaaattggataaaatcaagtgattaaagttactaaagagataaaaatggtaatttccatttttaaaagtaatttggttgtgtttatagttatttgtacaagtatttatcacagactctaaattgaaaaatgtagtatgatctatatttgaccctaaaaatgttggattaatttaacaaatatggcagatttttcataactaagtcttaagtcttctaaaaggaagctgttacccttctgtttttaattacattaattgaaatgtgttttaagagatacaatttcagcatattttatatattaaaaaacaaaaaaggattagtattgagccagtggccaaaaggtaatattactaccatgtagactgttatagttcaaattgtcccacttcacccagaattttagaaactagaagtctgggaggtactatatcagctgtagttgggtaattccaagtgctgatagtactattcatcttttttattattgtgtcagatgaaacaaatgccaagttgcaaaatatgcagatttttattatataatggttttaggcataaattattaacaagccatgccttatgtgtttcatcttatatttttctttagaactaaactataacagattttggaaaatgatttgacgtgcttgctcacttgattgacttggtcagatatttgaatgatggtattacctagattctaatccttgattctagttatataataaataatatagaatatgaaaatatgtttgggcatttactgtttatattatgtagtagcctccatcatgacacacttactacatttatgaattgagcagttctgtaattgtaattattattgctgttcatgtaacaaaacatgcttataatagcaaacaaatagaaatgcccccaaaatgctatttttttaattcagttataactgttactcttgtagttgtgtatgacgcaataaaatttgtaaaaaaatttcagcatgaaaaataaaatttgtatcacttatgtattttggctatgcttttgaaatttccttaacataaacaaatcagtgtagatattcaaaatcttttacctttaatccttttcatccttatagtccttacctgaactctactttagcattatctttgatttctttttttcattcacttaacttccaatcagtactcaagctttatccattctacctctgtaatgtctctggaatttatctcatacgtgaaatttcccttgatattatagacataccttggatatattgcaggtttggttccacaccatatcgataaagtgatataatcaagcaagttacacacctttttttggtttcccagtgcatatgaaagtta

SEQ ID NO: 124402 - DNA, 1170 bp, Homo sapiens
gaggtctttgaggtttggggacccaggagaaaaacgtacatattactgcaatttaagtaaaccagataatttcaatcactgttattccatcgtttgtcttggactgtgtgtgttttcatgtacgtttcatatctcgtctggtttgtttagcgcagcaagttatagtaagttcttcgtgttgtttattttagcaaagtagagcaaacctgttttaatgtattatttcgggagaataacttattccttcttccgtctcccagcagtcttatagctggatcagctaccaagagaagttgtaaaccaagaagagaaaagcatttcaatttgggacatttatttgcacctggaaatggggaatgggctgtcagaccagacttctatcctgtccaacctgccttcatttcagtctttccacattgttattctgggtttggactgtgctggaaagacaactgtcttatacaggctgcagttcaatgaatttgtaaataccgtacctaccaaaggatttaacactgagaaaattaaggtaaccttgggaaattctaaaacagtcacttttcacttctgggatgtaggtggtcaggagaaattaaggccactgtggaagtcatataccagatgcacagatggcattgtatttgttgtggactctgttgatgtcgaaaggatggaagaagccaaaactgaacttcacaaaataactaggatatcagaaaatcagggagtccctgtacttatagttgctaacaaacaagatttgaggaactcattgtcactttcagaaattgagaaattgttagcaatgggtgaactgagctcatcaactccttggcatttgcagcctacctgtgcaatcataggagatggcctaaaggaaggacttgagaaactacatgatatgatcattaaaagaagaaaaatgttgcggcaacagaaaaagaaaagatgaatatcaatacctattatatctgtgtggagtaggttttctctggtctgattttgacaaatagaagagtgtctacagcgtggtttgcctgtctgccctcctggatgctattaaagctttgttttgttgaacaatcagatgcccaactctgttgccttgtggaagatgagtaaatgcagtgcttcttaaagtggtctcttctccctaccccacaaatcttt

SEQ ID NO: 124403 - DNA, 1017 bp, Homo sapiens
gaaaattgcatacaaggctttgtaacgatcaagtgctaatcgatggaaatgttaaggtagattaacatatatgcagttatattgatcacattggtccaaccagtccttttttgaagtaagggacaaggagtaagtattttcttttttaagtttctgccaaatgatttttgacgctttctggaatcaagtaatttaatagtatagcttaattctagacaatgtttaagttggtctacctttattaaaaataagatatttggggtatattcaagtgcatggattagttttcctgacaaagcatgttttggtgtgtagtcttactttttagaaatagctatgcatcgttctacacaggtttaaaacaacttttttggggatttagggctattataggaatagtttgttgtcagaagcactttcacttgaagaacctaaaatgattgactcattcatagtaaatatgggcatgtaaactaataaatatgcactggatacatatatggatttatgaagaaggcgatttagtcaagaggatgtaattaaaatatgtggtctctaaaatattccagttacaagatatttgttttattaatatttgctggctaaaaacaaatgtggtttttatatatttttgtagtgtgttgagaagagcaaaagctttataaatatacctgatgcgctgtagaatgaaaatgtaaaagataacctgtatgtgttccgagctttaattttttgtttacaaattgaacagtgttacatgggctgtccagtcctgattatagagaggaagaaatggtaacagtatggcagataagaattacaattatagaaaatgaggggaaaataacaaacctgttttatgaaaattcactggtgctgtttacattggaataaaaagctctataaggaggaaaggcctttatctaattcttatctacagacacttacttccagtgaccatattttactaaatcagcttattttttatgtctaaagcaacagctgttctgaaaaatc

SEQ ID NO: 124404 - DNA, 1005 bp, Homo sapiens
ttatagggagacaaaaaaatgaagttattaatgtaaatatatatataatatataagaataattactggtctgtaaatgagtgatggtttatcaacagagggaaaggcatagactttgtttgtacaaggcattttttttttttttttgagacagagtcttgctctcttgcccaggctgtagtgcggtggcacaatctcagcttactacaacctctgcctcctgtattcaagtgattctcctgtcttagcttcccaagcagctgagattacaggcacaccaccatgcccagctaatttttatttttagtagagatggggtttcgccatgttggccaggctgttcttgaactcctgacctcaggtgatccacccgcctcagcctcccaaagtgctgggattacagaaagtagccaccatgcccagcctgtacaagacatttgatgcaaggattgttccattaataattcatggtgaccttgaaggaaatctttggtttttcaagattctatttaatacaacaatttcctctgtaatgtaaacaatgatttcatcagcgataataaagatgcaaaaaaagttttatcaaactttatatgatgtaaaaactcagcattcagctgatgcaattgagaatcttgagtacaccatcatttgaagctggaattttacctttaaggtttaaatttggcggaacattctggaaatgtaaaatcataatgttaatattaaaatctatgaagatcagaagtaatagtctcaacaaaccatagccagagtatgtattcaattctgtgcatgcacattaaaaatatgggaatacctgtacaggaagctagtttaggaggatgttaaatgtactggctaaaaacatgagctttggagtcagatcagtgttcaaatcctggctctcccgttattacacatgaacctttagcaaattccttgaaacttatgatgagaatgccctcctggttaaatgaagactgtttcatagaattttgagagt

SEQ ID NO: 124405 - DNA, 1048 bp, Homo sapiens
gtgaaatctctcttcatggtcaggacagttactgagcaacaggaaacacaactattccttataggcctggtgccctgtttttttccagccctcaggttgggagcctttcgcatattttgcatataacctctgactttgcaatggaacggaattttattatatttaataccatataatttttttagtactgtattttttggtggcttttaaagccactattcaaaatctttatattacccaatactgccaatattctaaaattcttgtgcaaataaattgtgtcattatgtacagttaatggacttagtaggcaaatcaatttttatttttttggttaaagggctctccattgtgtaagtgcctttaaaacatgcttattagttaagcatctcaacaatgtggaatgtgggttggttttatcactctccaattaaaagttattgctccataacttccaagaaaggaagttaggcacttggagaaattggttcagtattacattgtgcaaatagaataaataaatccagactactgattctcaacctgttttctgccctaaatcatcagagagataaatagattctctgttgtaataactgagtctcagattctagctcaggaagccattatgccttctcagtactggccttctaaaacttgatatgttcaattttcaaagaaaatcaatttagaaagaaaaaatatgctttgagatgataaaaaagggaatagtcatgtaatacaaaatccactaaagctacatttctctatgccttatagaaatggacaattatttaaatattaaaacataccactaccccaattatatattttataatataaaaatacttcttaaactaagtagtagtattactactgaaatcatctgtgtatatttgatatgggacatggataatgggtcacatcttgacaagcatttcaggcctattgaaagctggttgtaacaggatgcagtttgcatgaagggctcattatgattatatcttggacacagcacagtaacacttttcttttctttttttttttt

SEQ ID NO: 124406 - DNA, 1034 bp, Homo sapiens
gaaaatactcttctgagtgtttccgttctggattgttattagtaagaaaaatattttcacaatgatactatcaagcataaaattcagcaaattataatactacccttattacacagtctcaggaaaaaaggtaataagtattattttgcatttagtgatagaaatattaaggctcacaataacaattgattttaaaataatgattaattttccagctaaagttgtcatttgacaagcatttactgaaagtacttgagaaaacgacagcagtaattatagcagtaataaagcatagcaggctagacttgcctctgtaatgctcatgactcttgtgtaatgtagataattagcaaactatcgaaaccactggaggaacatcctgtaacatggttagggagacctttgtcctcagatttgttagctaatgacattgtataaggatttggcaagtaattgaattctgttgactcttaaatgtttggtaatgtacagttaaaactataaagtctgacagaggacatggagttggtaccttttcttttaaatttttcacagcaatcttccagtatgttcttatcttccttggaaaacctagtgtgtctgtctcccagcaggtgaaatgaaatgacaatagactttcattttgaaattcagcaatttcgtaagcttattgaaattttgtttatcatttgctaaactttactggtataaatattacatggcagaaataaaattataagttgtacattagtttattcatttaaacttttgtaacacaaagatcaagaaacataacatattctgtatttttgccaacaaatatctaaaatcattatattttaagttacaatatctgcaatcataataaatataggtcttttaaaatataaaaatttgaggcataaaagtaatatgatatgttccaagtcacaatggcagtaaatataaatgctaaactgaaatatgaaaatctagttgaggatttgcttagagtaagtttgtaaaatttgttttgaagaaagaaaaacagattg

SEQ ID NO: 124407 - DNA, 1015 bp, Homo sapiens
acattttgcctgctctaagaagtttcctcactcctccagcctctactcctccccacctaacacaatcataattgatcccttacttccagactttcctctaggatcttaagtggcacattattgttaaacatttttcatagccctcctatcgtttacctatgtttgtggttatctgcctttctaaattgtgagacgctaagtccttgtcttagttaattttgagtttccctctgcatcagagcacgttttatgtgtgccataaaatttggtctaatgtctttggcttagcttgtttgaacttcttatagttccaaacacatattttggattactccgggaagtataatgccttatacctatatctgccataaatatctccattcaattttccccccatttcttcactggacaacgttcacagttggccaggagcccaactactgagagatcttctttaccaacatatggctgaactgaatgattgcgctggacttgagtatgctcatttaagtctaatgaggtccatagaggtgactgtatgactcataacatgaagtcatttttccaattagcattctgacaaatgcattagaaagagagccctttcaatagatttccacagctgctgaagggatcaggtgtcagaagattttcagctttgttcggctgttctggtcaaataacttatttttacccagactttgccacttgatgcagctggcagtgatcatatgtcatctgagcctgagcccagtttaaaaatggtcctgttacagtgatagaacttaagaaatttcaggagggatcagctgtaacttttgattgactcattagtcttttttaaaaatgaggttatttccagatagtataatacaaaaaaaatttttaaaaacaaccccattcatgaggattagcacttggtatagaacatgtatttccaagcataataaaaaggactacagaccctgatattaccctacaataacacctaattcaactttggccttccaccacc

SEQ ID NO: 124408 - DNA, 2011 bp, Homo sapiens
ggacatgaattttgttccatctatcaataatatccagaagaacaacttttttaaagagtctatagcaaaaagcaaaaaaaaaaaaaaattctaaacacaaagtcaaaataaacctattgtaaaagcatttcgtgatgagcatgaaaaagattgtttaaagatgatccccccagctacccattttccaaaactacacagatcacagctcatttctctaagtggagcagttatcaagaaacccaaacaccaaaattgctactcttcacatttaatcctacaaaaagtactccaatttcaaaatatgtatgtaacctgcgatttcaatgattgttgttcatatacatcatgtattattttggcccattttgggcctaaaaaagaaaactatgccttaaaaatcagaaccttttctccccactatgcttatgtggccatctacagcacttagaataaaaacagatgttaaaatattcagtgaaagttttattggaaaaaggaattgagatatataattgagatttggtgaaattgaaggagaaaatttaagtgagtctttaaaatatattctgaatgaaaactgtattgaggattcatttttgttccttttttttctttttctcttttctcctttttcttctttttaatagtctagttttagtcagtcagtgaggaagaattgggccatgctaacgttatcacaagagaacaatggcagaaatggtattagttatataatatttaaggacaaactatatgttttgctgttttaacgtagtgactcactgaactaaatacataattgaccaacattaagtgtatttccaatacagaagggttgaaaatattacattataaactcttttgaaaaatgtatctaaaattttttaagttctgttttgattccactttttggttgagtttttatgtttttgttttcaggtagattaataaatctggcagctgatttctgcaagattcttgtgttttgaatttctcattgaattggctactcaaacatagaaatcatttgttaatgatgtaatgtcttctctcagcttttatcttcactgctgtttgctgtctcttgatgatgacatgttaatacccaatagattaattgcaacaaacacttatactcaaataactaagtaaaaataatttttcttgttatgtccatgaaaagtgcttcagaataaaaatccacaagactgacagtgcagaacatttttctcaaatcatgggcggatcttggaggtctagtttcccgtagatgctgtaaccaattaccacaacttcagtaatttacacaaatttatcttatagttctggaggcagaagttcaaaagaagccttaagagactaaaaccaagatgtccttaggtctggttccttctggaggctccaggggagattcttccagctttcacttctagagtctgctgacattccttggctcctggctacatcacttcaatctctgcttccatggtcacatactcttctactatagtcaaatttccttcctgcctcttataaggatgcttgtgattacatttaggggatgctcagataatccaggacaatctctccatctcaagatccttaacttaatgacgtgtgccaagtccctttggctagataattattcataggtcccagggattaggacatggatgtaaggggtgagggcagggctgttattcagaacaccgcacggaggaggaagactgtgtagcaaagactctaattgatttactcaggaacagtggagttctgctgagggatctaggatttgaaagtactagagtttgcttttatttaccactgagatattttccccttattctgcataaataattttgaaaactttctatattaaatttcaactattccactaaaatgtctggtaatcacatcaagcctttagattattcaaatccttccccagcccccaggaaaacactaagtcatgaaacagaaaaacagaaggtatgataataatagtaataac

SEQ ID NO: 124409 - DNA, 1025 bp, Homo sapiens
ataatggaagacatcattccccttggttggttatcatcccttgttctaaactcagtagcatttaacatagtccagcaaatgaagtagtagccctaaaaatgtttattcaaaagcaatacagaaggaagcagtgaggaaaggcagagtccttgagagattgcataagcttgattgcatgttacacattttaattcatttattacataatttttaagtatagccagtagcaacccgtcaaaggaagtccagtacttaaagcaaatgtatcttcctccacagccccaaacaaaacaaagcacattataaaacactcagaggtatgcaggccatttattttattttattttttctccaaatactttgaacaaagaaaaaaataaaggaaaactaggatttactatctcagctttgttcctgatagtgctatttttatgtttatggtcatttcatcatttcacctttaagatcttaattttctttgtatgaaggactaaagtaaataaatgtatgccagactcctctgtttctggcacagtgctctgtgctggagacttccatcccaaccttgcaatgggctttctgaggcgccattcctgtctccatttcacagcaaaggccactgagaggtagtctaagaaacaggtccaaattcataaaaactactaaatgttcattctttcaaacctaggtacattcagattatttgaattctctaaagtggttcctcttacttaaattcagggcaaaagaaacaaaaaatgttctaaatttgaattcagagcagcagcattcattgacaattgttacttttccctcaaagatataacaatactttataacccaggaacacactgttgccccacatcaaaaatcaactagcaaatgccttgttgatatacaggaacatggaggtgttgtgtcaccttcagctttctaaaatctcatacctttacacacacccatacaaagtgactatcaaagttaatagaaagaactgtattcatccacccatccccccaccccgg

SEQ ID NO: 124410 - DNA, 1050 bp, Homo sapiens
tttacctcaactttatgaggaatatgacactaaaacaactctaagactacattttattgtttttaaatgtccactaatacccatgatgctgagaatgaactggcatgataagtatcaaactctgtggtatttttaaaaatcatatttctctctccagagacctccacaacattgtattaaagttgttgtgagtatgtgagtattttattttctaggtgcatcctggtgagtttctagaaaataatcctttataaatgaataaggattcagaaattattgtttaaggagatactaatactttattttcacatcccctccaggtttgcatatagttcggctgctatgcctattaaaggttcactgatgtccatagttaggtttttgaatgaaatattctttagaaaatgctttcatttcttattgcctccccccagcgcccccacccccgcttcaattcactattgctcagaagatttacattaaaatgaagtttatctttgggaaattgagatgttcctgccactgtgattgtctgctgggatatatgatgttgtccctgttacatcgcatctctctactcttaaaaaacatactgatgcatgtcattaaagtactttatttcttcattcagagaataaaaattactgagagggaaaatagctaggatcggtatttctaaaggaaaaaaaaaacctggagaaaggttattactaataaagcaaagagagacagaatgatctctttgaaaagcaatctattttagtatatatgacatagcaacaacttggaattttatggaaatgaaggcgctccctagccctattagataatgtcctcttggggttgcctaggtttgcgtggcagctgcagtttcttctcagactaataaaaagtggaaattaatgagagagtgactttagctggggtaggaaaagcaagctacactattctgtatactgctttggctagcctggggtggtgatgaggtagggatatatatacattgaggagagaggattttttttaaagctctattgaaaaactcttaga

SEQ ID NO: 124411 - DNA, 1031 bp, Homo sapiens
agttttaagtactgtggttaaagtactcagtttaaatacttgtgaggatcacttaaaaatagtgttattaataataagtcccatatggtgaattcttacagtgtgcagatactgtgcgaaatgttgcacataacttactccacgtggtcctcccaacaacccttttaaggatgtcattattattattattcccactttacagatgaggaagttgggagttagagatgttaaataacaacaaaatgtcatactcccatgcaatgtcagaactgagattcaaaatcagttctatcagatgacaaggtgcctgtttataaccattgtgctgtacttgtactaatgatccttaaactataatctgtggatgcataataggacagtgtgaatatgctgtcatcttaatatttttgcatgagttaaactacagcttgttacggttgttgaactttgtacattttattcgtgaagaaacagaactgaatgcatatgcaatgcctccttcctctgccacaaaacatttgcctttgaagtcgccgcttagctagtttggatcatagtcaagcatttaacaaaagttaaaatgtaatgccaaacttcattggttggattttttattagataaggtagaaatgaaagcagcaggcaatttaattagcagtaatttttctgggcaagtcattactttgatgaacttcagagcaatgtttatggctcctaattaaccatgttagtcatttgattgaataatcactttggaaatgtttctacaatttgattagagtctgacccactctgatagtcataaattaactgatatcacttaaggataacatgactttacttactttatggggataatctccccttagccatattttttcaggcttctctggactgtataaaggacaccaattttaagtatagaccagatttaaacaatgctagccaagtgtatccattttaagagctagatgttaattttatttacactagagtataaatagtaacagcaattggcaaaaacacagtcg

SEQ ID NO: 124412 - DNA, 1056 bp, Homo sapiens
acctcatgatccacccaccttggcctcccaaagttctgggattacaggcgtgagccaccgcgcccggcctcatattttcttttaaacctctgttaattgtcagagtatggtagtatgaaataaatactcaaagttggtcaggcgcggtggctcacccctgtaaccccagtactttgggaggccaagacggcagatcacctgaggtcaggagttcaaaaccagcctgacttaagatagtgaaaccctgtctctactaaaagtacaaaattagcagggcatggtggtgcatgcctgtaatcccagctactagggaggctgaggcgggagaatcacttgaacccgggaggcagaggttgcagtgagctgagatcgcaccgttacactccagcctgggcaacaagagcgaaactccgtctcaaaataaataaataaataaataaataaataaataaataaataaatactcaaagttacagttgtgtctatgttttctatcacttcaactttattttaaaatttcagcttagtaagactatcacaggcttgtaaaacttgtaatagtgcgagcctagtagatcatataatctaatgttgtttggatctggtcattatttgtgtggggtattgtccaaaagaaaaccccaggtgcttacaagagaagtttataattgtgtagataaaattctatactgttatttttcgccatgtagccttaaactttcaaaagcacgtaaattcagataactgcgataactgcattatttacttattctacttttactttttctttctttactttacttttacttttttttttttttggacaaggtctggctctgttgcctaggttggagtgcagtagtatgatctgggctcactgcaacctctgcctcctgcgctcaaaccatcctcccatcttagcctcttgagtagctggcactacaggtgtgtgccaccacatccagctaacttttcaagtatttttggtagagatggggtttcaccatattgcccaggctggtcttgaactcctgggctcaatcaatcctcccacct

SEQ ID NO: 124413 - DNA, 1022 bp, Homo sapiens
agtgcagtggtgtgatttcggctcactgcaacctccagctcccaggttcaagcagttctcctgcctcagcctcccgagtagttgggactacaggcgtgtgccaccatgtccagctgatttttctatatttttaattagagacaggggttcatcatgttggctaggctggtctcaaacgcctgacctcaagtgatccgccagcctcagcctcccaaagtgctgggattacaggcatgagccactgcaccctgccgtaaaaagcattttctaagtcagttaactcagcatctatgatccaaaggctattcttacggaagacctttagaactctttattgcttaattctatacaccataaatgttgtgaaaataaaagaagcctcgtaagggaaaaggtagcttatgattgtgctctaataaagcctgacattaattatgacatgggaaatggaaggtctattagttataattataattacaggaatgcaatttcaactgcctaatatttaagataaaaaatgcaaaatagtatgttagtagagtataaatttttattcaggagaaaagaaaaagacttcaatcagaagacagtgaggaaacaagaaatagatatttagggctagcttaatgaaccagtacagtatgatcatgattgtatcatgatactaggttctaaaagatccaatccaatccatctattattgtccctttccttctcttctctagcctattatgctgcataaagcagtacacattttttgttgttgttggttggttgtttttgtctaaatccaacatgatattttttttcatgcccttatggtcaaatgcccacataagaagtgttaaatacacattgagtgcttcatctggagtgcgtcatggagattcccgtagaaagtatcctattttcttagagtcaagactgttttctcattttcatgaccacatatgaggttttgcaaattcagaatgtccagtgacgcaaatattttagatgtttatagcaatatattttattag

SEQ ID NO: 124414 - DNA, 1093 bp, Homo sapiens
ttgattccttacaaagctttcagttacaagtattattaacttccttttaaggcttcacaagtgagccagtttcttattttaacttcaagttacaattttctgattcactccttgacagttcttaatgataatttctgtttctttttttggctaatgaaataagcaagagaagggaaatgaatgcagtgccagtcagcctaactgctctgcaatatccgagtttctaagtttattttctgcaggtgtaggtggaatttcagtgctttccatgaccaccagtgagcctagagttaaatcacaggatggagtgttcttagaaatgctaaagcaatcgctttgccattctttagcttttaccttatttttatttaacattaccgaaattaaatgctaactttccaaattaaagtctcaggaatgcttttagtgggggggttattaggcttatatttgctcatagaaatgttttataggttatttttaagcactcctggggcatttttagagcacttttaaatctttaattaatccacatctttgtggtgggtcaatgatattatggatgagaaacacagaacagaacgattatgtgattagccaattgttataaagtataaccaagaacaaagaggcataggactcatttctagccttctgctgaggcctcagaacttcctcatgtcctaacagcgggacttgccccaaacctatacaacactatatgttattttcacctttggagatcagctgtgcatttatgcttatttttatcaacctgatactgtatttgaatctattggaagccaatatggtctgcattgctgtttgacagtaaagaggtagtctttttacaaccggcttgggtttgagtccttataatacctagttttgtttcttactagaacgcaatgttaattaggacattgttgaggaattgaaagtcctgatttgagaaaaaagtcattcctctcttgctttctcagcaggtttttggttggttggttttttgtttattgatcagtttggtaacagaattaaaagatagaggatgcagtttgagatctttttctggtatataatgatttaagaatct

SEQ ID NO: 124415 - DNA, 1031 bp, Homo sapiens
catatggtttctgttacaactactccatttggccattgtagctcaaagtagccctagactagaccgaaatgaatgggtgggagagtgttctactaacgcttcatttacaaaaacaggtggaaggccggatgtggcccatgagctgtaatttgccagcctctgttctagaacagcatacagaagactattctaaaacatgatttttgaacagaccagaaaacgcaacctcaaaataaagagactgtcttcaaggctcttcctccaaaactatggattttatttctgtttagagaagaattaaaaatatgacgtgtttctcttcccagggtaattgtttgctactcacagaaactgataaccctatttcactcttaagacaagagttgggaggaaagcagagtgaaaggtcagagccaagacaacttatcactgtatttactttcgctgtccacatatagaaggagacctttccatcattgtgacattttggttatcagagtataagggaagcttcaactgttgaatagcaacattcttccttcagtggaatatgagtggtgtgaatttttaaatgcctttggtcacagtaataaattgaaagaaggcagattgcctaaaagcaaacgtgaatactctgagaagtgtttttatttagatacacgtgccaagaatatagtactaaggtcatacatacagatacatgtatctgacacacgtgaattagtcaaacttaaagaatactgcctaatgtctttattagggaatttttaaaacaccaaataaagctctaattggacttccatgagctcttgataataaggactgtgtcttactatttatcttcattccatagctccatattccttcaccctctcaggacctgccgtagtgtctggggcatggtagatgaattaacaaatgaattaatgaattaattgctgaagaaatgaatgaataaaaatctcatataatgtgatagtggtgctcatgcatgaaggaaataatgagtgtctgtgtataaatcaatttga

SEQ ID NO: 124416 - DNA, 1059 bp, Homo sapiens
aaaaagtgttgcactggaaacattctgatacttgtaatacagaccctactataggatcagttagcatcttatgtgtaagattatgggttatgaattctggccaatcaaggacaccctaatttgtgggtctaacaaaattgcttctatcctcaatgtttttttttatttcaaagttgatgtattcattgaaagggaaaaaaagtgttgatttttcaattaagatgcaacctttacaatgtaaagcaataataattatagtgttcgctcagcctgaagaaaaaatttcactacttaaatagcaataatcaagatgagaactacattagaagggtgctaattttatgatcattgctatttaaataataaaaatgaatccacaggacccttgctgtaacactatttgcaatgaagtggtattcagctttaaaatggtcctcttgaagcccatttaaaattaatgggctgcttaaattgtgaatgaccaaagatcaccttataaaatagctacttttccaatcaatcaattattaggctatggctgggcttctacaggaccagatgtatttgacccaaagtatttcacaaatattagtgcaatcattcttatataataacagatttttctttttcttttttttcttttttttttgagatgaggtcttgctctgttttccaggctggagtgcagtggggcaatcatggctcactgcagcctcaaccacccgcgctcaagcgatctcccaactcagcctcttgagtagctgggactccggtgtgcgctaccatgcccagctatttttaaattgttattattatttgtagaaaggaggtattgctgtgttacctagcggtcttgaacttgtggacccaagtgatccttcctcacaaagtgttggcattgtaggcattagccaccactcccagcatatgataacagattcttatattttcagcccccaaggaaaatcaataacaacaacaaaacaaatcagaatttgagtttcatcaattggattctgcatgctaaatataagaaaaataggttctagtttttctctc

SEQ ID NO: 124417 - DNA, 1045 bp, Homo sapiens
tttgttcagcattttagatttcataggccattttcacatcctgtatctcatttgattctcacagttaccttgggatatagacagagtagacaaagctcatacagttttagtgtggttcctatataaggaactacattcataggtgttgaatggcagaaccaaaactcaccttgtaacattttcccttgtatgcattccagtaaaatgtacaaagttgttattcattgatttgccatgactatacaagtgaattaaagacgtaaaataagtgtttttgccacatccgtgtatacatatatatattcgtatgcttgtgtaatacaataaaagaaaaatggaaaatttatcaaaaatgatttttattcttcatggaattattctaatttataacataatgcacaaactaatacgtatatggaaagcaagggtggagtgggcaatccctgaagttccctgtttgtctatgaaaatctttatgcttgtgctttggattgtagaaatgtggttaagttctatgtatacataggtcttcagcttcaggaatcctgaatgtttgcttaacaaaataatgatgctctcaaaagagaattttaaaattggtttggactctatttggcaacacataattaggccaggaacatttgctaatgtgctgaaattaattgaatatcacattttgcgtcttgtctgatactacttttttatattatttcatgctgctgatagtgttgatgttgaagacactaaagccatatgatataaacgtgatgagatttatctatgggactgagtacattgtactgtataagagtaggacattggacctaggcctcttgagttcaagtctctactatttactagctgtgtgaccttgtacaagcaatttaagatcattgtgcctcagtttcctcttgcataaaaatgggataaatattatctcccctagggtgactaaatgagtatttatatatatacacacacacacgtgtgtgtgtgtgtgtgtgtgtacataacattgtatatgtttatgtgaaatatctaagta

SEQ ID NO: 124418 - DNA, 1100 bp, Homo sapiens
tccagtatcttattccagatactggaataagaaatacttttctcacccattttgttattcagaagggtatttttaaattctgctacatcactagcacaaatgtatatttgttggatgaaggaatgacttcaattcaatatttttatgccaggttttgtctcgtttatcaatgttaatgtatctatgcataattcttagcttagtattatgtcgatttttcacattaagtatgatcgtgatctataaaccaataccaagttctggataaattttgattagaaatatgtgcccccctttttccatttatcccccagaacttttcaacactgaatttagtcctaaaccataagatgtttttcttagaattatttccagctgcagagttaccagcaaaagttgttgtcaaatactatcaaggccaccgaacatggttaaaaatggctcatccctataaagatgtatgggtagtattgaagcaaacctctcagtagtgttagcttttcctctgaaatggtggtcctgctgtgaagtgaacttttactgctgtttggggttgtttttctccatcctcatgaacacaacagccttattatgttgatttgatttgattccctagtccttggcactggggccagaatgtcaggtgatgcagttgtctcaactcacgggtctgtagggaaagccaaatagctggatgtcattgctgtgtttctctggatgtttttgccatctgaaatctccatgttcctgtattctttcaggaaaatcaatccctgttttcctttgtgaaagctctattttcattcatagttttattgcagattaaaggctgttgcattagaaagttatcagctaatcaataaacgtcagtcatcccattttgtgataaagctgtcccattgatcaaagtggaaatgtgggcttttggcttttacatagcaatttctgaagttcggataatgtgcttatggaatatatagacctatcctcttatttataggtcttatgtagagatggacatatgaatttatgtgtacgtaatgtacatataagcaggctaatatatacaaacatctgaattttatgtaaaatataacatt

SEQ ID NO: 124419 - DNA, 1033 bp, Homo sapiens
taattttatacttattttaacaaaatgtactctgtccaaaggcaaggccactggattccctagtggatgatggctatcagtgtctgtcttaacaccttgttgacctatgctaaaattcatgttataggggactgacaagaatatctttggacttttaaaaaatgaggtactctactgttaagtattactatttacagagtattgtcctattcattgagatcatatttgttctttaagattcagatcagatgttatttttcccttgattatcttagtcagaattaacaaattttatgtgccaatacatactttacatagatcctaattttaatcctattttcattggcttgtagaggatggttcatgcccggtttatgtgtatgattcacatgtttgaggtattcattgaatactgaattgaatgaatagtttcttgggtatttagaatcttattttttaaaaaacgtattcatgcacaggtggcttgaattgtttgaaaacgagtgccaatatctgcttttatttccctctgttttatttttctttgagggctaatggaaagctgtttgcatttatgtaacattagagctaaatctcagttatcagattagggcactctaataaatattattagatactcctatctcaccacacatttctcaataatctctattaggacaaatactctgaaataacttgatattattcctgttttacatgaagagaaacccagggcataaaataatcaaatagctaaggcatgtgatgactgaaattacacagctgagaatcccatctcatggttgcttagtctatgcagatcttccctccctgatagccaatactcagactacacgtacaagcttcaaaactgtttctattctgaaaaaaaaaaatctgcgtggctaacaaagaatgtgtttcactaatagtttttgaaaattattctcatcaaggtatgatagatgaagagagaccaagagcaccttccaatagaggtttgtctcaagaaagatgttctgtgaactcatct

SEQ ID NO: 124420 - DNA, 1050 bp, Homo sapiens
ttacttaccctccctataattagtcacaagttattttgaagaaagtgatctataccttctttggttgaacttgacctcatattaaataattattttgttatacaatgaatggacttgatagaaatataagccaaacaatatttattggaaaaatctaggtaaaggatgtcagtggaaaatatttgcagaaccaaatattatactttttgtccccatatttttaataaatacacatacatctatatattctgatatgtaaaaaagtaaacacaacaattattagtatttgaaactaaaataaagcagtcatgaaaataaatatatttgggggctaccacctcatagaatatgtaagtttcatgaaataagatataaagaagaaataacctgagctaaactagtacatgtggaccttcacatcgtaattgtatgcttagtgtttgttatgggtttttattggtatcatttttccactttttttaaatcataataaacatgtatttaagatgcacaatgcatatttgcttctgtctgttactgaattttttcctaatgagagttggtgctgtatcttactaggtaaaaattttggttagatgctattgtttttttaaatctaaagcactatttgcatttgacagtagctaagggtaatgttaactcaagaactccattattggcaatatatcaggaatggctagattaaaaatactgtttaaacaatgtctgattaagctttaagatcagaaaagtacctttgtgcaatggttttgtatgtaatcttttgaatcttttgtaaatctagagtttagcaaagaagtttttttggtttgttttgctgtgggtatgacattattaaactattcagagatttgtttcatagttactcctagttattgcctatatagtcctgttttgactagtttttaggtcctgttgaagaggcttgagttgtgatggaccctttaattatcttttattgtagcagaatcttgtattcacatttctgtttgcaaaattggaatgattatattttgcaaatgagatccg

SEQ ID NO: 124421 - DNA, 1091 bp, Homo sapiens
cccggattcaagtgtctcttgcctcagcctcctaggtagctgggattacaggcatgcgctaccatgcctggataatttttgtatttttagtggagacggagtttcactattgttgtccaggctagtctcaaactcctgacttcaagtgatccgcccgccttagcttcccaaagtgctgggattacaggtgtgagccactgtgcctggccgttatatcattcatctttgaaaatctaccacctttcattttgttcttcgtaacaaagttatgtgttatttttagaactagtttgtttccatttggttacattagttcatttcagtcttttctctgtagtgattcacatgatagtgactttcacatttacattttatcttcttccagagcatttccaggagtgtgcataagtcccagggttatgcaaaattcccaacagaatagatccttgtaactctactgctttgtcttacactcagtaaaacacactggaatgcaagtccattggaaaaaatgttattaaagaaataacaataaccctgactcttcactatttacaaaagtaaatcttttgcaaacttctgtactttatcagatatctgtaatacaatactagaggaccatacaaaaatcatccagacagacccttgtgtggggactcaactgtttaaaaccactaatattattacatggatggcactttaagtaaatgaaaatcataactacactttgtttctttaagaatttctggttttaagaatagcatttgggtcgggcacattggctcacgcctgtagtcccagcactttgggaggccgaggcaggcggatcacctaaggtcaggagttcgagactagcctggctaacatggcgaaaccccgtctctactaaaactacaaaattatctgggtgtggtgtcgcatgcctgtaatcccagctactcaggaggctgaggcaggagaattgcttgaacctgggaggtagaggttgccgtgagccaagatcgtgccatcgcactccagcctgggtgacagagtaagattctgtctcaaaaaataaataaataaaataaaataaataaaagaaagaatag

SEQ ID NO: 124422 - DNA, 1013 bp, Homo sapiens
aatgcgcaaggagtgatgcatggagtactcactgtcccttaattgcagagtgagcgttttgcctgtacaaacgtggttgccttggggtttactgctgatatttataatctgccattctaccagctaactgctgctactgaccaaaggagcaaatactaaggaaaagggtataaatgccatcttaattatgaaactggcctaatgcatttttgttctgttggtgacatctaaatttgttttattttttctaatacagatacctgcattacttcaagtaacagatgttgtgggcagtgttttcagcatttatgtttgatatgttaaatttctcaggcgtagagggttgtgcaaggttttgtccagattctctaacatgttacatgtttcaactcagcttggttataaagaaattactgtggtaaaatatacataccacaaaatttaccatttcaactatttttaagtttgtagttcaatggcactaagtacattcacattgttgtacaaccttcaccactattcaacttcagaacttttttgtatcccaagctgaagttctgtacctgtaaaacaataactcccatttctctgccctcagtccctggtaaccactgttgtattagctttatttttgatccgagaagaaaactgtataatgctgtttgatgtctaaatacaggtaattgacataggctttcaagaaacttactcagcaactatatagaccttaattagacacccttagaaacactcccagaaggatgatggctaatacaagtcctccccttcttgattaaagtatgggaagagaatgtcatattgccaacatttcccttcctatgggcaattgaattcttctttctaaaagctaaacacgtcgtctgagtaaaagaattaatctcgttgatattttacatccaaagtaattggtaacaattccaatactataccaattgtcagggtaaaatgaaccacctataggtaattttttactccttttcttatttgacctc

SEQ ID NO: 124423 - DNA, 1055 bp, Homo sapiens
cttagctttaaaaaaaaacccaacaggcacatagtttgtaagaataggagggttttcgcttccctgcagccaaccttggaaactttttcatcgcttactttttcttaagtaatgattattatttcatttgaaagttaaaaataagcataacataaaggcaagctatatttaaaattacccatctctaaggcaatattagttaagaaaagtattaaaattaaaaaggagaattggtgagtttgtgacatataggtcatgattaatatttttatgaatttctttctgataatatgcattgatacgtagcaaaaagacagaaaacagtaaaacaactttggataataatctaggtaaaacaaatagctgagagtgcagatactgcccttttaaagccgacatcctgagacttgatggcaactggtctattaacgtgcaatgaactgatagagccgctccagctattaccaataaaatccacatgcttaatctccttgaaagcattttattggtcttttggtatatactttctccccttctcctttcctcctcttccccttcgtctttaattacatagtgtggggaaacattttcattccccaaaggtgattatatccagcacagtttataatagatagtagtggaaaaaacattgcttttttaggctgacctctattgttaattttcaactttggagttggtatggcttgctgcaagttttcaggcagctgcagtttgctccttcacagtattcccctgaattgaagaaaaaaggaaatgtatgatacaagtgtggcaatactttgtcatattttccttgcctagatccaacttgtgtttttagttaactgctttccgtttactctaacttgaaattagaggtatacttaagcctttgtctatttaagtagcatgctgcttcgtttggtctattcagtttcttaagattagcttctgtgaaaatgtgagtcatatgttttttgttaaaattctgtaatatgttcaggaataagtgtgaagtatttattcagtatgttaaggagttagaacagaaatag

SEQ ID NO: 124424 - DNA, 1064 bp, Homo sapiens
tgtaaatgtgtagctgctctcttgactgttattttgtttccggtctagatgttctttcaggttcactttcatcaacaatattctctgtcttcagggtaaaatgttttccagtggttttgtattgagtcaagtttagtgctgcctccacacttcgagtaggagttttatctgcaagaacaacctttctacagcaaagcttattacatcatacgaataagggttttttccttttggttttatgtgaccttcaaacaacagtcaggtcaacttaaaagcagagatgtcattactttcccctcaattcgctttaatggctgatggtaaatttatattcaaaatcataagtaatatgtgctattgttacttactatgtgtaatgtcatccacaatatacagtagtcataatacactcatttttatttttcagaaatcctacttttttttaatggaacataaaattggttatgtgctcatgaattattttcccccacttggtgcaataaggattaaaggctttaaaaacgacattattttatgtggtttacataaaacatgaatttagaattaagcattgaattacagaactccatataatctcttataattgaacaacaataatttcatgtgtgtgtgggcggggagaggatgggctatcacccctctttttgatgtgctagaaaataatctaaaatatgagagaaagacttcccatttgagtttgacttaaagacagcagataaagtatattttatttctaaacattcattggaattgcataaatgttttttcatccatgttttatttacaaaatagaaattttttttaaaaatagaaaaataggatttggtgtagtatagtgtagtttttccagaggatcctaataaataaaatattgctaagcttttctatttcagttataggaaatgtgcagtttgttacattttgtagtataactttattccctttgatttgtgtataatgttataataaaaaataataatagagtcagacctctgtagcattagagaaaatatttggctagaaacaacggctagttggctctg

SEQ ID NO: 124425 - DNA, 1049 bp, Homo sapiens
ttctcttttttttttttttcatttctctactctttttgctttttttttttgtgggggtggggtggggaggaggggctgtccaagagagaataaaacccactgttttaatctagcattgaaccagcctaaaaacaactttaagtgtaaatgcttcaggttgttttgatgctgagataccatgaatatatgattgataaatagtaatgtgctaagatcggcactgggaagcaactctccctgcctgcttaacataagctttcactgtcaaataagtgagaaaatgaatattagagttgatactatggacttctatttttctattcagagaagatccattagacttatgtatgcatgtctgtgtgtgtgtgtgtgcgcgcgcgtgtgcgtgtgtgtgatctgaggtttacattcttttaaaggattttatctttccctttgtagagtcagcgtgggagaaattgtaacgagaaaccaacaaatgtcaggaaaagaaaattcattaacagagatctggctcatgattcagaaggtgaggtttgattttgggctgaatccccatttttttacctacactctccaccctgctaaaagaaaaggagcacttcagtcttatcttaaaaataataaactttgaaattactgaatctaactaagactttaacttggaacgatttacataatgcggcagtttgcatgggagactattttatggtcctatcacaaagtaatgaaagaaggaaataaaaacttctcaatgacaaccttcttttaatcattgttttgtgtttaaatacctttgtccatggggcatataactcaccccattcactaagataacaatttaaaaatatccaatacagtgggacaaattcagcagctatgtacactgcttacttttttctttctcctttattacaagttaaacagtattagtgattgtttggtttcccacctcctttacactaaaaccatctactattaacagaattttcaagggtgattttgatgactaaattgtgaggtcataataccttgtttatcgaccataa

SEQ ID NO: 124426 - DNA, 1155 bp, Homo sapiens
tgaaggtgaggattggaaattcttattccaactgtctaaggcatctaccaatatgtcagctttcaataagacacatcgtatgagttgatttatgatctttgcctcttcaactatttcattttttttcttggttgtcagtaacctctgacttcccatcttgcttctctttgaattaatggaaatcacagggatgctcagacatcttggagagatttatgttgtcgggcagagcttggcactaggctatatattactcccaccagctcttaactgagtctcaattggttccattttcctaagccttcctctctaatgtccttttaaaaaactttctagtatatcacaaaattgcatttattttatctgctcttgtctaggttgttaagaacttgcatatgtatcttggcattttctaaactactgaagatttactttataaactactgatcacacagacctcagcaaaacattggtgctgccaccttccccaagtttctccagattttcctccataagccaccttgaagctgacattccagcctcccacatttcacattcatttcggagttcatatttctgttgtctatctactgcttgttcaaattttctttccctataactttctcaatagcctgacaaatattttgagttttcagtgcctagtgacatgtagcagaagctatgctacttatgcatcattgtctacaacacaggatctgtgtggagattacccagatattatgtagaccaccaaactaaaccataccccccataagtctttcttctccataaggcgtctccacatttcaaaaataaacaatgcacaataaataagggataagttattctgtaacagtctccttgacccaatatttcctggaagaaatttctttgagggataaatctgataaacatacataatatgggttagttatgactttggagtagaaacagcattttcaaagagtagtttcttccatcaagtccactgctagaggttgagatttctccgtgtagttagtctgtctgtctgtctgtctgtgtctgtctctctctctctctctccctgtctttctgccccgcaaatgctctaggcctctctattattcagtttaaatgccacagaagaggcttctgaaactttcagtggcatac

SEQ ID NO: 124427 - DNA, 1063 bp, Homo sapiens
tgtatatcgattgtaaagttgtaatacaatgtgtcaggaaaaaataaaagaaaacctttaagctttaaaatatacaagaaattacggacccagttaaaccttaagtgtataatcctgtcaaaatctgacaggatttcaaagtctccaaggtaaaccccaatgtgaagtaaaaggcaaggctaaaatctaaattgaattttgttttctaagaactgcaatagattatttttagttttcattactcattttgatgaagaacaattttttttaatgtaatattccctttggcaagatgccattccttatctgtatgggcttggttattttatagattgacatgccaggtcagaaatgataacatttagtcatgaagaattctgacaatgtttggattaaaacacctagaaggactgtccttagaatttgaaaaaatgttctatctttacctctaagacaaacagtggtgaggatttctttctccaagtgtcttcatggagctgttttatgtcttgatcttccctgaggaatttaaaatttgcatccatgcaaggaagcaaagaactaacagtttactaacactgatttagtgcttaaatatgcaacagaatctgctagattctgaagtattgcctttaatttcacctcagctttgaggtagtcaccattttcccacattatagttaagaaggaaaatttaccttctcttccatttctaaagaggaagaatggaaagtggaaaattggagaaattgaggagaagggcaatttctcattataggtaaaatgatggggagagttaaagggaagaagtgagaagaaattgggatgaggggcagagctagagctactattccacatagaaggtctgtgaagtccgaggttaggagttcgagaccagcctagccaacatggtgaaaccccatctctactgaagatacacaaaattagctgggcattgtggcacacgcctgtaatcccagctactcaggaggctggggcaggagaatcgcttgaacccaggagatggacattgcagtgagccgagatcctccactgcactcca

SEQ ID NO: 124428 - DNA, 1164 bp, Homo sapiens
atgaaattatttttaattcgactaagtgtagtcattggagctttctttaatcaatttcagaagcgtaagttagatttagggatttttttttttttcatttgtggcattctgtgaattggtcatgggtattcagattgtgaacctggatataaagaggagggatgaacgttattttcggtgtctgacaagaacaagcatggagtctttgaggtcttataggaagtaaacagaagtctaagaggtcacacacgtgaggagaataggtgattagccggtgtattttccccagtgctatgtcattttctcggagtctcatttaaaggataatatgcccacagtaacagaaagaagatgtttttctcagacacatcccatatttactatatgaagtgtggagaaatgcttattaaagatttttgtcatgatttccaggttcagttcaggagtgggtggtcacttgtgctaggacttcatttcttacagccctatccccacatcatttttccatggaagtaaatattatctaatgagataagcgaaggcatgttagaggaaaagcatgatttatagcaaactgtagcttcaaatggatttatccatagtagtatactagtctattttgcaagtgtacatttctcatctatcaaaaatcatgctatttagcttcagaaatcataaaatgagattgtccctggaataacttttaaatatctggcatttctttcctatgtaattttacgtaagctatataaatagggttagctgtgacctaaaaaatatactcagtcattttgtctggaacacaatatagcatgtgccctcattaattttatctgtgggatttttaatggtataactttgcaagataatgaaaactgtatggaatgaaaagactctcagactgaggaatatcattagattttatgattaggtaaattctgacaagttgatgcattttttaatgcatacatgttttacttttcctctttttcattgtttttatacatcacccaaaggggttaatgtatttctgtattatatttatcccaggccaatcagaaaaataattgaaaaacttattttgactttgcagaaatacttccttgacaggtctgggttaaaaattatgtctacttctatcaagtcaaagttgtccctatctta

SEQ ID NO: 124429 - DNA, 1002 bp, Homo sapiens
aaaaaaacccaaatagtagaataagtggttcatcaaagatgttttgctcttgtgggacaatagtgtgaagttgtgaaaaggtgatttttaattgtttcttaaactcttatttccctttagaaaaaacacactgattttaattcaatcatagctcataaatagtgaatcatatctgcaagcagacattcaagacttcactaccactagagaagagtaaagtgatggttgatggtgggaaattcaatccagaaaccctgtcctacaaattatcaggttatgtgataattaaaattctaattttaaattctaatttcaaattccatttttatacatttatttcatttagtattcaaatattgtatctatgtgaactgtataacacgtagggctttccaaatacaattttttttaaagtaccatcttaggtcaaactatcctattttagtcttctttctaatccacatgaatcagttatcaaataatcaggggaaggacagatgggatgagaaatgcgcagctatttaaaatgtctttagagttccatcaatagagtaatctcggaatgagtttcccccagtgaggcagctgggccatgctttataatacactttcttttagaatcccaagttgtgtattttgttctgattgttcataatgagatggaattgtgaataaggttatggagaagtcaactctatatataatttctcaatatgaaaagaagttttattgagtttcatcattttcttaggtttgatgatataggacttgaaacttactttctgcgttcaaactgtctggatgtaaaatccttactatttggatgaatttaagcaagtaacttaaattctatgctttagacttctccttgtaaaacaggaataatgaaaatacaagccatttcataaaattaaatgacgtaatcatgaatgtaaggggcttaaacagaatacacataataaacattaaaaaatattagctattatttccaacttacttgga

SEQ ID NO: 124430 - DNA, 1018 bp, Homo sapiens
tactattgctgattgtttttgttctctatgtacatttttttcttaagatcagtgatgatttaatatatattggcttgtctttgtgtaaaatgagaaatccagtaccactttcaaccttatcattatctctttacattcccaggttctgtgatacactttaaataatgtattttttaaatccttatcttttcagaattattagtcatgttgctttgcttcatcatctattaagaacaattgtctatctctttataaccaattcttttttctgtaatgttaaatattattttaatacttgttaaagatagtaaagaagactttattcaagggatgacttcaatgaggttttgcagtaggagagagagactggcctcaactttgaatacagcaaggaaaagtagagatttatagccaaggaacaagacgaggagccagtgggtggaaataaagatttggagaacaatgatgttatagctttttctatcattctttgagaaattacaaaatcctcataaatttgattctaaaagcctaccataaatttgtttacccttctctaagtactgacatctatatagtacaatgatgggatttaatgttttacagtcactaagagaaacattaggggtaaggggtgattctggttaaactcacttgatgggattcttattgaaggcagaccagggtgatgagatagcacctggaagatggtgggggatgagaaatttgatcagatattgaggttgataagacattgagggtggagaatttttgctaaattaatttaacaagattcctgataaaaccggatgatacagacctgaccaaggtcaacacctgaagggcttaaaggagcctgattacagtttgatcaaggagaagggctttgttagtaatactctgtaaatactaatggttaacaaggtaccattttcttctttatggctttttaatctcaggttccattacacaacagtgtcctgatttctttctataaaatgtgtctgttccttgttgc

SEQ ID NO: 124431 - DNA, 1029 bp, Homo sapiens
cattacagattctttgtgcagagaaatgctatttaaaacaaagaatttggaaaatctattaagaaatagaattagggttaaaaatttggagaatctgtggatttgtcctttgtgcatagatagctttcattggatttgtgactactttagagtttcttggaggtaccatacaagagtctagcaagttgaacggtccactgctatttttagtggtctcaaaagtaatttggtactgaatgtccagtgaatgacaggtatttaaacttatttgtgggtggcaaataacagctattgtttatgaaattatttcggctgcatttttaacctgtgggtaacatttcttctgaaactatacattttaattaaatataaggaccatcttttagctaatcccttggttttgttttaacttaaaggttgttgtttcctctgcttccaaaatatgcaagcatgacctcagttatcaagaactaggcaaattttagttcacgtaggataatggaattgcaaaatgttaatgctgtaggaggctactgaagtcaggacagccaaggcccaaggagttacatatatttgcccgaggacagataacgggtagagtaacagaactcagatctgtatccatggtcagtaatattctctctttgtggtggctcacgcctgtaatcctaacactttgggaggccaagatgggcgggcggatcacttgaggttaggagttcaagaccagcctggccaacacggtgaaacccttgtctctacaaaaaagttaaaaaattagccaggcatggttgtgggtgcctgtagtcccagctacctgggaggctgaggtgggagaatcacttgaatctgggaggcggaggcggaggttgcagtgagcagaggttgccgcccctgcacaccagtctgggaaaaagagtgaggccctgtctcaaaaaaaaaatcttttttgtttgtactcagattattacagtgggaaaaatctgttctttttctcatgttgtctaaaggagtcatggacaaacacta

SEQ ID NO: 124432 - DNA, 1013 bp, Homo sapiens
accaaataataaatgcctgtcatgatatagtcactagatacagggagttgaactgagcaagtatgatttcctatttccaaggagcatattgtccagttggggataaaaagtaaatgaatgcaaattaaaatgtcaaattgtgatgaatattctaaggaaaacataactgtgcttatataagagagccagagaaagtgacttagattgggagtggaaggcagtaagtgaaatctcttggcagatgtggtatttaacttaagtctttaagggcaataaataattatctatttaaagaacaaaccagaagtaacagtatgtgaaaggcacataaagagcttcattggggcacagaaagaaagcatctgtggttggagatgcaaatggagtggaagtgggagtagcaagagacaaggaaagagccttgtaggctttttatgttgagtttaccacttctactgttaccgttgctactattatcatttatatattgttttaaggggaaaatgaagtgagagaagactttatttgaaaatgacatgatccagtttacctttacaagaagattatggtggctgctcctcttaaaagtacagttctacagaggaaacctctgcagtacttgttttcatacatcacattacctctaaatgcatataagcgtgttcaacccaatattcattcctgtaataaaagaatggaactcctaaagaatgctgatctatactctgaacaaacagggactgtaggggcttttcatgtattttggttatccactccttcctgtttcctggaggacgtaatttaattattgttttgagtaatcacaaatgacaagcagggtgtaactgaaaatcacgtgtaaagcatgctctgattttgttgaggctgttctatggtacttagtttcttttttttttcccttatgccctcaaggttgtgtccagtgtatggatccatgccttttgttatagacctcagtaaattcaccgtatgacatattagtcaaacaacac

SEQ ID NO: 124433 - DNA, 1072 bp, Homo sapiens
tgaggggtaatatattagtttcctagggctattgtaaaaagatttcaaaattgagtgacttaaaatcaggaatgtattatctcgcattttggaggctaaaagtccaaaattgaggtgtcatcagggctaggatctttctggctccagagtagaatgttcttgtctcttttagtttcttctgttggccagcagtactttgttttttcttttacagtgccttttatttcatttgcttgtatggtttttcctaagcctcaccatctttctcaggacttagtatattgcctggcaaattttccataaatattttcttcggaaaaggatagacgttcctcagttttccagttattctttttcatgtttctccaatacatactgggcatatatttttaactgcctatgaatacttttagtggttgtcctatgggtaacttaaatccaattggttcctccaactaaccaacagacctactctttctgctacatcatccaacttgagtaatgatgtcaccagtcctgttgctaataaaacaatttctggatctgggccctcccttccctatatttcttggacttatttcagattctcataacctgttagtgagattatggccaacagcattgtaatggttctccttgtatgaatataaaccacacctttcctttggggttgaatggtgatagttttgattttttttccctaagttatttacattggggttagatatgtcacatgtgatatatctactcagtgttgtcatataaggttaataattcgtgtgttagggaaatattttaatttcttcttttgttgtctcacttttgatgagtttatcaaataagttatgatagggtaaagcattttagggagattcttagcttttaatagtttgatatgaaggtcagtagaaatgtctaaaaagacagttatagggttactgataacattgtttcctgtattacttctttcccccaattatttggactctgaaaaagaattatctaggcagtgtttgatagatatgggtggtgttgcctctaagtttgtaatggatttttggttaggtggggc

SEQ ID NO: 124434 - DNA, 1138 bp, Homo sapiens
agtagctgggattacaggtgcccgccaacacgcccagttaatttttgtacttttttttgtttgttttgagacagagtctcactctgttgtccagactggagtgcggtggtgcaatctcggctcactgcaagctctgcctccccagttcacgccagctaattttttgcatttttagtagagacggggtttcatcatgtgagccaggatggtctcaatctcctgacgtcgtgatccacccacttcggcctcccaaagtgctgggattacaggcataagccactgcgcccggccattttcgtgtttttagtagagatggggtttcaccatattggccaggctagtctcacactcctgaccttaggtgatccacctgcctcggcttcccaaaacactgggattacaggcgtgagccactgtgcccggcctatcttgtggatttttatcttcctgacactccattatttttttcctagcccaaacatataccctataccacacacaccctataccatgctggctctaggatgactttgagtaaattcaatgttgagggttaactggttaggaattcagcaagcgaatttagactgaatttgttaatcatgacaagcctccctccgaaaaaaataaaatcattcatccaagtacttcatctatacacacactgatgaacatttatctttaggtagtaaaggagccctcccagccctcgctctcccactgacatgctttttacctgagttcccggattttagtgattttttataatgtttgtgttaccatcaattctccttttcttcaccccactctgtcacatgctgtggaggactctggcaagagggcacggcccctgtctttgcataccatggagggttgtggaaaagcagaagaaattgtcagccagtaaactgagttatttccctgctctgcattagctgcaaaaaagaacatacatttgggggaaaaaaggcaggcaggttttattcctggccaggaatggaaaaggagagagctcttgctctaaagacaccttcctcccaagctgtgggaagctggggaactttaaggagttagatgttgggtggaagataggtaagcatattcagagaggaactccagatgtactggcatacatcat

SEQ ID NO: 124435 - DNA, 2158 bp, Homo sapiens
ttttaaagtctttgaataagggaattaattaaatttccactaatggctaccagaagattttaagggtggaagcctttaaattccttaattaaatttcagaactacaggtgaaattacagagtatatttataaatcattcattaaattgcagatctaatatacagatcaaatttctacaagtgtcatagcagtgaattttgtatttttttttctccatccctcttgaggttttgtgacccattttcatcagaaatagtgagttgcttcagcagtgattatcagattggagaggagaactgcccccaccctcatgcctcattccagagaatgtatcatatgttctgggggagtgcatgtaatttgaaaaagatgcctcggttattctgataccaggcatttctgcctccatctctcaaggaaccatatccgctttactactgggttgagatatactctcagtggaattaaatggtttgtacacaattaaaccatttatccttaagagaatagtcaggctttctgactgccatgccttctcttgttttcttgaccaaacttttttattctatgtgctaaggacagaaagtaacaaatgttcattactaacacactattgagggagaataagattgtcagtagaatgggcactcccagttgttaagcatcattcatgcaccaaacactgctctaaatgttacagacaactttattcttcaccaatgtaggatagcctttattacctgcatattatagacaagggaaacaacttcatgcaggcaattacctctccaaggacatcaaataaattcacagaaaagctgtattcaaatacaggctttgtcaaatcccaagcaacaatcttgatttagagatggctttggagccagcggcctgagttcaaatgctggttctgctgtttcactagccaggaaacttgcagcaagctaccaaacctctctcttctcagttttctcatttgtaaaataacgttagcgatgacagtagagatactaatatacctcatgtagttgataggaagattaaataatacatgtaaagcattgagaagagtgtctgacacatggtaggaacaaaataacttcttctttttttaatcagacggcaaacttgatgtcaattctaactgtgttaatgaagagcaaccagaggctgaagtaggtatctctcaaaaggattccaatcctgaagattccggggaaggaaagaaagaatctcttgaaagcgaagctgagttggaaggcttacaggatgctcctgcagggccacaggtgtctgaggagtaaaagccagagcaagtgccagtgtggatgatcctcaccctgcaagaagctggaaaactcctaggaatgcattgtcctcaccttgttatacctgcgtggcaccatggcaggattccacatttcatagaatacaggttttcaagcaaacccctgttgaccatgccctaatttcctattgatttctgttctataattgaatggatattcctatggaaaattttttgtttcaaaatacaggaaaaacattcctattacctttctgaggctggctttccagcaattgtttcaaaggaaaatagatccccttaaagaaaaaatacaggctttagggaacaaagggacaagcagaacaggtgtggaagagagattttcaggaagggaaaaatttatagctacagagggtagttagaaaaatcataacttatatgtgaataaaatacatataagcagcatttacggtagtggcattctacttattaagatgcaatgaaatgaagaaaggctttatgttcaaggacctttgccatagttcagctaattgtagttttatatagaaatgatcctgaacactctgaacttgacgtagtcctgcggtgatattctatctgcagtatttgtacctccagaatggcagatccctcagcaggaacaaaggcatattgacggttctctcagcgtatgcattaaaaaaggtacttcctgaaacttttgattcaataatgactaaacatactatgtacacaattactgtaaggctaattcacgtgccatactccacctgaaagcctgagttatcttgctataagcttttcatggagcacttcctttccagaaactgatttgtaactcatttagag

SEQ ID NO: 124436 - DNA, 1113 bp, Homo sapiens
tgatcttgaactcctgacctcaagtgatctgcccgccttggcctcccaaagtgctgagattacaggcgtgagccaccgtacccggcctagagtataatgattaatgtttatcccagtgatctgagtcatcaagaaaaggtttataataaagttaagatagtatttaatgcattttagaaagacttttctttaaacatttttgttctttgagagttttatgttcttctgtctggaagacttcatcccaaatgcctgtgattgtgcgtatcacagccattgtttactgcctaattggttttcatattctgcaagttctaaccctctgaagtgatgcccaaccttttccccgcatacgatggttctcagggctggctgctgtgagcttcactgtgttgttttctgacagtgctaatgcctgggccctcctgctcagcttttggttccctctgctgctgtggaactctggcttctgcctgtctcaaggctcagcacaaaagagaattcgtagcactttcatgtgaaagcagacccagtcattattatttgtattcaagaagaacatggtagtttcaaaatgagtgctacttttaaaatacttcttgaatctttgaatattttctttgactatcttgagtatacagaacagtgtaggacattgttaccaggtgatatttttaaacctctattatgtacagttggtaagataatataaaaacaaatattcttaggaagaaaaagcaaatactcaaatgaaaatgaaaattataaagagtgtcaaaatgctggtttggaacaaatgaacaaatttgaaaaactcagaacaaagaactattaggagtaggtaagaaaaatagaaacgctgtgattattttttgctaaataggttttagtagcatcgtctcagacagataaatgcttacccttataatttttttttttttaaatacaaggtcttgcactgtcaccaaggctggagtgtagtgacacgatctcggcttactgcaacctctgcctcccggactcaggtgatccttctgcctcagcctcccaagtagctgggactacaggcgtgccaccatgcctggctaatttttgtattttcagtagagtcgg

SEQ ID NO: 124437 - DNA, 1024 bp, Homo sapiens
gtttgtgcatgcatctgtgtgtgtgtgtgtgtgtgtgtgtgtgtgtgtacacatgtatttccctaaagtgattggctggtcaaaactgtacagtaccacataccccatccccaaggccccatatttacccatttagcaactttataagatgaaatccttatacttcatttatttctccacattctctgtttttgccttgtcaggccacaggtctttcctttctgccttctctgatacttcctcaaaacctgtgccaatcatacctgtagctgtggactttgctgagagagtctagtatttttagcacaagctgtaatgagagtgtcattgacagggtgttgcttctctttcagtaatccataccaccagctgtgtgatttgcctgtcatctatcttcacccactcatatgaactcactctcttactgtcctctctctcctcccctttgtctccatttttgcatttttgtctttagatctctgttctcatttagattttggttataggaccttttcaaatgggttacgtaggttgtatattctttgacacccatcatgacaaaactattaatacctttctttctgaaatgtgagtcatattttgcctagctttctgactcatatcagagttcttttctctccgacatatagaagttattctacagttttctaagttctggttttgcaaatgagaattcaacttactttccattgtaaactttacatttctcattctggaagagcatttgattttcagtttatccttgaaagtaaaaaatttgaaaaggatacgtcttgttgtatgtgtgtgttcctattaatcacactcagtgagccctgtaagtctagaggactcaaatctagtgattgtaatatgggagcaaaatgatgtactggcttctccacctgcagcatttattttctatattagtagtattattttatttatgtatattcagaatttataaatttaaaactagtaaaatatttaagaatttcaattacaaacatttaaacctaaatga

SEQ ID NO: 124438 - DNA, 1611 bp, Homo sapiens
ggcaggaggatttttgagcctgggaggcagaggttgcagtgagctgagatcgtgcccctgaacttgagcctgggtgacacagtgagactctgtctcaaaaaaaaaaaaaaaaaaaagacttcttataaatcaagtataaaaagaaaaatactacagtagaaaattggatggaaaacaaaagaaataccactggctgatcaaaatataaaacattttgcgcagtaatcaaaaaaatgcaaattagaacaataaattttattttttagcttattatactggcaaatgttaagaaagagctataatgctcaggaacttctttacactatttgggggagtgcatgtcagtccaaccttgctggatggcagcctggcaaaatgcatttaaaatatgcataatctttgatctggcaatatttcccaggaactgttcctaaggaaatcataattcaaacttgcgaaaatgaatggaaaatacttttcactgagtatagttcataatagcaaaatacccataatgactactttagtagaagaatgtgaatagaataatgtgtatgtttagatagaaaaaaggtgtagaaagatagatgcccagtggttaatagttcttccagagcctgtaagtgtgaggaatgggatggattagtcgatattaaaggggaatcctattcattttatctctttttaaaaaattgttttgtatgcgtattttgattttatagtaagtgttacctctaggaaaatatatttcattttgtttaaaaaggcagtattcaattccatactgcctttgcattgcttgatttgttttccagaaaataaggttaatttctaaggttctatagcattttattctttactgtagttaggattcatgttttaaaagaatgaaaatatccacatgacagaaacctaaaactaactgggggaataaagggtatagagagtttagaaagggatgtttaaattgtgtcctccttaacattaacaaatgtgttccctttaaaactctaggtaataaagacatcacatgggtaatgttagaagctggtgctgagacagatgttgtcaactctgtgggaagaacagcagctcagatggcagcctttgtgggtgagattttgctgcagttttgcattagattatacccaaaatttcccttgtggaaaaaaaacccactttgcttctcatggtgaaaatattatcatgttgctttaaaaaaacttaagtatttacagtccactgtaacttaatgaaacacctagtgactctggagaaaacaaatggctatttcgaatttccactttttcaaatacaaagagtagtggggccattgtaattgctcacaaatgcttataacatgtatattttatgtctctgatggaagtagctaaccctaatgtttaagaatgctaaccgagaagtcagtaatcccaagttaaattttggctgtgccacgtgatagcaaagtacttaataattctgaccttcagtttcctcatggtaaaatgttacagggttattgtgaggattaaaagaggtgatagacttgaactttccatgtaacactaaataaatggtattagttactgttgttaataattattacaa

SEQ ID NO: 124439 - DNA, 1009 bp, Homo sapiens
gcattgaagatgtgtttcacctaagtatttccaaaccaagcactctattataaatatgtcatcaattcacaagatgtggtgctgacaaattatataaatactgactgcattttgaattccaagtattacattgactggaatttaagcttcagatggtgatttggattagataccctttaagattttttttcagtattaagtcttatgctttgtggttattgtattaccgccaaaaggaaaatgtggccaatgtaatatactttaaggtcagtgaaaataaaaacaagatggagctatttttagtttctgtaaatctattctactggacaattactttgtaaaataaatagtatgtgattggatgtttcatttcttagcaacctacactgactagatgtactcttacagataactccttaaggtttatttccttgatgttagatttttctcttattctagtgacgaataaccttacttttcatcttttttttttttttaggtactgtccaagaagctggaacattattatccagcaagaatgttcgtgtcaactgtttggacgaggtaagattttagaagtttaataaaggattttacttcctataagaagagataatatatcctttttttttttttttttttttttttttttgagatggagtgttgctctttcgcccaggctggaatgcagtggcacaattttggctcactgcaacctccgccttcttgtttcaagtgattctcctgcctcagccgcccaagtagctgggattacagtcacccaccaccactcctgagtaatttttctatttttagtagagacagggtttcactatattcacctggctgagctcgaaccctgacctcatgatcctcctgccttggcctcccaaagtgctgggattataggcatgagccaccacgctcagccttcaaatctcttaatacaagttttttttctagcatttttgctcatattacactaataattcctaaactaaatgtaagc

SEQ ID NO: 124440 - DNA, 2216 bp, Homo sapiens
gtacggcgacaacctggggcctctgcatgccccagaaagccgtcgctgagcacataactgccagctgtagaattttcaatattacatgtggcgaaatatttgaaccggacaggataggggagcggaacgtgtaggaggaatttaattcccccctccagctttctgcatttggttttgtcctcccaggttgctccaatggcgatctctcgctaccgcctcctgcggctcctcctcctcggcagggccaatgacaggcggcaggcggtgaccgccgcagggcctgcggagaccgtccgcctggctcgcccgagctcgcccgctgtccgccagcccgcgggagggaggagagaagcgaagcgtttccgcggttggctactcagtgtcttggtctcaagttgcctcattgcggctggcgttcccaatacagacgcatcgtttcttttttaatactccctaagaaagggaataaccttcaagctggcgggagcaatggttcacataaagaaaggcgagctgacccaggaggagaaggagctactggaagtcatcgggaaaggtacgggtgctgggctgcgacgcggccgcggccagcctggccggggggcgtggcggagcccggggggcgctcctggcctgggtgacctttggctgcggttctgcaaggtttgcagcctggaaccgggaaagagcgtttctccctttggtctgggaaaggttgcaggggcggagaggtggggaggcagaagcagtgctgggacaagaggggtagttacagaggctcggcctctaaatccgcttttggaaacgtacggatttccacgccccgccttaggttaatgcgagcttcccggggtgtggaccccagtgtgtgaattcttcactgctcccgagggattttgaccgcggtcagtcctggtagtttcaggttcttaggcgggtgtctaaatgaccctttagacttccgcaggccgaatgatctggatcctttgccgatccccgcccccgcttgggagtggagggcgcccttagggagaggggttcttcataagggtacagaactaggtctgtaatttgctgcattgagacttccgtatccagggcctccctggcttccagaagccccgacagcctcaggaaccctagagagacaaggaaattggcgaggcctccacacccacccctcggcccacgttgcacagatgagaccttctaatcgcgctccttcgcgctttcttgtccactcccccaaggcgtgccccacttccgcagtgctgagtcccagcggggagccccgaggacgagccagaagccatatttccccggagtccccgagtggacgtcccagaggagttccctgccgagtcccgttacctggcaggtgacatcagcgtgactgcatgcttcttctgcaccctcacggtgcagggatggtgatgcgtgcgactccgggcaattaatgtggtgattttaaactcaataataatatagccatgtttgtcctcgaatggcagagatgccagtcattgcagcataaggcttcccagtttccagttttatttacttagtagccaggctgaaatgtggaatcctagagaataaggcagatttattcttcatagcgacaaggaaactccacatgcgaaggagaaaaaattccggtttgaactcaacaggtgctgatgagctgagcccacccgatctgatctcaactattctaagtcagtcacagctatatctatcaatgatgtgttctttgcctggaatttggggatttgggttagagtttagattgttgtactgcatggttcttgctgacctatttggcatttcagtctttcagttcttcctgtctctaggtaatttctccctgcctttgatggctctgggattcaattaagcaaacatgcaagttctagctgtgtgccaggtactgtgctgggcaaaaaggagacaaaggatcaattcacaatccaccagggacaaaaattcttttaggcaggacagagctagtacatgtcctctctctctctcgctctcgctgtctctttctctctctctctcgtttgtttgagacaggatctcactcttcacccaggctggagttgcagctctctgcagcctccacctccctagtggctgggactacaggtgcgagccaccatgcccggctactttagaaagattttttttttttttttgtagagatggggtggtgg

SEQ ID NO: 124441 - DNA, 2244 bp, Homo sapiens
ggtcaaatttatctttgtttctcaggtttaacccagtgtcttgcacctagtgtatgctcagtacaagctgagttgaattcagtttgatttctaagttattttaggtggatttgttttcctacttgactaatccttcctggcaatgtgaggtgaggtggcactaagcacgcacaatcataaccagaggcagaaagtctttaaatgttttggatctcaagcttcttgacattctgatgaatgctatcaaccaagaaaaattgttcttgtgcacatgttacaaatttggcatgccattcttagatttccccattaaagaccctgatttccagctctctacattaggagaatgctgcctttttgttgcatttttgagtattacatctttcagggtactgtttgtcttgacatttgactttttttccttagacttaggtatctttattgactggatatttgataataagaaattttgatttttttaagttggaagtagattacggttatatttttaaaagattacttatcttttagagataggaacagaattatttcagaactggatgagaagacagctgagatttgctttaatataattctgtgacagaaaggaagagagactgaatgagaatataaatgagataaaattgactatgttaacagttgaagatgggtgatgagtatattcacttgattatactgttctctctacttttggatatatttgagattttccataatgaagtttttaaaaagaaaatttggaagtattacagcctctaagaaatcttttttttttaaacacaacataagaaagtaatataaatacaaatgttcttttttctatacttggagtttcgcttatgtgattattcatttaagtgttaaaacagttacacctaaatctgcaaagaactgtcttgtgaacaatgcgtttccataaacatttgacatcacattttaacttctccaaaaagtaaaaggttggtggcattactcagtgcttgtagaacaaattgatgaatatcttactggtagttaatcttcatcttttttgaaaagaaaattctgaagaaggggtacagatacatttagtttaactgagaaaatcaagaggtgaatgaagtggagatactgatgttcttctgtgcgtcataatccaactcagaaggcattccaaaaaaaaagagtaccaaaactgtttcgagcaatgtcagcactgataggataagtattagtctaggaaaatcaggagcaggcccaggacagggtgtgactggtaggttcttactcagtgtttgcttagctgaatacttaatctgacacctactttctaatttgtgcaattttttaaactgattttttgatctttacaattttttattgtgttttagatatattaaatgtcctttataacatgtcatcctagactttgggattttacaagaatatttaattaatatgaaatccaccaatcttagcaggtcataaacaagaatacttttcattcttaactcactcatttctgtgtattgaggccatggcgctctttagcaagtatcttttgggcagttaggtgccgagtggaatgatttgccccgttctaaatttggcgtgtattaagtgaagagtgccaaaattgttcaggtagtcatatttgtaaactatctattttgaaaataaagatttgaataactcattgaatgaaccattctttaaggttaaatgccaaaaagataatgttctcattattctttcttgatttttagcaataggtgtttccattgatgttttttaagtttattcaaaaattaaaggaaaaaagtataatgacaaaaagaaagaataatgccctgtattaatatttaagatagtataatcctttggctatctttaattccattctgaaaatattaatattttagtaggaaaacaataacttaagatgtagaattattttttgtgtcagatgtagcattatattttctttttacatctcaacttatttttatgctagatgagaactttaaaaaatataacaggtgtactgttatttttgaggacttctaaataaatctcaagaaaagccctggggcagagatgaataataagggataataacgtttagcactgtagagaatatatcataagctactattggatgatattctactgtcatcctttttatatatccacacagaagactttaatggttttcaaactaacctggatttatggtcatttcta

SEQ ID NO: 124442 - DNA, 2184 bp, Homo sapiens
aaaagaaatgttatatgtttttctcagtgaacaaggtaattgaatgggactattataaacaggaaagagaacccctagttgtcggtgcagaggaaactgctggctggaggaaaaggatgcggtgttagtatttgggagtgtgaagattgtgtttgtgttagagttgagcttctgcaggaaacaatttaaaaactgtatcctatagtgctagaaattatggtgccataaattttctaatattcgtatgtccctaagaggcaatattgttaaattctctctctaaagataaatgccttttcccccccaccgcttaatagaactctatggagaactctttggtattttggaagtaacatatgctaattcaatttatccaagtgctgaactcaactttaaattaatatttatgcgctactccatcttattccaaactataaaatttatgaggcaaataatgaaaaagctgtcttcgagaatcatataaataattctctaagacattgcaacagctttagttggctccttggaaaatgcactgagtggagacagtggatcaggttctggccccaactcttccatgtacataagctccagatgggcagggatcgttctgctttgatctccactgtcttaccaatgctagaatggaattcctgacctcagccaagtggtttgacatctcagtgccttatctgaaggttagcttagggactgggcttacatccatggttttcaaagtattccattccgcgtggatgccacttgtaagttacaaagtaaaaaaacacgcacttaattattaaaacgttaataaacacaactgcatctcgaatgcatcatatgttgtctttaaacatactggagacaatcagtgcttgctaacttgttctgcccgattgtgcaatacttggaacaaagctccacctgctagaaagtgacctccatgaaatttgcctgatttagtgcttgctgcatccctattgactagtaccagacctggtatatttggcaaacaaataaatgaatgattctctgtaggtttaaacctttttcttttgagacggagtttcgctgttgttgcccagtctggagtgcgatggtgtgatctcggctgactggctgactgtaacctctgtctcctgggttcaagtgattctcctgcctcagcctaccgagtagctgggattacaggcgcctgccaccatgcctggctaatttttgtatttttagtacagacggggtttcaccatgttggccaggctggtttcgaacacctgacctcaggtgattcgcccgccttggcttcccaaagtgctgggattacaggcatgagccaccatacctggcttaaacctttttaaaatgtatgattcagagagcttgtagctctgtactagttcttttttatttcctttaattcaattttgtatggtccacttctgtaaagttgtgttggggaatccagtcccatgtcatcagcgtgccctagactaggcttggcatttctatccagttcatgctctcattatgtaataagcatgcatatggaaagtaactttgtgtgtgtgtgtgtgtgtgtgtagcccttcaaataaagcttcacctgctagacaggcttgggcaggtccccttctgggaggatgggagtttcttggttgagagaactagtaagtgagccaatatttggactcatgcccaccaccacctttgagcttcctgaaggtccactattacgatttttaagcaattgctccaaaacagaattctctcactgtctaccagtctaggccttacttttctttttatttcttttttttctgaagattttattttcctcttttccatgattaaaaatcctctgaagagaggcaaacacttcaacactcttttactttaataacttgtcttctgacttcccactggagtaatagtcaccaacactcccatcagttttgtgtctgtcttaaactaacttgctctctggcattgccactccacttcttgctgattttcatctcctggttctcctcacctcagttagcaaggccagtgttgtgtgtgctgtccatagctcctttcctctaggtggaaagtaaatctcatataaaatcatctttctcctctactatgtaaagctcaacatgtatttaggtatcttccagtgaaaaagcacttttctggagg

SEQ ID NO: 124443 - DNA, 1131 bp, Homo sapiens
ttagttattagatttgaaaatacattgtagggcagtgtactaacagcctttgacattggcctaatagaactgtctttgttatcttcctaggttgaagcgagcagtttcttattcaaagtgtccttgcttctcttaggccagggcttttataagggcttagtgagtaccttataaaggctgacccttactggagcagattatagtgtagcatgaagagctaaatttagagggaagtggggcctctgctccaaatagtaacagctaaaggatagacactcttggagagcagaatatctttatttagtctgtcaccaccagtgggtgagtttttgtttgtttgtgttaattttgggtgttataccaaagtctttgcatacatttttatgtttacatgttatcatgtgtttctccacatggaatgtatcgagggtatgaaaagtaagcccacatacctgggttataaagaaacaaacttttatgcttagaaaggaagtaagtataaaagctaaacatttgaaaatagagtaattctttcatatgctgtgtttggtggtacttctccattaacagaaaaaagaaaaacaaggtgcaaagagttaattagggaattccatgagtttgtgttctaaaccccaaaacaaaacttttaggaaggactcacactttagaatttttgaaattacaaattaaaaaccatttttagcctggcacagtggtgtgcgcctgtaatcctagttactcaagaggctgagatgagagaattgcttgagtccaggagtttgaagtcaccctggtcaacatagtaacaccctcatctctaaggaggtagagagagagaaaaaaggaaggaaggaaggagagagaaagaaaaagaaaggacggaaagaaagaagaaaaacatctttggcagagaagtctgctggagagatttctgtccagttgagctacattctttttgcatcttggtacaagacccaacacccaaattcttgacacatatttttctttgctaacacaaatatattttgtataatatttgtgtttgggagatatggagacaataatatgtatatcatcatcacttttgcaacaataaagtattggctgattcagagtgaatctgtttataat

SEQ ID NO: 124444 - DNA, 1290 bp, Homo sapiens
tttctgctagactgtcctctaataaaatgcaaactacatttactgtactttcagatgaaaaagactctttagttccaaagttgtcttgtttctcaagttttcattagtgttcttgccattttcttatatgggaattttctagtccttttgatggtcactttgttttagcagctgggagcttttttcagcctgcaaaacaattattagtcctttcggtccatcataagtttttaagatttccaagctgtaagtaatcattttgacctaccacccttattgctcactgttgaaatatccttggctgtagtatgctatcttcctttttctgtttgctggtaattcttttggaatgggaggatgaagatctttttacaaacaagtttttaagttgtgtcttacattgaaaacaaagtcctctgcattgattcttggcataatctgggtttttcctcatttatccatttacatttcccaatgcctccatttgtaattttcaaatcatcaaaatctgttctaccacctgaatcaacatccaaccatgtggtagggcctttgtgggaatgactttatttgattttggaaactggtcacaagacttaatataacagcatgtagttgttttatttccacctttctcatattataggaaagaaaatatcttttttcaacaaggaaggagaattgcctgttggctagaccctgagtgggaggtgaagttttctgtgcttttcagtgggttccttttgtgtagaaacccagttatcccctcctcccactccacctaatgtattcctctagaattcctatgcgttttcctccccctctacacaacaagaccctaattatattttttctgcagtcaccatttgcatgttcttgactgcataatgttttgcttacagcatcaaaaggactttttatctcttgttcatgatgaatattgtcccagttaatttatgtgtgtctttatggtatctcacgctgcgtgactctgactggtactgggaatgccattcttctctggttctcatgcttatgtgactagtgttaaccacttacaacccagcccttctgttagaccacttacaagcagtacaaactaggcagttgctatatggttttaaaatgtagtttttaattttatcaaagttatgcatgcacatagtatggctagttcttgattttttctgttggagatagtagatatgccttttctactatggaaaatgatgattcagctctctttcattgcttgcttccccccatccccatacttcctgtccttctcta

SEQ ID NO: 124445 - DNA, 1035 bp, Homo sapiens
tccacctcctgggttcaagtgattctcctgcctcagcctcccagtagctgggattacaggcacccaccaccatgcccagctaattttttatatttttaatagagacggagtttcattgttttggcgaggctggtctcgaattcctgacctctggtgatccacctgccttggcctcccaaagtgctgggattacaggcgtgagccaccgcgcccggcctacagtaacttattttaaaagagacatcccttcttattcccctatgccatctttatttgtttgtttatatttgtatattctcgtacattctttggcgatgctctgtggatttttttttcctatcttagataaaatagaattaaagttttgattgttatactctcagtatttatttatttatttgactgttattttgaattgttttattttagatgaaaaagagaaattcgaacccacagtcttcagggatacacttgtccaggggcttaatgaggctggtgatgaccttgaagctgtagccaaatttctggactctacaggctcaagattagattatcgtcgctatgcagacacactcttcgatatcctggtggctggcagtatgcttggtaaaccatgcattatcgcttcttgtagtatatttatatatttttaattctgttgaagtatttccttataagatagagtctttataagtttatgtttattagagttaataaaaatacaaatggaagcctataattttacctggtttaggatttggaatggtattaatgcagatgtgaaatgattattggttaatagaagcatagaatggaggactttggttgacgttacaacaaagttggccactttgcttctcctaaaagccgcctttctcatatgtccctaatctttcagtgtttttggtggggccataaaaggggtaatttctgcaaaatactataacttagtgtataaatttccaaggtttaattaatgccatttcatccataaataaagcatataagaaatatagtttaaacctggtttttgaa

SEQ ID NO: 124446 - DNA, 1002 bp, Homo sapiens
aaggaacattatatttaatattttatcaaaaattatgagttcctatttacatacacctttaacaatgttagctacctaatttcatcagttctctagatctctgtcaattaggtaagggatgagtattttcattttaaaactttaatagtggagttgaatatttcctaatatattattgacttctagtatttcgttaattatgatatatttttatcagagtgatcttcagcgagttttggttcttgccaaagtcacatgactgtagtagtcacttatatggacccttttcagactgagtgacctctaggcagcactgttggcccttttgtcattcttgaactcttttattttcttcccttacacgagaccacttagacctccttctacctctctgcatgccacttcttacattactcctggcttccatcgttaaccacctccccatataaaattatctgtataatttgtgttgagtttcttaaagtttcctttaccatgatcagcagatttatctctgtagcccagatttctttttttttttttttttggcagttgcaagatttaatggagtgaaaacagagctcccatacaaagggaggggacccaaagagggtagccattgctggcttgaatgcctgggtttatatcccagtcattatccttcccactgtgctctcaggcaatagatgattggctatttctttgcctcctgtttttgcctaattagcattttagtgagctctctttactacctgattggtcgggtgtgagctaagttgcaaaccccatgtttaaaggtggatgtggtcaccttcccagctaggcttagggattcttagtcaccctaggaaatccagctagtcctgtctcttagtaccccctctcaacaggaaaacctaagtgctgttggcgaggttggccaacgaccgctctaacttcttcctgctgaattgaggtgtagtaggggttgtgtagttgagatttcctcgggaggggtgcctt

SEQ ID NO: 124447 - DNA, 1224 bp, Homo sapiens
tttttactcttggactccatcttgattacattaggaaacgaatacaccaagagttgtaagtaggaatatagcctgtgtgtaggagaaaaaggaactagattaagaaatcatttccacagttattaaaataaccaatatttacaaaatcctcatttacataaaaacatcattccacttagaaaactgtctagaatcttactaatacagttgcaaactttgcttcagagttctaacaggactgtaggggccagtcatcctttattgccagtaaattataacacgttttgctcatctgctagaaacatgtttgttgtccacctagagtagaatctgtcctgcactttgctctcctccccatcacatcgttgtctaagtggttatatctttaacaccttcatttccgtgatttttagtctctgcatctcacagtttaaaaatcacatttattttattttcgtcgaatttttttttctacctgctatattcttgaatgaatttgttttatcttacgtgtacattttgatcatatttgttcccctaggtcatgatagcatctttgaaatgcttatagttcttatattacagtgtgagcctgtttaactatacacttttattattatagatctatggtgtcattatagtgagtttctattacctacttctgtgtctttttggttgacctaatatttaatggttgttttttttttaggtcttcaataaactcatcaggagatataagtatttggagaaggcatttgaagatgaaatgaaaaaggtaaaaattcaaatataatgcctatctgttttatagtaatgacatgggggtggataaaaattttataagtggccggacacggtggctcacgcctgtaatcccagcactttgggaggccgagacgggtgggtcacaaggtcaggagtttaagaccagcctggccaagatgctgaaaccctgtctctactaaaaacacaaaaattacccgggcatggtggcatgcacctgtaatcccagctaactgggaggctgaggcaggagaattgcttgaacctgggcagcagaggcttcagtaagccgagatcactccactgcactccagcctgggcaacagagcaagactccatctcaaaaaataaaataaaataaaattttacatgtacaatgatattgcagaagtgccatatatgtaataacatgtatgtgaaacacatagtgagtttttaata

SEQ ID NO: 124448 - DNA, 1114 bp, Homo sapiens
tgtagtcaaagcacaaagcagaggagagtcaggagagagaagggcatcccacagggctgactactcttagaatttaatacaggaagtgggtttttcgttttatttgctttgagcttacattcaaattttctagggttgctacttttttagttccctgcctctggggcaagagaatctaaaagtttaccaaaaaaacatcaagaacctagaaaacccctttctccctcaacagtcttgttttgaagactgttgtattccgtgagctcagaaaagtatatattaaatgtcaaaagcttaacttcgactctttcctgttttttttttttgtttgtgtggggcttttttttgtttctatgtttttgccgtacaaattctattcagagaaaatgggtacatgtagcaggggaagaggtagtcgcccaaggaagtggaaaaacttgaaaaacaatacatttcagaaaacatgtccatcatgtatacttaactctcttgcatgcacatagtcaaacataaatccatctgtttacatatcatccaaatatctcttttcctttccatgaatgttatctacagctgtgagtaaattaactgagaagaaaggaactctgcctgctcaagtcactttccacagcatccagtttatcatgaaatgaattactatgctttgcatatgaccttctgtttgtgtgccacgtagccatggatgttcacagtttatcttcccacttcagtcctttgcttcatagacatggttcctttttttttctttttctttttctttttttttttttttttttgacccacagcttctcctcttccttaaagccttttccgaaacagagcagacaaagttggcgatgctgtcggggattctgctgggcaatggcaccctgcccgccaccatcctcaccagtctcttcaccgacagcttagtcaaagaaggtaacgaggctcctgttttctcgcctgtcagacaacaaaagaaaaataaagtcacagatagttagaaaaatgccagtggctctttttggtgtcctctattactcattcttcatttaagagaatatctttgtatgggtgtatattgcctttcaaataataaaaggagtggact

SEQ ID NO: 124449 - DNA, 1036 bp, Homo sapiens
ctttattagcaaattacttgataaaggtgacattacagttttgtgtctcctaatttactttcttgtgcctcaagatcactgttataaagatgaaatacatatgaaccagagggtgaaataaaggcaataacaccaaagatactgggtgtgaaatatgtttttgaccaaggtaaaataaaataaacttgcagttagaccaggttggattcaaggagtccaaatttgaaaaatattttaatttattttccttttcctgaaaatgttctagtttgagtaatgagaagaggagaatttgcctagaggtctattgacttttcatttgtaccaaaattagtcttttagttatttacacatttcaggaaacctggttgctttgcacaccatcacaattggttttgctcgtaaaaggaatgaaattctcttttgtttttcaacaggcattgcggcctcatttgctgtcaagcttttcaaagcatggatggcagaaaaagatgccaactctgttacctcgtctttgagaaaagccaacttagacaagaggctgcttgtaagtgttttctggttaaagagttgtatgtatgatgcctttcttggagcttaagcaatgcctgcaatgtagtatatgagtaagatccctggatctgtgttgacttggagcactgttccttttatttctgtgtaattggtagtagaagctaatttcattttaatctttattttgtgaacaaatggcacaataaaattaaagaattgtgaagaatatagacttccaaatttgtaagtttgttgacatagtattaacatttcatcagaattaagactttgttttatagccataacttttttactttttttttttttgagacagagtctggctctgtcacccaggctggagtgcaatggcacaatctcgctcactgcaacctctgcctccggagttcaaacaattctcctgcctcagcctcccgagtaggtgggattacaggtgctctccaccacacccagctaatttttggattttttttaatagagacgg

SEQ ID NO: 124450 - DNA, 1940 bp, Homo sapiens
ataagtattgacttgggggcacacagctctgttcttaaatatttttggtggcataaattgggtcaagctgcttaaccttgttgaaacttggtttaccgtctagaaaaatgtctgctttacacagttattatgaggaaagtgccagtacattttgattcatagaagaaactcaataaaaatacattagttcccttccctgcagatttggaagatgtggagcagtagaggaaatatcagtgacgcagtttcagtgtggtataaaatgtttgctttattatgaatgcgtgtttgatagctgctcccaccagctctcttctgacatttttgaaacatatgactcaacaggggaaattaataggatgatagaacattgaaatttgaatcctgacataggagccctccagctgtgttcctataggtggtggcaaacccattgcagatctactgaggctctttctggaaccacatagccattggccatatatatgcaagtctaaccaatacaaaagcttggatatattttttagaccctgcagcagtctgaaaaatgtgagaactttgaaaatcatcttaatttcatagatgggagttgaactcacccaggattagatcatgactaagtgttactgagattctgccaaactgtgtagggtaaaatggaaatgaggtgaaaatatgagagcagctatggtatattgctctttttgaaaatttccatcagaattatgtaataaactagagttggtagggtaggtgtcttagaccttttctattacttataacagaatacctgaaactgggttatttatacagaaaaggaacttatttcttaacagttatggaggctaagtcccatgtcaaggggctgcatctggtgagggccttcttgctggtggggactctgcagtgtcccaggaaggctcagagtatcacatggcgagggggctgagtgtgctagctcaggtctcccctcctcttttttaaagccaccaggtcccctcccaacataacccactaatccatgaatggattaatccattcatgagggcagagcccttataatccagtaactctttaaaagcctcatctctcagtattgccacagtagggtccaagtttatctcaattgcttaccctttttttctttttctttgtgaaactgcctgatttcagaagatgtttagctcagtaaatataccagagatttgttgttttgtaaaacagtctttattcttttcttccaaatgtgagatattctaagtgaaatgaagacttttgtcctttatgcttgctgaaatttgaatggcttgttttatagcagtcttttttccctttttcaggaactctttccagttaacagacagagtgtggatcattttgctaaatacttcactgacgcaggtcttaaggagctttccgacttcctccgagtccagcagtccctgggcaccaggaaggaactgcagaaggagctccaggagcgtctttctcaggaatgcccgatcaaggaggtgggagaccacgggcagacatcacctcaatacacatgaatgagaggaattacatgggctgtgtagcaaaggctttccttaacaagtctgtcctatgcttattgctgtaaactttgtccacttattcctaccatttaaattaactcagcttcaaagtattgatttagaatcctccatttttgttaacactctaggatggtccagaaattaatagtgatttccacacaactgacttattttaccaggctgctatgattttcaaaatatttcatctgtcaaagagatttgaccatccactatcagtatagcccattatatggtagttttaaaattttgttgcaggttatctaacctgattaagcatttgtctagtgtttggaattaacactggattttttgttcatcactctgtatgaatatgtaacaggc

SEQ ID NO: 124451 - DNA, 1467 bp, Homo sapiens
tacactccaggccagaagtcaagaaagcaatgtgtttccagcaaaaaagaaaagggagggaaaaaaaaggtgttactactactcacaaagtagtatgctggagatatacgatgactttcaatcacttctgaggcccaaacctctatttattattttattttaaaaggaaaaagcctttcaaataaattttaggcaagcctatattccatactctcagggttgagtataaatttgcatatttatacataattcaaaggagaaaataagttgctgaatactgctgaattgatgtatatgaaatttaaaaattgcctttgcacttacaatttatttacaaattaacttttcactgagatggggcataaggatcatcaaaagtaatcattgaagaataaattgtggagaatggacctgtacaaacccaagatggtatccatcaagaggttttaaagtttagggatgggataaaagttcacaacgctgttgccttctttaaatctccaaaaagtcaaactggctcaagtatccctactctactagactcaaaggggtttctctatgaggaaacaaaaatcctctcttactccacattatccagcagctcctggccagagctaagcctattaattttgggactaaaaataaatttgctttgagaacaaatcattatagtttttctccctcttccagtctgagaatgcagacaaggaaaggagaagctaagcagattgtttcttagctgccccaaaaccttgattgactgggcagctagcggggagatgggagccctccatctgcctgttactttctgaccccatttccatgtaatgtaggtggtgctttatgtcaaagaagaaatgaagaggaatgatcttccagaaacagcagtgattggtcttctgtggacatgtataatgaacgctgttgagtggaacaagaaggaagaacttgttgcagagcaggctctgaagcacctgaaggtaacagcccttagcaaggaactgacccagccaagggcaaactgcagctttttttgtttgtttgtttgtttgtttgagagtgcagtggcacgatctgcgctcactgcaactttgaactcctgggctcaagccaccctccctcctcagcctcccaggtagctaggactacaggcgcgtgccaccacgtctggctaatttcttcattttttggtagagatgtagtctcgctgtgttgcccaggctggtcttgaactcctgcattcaagctatcctcctgccttggcctcccaaagtgttggattgcaggcatgagccaccacgccgggcccaaatttgtcttaattgagagtatgacaaatgggttccaactacaattaccctagactcagactaaacatatacttcctaatttttttccaagtttgcacccagcgttcatgagaacatagcagtgagtaaactgtccatgttactttgatcagggaag

SEQ ID NO: 124452 - DNA, 1004 bp, Homo sapiens
gttcaggaatactgctacgacaacatccatttcatgaaagcctttcagaagattgtggttctcttttataaaggtatccatccacgtgccactgctgtgcttctgtgttttgctgaagctctttgagaggcagagcaggcaatgaggcagaggaggtcatggggctctgtttagagagggacagcaagatgctaatttgtgaaagttttattgaggcaaccataccatgtagagagaggaggcatacacgccatatatgcgttgccttggaaaccctgcttaggcccctgggcacttctcattggtagatgaactggtaattgtttcttggggttggtggaaaaaaaatgtaattatataaaattgagcctgtttttgaattgtaaggattagctctaataacaatgattatcaaaatagtatatatattatgttcagactcttttaggtaccataaatctgactttaaaattactgaagtaattagcctttttactttgtattttagttacttggcccagccattctcctgttttccaagggaatggctatttttaggttttcacatttactgtcttttcattgtatttataaggattaggttgctatgacaactggcactaaaatatgaatgctaaaggttttaaccgatcccaatctgtatacctacagcatacagaaatgtcctaggctattttttgggcctacatttatgtagttttgtgagggagaaaaaggaacacttaagaagtggtacattttgaacattataacatgtttattttatgttattatgttcataaatatcatatcagaaaagttaaaataataccagccaaatgtttattttccctttcatgtgttcctaaatttgtctcttttgaattatatcttgggaatttggaaaataaaggttttagataaataatagctcttttaaaaatgcttaatagcatttcacaatgaatttttattggccacgtagattcctcaaatgaatgaat

SEQ ID NO: 124453 - DNA, 1046 bp, Homo sapiens
cccccttggcaaatctaattacttaattgaatatcattattgaaagatttataaatcttttacataaataacagtggaataaaagcaaataaactaaataatgctagtcagcaaagaaaaaagtggtgatgggtcattttgcaaagactctctgtattaaaatctagatttgcatatttttaaggtagtaagaaacagtaaatccattgctaactttcaagcatcacattattgacttttaaaaataattttctcttcttttttccctgaagataagtcccatagactcagcatggtctaaaatgtgtaaaactaccttgtcaagtactgttattatctctatcatgggttttcttgtttgcagaaattttttaggttaaattctatcctgcatgcaaatttttctaaaaggagttttttattctagttctaaaaaagggtgagtgcccttctcagcatatattcccagcattcttagggtaaattatttttgacttgtgtccctatgtgacattcctaataaaaaaatttctgaatttcaagagtttcaagtgacatagtttcagactaagtttctaaataactaacatgatctaaaatttagcagttctcaagccacttttacagtattgtctcttcgatcctcatgaatacattagaactctacaaattgagaaatatttattttttctcatcaagttaacaaatttattccttaaacgtgtgttgaatcgatactatagggcaggtctttcattaaatgctggaaatgagatgaacaaaatatagtccctgacttcctgaatttcaggatgtagaagaaaacaaagaattacactcaccatgtcaattgctgaaataagcctcacacagagggtgtcagaagggataggaccacagagggagggcacctaacttgttaaaggtaatttggagggggagaagtgaaggctctcaaggtacatgtatctcaccagacattatgaagaagttggccagatagaaggggaaaacatatattccagtctctatgtgccatcatacaa

SEQ ID NO: 124454 - DNA, 1428 bp, Homo sapiens
atttatgaaatatcccaccaaaaatggtttctcagttttaattaactcttttccctactttatccttagtgagggaaaaaattgtctgaattctttgtccctcaaggagttccttccttttcagacctttcctttcactaaatagaagtttaatttcttcttaaactcttcgatgttcatactttgcctcatatggtgctctgtgtagatacttcagtagcttttaattaataattctctggtactagaagtttgatctttcagcaagtagttgttactaccctgggttcttctaagaactccacattgcgccgttaatatgtagacttattttaaattctccttcctattcttaacattaaatattctcaattaatggtaacttaagaatatcaaggcacaagatttgcaataaacaatgcatttgataggttttacctatcatttagtgtgcttttcacaagcactgacattgacaagcattttagtagttgcatggtctccttcagcctctgtgaggcaataaaacacaggaatgtgctctcaaccttcaaaaggaaagctcagacaaatagtatcactaaactgcagtctacatcagctttccaacctgtactttgtatcatcctcaattcattaaggtgtggagaaaaaaaacaattctcctttccatgtttgtcacagtttaaaattatattgtttgtgcagaacattaataatgatagtttaatagtgcatgaatataatttataaactcaaaaatatacatatgttgggtgtatatgctcaaaattatcctacaggcaggaagacatgatccaaacagtttgataattactgatctaatcataagcatcttaaagataatttacaagttatataaaagggtcttttaaaatccctgttaatgttctttaaaagtctctgcaaggcagtcttacacaataacaggtcacttcctcgggacacaactgcctgctcctcagctctatgacaattaggctctgatggctggtagaaatttcttttatctcagtggagagctggaaacaaagagctaaaataactagaagctaagaataagtctacaggacccctgattgtagctcttacatccaggctctataagtaaatccagacttcttgcttcctttgcaaaatgtaatgtttttagtgatgataataaacatgtttttttaaaaaaccttttattttcataaacaaatcatgttcattttagtcagctcagcctcttcaatttaattcaagaacattttccaagagccaataattctttaaaaataaaaaaagccaatgtttttgttatgaaactaccagtgatgttttaaatgaaaacaatattaaattgtttctgtcattttcataagttgaaattatattttaactgaaaagatatcattaaagtaa

SEQ ID NO: 124455 - DNA, 1159 bp, Homo sapiens
agccaagatcacagcactgcactccaggctgggcaacagagtgagactccatctcaaaaaaaaaaaaaaaaaagaataaaaagtttatcttaggtgatccaaagaagaaaagttatattgtttaattttatatatattcaaatttttatataatttatatgtataaatttaatatatataaaatgtattcatttataggtatttgtatatgtatgcatgttgcatttttagacaggcaaaatttacgtgaaagcagaaaagagcaagagtttgctatctgccctcatgtgactattttaccttataatgggtgcctagggtaaaagtatgctggtgcaatggcagggttctgggttggtgactgtagtaacttttgaccttaattagaggaatctgggaggaaatatctcacttctttcttctctcctagaatccgaatcggaaggtgaggaaaattaaatggctcaacaagcacaatacctaggttaccacacaccactttttgattgggaatgctgaaccatttgagaagagaaacttggcttctgttttcgcaaaggaaaaaaaaaataggataggcttcccttgtgcagagggagaaatggttttgtttttgttttgtttttaaatggagccctgaggcatcagctattatacttgggactctacctctcactcactatatgctaacttaaagccattcaacaaggagtcaagtagatctgaaattaaatactcaacagactcctccttttttagctgtatttttcaggtactgtgtggtgaccgccccactggtgtctattacaggccactttggtagttgtgtatctgctcatgtatgtgatttgacaaaccagttttttaaaataaatggctttttaaaaatctgggcttatattgtcagagcttttatttctttcctgtacgtgacttcttacacagatagtattttggtgttttttctctttccatccacaatactgaatggttatatttcttgtcatctattaaaaactattctgctcacacctgtaatcccagcactttgggaggccaacgcgggaagatcatgaggccaggagatcgagaccatcctggctaacacagtgaaaccccatctctactaaaaatacaaaaaattagccgggtgtggtgg

SEQ ID NO: 124456 - DNA, 1037 bp, Homo sapiens
cttgggaggctgaggcaggagaatagcctgaacccggaaggcagaagttgcagtgagccaagatagagccattgtactccactctgggtgatagagccagactctgtctcaaaataaaaaaataaaatgaaataaaataaaacacttttaaagtattttaagaggcacaggagagtgggaaatgtctcaattcaaatagtcttgatttttttattattattattttttagtccccagggaagaagcagtccttgatgttttacaaccaactaaatcctttgaggaatcttagaccttttcgtagcattatcttttctttttagcaggaaatcctcatggttttctgagtgtagtctccagactggcagcattgatattccctgggggctagctggacatgaagactgtcaggatccccccaagacatgcaaaatcagaaactctgggggtggactgagcaatctattttgacaagccctcctggtgatttggatgcaagcttgggcttaggaacactgacctaacccaaacttcaggtgtcaaaacatcttggaacacattcccaaggggacataagggcaagcagacaagaactgaggcaggaccaggctttggcacaggataagggattagtgagatggtagatttcatttttcctgaaagctgattaaaactggcaaatatctctggagaaagatgtcctggcatccttcagtgggttttacctgatgtaagaggatagaagatgttagtgccctatagccgtatgacagctaatctgaactcattcccaagtgtgtgggaacacagtgaaaagtatagtcctaaaactggtctttcttgatttttttatcttagtgagcaataaagtgaaaatgtatttgttttttttttcttttttccagtgtgctcaccaacaattacaaccaaacaacaatttttgttgtagtaccaaaaaacaacttttctaaatacaaggaaatctaagagatgactatttacaacatatctaaaactttcagagaatagagagtaac

SEQ ID NO: 124457 - DNA, 1053 bp, Homo sapiens
tctgcgttgctgccccgcctgggccaggccccaaaggcaaggacaaagcagctgtcagggaacctccgccggagtcgaatttacgtgcagctgccggcaaccacaggttccaagatggtttgcgggggcttcgcgtgttccaagaactgcctgtgcgccctcaacctgctttacaccgtgagtatccccagtccgttcctgctcgcttgggggctttgcacctgcttgggagctctttggcttccctgcctggtcagcgactcactcgttgcatcccgcgcccccttcccggcttcccacgtctgcgcgcccccggcctcaccatccgtccccgccggggaccgggcgccggcgcttgtcgcagtctcttcctttcgttcattgtgaagccgcggtctctcaggctcgctggccgcgtctctgccacattgctccaccccgccccctcacccaccgccttgtttttcaaacattcaaccggacctctccgctttcccaccccgtacccttctgccgctcgctcctgacatccagacgcatctgggccaggcgtggaggcgcgagagccgtcagggcttgcggacagttttgcggaatggcgtggcctgaaactgacgaggcggcatatggctggtgtgcctctgggttagctcttggtaccctcgggattttaattgaggccactgagtaggttcacaggatgtccgctgcttccgaagtttgtttcgtgctcacagtaaagggatgtctttttgtttttgttgttgtcagttttgctagtacttggtgctttttctgtgtgtcttgtccatgatcaatatcctaactccattttaaaccaagtcctccaggaaataagcgagcccccacccaagtcgtttctttccctgccaaccagcttgggcctcttagttttaacgctgcaggctctctttgtgattttttgaggcgcaattctgggtgaacaggaggatgggcaggacagatcgacatttattgaatgcctatcacgtcccaggttttacatacacaatgctcgttcatcattctgac

SEQ ID NO: 124458 - DNA, 1520 bp, Homo sapiens
catgactgcaagctttgaaggcaagacagaaacaggcattgagtacgcttttatggctagttagtaagaatctggtcaacatggtcattaatagtagacttgggaaaaaaattttagaacacctggtgatacagttccttggagatacatgtcaagtttcagatcaaaattcatctgtatcaccctgaggtatgcttatcaccctggctgtttattaagtaaatgctgaccagttctctagggtttttttttttttttttaaatcagtgtgagtggcctgcttggaactttaaattccttattttgtgacctgagttctgttttttttctgccaatgatttagtcatctgtttgccagacacttagtcttacagtgcctgcttacacagagtggaatgtctactttgcatacttacttcactgaagggtctatatcaatgtataatcttttttaaaaaggcaagttattttaaaatgaagttccttgctttctagacatcatttttagttgtatttagagtatatcaggaaagtgaggcgaaagaaaggtgattctaaagggacatattaagactatttaatatctattctaaattattgaccttcaaagtgtgtgttctattgattttaatagctatgcagtaaaacttaatgaattggaaattcacgggacaataaaaatggctagcccttttaaatcatagactttttagacaaagggacatttcttaaaatgaattagtggctgcttgcttcttttacattgtaaataggcttaaataactgcagcagtttaaagtggaggcaagtgacaggtaaaagttggatcaagtcttagatagatgctgaaaatgtgccatggccattatttagcttctatttctcccctgatctctttctcaacattttaagatgaaaaaaatgtgaggcagttggggatgggattgagcatgaagacttgggagacatttctctataagtcatgaatagaaacattctttgtaggttctaatcccaccctggtcactgcctctaaaatgtgctcaacgctacaggattacatttgaggtcatttctaaaagtgttggttaaaccaggattgcatatgggaacggcagatgcctgaaacatcatcattgctgtgttgaagcattttactgaggaacttaggactgtatcagctgaactgtccacatgctctggtggcttgctgatgagcctgagattcgtgccacattcatgatcagctcagaaagcatgtcactaaaaacaagttggaagtcccaaacaaggaaatttgatcactaggcaaaatgttaacagttgatttttcttgttgtttatggcttgattattttagttaataggatcgccagtactggacaagcttaaattagtgtagtatgtgttaacagtttgtaaatatagaagaaaagggggaagctacattcctgaattcaccttcacagtattctaagagaatgacttgcctcagagcttcctgcatttaaagaaacttt

SEQ ID NO: 124459 - DNA, 1047 bp, Homo sapiens
tatatggcttttgagttaagaatatattatagatggcacaggtgggagcattgagactagttacaaggctattgctataatttgcacatgagatgatggaggcttggattagtatggtggcaacagaattaaaagaaatagattctgagagtgttttggaggtagggcgacctgatttactgaaagggacaagtcacagattactatgatttgtggctcaggctcaaggaattggcaggatagatttgccgttaactaggatggagaagatggcaggtggagcagactttgggatgaatgagaggattcagtattggacgtgatgctaaagaaacccaagtggaaatgtcaggtagcacttacagtaaccacactgttattcaggggagaggacttgccaacaagttagtgagggtagatggagaagggcagtggtccatggattgaagtagtgcatttcaaacattaagagattcaggagatgaggaacattcagcaagggagcctgaaaaggaatggccagtcaggtaggaggaaaattgcagagaggttggtgtctcagaagtcaagtgcaaaccatttcaaggagatggggaccgagagttggttctcgaatttgtcagtgaagaagtcgttgaaaagagcagttacccttttatttttcttataatcctctgaacaataaaggcaatgtcgcagtcattctggctttcctgtgtgcccggcacagccctggcatgtggttggcatttagttaattgaatgcaggaatcagtacagggttcttctgcccatacttcatttcttgtctcccagaaatgctccaaagaaggaagtggtagagtggggttggaactttgttggcagctgtggatgtcacctcaaactggttacccttggaaaatgacaagtggaggtcccttactttcaatcacctttatataatttccatatactttgtatttttttgcctagtaagtataaaagcagtggcatcacggagagccataatgaagaaaaatattcgcaagagcacttcaggccttc

SEQ ID NO: 124460 - DNA, 1026 bp, Homo sapiens
aaatttgcttgccttccactaccatcataacttctctgttgcgttagtgctaacaaaacatttttgaataatttacaacatctaatctgtctttttgaaatgttttaaattctttcatcctcaaagcaattcacttaccttggaagaattttggtactaaaaaaaaaggtagttgttttcacaatattaaaatctgtcttttcatcttgttcttgaaatgtggtggatatttgatgaaagattgaaggttatgtagacagagaataatatggaacatcattaggctgactttcttcccctccaaatattgtatagattggagaattagcgtttccttgtcctgaaagggtaatgagcaatatcatgtgctctttgattcagcagtgtgttttgagcacctcttaatgcttcacactcttagccaggtgctaggaatgtaagataacatgggccttgattgtctggtgcttaaagtgtagaaggcccatcagaattccaagtatggctgggaggaggaatggtggctaatgaataacctcgggcgataatccaggcccttcccatcttgggatttgtcagcctgggagtatggactttttctcgagatcagaaacaaaggacagccagcatagaaatgacctgatctgattggctttaaaaccaagaccacaatgttaggaatagagtttagccggaagtaatagaaacccagctatcactgcttaaaatggtaagttttattattttcacggaaaaagaagtcaagacccaggtaacccagggcatgtgcataattcaagcatattgtcatgggcccagtctccatctgctttcctgcccaactatccttggcatgccaccaaattacatataaaactctaggtaccatgaattgttccaggccaggcagaagatggtctaaaatgtctttccttgtaaagccttgtcttttggggggaaacagatctattgaaatattatcgacacagtaaggtgaatatacttaaagtataacattttataagt

SEQ ID NO: 124461 - DNA, 2591 bp, Homo sapiens
cagtgcatttgggctttgaaggaaagataggtgatgtccatttgaagagatcaatatgttggaccgagcttggcatctggaagtttttgtgtatgtgatttcttcaaaatcttcagtagcatgcatttaggctcttagtaaacagatgacttctgaggctctgtgagaattttgcgtattatcagtctttttttttcttttgcaagaataaagcacgcctggggattaatgtaatttgttaaaacaatactgcctattgagatcttgtgtgtattcttgtattaagttttagtgcttatttgtaagagactacgtaggtgcctgaaggatattgttgatatttaattaactggcattttccccattctctctcctctctctcgtcctctacccctgccccctgggtgtttttgcagttggttagtctgctgctaattggaattgctgcgtggggcattggcttcgggctgatttccagtctccgagtggtcggcgtggtcattgcagtgggcatcttcttgttcctgattgctttagtgggtctgattggagctgtaaaacatcatcaggtgttgctattttttgtatcctttttaaaaatcaagattttactcttgatgactattttgatggttacaactaatttaatattatcactaggaaatttattgccagaaagcaactccaagcaagccttatgcatatttgttcaagaactattagaaacatttcttagggtaatgttattgtacgttttcatattctcaccctgtccttgtgacaccctgaagaatatattctgcaagttcagtgtagtcctatttatgtattgtaaattcagagttaaattgaattgatttggtgacttctaggcccttttttacacattaatgtttggttgagaatttcagtgttttttttagacttaatattaaaaaagcttacatgtatttatctatacctatgtctgttttgtaaatgtaagaatttttattttattctgaatgaaattctaatctagttttagttatgtaattatgactaatatttttctttataaatttgatgcaactatgtattaccaaaataataatatgtgtatcctttttgaactttctctaagtgccatctgttctgtattctgggttaattacttcttgtgcattctaaagttgtcagtacctctgtacctctgttttatgccattctaagaatatttagaagtatccttaacttctaactctcagtatatgattattctgttacttgtatttattgttcagttttctgtatcttgcgcttgtttagccctgaaccaggagcaacaggtaagctaagacttttttcttctactttattataccacatagcatgagtatgaaaaaaaggagggtaatgattagaatataaaataatttcgtcttgcacagaatgccaccttcactctggatagcaaaactctcttgttccctttgcattagtgcagcaggttggagccggacaccatcaggtgttgccattttcggtatcttttaaatcggattttgctttcactgggttaaaaagtgctatggctaaaagatgttcccccaatcttttcccactattatgcaatgaaacatttgctccagaatgcttgtggttccagtctagcaatgactgttttcaagctctaattcgtagacaaatccaggtttctgtcatggagcaacagaacttttgccttgttaacactccgagaattatgcctttgaaccaagtgcttcttttaaattgcatgtaaattcttttaaatgcatgtaaaaaattaggagtttttcaatcttgggatagaaatagtgccttaatttttgctgcaaactgaggaataagcctttgaaaagttttaaggatttttaaaataaaaattattttaggtacacttagtactaaaagttacaggctccagctttatacattttctgcagggatgacacattttatatattaaacacatttactagggtcagcttctggaggttggttggaacaatacggcaagtgctcgaaatgacatccagagaaatctaaactgctgtgggttccgaagtgttaacccaaatgacacctgtctggctgtaagtacattgtataatatatgtttttggaaatgtattacagataaataatgattaatgtggaagaaatggactttctgatgctgaattgtattttcaggattattttatgtatatatttacattatatttccatgtcctctgttatatcatttgcctgttctcaaatacccactccagagagtgttgagaatttcaaggccctattggacacagatgctaatggtttattgtccctaatttcttcccatccttctcttcctagaacaagttgtgaaagaaataatagtacgtcagttcatgtgttcatattttggggaaactcctgttatcacatctctgagccctaagctgaatatttcctcagtgaggcttcttttgtgagattatctccttgtagggggtctgtgttatgtttctgttgctgcgtaacacattattacacagcaatagaaacacactggctttaaatat

SEQ ID NO: 124462 - DNA, 1035 bp, Homo sapiens
tcagtctttgtggctgtgggaccacccctgtttttttgctgcctgttggctggaggtctctctctgcaactagaagctgctctcaggtcctatgttactctttcacaatgtggcagcatcaaagtcactgtgagaatctctccattctgttaagatggagtcttttgtaatgcgtaatggagtcttatctgatgtaaggtaacatggaagtgactgtcctatcatattcacaagttccacgcatactcaagagcagtgattgtatagggtgtgtacaccattgagaggggagggtgggagtcttgggggctgtgttagagatttgcacactaaaaaaccaaggcctcaaattggatataatactcttagacactaattttgtgtgtatgcagtttttatgggctttttataaatgtattttgaaataaaggtttttttactttaattggtgcagagctgtgttaaaagtgaccactcgtgctcgccatgtgctccaatcataggagaatatgctggagaggttttgagatttgttggtggcattggcctgttcttcagttttacagaggtatgtgcaaataacaatatttttcctcctttgtcacagagattcctgttttgcatgacaaagggccttgattcttgttatcagtgagcattttcattgagaactagcactgtaaaaagaggaaacttggtttagaatcagaagatcttacaagtctattaatagcaccaactttaggaccgggtgaaaggcttgatctgtctcttcttatgtaaaatttaatgaactaatgagtgagattagattgaattatctctagggtctcttctatttctacagttgtgtgatgaattataattttaaatttaatttggaaaaggtaggacattcacattgtttaatatgtatgttaatgtctataatacacagacatacatatataaaaagattatatatctttttatatatatcttgaaaaattgccttcctacaccatttttcattcccctgttcctagccttctaaaa

SEQ ID NO: 124463 - DNA, 1394 bp, Homo sapiens
ccttcagggccagtcattcagtttaccacagtgttcgttttaattttttctcagcgcccgtcatttggtttacttcatttcaaaaagaaaaaaaatctctccccgttgaacaaaagatgcaaagcgattgagagggtccaaagttattttattgatcaactgaataaatatacataaatgttactttctttttctttactttatttttttttccccattccagatcctgggtgtttggctgacctacagatacaggaaccagaaagacccccgcgcgaatcctagtgcattcctttgatgagaaaacaaggaagatttcctttcgtattatgatcttgttcactttctgtaattttctgttaagctccatttgccagtttaaggaaggaaacactatctggaaaagtaccttattgatagtggaattatatatttttactctatgtttctctacatgtttttttctttccgttgctgaaaaatatttgaaacttgtggtctctgaagctcggtggcacctggaatttactgtattcattgtcgggcactgtccactgtggcctttcttagcatttttacctgcagaaaaactttgtatggtaccactgtgttggttatatggtgaatctgaacgtacatctcactggtataattatatgtagcactgtgctgtgtagatagttcctactggaaaaagagtggaaatttattaaaatcagaaagtatgagatcctgttatgttaagggaaatccaaattcccaattttttttggtctttttaggaaagattgttgtggtaaaaagtgttagtataaaaatgataatttacttgtagtcttttatgattacaccaatgtattctagaaatagttatgtcttaggaaattgtggtttaatttttgacttttacaggtaagtgcaaaggagaagtggtttcatgaaatgttctaatgtataataacatttaccttcagcctccatcagaatggaacgagttttgagtaatcaggaagtatatctatatgatcttgatattgttttataataatttgaagtctaaaagactgcatttttaaacaagttagtattaatgcgttggcccacgtagcaaaaagatatttgattatcttaaaaattgttaaataccgttttcatgaaatttctcagtattgtaacagcaacttgtcaaacctaagcatatttgaatatgatctcccataatttgaaattgaaatcgtattgtgtggctctgtatattctgttaaaaaattaaaggacagaaacctttctttgtgtatgcatgtttgaattaaaagaaagtaatggaagaattgatcgatgaattaagtgaggtggaattcttttctttctgctttagcttctctctgttggac

SEQ ID NO: 124464 - DNA, 1027 bp, Homo sapiens
cacatttattgagtcttaggcaaaattaagaagtagcaatttatattttataataccttgatgaattttttaaccaaaacacttctattttagtcttcgaagaaactcttttcttcttttccaagataatcatgattaacttacaaaaatgggtatacatcttcaaaacatttcccttaataggaaacttagctttacaggatctaaacactaaaaggcaaaaaaaaaaaaaatctattttcttttcattacaagacaaaacagaatccagcataagtcaaggaaacacattcatacctcaggtcctcctcctccatgaaccaacattattatattatttccgtttagcaaaatctgatctaatttagtattctttcttctggtgggatttcaaactcagtgatatcttgcagtaccatattgacaaagttatcaaatcctagaagagtatcaacaatttccttatcagttttcatcacaatgagaatttttgattcttacatttgtctacaagctctagcagtagcagctgtaaggagctggtactagtgttagccgccataactgtgatggaaatggccttggttaacatttttttttttggacagagtcttgctctgttgcccaggttggaatgcagcggtgccatcttggctcactgcaacctccgtctcccagattctaacgattctcctgcctcagcctcctgagtagctgggattacaggtgtgcaacaccatgcccagctaatttttgtatttttaatagagactgggttttgccatgttggccaggctagtctcgaactcctgacctcaggtgactcgcccgcctcagcctcccaaagtgctgggattacaggcgtgagcccaccacgcccggccttgattaacatttttaattttaataacaagcaaataattctacaagcttctagacaagaaaaaaagataggtcacacaataacgacagatggtcctcaaacctttcttccataccaaatagaagatggtgtacactaaacagt

SEQ ID NO: 124465 - DNA, 1045 bp, Homo sapiens
gcttgttattaaaattaaaaatgttaatcaaggccgggcgtggtgggctcacgcctgtaatcccagcactttgggaggctgaggcgggcgagtcacctgaggtcaggagttcgagactagcctggccaacatggcaaaacccagtctctattaaaaatacaaaaattagctgggcatggtgttgcacacctgtaatcccagctactcaggaggctgaggcaggagaatcgttagaatctgggagacggaggttgcagtgagccaagatggcaccgctgcattccaacctgggcaacagagcaagactctgtccaaaaaaaaaaatgttaaccaaggccatttccatcacagttatggcggctaacactagtaccagctccttacagctgctactgctagagcttgtagacaaatgtaagaatcaaaaattctcattgtgatgaaaactgataaggaaattgttgatactcttctaggatttgataactttgtcaatatggtactgcaagatatcactgagtttgaaatcccaccagaagaaagaatactaaattagatcagattttgctaaacggaaataatataataatgttggttcatggaggaggaggacctgaggtatgaatgtgtttccttgacttatgctggattctgttttgtcttgtaatgaaaagaaaatagattttttttttttttgccttttagtgtttagatcctgtaaagctaagtttcctattaagggaaatgttttgaagatgtatacccatttttgtaagttaatcatgattatcttggaaaagaagaaaagagtttcttcgaagactaaaatagaagtgttttggttaaaaaattcatcaaggtattataaaatataaattgctacttcttaattttgcctaagactcaataaatgtgtctaattataaacacccaaggctgtgttcagtttctagaagtgtttcttcttatcatctagctggttattgattttcattatgatcaactctttatttctgtaaaacttgttttccagatttgagatgtt

SEQ ID NO: 124466 - DNA, 1035 bp, Homo sapiens
ggattaggtccattcccggcactgcccgtggaatcgaggtttggaggccggctgggagacagaggacttggattctcccgttttcaatgattgcattttaaaaattgtcctcccacccatcctcttcccccgcaccagtgcatacacaccctctcacatttgcaactttgttctttctgatttggtcctgatttgttgacagctctgatctgccttgggctaatggattagttagtataaacctgtcttgaaatctccttccacttttcatatccgcatgggttaggttagaggacggtcttaattctcattcttcgtagagtttggtaaggcgagatgttttaaagagctaaacacatgctgacttttacgaaggggctgagtgcctctaaaggtactttttggtccccaccaactggctttgtgttgcgctcatatttacttatttggcagcaattttgtagcgctcatcgtgaccatatcggtaaagtggatagaagtggtagcaggtgggagtggatgcaacggacaggatacggtggaggatttgtattcttcagacatctttttcggaagcttgcttatcacttttggggtggctttagggtctgtaaaataaaagatttagaactgcatttgagagaggttttcattcttaacatctacctctaattcttttccccttcaaagttttcttctagttgagtgagtacaaacttgcttttgtcgttgtcggttgattttggtggaatatttgtgtgagatggccaattttttgtgtgtgtcagaaaaaactatccgtgctcaaaacatttcctgttgtgaggtggttgtattcatgtgtttattccaatttttttatttctagatctctgagttactttacctacatgtgtttcaagttttcgtaaacaattttaagaactcttaaacgtcttctcagaccaaatcagaagtgtgcattttgcttagactccaactatcactaatgggaaccagaaaaataacactttaagatttacatttaaaaccagt

SEQ ID NO: 124467 - DNA, 1050 bp, Homo sapiens
tagtacatatttgagatgtactaatttaacaattaactaccacttaaaatttttttggtaatgttttagtgattctggtaaggcagatacattttatgcgggttcgagggggaataaaaatgtgtgtttgcgtagaagaagggggaggggaaacaatgagttttccaggattatggaactagtagtggtttctaggccatatttcattttcctgatcttccctgctaatgtcttgtgctagaaactatgctgtttatatctcatcatctctcctcaggtatagcaaacaaaagggaaaggaaagaactcatcacaattatagggcagcagcaggagggtggcagaagacttctgactcattaaaagtggcttccagccagaattctcagaagtttttgtagatgtttttgactcatatagggaaataaaatatccagctgtgttcagcctgacaatgaagttggggtctatttgtgctatgtgtcacctccattacattaagcacatagtttatgattgtaaatatttgaaatttatattcagagataaatacggatgcactgaagctgggggaaggaaatgaagaatgaatggggttaagagttgggctttattgggtgtaggtagtatggtagggggattttattgaggaatacttcagatttcctagctgttagatggagagtagcaccatagtgctgagaagcgggtgcccaactccaggggaatgttgaatggaagggcacagggtcaggtacagggactggaaataaagataaacaagttatgggtaagtagaccaacgcagtaagagtagattaaatcaccccgaggaaaaatccgatagagcaaactcagtactgtgagaggcaatctcttgttaaaaaacgtcactttgatctcataggattactgaaaccatatctttgcatgtcattttgaggttttataatgaatattatataaaacagttatatttatgagtaaacttggttaattttttcagctttgcttcaaacactggctacaaatgatgaacctcatagactt

SEQ ID NO: 124468 - DNA, 1151 bp, Homo sapiens
cacagagaatgaaattataagggtgacccttatgaactgaaaaaatggtagatgcaaacgaagagatttgaaacatgctaacaatgattaggatttttgtgtgcagttggacccactcttccactattagggaaacagtatagcgaagcgaagggaagctcaaagtgaataacaggatgcaaacagggggtgtgtaaattcctgcggaaagaacaatataaacgagtaatcatacaatcttgttagaaaggaaactcaagttttactgtaacaatagatatttttccaagaaaatacatctatttattgcaagtttaaataatccaacttggatggatcttcttaaagtttggaaccatgactatactgctgctgctgtctgaaaagcaacactataaagttttaagtactacattaatatttatccatttctaattaattaaaacatattgaaatataactttaaaatacttgaacaaggcttagcaatttttcagttataaagtcgaaaatagtttctttgacatgatttaagcattacatttaaatatattatctctgagatggagggtattttaaaaatttaaataacaatggttacaatcaataatagtttattaatagagactaggatttgggtggttacaatctaatctttgaaactggttgatgtgaagagaaaggattgtttcctcctatatcatgtctctcaaaattgttaaacagtgtacactgggcttgttgatcaatctaatcagcattgtaatgtttcattcctaatttcagcatatctttaatacaatttttaatgagatttccttactattttttgaaatgcccattattatgtaaatattttgttcaaattattctgtttttatacagctgccccaaaattgagaattcgggaatgactacttttgttttctgtttacatacaaacacctaatgagcctgacaaaatggagcttagggatccgagtttctgatttcaaagtcttgcatttgcagctgtcatagggaatagtagtattctagttatttttaaaacaaggtaatgttagggaaaatctaagtcttgaatcattatacatgcttaaaataatcaccattttataaaatgtagaattatttacatgttaaaatatttt

SEQ ID NO: 124469 - DNA, 2144 bp, Homo sapiens
aaagcatgtgatatgaagagatgtggcatttagggagtaggggaaatctgagcttagatgtctaaggaaggaaagtaccgtattaggaaacatggatatggttaaatgcatgtgggaataaaacttgagtcatctgtggtatgaccatttgataatgctgtgatgtatttgcactctaaattccatcatttgttagattaaattcttatttgtattgtacgactccttcatagatctttcaatgaggaaatagtggaaatattttggtggtttactatcttaacattctactgaatgttcagagtctgattctcacactttggaaagtggtacatatcctcactgatggggaagattttaacaaatgcccattacggtacagcagatacttcccagctggtgacctattttcagatactacattttgtttctgtggactgtcataaatttaattccagtggtgtaatatttaaagtgtcgttatgcatataatttatgtaacaatttacagttttgaagtatagttgacccttgaacaatgcattaataacatgaacagccgattaatgtgtcttttgtatatgtattatatactgtattcttaaagtaggccagagaaaagaaaatgttattaagaaaatcataaggaagagaaaatatatttactgttcattaagtggagtggatcatcatacaggtcttcatcctcattgtcttcatgttgagtaggctgaggaagggttggtcttgctggcttgggagtggcagaggcatgtaagtggacttgcatagttcaaacccatgttgttcaagggtcagctgtactttcaaatgtgtcatatagttaccatagtaatcctattagatactaattactgctttccacttaaagatgataaaaatactcagttacctccttaggggcactttaattgtaagtttctcatcatggtttgagggtgtataaagtcagcatagacttcgttacctctgtccttgattgtcagtgattgattccaggcattaccctggtattgtacatgttattttaatcctcacaagaatttgtctcaagaggtagcattgtcctcatttaaagatgaggaaactaaaggtcaaaggtagttagcaaagtgggcggtggctaataatagctcacacactgaggtctggctacctgagtttttgtctaagctctgccacttaaatctctatgactctgaacattttctcaatctccttaagtctcacctttctaatatattgaaataacagtgtcagtctcatagaactattatgaagattaaataggatataatacgtggaaagtgctaggtgtacagtgtgtgcccaatatcacatatgagtactaagtaaggtcactccaatggtaggaagcagctcttgtgacagtgtctcatgtcactttcttactcattgttttctttctaatcagcacaagcaatatatacatgaaaatgagtagtattgatagagcctctagtaatttactaagttagaggtagtaggcatgagagcaagaaatagaagaaaaacttcatgcaggggtagacattacatagtttaggctgaaaggccatgacataaaatgtttcctgaaaaagcacagcagtgtttttttaaatgattttaaaagtccacccttctcagactcatctttgcacaatatttacttcaattatttaccagtgattaaccttaaacacaagagcaacagaaatatttgcatatttgtttttggtagaaacctccagtgatcattccgccaaatgaacttgtcacttttcctacttatgtagtagttacacatattatctatcatccttccaacatttggaattataagcattgttgtttagaaagaatttgttctttttattttttctctacttcaagttcctgtaatactttaattaaaccctattctggtacttagtatttttgacattgttttctagttatttccatagcttatatcccctacttaaagacagggtctgactcaagtgtctaattacattggctaatactcccagtacaagcccaagaacaaattataaattactctaagatgaatggtctctttcattgcttagtcatcttctcagtgatcaagtagttat

SEQ ID NO: 124470 - DNA, 1048 bp, Homo sapiens
ttggccatttgtatgtataaagtatcaatatatgctgtagaatacagtatgtatttgtagctaataattttttctaatattaataatttactgcactataattcctttaaacctttatgtgattcatggttactgtgtttcttctttcgcttatcaagaatcttatatataagaaactttcaggcacgtagggtctaggggagaagatacaaaattatttgctatcaaataacttatggatagcagaggatatatgacaactatgaaatgaatgagatgctgttaaaaagtacaagtaaaatcctatgatttatacctttaattctgatttatttggattatggaagttaccctaaatcaaatggtatgtaagctgacctaaataatgtgtaacaggtgggtggtcaagaaaacataggaatattgaagtactgtaagcattagactggaagtcattgaaggaaacagacgtgtctgacttgtttgatgttattgaatgaacagtgaatagatggaattataaatatttgatatattggaagggcaagaacatcttttatggtttgagaacagattgtaacatttgaatgcttgctattctcatatatctggttctcaaattgtactgtgcacaagaatcacctgaagaccttgataaaacttggtcatccctgtgagccccattgtcagatattctgaatcagtagttcacagtggggcccatgaatttgcatttctattaagctcacaaggctgctggtcttaataacagttatatagactagagcttcaactatattatatacccagtggaaaccactgaagggttttgttacagggggtgtgtatatttcaacttgtgtttcagatgcaacttttggaaattgtgtaatggttggcatcaagatgatttaatactagaagattaggttcctaggaagatttaagtgtagatgactaaagtagtggtatctagctactactgctaccacaaagtctaaactcctgatttcttgcattctaaagaaaatacattaatgtccataga

SEQ ID NO: 124471 - DNA, 1216 bp, Homo sapiens
accatctaggtttgtgaacctaccctctgatgttcacaggataatgaaattgcctaaggacacatttcacagaacatgccccttttgttaaatgacatgtgagtgtatgtctgaggtggaatatctgtgtgcaggagggccttttcctccttgtgctgctattattttgatgtcagaaccatcccttggactggttgatattgttttaagcaattaaatatatcatgttcatgtttaagtgcctttgttttccctgtcttctaaatttcttccatatctttactcagtagggctctgcattctttatatgttttcatgatgattcattttagtgtcttaataaaattatattttgcctctatagaaaagattatgaactatgcagtatgctatgagctgtgatatagttcatgtatgcttgaaaatgaatgtttactttaggactttatcaccattcaggatatattgattgcctggtgtgcaaggagctgtgtgaggtgaaaatgatagggtaatggcaagcttggaaaatgatataggttttcatgttatgaccattaggaacaaggagtggttcacttatccctttagaatatttttcatattactctttgagatagatttaatgggcgtcccatggagagaggagtgaaggaaactaacagttctcagcttcaggaatatttatggaattatcaagaaccctagaggcagccataatggagccttttaaaaaggcactattttatattgttaattttaatgaacttttttgttgttgttgcttttttaaggcaatgaatttccaagggaagttaaagtatcttcatggacagaaaaagaaagggaaagatggatcaatacttccacctcagttggctttgtttgcgatagctactccacttcagccaccatccatacttgaaatccggaccaaaaattttatctttagaaccaaacacaaactagacttcacacctattggttgtgatgccaagtaagtgagactttttcacttttattttattggatgtacattatgtttcagtaagtctctcttagcatgtaaaacatacagtgtatgtaatattgtttattattagattggctattatcgtacattcttccagtgtagccttttacagtaaaataatttaatcaggctcacaaatcatctttttaatttttgcaatacttgtctcaaatgatgatgttc

SEQ ID NO: 124472 - DNA, 1133 bp, Homo sapiens
ctatattgatttgggggtttgataatttaattttttaattttattttagtgattaagactggagaaagtggcatgatagttttccggcttcttacaaaaaacaaccgatggacttgggtccagtctaatgcacgcctgctttataaaaatggaagaccagattatatcattgtaactcagagaccactaacgtaagcacaaataatgtttcctgttttaacagttttgttttcataagtcctcttatgtgaaagcataaaaataattcaagcagactttagtctgtaaataaaaattgaaaagtttaattcatctagaaagaagagcacaggtgagagacattgagaagatagaattgacgaacttgattgagagctacatgtgcagagctatagaaagaataataaaactctagggttttatcttgggcatatgaaagacacatgaaaagctagtgtcattggtaaaaaagaagaaaaatataacaatgctttatttagaatatattctctaaacccagcagtgattttaagagtttcttacacatgctgcagatgagtcctttatcaaatatttgtattgcaaatgtttcctcccactctggagaattgatttttgtctgtagcttgaggtaaggattgattccccccagccattatacgtatacccaattgaccagtaacattgaaaagatgatttaccgagaaggtcattgtttcccggctgcgctgtattttgatcaggggattttgtctgtggttctctgtctggattgtgttgttctattaatagctccattagtgcagttgtctattttgtctagcattacactgtcttagttattctatctttattatatatttctatgtcagagtgtgtcattttgtttgttttgccttttttgttctccttcaagattgccttggttcttctttgccctctataattccatatacattttagaaagcagttgtctgaaaatctgttgagattttgagtgcaattaccttgaaactgtagatcatttggggagaattaacatctttttaatactgaatctttgagcccatgaacatgatgaatgtatgtatgtgtataagtacccatggaagtacatgagtatgtgtgtacca

SEQ ID NO: 124473 - DNA, 1114 bp, Homo sapiens
tgaccagcctcaggatgtgaactcatttgctggaggtcacccagggctctttcaagatagtaaaaacagtgacttgtacagcataatgaaaaacctaggcattgattttgaagacatcagacacatgcagaatgaaaaatttttcagaaatgatttttctggtgaggttgacttcagagacattgacttaacggatgaaatcctgacgtatgtccaagattctttaagtaagtctcccttcataccttcagattatcaacagcaacagtccttggctctgaactcaagctgtatggtacaggaacacctacatctagaacagcaacagcaacatcaccaaaagcaagtagtagtggagccacagcaacagctgtgtcagaagatgaagcacatgcaagttaatggcatgtttgaaaattggaactctaaccaattcgtgcctttcaattgtccacagcaagacccacaacaatataatgtctttacagacttacatgggatcagtcaagagttcccctacaaatctgaaatggattctatgccttatacacagaactttatttcctgtaatcagcctgtattaccacaacattccaaatgtacagagctggactaccctatggggagttttgaaccatccccataccccactacttctagtttagaagattttgtcacttgtttacaacttcctgaaaaccaaaagcatggattaaatccacagtcagccataataactcctcagacatgttatgctggggccgtgtcgatgtatcagtgccagccagaacctcagcacacccacgtgggtcagatgcagtacaatccagtactgccaggccaacaggcatttttaaacaaggtaagggtgttatcaaactgaattaaatctttcagtgattctttttaccttatagacatgttacacattttttatgtcagctgattttaatcggttatctacagcattcatggagacagcattttttattatatctgtgactaccttttttttttttacaagcctgtactttttccagtatgttactaatatatcattcacctgattcatgagggagaaagatatcaaggaatgaagcaacatgaatgtgtc

SEQ ID NO: 124474 - DNA, 1024 bp, Homo sapiens
atttttactatagattttatatatgttttggaggatctgtgaagtaattaacattttgattactgaagccagttatgtaggctttacaaaggtagattttatttgaagcaattaaggatatgattttaatctgttttaaagtttccagaacgtccactaactaaaatataaaggctctgtaatctataaaactctacagagctatacatcttcatgtccttcctttttatttttcttttttctactagcagttatagaaaccagattcattgcagtgtaagaaaacaagacagagcattttcttttggtaacttgattctgtaattagaactatgctttcagtagtattcattaattaaaagtatattatgaataagaaatcggttaagaaaatcatacctgtggtgtaatattttaggaatatttagaaacatttagaaaatcagaagctgccttttttggaaaagttttgcattccagtgtaagattcctgaatataatcaattcattgatacctataacttcaaacctggtcaaagcaaacctacttatgatagagaatatttaactgtaatttgtgacttgtgctgtttgacccatcaattcctacctgacccaaaggcaatctgaaatgagacagctgcatcactcatctgtaccatgttcaaaatttcctgtcaaattaatggaaaaacaggttataaatgcaactaatacataatatgtcctcagtatgtcttcactgtgtgaaagatttaaaatttagcaacagtaaaggaacttgaagtttacaactctcaggggtaagattttaaaaatacatgttaatgttatttactggcttaagatacttggaagatctattccaataagttgcatcaccatttttgttttcagtttcagaatggagttttaaatgaaacatatccagctgaattaaataacataaataacactcagactaccacacatcttcagccacttcatcatccgtcagaagccagaccttttcctgatttgacat

SEQ ID NO: 124475 - DNA, 1036 bp, Homo sapiens
gaggtcaagagatggagaccatcctgaccaacatggtgaaaccctgtctctactaaaaatacagaaattagctgggcatggtggcgtgagcctgtagtcctagctactcaggaggctgaggcaggagaatagcctgaacctgggaatcggaggttgcagagccaagatcgccccactgcactccagcctggcaatagaccgagactccgtctccaaaaaaaaaaaaaatacaatttttatttcttttactttttttagtaagttaatgtatataaaaatggcttcggacaaaatatctctgagttctgtgtattttcagtcaaaactttaaacctgtagaatcaatttaagtgttggaaaaaatttgtctgaaacatttcataatttgtttccagcatgaggtatctaaggatttagaccagaggtctagattaatactctatttttacatttaaaccttttattataagtcttacataaaccatttttgttactctcttccacatgttactggataaattgtttagtggaaaataggctttttaatcatgaatatgatgacaatcagttatacagttataaaattaaaagtttgaaaagcaatattgtatatttttatctatataaaataactaaaatgtatctaagaataataaaatcacgttaaaccaaatacacgtttgtctgtattgttaagtgccaaacaaaggatacttagtgcactgctacattgtgggatttatttctagatgatgtgcacatctaaggatatggatgtgtctaatttagtcttttcctgtaccaggtttttcttacaatacctgaagacttaccagtattctagtgtattatgaagctttcaacattactatgcacaaactagtgtttttcgatgttactaaattttaggtaaatgctttcatggcttttttcttcaaaatgttactgcttacatatatcatgcatagatttttgcttaaagtatgatttataatatcctcattatcaaagttgtatacaataatatataataaaa

SEQ ID NO: 124476 - DNA, 1056 bp, Homo sapiens
aaaatccaaaatcctattttaatattttaagaatatttctgaagaaattcgaaataacccttgttagctgtattttgtgcttagtttagaaaaaccattgcccaaacttagtatttctgtttaataagtataaatgatacagaagcctttggccttaaattcataactgttgaacattcatggaaaaccctgcaattagaattgattgaagaagaattcctgagaaaatgttttcattcttgtgacagttatttttctattagttttatatttgttctttacaattaggcatttttctcaactagcatatcataagttagcatcatacttaattctgaacattttagactaatcctgagtctttaagaattacataaaatatttagttttaactatttgatctgaaaaaaatcaagtaaaaatcctgataacctgagtgcatctctgcttgcgcttaggtgatttctgtcaccatgaatgactctagcttgtccaatttcaccagctctaccaaacaccgacccagggatgttggccactgacagggctggatgacatctctcatttctttcactgtctgcagatgaccttgcttccgtttttactaataaaatcaaggatatcatcctaagtttgtaccttcacctcagcaattcctctatccttggacttacctccagtatgtgaggaggagagtttcctgaactccagggttagcccccgtcctctctcgttctcatgcacacagcttcgacacctgctttctgagaggctctccttctctgtaggatttcctgtgaataggtcctcctccatcctggaaaaaaattacttgaacctgcactttcttctctattaaattacttctttaccttcttcctttgtaacaacagttttgatctcctgagatctggttttgttttccatccttccattatattgcagtgttgcggttcactaaacttcttaccataggctcattttctatggccctgcaaccaaactgattacactttcaatgaacttttttcttcccttccatgacattagttgtcc

SEQ ID NO: 124477 - DNA, 4769 bp, Homo sapiens
atgctttgttattctagttactgcttatttgctcattcatgttcttttcaccaaggctaatccttcatctcattgcacctatcaaaatcctgcccaagtagaaagtctcctttacctgccacttccttaaagggaacttttctttgttatcgcatctgaaagtctccccactaccaatattcttatacttttagcatttttatggtatagttactatgccaggggtttttgtagatcagggattaatttttttttttcctgtgttccaatgaaactttattcaccatcatggattagtttgtttccttacagcatttgtcactattcattaggcctactaagaatatttgtataatattacaaagtttacagatcactttttacattatttcattaaagacttataaatccttataaggatgttattataaatcctccttttcagatgagaaaagagagtcagggtggtgggtaagtatcacatgggtattaagggacatgtttgtaatcatagtttgggatctttgagactgttttttattttttatctcttacacctgtgctatattgtctcccagtagcttttgcattaagtgcgtaaatagatgcatgcatgcaaagatgcatattaagtttcagctatagtacatagctgaaatgcattaactggttacctactgttcatcagttactctgctgtgtaccttaatttaagaacatttaagagtttaggccttgtgtttcctttgaataattatgtgtgttttcctccacttcatttagatgagctgaagcacattattggggctgagacaacacggaaaggtattcttcgtgtttttgaaatgtttcagcacaaccaattaaataggagaatggtttatgtcttcttggaaggctttttagaaaccttatttccacagtataaattccgtgaacttttcaacaaactgcattcacggtcaaagcagatgcagaaatataaacagaaacttcaaactactcaagcgccttctttgcagaaaaggtgacactccactctatgaagctggtgttcattttgtccaggactaatggtatggacagatcttctggggcttaactcaaatactgttgtgtctgcaccagtcttttagtgtctcaaaatagattattaatacatccataagtctgtggttcttctcattctcatctataatccaccactaccaagagagatttctgtgtcttaaatgatttggtgcatattttgcaacattgagagaaaactgcccccatctcaagcaagaatggcgttggtttcttccatttcaaactaatcagcattctccagcaatgacaaagtgccagagtgtatatatgaaagctaaggaaagcacaaaacaatggttcagagataaattggctaatttgtttaacagttggagactgtgcaatgtacgacttggaggagtttgtttggcataatgattttgtaggtctgtcagcattttgatatattgtggattagccaggtgaatgatccttgaaacatctctttcaggtctggagaaagagacagaatgcccttaaagtgtgaaataaccttatacctgaattacagttttgtgatataaaataaagctgagtataaaataaaaccaatcaaacacagaatttgattggatttgttattcattggtatacaacaatttttattcttatgtgtgctttaagggctgtgttttgctcttagggtactcaattttatgtttccttttggcattctttgtgcaaaaagaagcatgtggtggctctcatttaaatttcaaaattattagttttatctttaacagattactgattatacagaagatataatttattggaagaactgccaaatacattttgtccttctaaaaatatggaaatttaaatagtagtctggaaagttaccatatgataatttttaattgtgtgatctagacatgccttaggtaactgcagaaatagcaaattaaatgattaatgagcttattagtcatagtaaacatacagattcctaattctatgacagtgtacatatatgaaaataaatgatgaaaaaagaactataatatttttaaaaatatgcttttatttatatttcacataatgtaaagttctacaaaataaagctagtaggcaagacccctcagtgtatacctttaaacccataaattaattttatatcaataaaataaaatactttctctagttttggagcttctgtatttcctatagttttctgactgtccattttatccatcttagaagtattcacatcccttctatgcaggatttctgcatagttttaaatactttcattgcctaagggtttgggtgtgtcagctttttttgttttaaaaatatttaacactaaaaccttaaaataatgaagctacttatcagaccactgagccaagatcctggtattaaaagaaagtctgggtgcttaagataaagggacagagtattggtatcccagttatttgggagctttaagattggaacaagatatcactgtcttgttttcacttagatcctacttacaaagtgagggttattaacagaataaagccttcctttaaagctttataataatcatatttattaataatgctgttgtgcatacttatagtatgcatatattcagcatatgttgcatgtcttcagaattacataaaatgaaatccctttcattgcaacttgcaagtgagaaaagatccttagtggctctggtggaagaaatagtatttcttcttctcagggtgtctccctgccttggcccctccctgagccccaggctttaaaagtgaaaatgtttgaaacatgaaacatgtctgtaggaagcatcagcatggccataagtgcagtgattttcatatatgcctctgcccatttcaaatatatttttgacatgaataaatctaacagtatacagaataattcatgtaagaccctaacgtgtacatgtgaaaaagcatttctatataatgtgaggagcactggccatcaattagggaaataaaggtcatgtaatattgcaaattttcaaaatagagccctgcaagataactgcaatcataccaaaaactatttgagtaaatggatttttaaagtaatttttgtttagaagagtttatatttcagaagcagaaaatgtcaaatgatagtctttgtaaatggtggtgcaccttctctatgcacatctgtcttttacatcagaaagagctgtggtcatgctaaaattagagataactttttgaatgacttggtcaagctgtgtgtaaaatatttaaccataagtcaagtacagtgtactatgtttaataaagttacatttaatgcatttattgcatatatgaatatatacatgaagaggctttatgtcttctggtatttgattttgaatgttttttaagtcagtggtgcctttaggcaagaactttcgaaattaatcattctttgtgttttctgatttttcaggtaacatgtacactatttagaaaccatcatagtttattcaccttaaaaaattgattgtattatttaaatatatcacttagatgggcatttcctataattaggatattccaaatagttgctgaaatcaattgtgccattgaccaatggatgcacttggttagccttaatttttttaaaaaaaaaaaaaacaaaaactttcttgaatatttcagtttgttcattttaagtttgtgctgctggtatttgggaagaaaaatcaatcagttaagtgctaccagaaagtgtaccaatttttataaaaattaagaatgatataaatttcacaatctaaaattttaattttgtgcaatattttcatttaatgcatgtgtatttgagtaattgtaagataaatgaatttttaattttttgagatgtagcttaaactgtcttcttaatccaacaacttacattccgttgttgctgcatccttttatttaaggacttgttttaaaagtctttttgtcactccttggaaaattcttttattagtagtaaattttgcttttaggagcatggctcctgtattacaagggaaaaaatatgaagagcacattttaggattataattgttaaaagataatgtgtgcatatcattgtacagtaagtgtcaactgtgtgcctaactgttctatcaatactttctttctttaacaaagaagaaacaacaatcagaatgtcagttatttttattcaactaaaaggattaaaaaatttatttggtttgtgttctgtccattagaaaatactaataaagtattaacaaacatttttgttgagttcatttaatagtaatgtatttttgttacttttaagatgcttgctcagtagtcttatttttagtatctgtttgtattttcttttcttttagatatcaaccaattcaagttccaggttgatagatgagtgcttgagtgattactgacttaaatggactgaatttaactttttcttttatggggcaaataatttacaccacagtgttaaagaaactttatacttcctcatcgtatcaaattataaagtattttcccacagatgaaaagatttataattagtaatccattttatttgatctcattttaaattcatattttggctaatattttagattttgccattctaaaagtagattggtcataatatttgcatctttcttggagctgtatcaacagacttctaaggcctcagatgtgataacttctagcccatcagggattggc

SEQ ID NO: 124478 - DNA, 1950 bp, Homo sapiens
gtaagtctctctggctatgttgtaattttttattaaatattggaacctctacaaggaacaaaaattaagtaggtaccctacttcatatttctttctacaaaaaatactgagcgcctcctctgtgcctagcactcagcccattgctgagataagatgcagtcccttgaggaaagtacagatagtagagaaataaacctcttttctgaaagtgaagataagcaatgcgtaaaaattcatggcatcatgtattttgaagggaaggaaaggaagcaagaagggaactatcagtattgaacactaagttcttggcactgtgcacagtactttatgtatgctttctgattttatgccatttttcgaggtaggtatttttgtctctattttgttataaggaaattgaggattagagaagttgaataggctctcaggctacaaagtggggaatctggtttctctaatctgaagctaagtttcttcccactgtaccatactgtttccaaaacttggactagctgccctggcatgttcattttatttcagggtaggtaaatgatgttcctctggagtggtgattatcagctttggctgttcattggaatcacctctagagctttaaaaattactaatgcctagatcccatgtccagggagtctgacttaattaatccaatgaaaggcctgaacatgaagagcctgtaaagctctcaggtgcttctaatgtgtaaagttaagaacagctgctctggggagtcttgcccttacaccaaattcccagatgaaagcttagtttttgtgctcagtccctgccttcagaccaagaattagggaacaggagtaaagcacactgaaagttaagaagaatgggttgttttacttgtgaaaggaccattatagtcaatccatctgtaagttgtgggcttagaatttagtattatgtaggcttaattataagaggagtgggatggcataactgaaggagatagctattaaactctaaggcattgagattcaagatattgtagggttgcatttggatgagatgttcaatcagcagatgcccactttgagtttaaatggctgtgatatagtcatgtacatattccattttgctgtcttcattagtgtttatgaactgcattggtgcagactttatctggtatttttcttgtgttcgttttttttgaacccctaaaattgaaccctacacttagttgatctttcttgaatatcattatagctatatgttattattcagaaacttttctttctgttcacatttgtattttctgtagaaatttgaaataattttatcaacttgtatcattagaaaatgaaaatgtttacaaaatgtatttaatcttctcaaatagagatgcattttggccaaatggcattttagcagaggctgttccatgcagagataaaagtattcgaatgagaacaagagtagcaggaaaaacgaaattacttgcaattatgccaggtgagtgagcatgtatagttaaaaatctttataatttgtcattcttctgagtttttagcattcatcatgccagtgtaactgccttttgattataacaactaccttttgatggcttaatacatatcaggcactgtactaggcatttctcatatgttcttaatcagtcctcatgacagtactgtaaagctaaggactgttaacatcaccgctttatatgtgaggaaacggaagctcagagaggttaaataacctatccaaggtttatagctactaagcaacagttggtattctgacttggctttaagtgatgtgaaagcttatgcttttagccacttcgctctgctgccttgaaacatattgggagttaagttaaataaataaaatacatgacaggtgaaagggctaataaaatataaagtatgaatttttcaggaagaatatttgttgtacttaggaaaacaagttatt

SEQ ID NO: 124479 - DNA, 1064 bp, Homo sapiens
gctcctaggctactaacctttacagtatgctactgtactgaatactgtaggcattttaacacaatggtacacaaatgtgtatctaaatatatcgacacagaaaaaatgcagtaaaaatgtagtattacaatcttatgggaccactgtggtattgttgaacaaaacgtcattatgcgatgcatgactttttggctttcaagtcatttgacctttcttagctttgaattcttctaaaaaatatgggagtttgactgactaatttttatttctaactcaaaagtcatttattttgtaaaggagaaaacccttttagtaatgaaataattaccctttatatttggttccaaattttagattgttaaatttggcttatatattgtaccaaaagtcagatcaaatgctgatactcatttaggtttatgattgtgttgtgttctttcactgtctgctttagtgtgtttactttgtggatttggttttatttttaggtgcctcctttaattcctaagactgattcagaccctgaacatcgccgagtttcggctcaacttgacgataatgtgagttaattttattcttggtagtatttagtttaagtcatacttggcatatctttttaactttttaatgaagtgttctatgtatcattaatgtgcacatattataagtgttaagcttgatgaattcttacaaactgaacatgcccatgtaattaacactctaatcaaaaaataagattatcactactccagaaaagcccttcatcctctgttcctgttaggaccttcgcctccaccaaggaccatcactatcctaacttctactctgcttttatactttgtatatatgaaactgtaaggtacgtattccatgaagtctgacttttttttgctcaacattgtgatgttcttccatgtggttttgtatgattttagttccttcattcttgtggctttatagtattccattttgtaaatatagtacaatctatttgttatatcatgaataatacttctatgaacattcgtacatgtctgtacatgtttctattggatctatactta

SEQ ID NO: 124480 - DNA, 1044 bp, Homo sapiens
aactcctgagatcaaatcatcctcttgcctcaccttccccagtagctaggaccacaggtgtgtaccaacattaccaatatacctggctttttttttttttttttttttagagatggggtctcactgtgttgcccaggctggtctcaaactcctggattcaagtgatcctcctgctacagcctgccgaagtgctgcaattataggcatgagctactgtgcccagctgaaaatacgtttttaagacacactgaagacaacatttctgtacttttaaaatgtaacgacataatatagaccagaaaattactgcatctttccagtgttgcactctatattttccaaggcttgtcatttggataacaactctggtacaataaagtcatggtataatatcttttttccctttagatggacacttttgtaaatccacttcgcaattcaatgaggaatgtttcaaatgcagttaaatcccttcctgatagcttggcagagggaatgactaaaatgtcagacaacatgggcaaaatgtcagaaagattaggtcaagacataaagcaatcattttttaaggtaagaagacattttcagtaatgtctaaagcaaactatttttaagtcaataagatgtattgaattctggttggatttaccttagtcccttaaccttatttcttttccaaacattgctagacacatagtctcataaagaataaagaactaaagagaaaaattcttaccagaaatgagtatagtaaaatccacttgcttgttagtctctgctgtggtagggttttaaaattcatttaaaacaaaaactgaaaattagtaaagttaacattctttatcttgttttatttcattatgccatttttatcatgaagtactattaaatttagtagcaaacaaattctgtcgtgcagatgagttatactagtattcactcaggaagcataaagtcttatttctcctgatttacatgatagaatgattaccagatcaaagagaagaaaagttcatcattaccatcaatctctgggctcatacg

SEQ ID NO: 124481 - DNA, 1028 bp, Homo sapiens
tgcgaaaatgctttgaaaaaaaaaaatccccagaataaaccgcacttgtgaactactgaacgtatcaaagaaaaagaaaattgccagaagataaatgttatcccgtggctgttgctgtttagttgaaaagattttaattgtaatacaactgaagagtgaaggctagtacaaaacatcattttgtttattttttctatattaaatttaagaaattctaattttactctctaaggtaacattagatgtagcaatgtaatgatgtagtgatgtagtaacagaaagctctttggaagagagaattgtaataggtaccgctttgtgattgatagtgtcatactgaacttagtttattttgtaatttagccattatatgtaataccttatggatgtgaatatggaggatgggaatctatcctttgctgacatccttctgtctcagtctgtcatttcagattcttcttcatttcatattatcttttttgttttcttcatcttcctccttttttgtgtctttcgttcctcttcattttgttttaaatgattagtatatgctgactatgacccatatgctgtggcaggcgtttgtaatgatcatggcaagacatatgcattatatgccatcactgtacaccggcgcaacctaaacagtgaggagatgtggaaaacctatcgtcgttatagtgacttccatgacttccacatgagaatcactgaacaggtaatgaagttttaaaaacttgtgtactttatgttgtttcttgatttgattttgattataaatctgaggatgcccagatagagtgattaattaaaaaaataaggtaagaatttttggtataatcaccataaatcttagaattaatctgagcatttaaccagtaaatcaaatgttgaacacttcctcagtcctaaccatcatggactagtgacagactatcaagagtataccttggaaaattaaagtgaatacatgtttctgattttaaaatttgcgtgtgtgtattgtgcttttcaaagttttttgggct

SEQ ID NO: 124482 - DNA, 1507 bp, Homo sapiens
tggaattgtttttgaaaactaatcatttaaaatctatcatagtctatggattcacctcatttaataaataatcagaataatagctaacagttgttatattaggcagttttctaaatgtcttacatgtcttatttaatctccacataattctctgacttaggtagtattctcattttatagataaggaatctgaattaaatttaaaaattatttctatattaacaaaagtattaagctaaaaactacagagctggttctagtatatttcaatgtaaatgttaacataatatgtctacttatttttatctagattttcttgccatataaggatcataattgaaaagtagcaagttacagtagatggacaagcaattaagggagaaataatctaatatattaagtttattactaaattttttgttattgtttcttaatctttgctttttttctgttagcctaaatggaaaatattattgtgtatggaggggatggagggtatacaaataatatatagtttacatgcagggaaatgagtaattgtaatgcatatatgatgtagaattctttactcttttttttccctataaaattttaaaaatttgtttcctgatttttttttctcagtctttagatgacctttcaaatgtttcttctgatgactcagtacaacttcatgcctacatttcagacacaggtaagagagtttgaagtataattattgcattaaaactatgtattattatatccctaaataattttccacacttaatttttactaaccatttttttgttctctagtcatagttttgttactttttttctgcagcatgtccttcattaaattctgctatatttatttgcttatgtatttgatctctctaagattgtcactatcaacatttgaaaatgcttatattctaagtgttctactatttctaataaactctaaaaccattcttttcctctttgttcttgggtctagctgatagttgtctgtataattctcgttaaatcttttctggagagatcttagttcaggattagttttcatatatacaaagtcaggctagataactggggtaaatgaagccccaggtataggggtttgcagaacttcaagaagtgcttgaataatgaggtgagaaacctctaaaactttgtgatcattcagcatatgtgaagaattgttagtaaattcggaaaaataaccagttttcatcattgctattgagttattagataacactaatgagtattaaataatgatagttttcttatctgacctcttactgttcttagattgtagaagtgtgtttgtcatattacatactgaagtataaacatactgaggtatataccttaattcagtttcatgcttacattttagacactgaagagattttatagtctagtctagtctagtctagtctagtctagtctagtctagtctagtctagtttaatctagtttagaagacattaacttgtatctttttaaaatagatctt

SEQ ID NO: 124483 - DNA, 1053 bp, Homo sapiens
acttactctattgaaaaatgttcttttatagagatgctatgaaatttgcaatagcagctctgtcaactaaccatcctaaaatgactattataaaagtttttgttgtttatactaattttatctattttagaaatttcttcgtatttgtgaagtggatttgctaggtgactcagaaagagagaagacaaagtcataaccaaataattgtgtgggcttctaagtaatgtgtaatttaaactggtgatagtagcaatatattctgtggaagtaatttttgatcctgtaacttaagaatgcttccagtcctttaaatggatttctagcttccattcatatctttctagccagtctgtcttcttcagtacagctattggaagcaaactataagcagtctcaaacttcctaaaatcatacactgtacttttttaaaacacgaagtacattaaaaaatttttttttggaactggttttgatctgaagtaaatatgcttctcttatatatcagttattgagtaacccctcacatttgaatcattgattgtagtttgagattatatacttatgtatcttattgtctttctaggacattgctctctaatattttgtttcctaattgatgagttttatactgtgaaattacctatcccttttttgaaaccattcaaaaaaagtatatggagtgatgggtataatatgaaacattactatttaaagtaactgtcagctttgttgtctttgtcagtgtttaggttttaggccactggtttacctttctcaactagtaatgcttctgatatacttctttttatatgattatttaatcaaaaataggcctttccactttttttgttataaattagttttctgacttttaaaattaagctgctgagcactacatgcattttttagatattctgaaattttgaccaccttttagacattctgaaataattatctaacctagggattaatgtacagctgatttttttaaagtagtctacatttgagcctaaaattaaaggaccaagtcatatcatatggtatagtactgta

SEQ ID NO: 124484 - DNA, 2643 bp, Homo sapiens
cagtcatattaatacacatctagtactactgaatactaaacactgactcctaatgacagtgtttcctatgtgccagacactatggtatatatcttatatagatcttttttaatccttacaataatcctaaataaccttatatagtattatctccattttacagatggggtaaatgaagcttactgagagataacttgctaggcaaaagttgagatttaaatccgtgtttgtttgccagcctgctatgaggaagagtacatgaggaagagaagggtttagtcctgtttcatccttcttaaacatcaaggtgtcgtttacaaaccaatgattcttacctgccagttattttcaataatatgattccattattatcatactatcaagtatcatcttgtattaagaaattacagagatcattactattatttttctctgttaggcatctccaagagttactgttgatgactatttagtagcaaaattagcagatactttgaatcatgaagatccaacccctgaaatctttgatgacattcaaagaaaggtattattatgtacagcatttatcattttatcttttttgagaaaaaatacttttatgtaatgtaattagtttttaaaaactttctaaaagtagagtggtattaaaaagataaactatggcaattatacttctcaattccagaaatgtaaaccagtatttttgtttatttcgttaattttctgaggaaaatccttaagttgggttgttttatttgaatttgattgtagggctagatattgtagtctcagaatttgatgaattgatgccatataaataacatgtctttcaaattcattttaacatgagccttgaacctttacatgtacttgtttcttagaaaacaattcctagaatgtgctgtctgtgacttgtgttgcagtaggatttttttcaatataatttagttactggagggatcagaggaaatcattagttgtgaaatagtcttattgctgacagcttgtaactatgatacattatggcaagacctcagtgtgtcttttggtgaaattgtgttttgtaaaaatcaccacacacctgtattaattgttgaatatcttgatttatttcaccaaggtatatgaattgatgctacgagatgaaagattttatccttccttcagacagaatgcactttatgtgcgcatgttagctgagcttgacatgttaaaagatcctagtttcagaggatccgatgatggggatggaggtaaggtggcacccattttacacataatatgcatatatatttatatatattctgcttaccaaaagagcttttgtataagttaaaaatgttgttggagtccaaatataaactgtaatatattaaaaaatctacaaatgaatgacaaagtttagtgactatactaaattaaaatgctgaaaatttaatagtggattagaatgtaactatagaagccttgaattcttaaagaagaagaatgttttcttcaggtgagtcactgaaatatttttatggcagtttcccttttgggagtaagtaacaatattcatgattaacaatagaattattgagaagatttaatatgcaataagtaatgactcagagtatatcataaactataaagcattattaaaaaactacagttttaaatatctttaattgtacacttttccaaattctacacagtgtgagagacttttgagctagaaaaagccgcaagagtcatttatcccaaccttcagttttttccagtgaggataatgagttctatttacatgttatagtgaaaaaaatggtttaagagtcagaatatttcgattttactcccattctatcacttactacctgtgtgaagttgtccaactgcttaaattcttcaagcctcatttttctgagttggtaaatctggaataatatcctcataatatcttacgttagtcattgttagatttaaatggaattatgcatttgaaaatgatttataaagtaaaacacaagtatcaatttttattagtaaatagtgagttatataagaatagtgggagggatagcctttagaacacaagcttccaaattcttaggcccaatgatcattaacttgtgattcaattcagaagtatttattaagctctaattaaatatctagggttggatgatctttctggtatgttctaccaagtgaatgaagtcaataaaaagtaaatgggaaagatttaagtattttaagaaagtgcttcagttatgactgtttacttatgaataggttttatggcaagcacacttgagaatggagataaaatagagctgttaggtagtgagcactgctttaaaaaatacctttattatggaagtctcccagcctcccctctcctccacctcctatccctgtgtctacactagtgagattttgttttttaaataatctaagaaatctagttactgaagtttacatttgaaatttagtaacttttctttgattatttatctgatgccttgggtttttaaattaatactctataagtttacttatgtgtacaattggaataatgtattaactgattttgattgcataattaaggaagattttttaaaaaaacagagttcttctctgagttgaatggtaaaattttat

SEQ ID NO: 124485 - DNA, 1011 bp, Homo sapiens
tgagggattttgtttttataccattttaatatatactttttaatttagatcttattgctattacgttaggattgcttttatctggaggacattttcagcaaacctctatacattttcatttttgtgataaaaatataaatatatggtttgaagagtcatttttaaaaatgtctagaaatattcatattataacaatctttattgagaacaaatgttgaatgttttatgtaacaaatttattcactagagattttattatgaaaagtgggattgaaaaaattctgaaatacacgacttcacttttgtttttaacataactggttttttagcgtaactaatttacaactatattttcacctcagggatttgctaaaacattttcaaaatgtggagttttaaacacttgaaactttaatccttctttacttgtcataaaactacatggaccccaaattgtgtgacactaatatttatgttattatggatttttgattgctagattacatgcagcaaactggaggtcaagcacatctattcttttggatgacagtggaaggataccgggttaccgcccaacagcagctagaagttttattaagtcgtcagagagatggaaaacatcaaaccaaccaaaccaaaggtcttttaagagcagctgctgttggaatttatgaacagtatttatcagaaaaggtgaggctgtattttgattactgttttcttctttagcagtattattaataatttttgtaatccattgcttatgccaggctgactacctcgaaaacattgtctcctttaatcgataacaatcttcctgtctgtctgtatcctcgtttaagtgaagattctgatgtttagccagtcaaattatcatggccacagtcatgcaaatactaaatgatagaataagattcaaggtcacacattagattcaccacaggctgaaagtaaaaggatagaaaaagataaaccatgcaaaagtaaacaaaagagagtacgtatatatat

SEQ ID NO: 124486 - DNA, 1012 bp, Homo sapiens
tattttgttttcctagtagtaaatagactttatacatgaaaatgttgagtttttaaaattcttgcgtatattaaccatttccttcacccttttagcctttggaatgttcattttcatttggaatatatagagatagagaataattgaaaatatagtgatttctatttattttatattgaaacagttgaatgctattatttttaatgtgttaatatttttaatttgctaagcaactcttaactaggaatttaaattcacacaatgtatatctattgggaaacaacatgcatgagaagggaaaaacttcatctttactccgttttagcttgatttttttccttatatttatgtacacatctttaacaatgaatgattagataaaatattaacttatattcacttttgcctgtaggaaataaatactgtgaaacttgcagcaaactttgggaaactttgcacagtccccctggacagcattcttgtagacaatgttgcactacaattttttatgggtaggtagatcaattctatttaaatgatacagccattgaatttctttttcgattttttattgtaaaatacacataaaatttagtatctcaactatttttaagtgtatagttcagtgatattaaatgtattcatgatgttgtacagagtctccagaactgtttttatcttccaaaactgaaactctactcattaaacaccaactctctccattcctcacactctcaacccctgcaaccatcattctgctttctgtctctataattttgactactcttaagtacctcacgtaggtggaattgtacagtatttgcctttttgtgactggcttactcacttaacgtggatatgccctcaggttttatccgtgttatagcatatgtgagaatttccttcctttttaatgctgaataatattcgtgtgtgtgtgtgtgtgtgtgtgtacacacacgcacacacttgcttctccccttacctcttctcccctccctccacttttcct

SEQ ID NO: 124487 - DNA, 1026 bp, Homo sapiens
aagaattacagtatcttagatctctagatacagctggtgatggtaagtaatgtatttaatttaagatatatttttttgaagtattattttatcttcaaaactttgattaatttacctaaatgtcattttctgatattaatgttttcaccttaattaaatcttccttattaggttaacatgtgcttagttaaagtaaaagcattattttcagaatgtgagaatgtgattattgtaattatccctaaagtggaggtaattggcatggtttacttttaattaaataatttcactgtataatttcagatggtttcttttattgactaaaacagttgctgtattattggttattttgttaaattacagtaagtgcatgtttaaagtatttcataaataacactaccactttctagttcatgatttctttgcttttagatatcaacactatcaaaaatcaaataaatagcttactattcgtaaagaaggtatgtgactcaagaatacagcgattgcagtcaggcaaagtaagtaaagtagttttgaattaacgtttagttataaatactatactatagggattaaaaatgcacagtaaaggacaaaaagcaggacgtttaccagtgcagcactttacaagaggactttaaaaagagttttctcttctacaatgtgatataaatatttgttaaaacatgccaaaaaggttaactaaaatgcttcctgaaaaatgttaaagtaattgaagattttattttattccttgatttatttatacatttacttgtgtatcatttgtttattcaaaacttacatttattcagttttgtgagttgggtactttttagaagagccaagcagacagactcttttcgtggagtttacattttagttgcagagtcaggaaataaaccaataagcaaattgacgcgtaatatcaggtggtgatatctactgcaaaaaacagtaataaagcaaagtagcgtatagagaatgtcttggactggtttagataggttccaagaggttcga

SEQ ID NO: 124488 - DNA, 1112 bp, Homo sapiens
atagttttaataaagataaatgaatccataaacactgttagtcttatattttgtctttttaaaattgacatcaatgctaacatactagaggtatcatcttgctttatttcactccacagttgttactgtggagatgtgtccaagttgatacaggtaactgtatctcatttatctaaactgaggcatagtagttcatctttttataagactgtgttgcttatcaagtcctagttacatgtatatcatacttttcttaagtaacagcattgtgttagaatatttacattatgctgttgatttcagaaatagattaaatttgtttttgttatttacttttttttcaggaaatccttgcacgaggaattcttcttccattaataaatcaactcagtgatcctgattatattaatcagtatgtcatatggatggtaggtgccttttaaaattacaactctgttttagaaataatttttgaaatgtaaaaatatagttgggagatagggtgtttaagcagtaatttattaaagaaattaagtaaaaatgtttctgaagtaatctctgtgtttccaatatttttatttgcttatattttgaatgtgttggccaaattctctttaagaattttgttgattatcttccttgcggttatggtgctactactatttctttaaaaaaatagaatattttactacctgtgtctatagatgatgagtatttttaatggctactatttgatttttaaatacaacttgggatttgaactacttgacatgtaactcacattttatactgtataatggggaaaatatggaggacagaatagtagaatgagaaccagaagatctggattctagatgtttctgtaagttgcctagtgtctgtagtagttaactcaatagttttcttctgtcagacatatcaaagacttagttattactaagtccacaagccctatttttttttctttataatgtatccttttccttaataaactcatggtcaaggaagaattgtaaatgggccaccttctgggaatactttgatacctacttctagatctttgatttattttcttaaatctgggatttctactctacatttgtcttccttta

SEQ ID NO: 124489 - DNA, 1031 bp, Homo sapiens
gccgttactatgttttattcctttaaagatatggcttcaatgattttgtatcttttaggccccatgtttgacaaacattgctgtcttctaaaaattggaggtcttaaagtaggaattatgtggaagtgcctacttgcttggaatatttagagctctcactaggaccttgagtcatatgactagcccttgactaaccaaaccctttaatgtgacagattagaagttttctaatacaaatcgactcattgcaccaactaataagaaacacaaaatttaatcaaaaattttccccaggtgtttttttctccttttgaaaagaagcattggaaaaagtgtgtgtgtgtgtgtgtgtgtgtctgtgtgtgtgtgagtaaattttctcctaacaaagtgcattttaaaatttgaacatgtggccagagacataatttgaaggaaggaattacatacgtaaatacaattttgaagaagtaggagactaaaactaaccttgaaagaagcaattttttgtcatttcagactgcaaagtgtctccaaagacatttcaaaaaaattactggtgcctccattagtgctttttggaaatactgattcatcatgggggtaatagttggcagagacttgtacagcttacaaaagagacttgtacagtttactaaaaataaagaccaccttctgtgatcctttacttagaaaaattatacatcctgttaagcttattgttatttaacctcccccaatattcttaagaaattagggttcataaatttatatattactggcactaaagggtaataccaggtgaaatcattgtatttatagaatctactaaattcttagtttctttttttctactcatttatcaaatgcctgccatgtttaaaacaatgaccttgagaagatgggatgaggaaggtaaatatttttgagaataaataattcagtagataagttgaccaattccactcatatggaggtttcctagatagttgcctctattagaaaaatataagacttataattacagagaa

SEQ ID NO: 124490 - DNA, 1205 bp, Homo sapiens
aaacaattgattaacacatagactagtatctgcatatattttatgcattcatggcatacctttttgtgaatttttttgatatttctaggctatgcggttcatctcttgagttttttaaattgtcacaaatctctaaaaaattttccaatatatttactgaaaaaaatccacatataagtggacctgagcagttcagactctttgttcaagggtcaatttatattacagtaacttagaatgtaacacatagatatactgatgtgcaatacttttatgtaagttgagctctcttaaatcagcagaatagaagagcatactctttttttcctttgttatagcctgctgagatgatggaggtgttttcttgaaagaagaattacagctatgtttttatatgtgtgaataacttttaagtatggaaagctaattaacgtgtggtagaattacagagtacctggtccatctaaaactattttgggaaaaaagacttgtaacgaaatttttttatgattcaaaaaactggttaaaacagcaaaattaaaaaaaattaagttgattaatgaatagttactacttggagaataatgaaggaatttttaatgaatactgatgtgtactaattactaaaataagccattgtaaccagggaactggttatttctgcctttttaaatgtatcttatatatcaagaggaagtgtagactttatattttctaatgttatgatagctactttttctacttttaggattcctaagggatttgtgtgaggtcttactatatttattgctacctcctggagatttccagaacaagatcatgcgatactttgtcagggtaagcttaaactcataccatatcatacctgcaaaaaaatgtagagcagtagttttcaaaatttttgtcttaagaccctgttacactcttaaaaattattgaagactccaaagagcttttgtttatgtgagttttctttaaaatatttacacaagtgaagactaagaaatttttaaaacatgaaaatatgcaagcatgtatttcattacctaatagctcgataccatcatagcattatgtaactttgtaaaggtcactgtgtgtacatgaaagaacaagagtgaaaagttaaataatgtcttagcattattatgaaaatggtgttgaaagggtcacctgaaacccaagcttcgggggaacttcaggtt

SEQ ID NO: 124491 - DNA, 1695 bp, Homo sapiens
tgaggtctgttgcttttgagatagagtactaggtgacttcttaaaattagtaatcacctttttcatgagtattctaaaggcttttatatgtgtgatattttatatcattctttataccatttccttgtaattagttatttctaatggttaaggcttttttttttttttttgatgagatagctctgttcccaggctcgaatgcagtggtgtggtcacagctcactgcagcgttgacctcctgggctcaggtgatcctcccacttcagcttccctagcagctgggactataggtgcatgccaccatgcctggctaattttttgtaatttttgtagagacagtttcaccatgtcgactaggctggtcttgaacttctggactcaagtgatcctcctgcctcagcctcccaaagtgttgggattataggcgtgagccactgtgcctggccatggccaagtttttaagtgctagtgtattcaaacagaacgttcagaacatgtgttgcatagctaaaaagatgaatgtggagaattcagaaagagttcagaagaaaccaagaaatgtttgaaatgctcttttaaagcaaacaaaactattcagaattccttatgtattcttatgttggggctgagaaattacatgatatactgttgtcagattcacttcaaatttaactggaaaaaattaatttctttttctattttaaacctttagatagtagttttaagctttggcacataaaataattcaagtaatattgttagaagacttagtgaagtagatttgatttactttgaatcttgtgaaacagtactaacaggtaataatgaatgaaaatctcaatttaaatttacagtctcagataatcatgttgtttgtcagtagtcattaaaatgaatttatattttctgataaagcatttatataatccttttatgtaatgtgttttttataaggtcaaaagaaatagactggcaaccttattttactacacgcattgtagatgactttggcacacacttacgagtattcagaaaggctcaacagaaaataacagagaaagatgatcaagtgaaaggtaatatctttattccatttgaaaactaggatttgaaaatctgttttcctttcatcattttatatatcttgaattgtttttctttaggtacagcagaagatcttgtagataccttctttgaagttgaagttgaaatggagaaggaggtttgccgtgatctagtgtgcacttcccccaaagatgaagaaggttttcttttaatttaacttttttgacaatagtagctggctagagtcaagttagcagaaccagtgaaaaaatctaagggtaaaattattcttacttagggcaggtagcatagtaaagatgctattcattttattttattttgtaactcttaaaagtagtttccagattctgttttcttctttaaaggtcatctttaataattaactggtcctggctgggtgcagtggctcatgcctgtaatcccatcattttgggaggccgaagggcctggattgcttgagtccaggagttcaagaccagcctaggcaacatggcgaaaccctgtctctactaaaagtacgaaacatcagctggctgaggtgggagaatcaccggagcctgggaagtcaaggctgcagtgacctgtgatcatgctattgcactccagcct

SEQ ID NO: 124492 - DNA, 1059 bp, Homo sapiens
atcatgtcatgattttagaaagtacttcactgtcatcaaagtattttccaattttgttaagacaaacattattagaaattgttagtatatatcctaatttataaatgggaagaagtgtgctattgttcttcctaatctagaaagttcttttgagatttatattaagtttgcatgaagtcagtggaaataagtcaagcagaaggaaaataacctcagaaagagataagatatcggtactgtttttcctatttttcctaccctcaacatatttctgtattgaaaatagaaatctgtacatcaaatttaaaataattttgtatgtatttgcattgcttgataattttattcgtttaaaatgtcattacatcctctataatgaatcaagatggatttaaaatgtcttctaaattggtaaaatttattttgtttgaaagtttcagtaaattaaataaacagcattgtagcatgaaacaggacagatgtaacttgaaatattatatattctgctttcttctaaatttgtcaaaatgaaccttttatggattaaatgagctatggcctatactaagtaaattttgtttttataaaattttcagtatggatgattttgaataaatattcatgtaaagatttttgaaagatgcttacacagattgtgatttatttttttaaataagaaaaaagagtttctagagactgctaggtttaagtttttattttaggtttatgttgagactgaatattgttaccaagtttagttatatgcttatatgcatggctcttatattctaaataatgttaattaattcatcctcggattactgagcttagggatccacctttttatgttaatttgttttcgtgttcatatacttacggctttctctttagtttcatgtatacaacaaaccttagtgttaataacttatttttttacttgaaaacagccatttatttttcaacatcatactgactctttaaggctttttttttttttttttttttttcaaaaagtaacagtaattaagtcagcatcttcactagcctttttattgtatg

SEQ ID NO: 124493 - DNA, 1953 bp, Homo sapiens
aatacttaaacttttttataatctgaaacctttctctcctttaggactcatattaatatgtatttttttttttttacttataagtcttaggaaattaacctttccttttttgaaccatttcttagctatttatagtgtacttcatttgagtggcatatacagagaataggaaatattttaagaattaagatccttaacagtaataaattatattcaagaatggttaagtctttataatccatttttaatagatagtataaaacaatgggttttatttgctatttctaaaatatgatttctaagtatgtcttatgaaaaaatatccgtggtttcatattataactttgaagcatgtatttttaatatagatatctatgtctatatctgtatctatgtttatatatatttatggtttgtttttttaagaatctcccactaccttttccccaattttcaggccactgatctttctgaacacaaaaaagtagagaagtacattttcttaagttgccaaaactatccctacataaaatccgtttaaaaattaattattttgcagctggtatactgttttgggctgggaaaggggaggggcaagagggagagtgtccagtaaagacagtttgactcacatgaaacactaattttatagttgtagagtttcattgaaatatggcagcagcatacctgtacatttgcagttttcccacattctaaataatttttgctgattaaatttttgaggataatcatttttttgggagtgtctaattttgttaacttgagaaatagtgtttggcttatagagtagcacctcaaataaggttatttatttacttgaggataatgaagggatgttacattgagtattcaactggaattaaactggagagattttacatcagaaaactactcagtaagatattttgatttcctttaagtgcttagaagaaatgaaacgggaagccaggactattaagattgatagaagattgacgggtgccaatataattgatgaacctctccagcaagtgagtttcagcgtgtggtatttgaattctatatattgtgttctaggtatatttcttttgaagataccaggaaatactttttgctctttaaataatatcctggaatttcttaatgttatccttgaattttatacttgaagatgcttccttatttattaactcacttctaatgaggtggtttactttatgtaaaagcctttcgattgaatttggatttagaaaaaaagttgttattgacatttgatagtgtttcttaaaattttacagttaaagtgttactctttcgttgatgaacaagcttagtggtgtggtaaatcagactttttttcctacttgttaccttttaaaaaatggaaaagaaatatccgatgcaaaaacattaaaaaattagagataggtaaaaaaactatgccccctgaaatatttttcattgatgtttgattatatgattataaaaatgtgtactttagaattttaacatttattattattactaatatttagtttatctgatttgtaaaaattatacattgagttgtattatgtactatttattgtctgaatactgttggcagtatcaaaggtattagtagaaataagtgaactcctgtatcatttttataattagactgcaatggatctgatgatataatctttaaaaaaactttttttgtggaattatagtctctattattttacatctcattccattaaactgattgatattatttattagattatagcatggaaagtttcttttttttctgcaaaccctgtctttacctggatttatgtgggacttggccatagatagtgttttattttatttttttttttaaatctaggcagtaggtaagttgggataccagaataatttaaaaatgtttgaaatggtttttagtatgttgatgtttttgtaatg

SEQ ID NO: 124494 - DNA, 1083 bp, Homo sapiens
gtggcgtgatctcagttcactgcaatctctgcctcccaggttccagcgattctcctgcctcagcctcccaagtagctgggactacaggtgcaagccaccaccctggctaatttttgtatttttagtagagacggggtttcaccatgttggtcaagctggtctcgaactcctgaccttgtgatcctcctgtcttggcctcccaaagtgctgggattacaggcatgagccaccacacctggccttgtcacaagattctttaggaaatatattggattaaaactttaaaaagtattattgtataattcacaaaatgttcatagttgttttaaacttcagaacctaatacaatctgtcaatttcttgctttgccaaagtcacaaattgactttttagtaaatgataagccatctgtgaactctggaaaatatacttggtagtagattcattaaattataaggaaattttgtttttatatttgtgattaaatttttctttctaggggtttagtggttactctcctgtttggaaaaacaaactcagagaagtacctagaacagtgtgaacactcatttcttcctccaacatcacctggggttcctaaggtaaatcgtttgagggaatataaaacctcaaagtccagttctttgcaatgataatagagtaatcatctgtatatatagcgtgacaaattttcgtatagtttactaatgctcactgggaatttatgtgagattgtctaattatacttagaaaatatattttaaaaggccatcttaaaaactttcttagtgttagatttaaaaagtgggaatacaaacttgagaaaacgatagaaattggttagtttattttgggtatttttcctgctgtcttatcatagtatttcaaagcatcatgcatatgatttttaacaatgtcaatgagtattctggtttgaatgaaataaattgcagaggaatcagaggaaaaaatggatacttttcattactttgaaaaatacagcttgtaattagattatgcagtatctataattttaataattcaggcctaatttttatcatcttgaatggtgctattattttt

SEQ ID NO: 124495 - DNA, 1027 bp, Homo sapiens
tgaaatactaattctaagtaagtataactttgtagcctacttatccttttgtatatgcatttgcaaatataaatgtacagatgtttttgtacatactttgttgtatttctcatgctaggatttcatttaacagtttgtataactatttctgtcctgtacctttgcattgccactaggattttttaaaaaagtaattgcagatgctctgtaaatctctctatacatataaattttgtatattgttttgtggagataaattttcaagtatacacttcacattttcaaaagttactgaaataataccatgaatgtttacaagaagaaatttaaaactatgtaaaagttttgttggttcttttctaattcatgtggagaattatttactaatttacttatattttttctgtatttcaggccagtctatccatatggggatggggaagccttggcattgtcctttttctgataacctttggaccctttgtaatattttatttgacattttatatcctctgctttgtgggtgggtaagtatactcaattataattttataattcatgtgtcatatcttgttaaaatggaaacaaatgactgagaaacgggagtatgatttatttgtgaatgccatttttaataaattgcttttactaaagttaaaaaaataaggatacccataaaaataaaaacagtgattgtcattatttgtatcagaaatatgggtagtccttcaataataagatgtccatttccaaaggtatgaactttttttggtgataatgtgtaaagtttaaaaaatttttcaaattccttttggtggtgtttctcctttaaagttgaaattttcttttgcattatgttaataagtaagttaaattgagactgcacatgaagttttacattatagaaattgtgattagacttcaaacaaatgttaattttttcctttaatgaatgttgtcatttcggtctagaaaattcaaatacctgattttgcagttttctcttcatagttatttggtgtacgtt

SEQ ID NO: 124496 - DNA, 2938 bp, Homo sapiens
gagtacagaagtgggttatgtaaatgagggtgtgtggtcttgtagtgtctaaagtgaagttgtagtgaatgttggtggaggtgaaatgcttatgatattaaaagtagcatatttgatggattatccacatgtatgttaaaataactgaaggttattcagcattcctgatagagaagaatgtttatggattagtagtgcatacatcggtggttctcaaaagtaactgcatattgcaatcatctggggaacttcacaaactaacaatgctcttatatcagctttcctgaacattggaaattctgatgcatggctcacatacctagctattttgatttaatttgtatgtggcgtaagctgggtagtgggattttaaaatccccctacttccccaggtaatgctaatgggcaggaattatacaggaacaacaggggcttttacaggaaatgggctgggagttatggttttgatcgtgaccctacattctgaagttgggtacatgattaatgaaagaataagcagcctttgtttgagagagctgcaggagaagcagcttttacttgaagcaaaaatagtgaagttgtcggggatatggaagtgtttgttttgactttggaacagagtgatcctagagggaaagtttaggagggatggaatcactgggaaattgtataagggaggaaaaagcaagaacagtacagtggtcagagtgtaggagagaatcgataactgaatgtatttatctctctatgatgaacaaggataacaaggcttagtgggttcattattagtctagagaacacatccagcagtcctgtagtgcccaataattgggaattgggtaaacagttcttaggagtcagtccagaccttgatagactgaatttcataggaagtcctatccttgtatcctctggtaaggggtttggattgattgtgcaagatctaaggagagccctagagtttggggctgttgtcccacaggctcctgatagtggttggagtcttttctaacactggcgggggaggctgtgaagtcttaaggtttggtcagatttgttcttctcactccagtgcgctgcttggctgagtacacgctgctgcaccaaatgatggcaaagcctttactatttctttacttttatacttcatacttttcaggaacactttaaattgtccagttctagatttgtgagcaactatttataggtttcactttttcaacatacaagaaatgatatagacttagagtgaaaaagggccttatatattatctaggcaaactcttcttatttatgcattagaatttttatgcatagagaatcaaagtgaaattcacaaagaaccctcttacttagattaaagtataaacggtatatggggctggaaatttataattgctgcactgattcaaagtttttgtaagaataaatgggttaactgcaactcattttattaatttgacacgtaacttgatttctgtattttttcactgttaaactttgaaatataagagcatcagacatcaccgcccacagagtgcttcaaatttatttttcttttacaattaaagaaagcttttaaaagtacagtgtatgtgtaggctttaagagctactctagttatgcaagagaactatgaaattgcttttgaatgaagagttcattcaaaccttctcaaaaatattcaaatatatttttggtcagaataaggtaagtagtaaaatggtaaatttggtaacagtttgttttagaaataagaaaattgctaagtgaaaacaagactttcacataattatagtatatcatgttaactagtaattaaaacccatgtgcttttactaagcgaaatagatatcatgattaaagcttttatacttttaaacattagtctattttgcgtatagcgatcttatttcacctgtgtttgaattgtgaaacgcaaggtaactttttgaggctatgacaccagatagatgaagcctgttttaagtcatggggatttaggccacatcaaaaggatacttttttttctttttaaaattttattctttactcattcattaatttaattaatttatttagagatgggggtcttacactgttgcctaggctggttttgaactcctggcctcaaatgatcctactgccttggcctcccaaagtcctgggattacaggtgtgagctaccctgtccagcccaaaagtaaacttttagtagctgagtgacatacatttttataatgtatcttttgtattcatgttttagatgttttagatgtgcaagataaaaactgaagagcaattacgttaaatgatgcttgtttcgctttcctcctcctgagttgctttcattgacttatctgatgtttaggtggatatgaatagtatcaatttttctaaaactcgggtatttgttatagaactctgcacattagatcaattgtctgtcatctaggggtacatttctaagttgtgttttatagatacagtttcagactatttgtaggaatgctattaagatttttctttggctatggtaggtgacatcatttggctgagaatttctaaccaaaattatttctactgaactgtatggtatgaaattctggtaactcaggacaacattagttatgttggaatatattcgaagctgctttctgaggaaaattttggcttttatttgactttgctatagtatgtcaccttataatagggtggtgagaacactaagtaggttatttagtatttatggcttttctgatttttaggtgtatatggaccaactatttttgtttttcaaattattttaagttcaggggataaatgtgcaggtttgttacatgggtattttgtgcattgctgaggtttggacttctattgactccatcagccaaatagtgaacacagcactaaataagtagtttttcaacccttggct

SEQ ID NO: 124497 - DNA, 2231 bp, Homo sapiens
ctttttttttttttttttttttgagacggagtcttgccctgttgcccaggctggagtgcagtggcgcgatcttggctcactgcaacctccgccttccaggttcaaactattctcgtgcttcagcctcccaagcagctgggattacaggcgtgagccactgcaccgggccaaaaatatatctctaattgaaaccttttcagaaatgagaagccacacaagtgatcaattaaggaccattttatattaagctaaaatggaatatcactcagttgagcaaactaatatgtacattgaactttgagcctatgaaatatagattaatgtaaattgaaagtatagctcccatatagttctcgatgtaaactttttggcttcaatttatattattttatcttaaatacaatggaattatttagaaaacttgctagtcatatttatgtatgtattttttttttttttgcattttacatacagggatgagctgtatgtaacgtctagctagtttttttttttttattttattttattttttttaatgttagtttttttccccttctgttgtccttgctcctgttaggacttcctgcttctaatgtgactcctgctatacttggcaaaaaatttgtcatagtgtacatgaaagttacttgtttaatattcactcctcactctccctctatcccttctttttttttctttttttttttcttttcccctaacagtaaacttcatatatcgaaattagagcatgggatgtttgtttacctgagaatttgttttaattaatccgagttttcacaacattagaagataatgaaatatttatcagtgaatttttatcaaacacacttttaaacttttcttgataccaggagcaattaggattataattctgagcatttattattacagaaaactaaaggtaagaaatgtgggaaaatgtgctgaatacattccagtgttgtggcatactttggaggttgtttttgcatggaaaccagttatcaacgtgttgtcacttgtcctgtgttttaaaaaataataaacagtgtagctatttaaagctattagttgtttgagttgtctgtaaatatgaatcattaagtgactattaaataaaaatagtttctatttgtgttgttacttccatccagatttgttgctttttcaatattaacactgattctcagagttaacagatctgatataaatgggaaaaggcaaaaaatgcagcactttgagaagttccaggttaatagttgttaagtaaaaggttttgtagttgaaataaatttggaggatatttgcctaaagaaagttaataggtttcttctctggatgacttaacatagttagtttttgataggtgatttattttcaaagaagatgatagaatttacagcatattgcagagtcatttaaccatggaggtgaatacactttcttgtatttcacttagggaaatcctggagtgatgagttacgtatcaagaaaggctccctgaacatccaggggtccttttgaacacacacatgcacatacatcatacatccacgctcacacacagttgtcttgcccataagtgcttagtaaaatattatgacttggttttgttgattaatatatttgtaatagaaatactcttggggcacattaatctttaagctatataagctatttcttcaattattaatgacactgcaagagctactaaccaaagcaagaagaccataggtccactggcattcagaggtgtcaagaggtaggaaagggattttataacgggagtggaaggacatcagtatctaaaatgagtttggcttgccactctacacacagccttacttggcatcttttgacaaaccaagaggaatattgataaacattcttaaagaattttttctttttaaatattattttaattgacagtcatttttatgcatttatggggtacagggtgatattttgaaatgtgtgtacaatgtggaatgattaagtgcagctgaataacatatcaccttgattattttctatggtgagacaattgaaatttagttatttaaaaaataaaatacatgattgttgacagttgtttaattgatctaaaaatttcttccttctatctatctgaaactttgtactctgagcagtatatccccattgctccctcttctccaggctctggtatctgtcattctgctgtctacttctgtgagtttgacttcttaaat

SEQ ID NO: 124498 - DNA, 1762 bp, Homo sapiens
gcccgaccggtttgtttcccaccctctactttgactgcttcatgaagtggacttttttatctcaagctgcacatgtatggctcagttgggtcatccccctcccccacatccatcaccttttcggttaaatcgtggtcatcacaaagttcagtttagcatctgccaccttgatttgcgtgtggcccccttgttactccctatggaatagtttttttctttggacctgaaatggaagtagggcaactatgacgaaccaatcaatttcccttttctagtgcctaatgggcattgcaaaaagccgactttttgaagaagtagagtttgcctttactagcaacactttaaggggaagaactaaatcggtgcaactaggtacttgacccaggttagcccagttatgtgttgtagtatctgcaggtgtaggtgtcactgaacataaaatactgaaccttgtgatttgatgaaatacctttttcgaagcctttcactttaagtactgtgaggatcctgacgtgaggaactgaccggattgggcatttttatgggctgaactgaataggaaacagttttagtgggcaatgggaagtattcctacatgggccaaaaaggaaatacaaacatttgtaggtgagtggcttttattttgtgaaaagtgatggtaaagcacgtacttgcctgaaatttcaggtccttggaacgtgactaactttgaggaactttatactttgctgtttgtacttaatctaagcacagagcctggcatatgataaatacttactggttgattgtaacttctacagtacgtatttttagttgtttgaagttcattttatatttctaaattctacagatttttcattcttggagttaattgagattatggttatagcataagtttgtgttgtgattagcagtaatagattagaaaaaagagttataagtagcagaagtttcatttttaccttaagtgtgatattttagtgggaacagttagccttataataagtgtttagtgttgtctctaatgtgtaatattatatgatatgatcttttccttaaacttagcttatgttaacatgtttcagagttttaatactttcaaatgaactacttgtgtgtctgccagtaaaatgatttggaaagatggagctttctcagcttctgtattttaatgcaattttgcgttttagggaaatattttaaacagtaaatcaatgataatattaagtaaactgtactttagtactttttgtgtgaacactgcacaacttataagtggcagaagcaggattccaaccttggcagttgccacctagcccattctgttaacttttctagattgcctcgccaaagtaagacccagattaaattgtactaaagtcttccctatagttttcagtagtcgtttatagattaggaaactgaagccagagactcttgtccaaggtcaattattaaatattagtgacagtcgaaactggaatctcatctcctaactctcagtagagagctctgaccgttttgctcagctgcctctcaagtagttttcagctctcttgatagattttaaaacatgctattgtacttccttgtctgaatattgtcagtaaactgaaaatgattattacttaaaaaagactttctgctttaccttagctttttttccttttcattttttaaacaaggcttctaagcctcgtaaactagtcctattttgagatattttagatataaaatttcactcaatattggctactacaaa

SEQ ID NO: 124499 - DNA, 1041 bp, Homo sapiens
tgagcagccattgggatcttgagaggaagcaacaagtacagtaaatgcttcttgagaggaggaagattgatctgtcaccatctatttggacactatctatcttggattctcagttatacctgttccttttgatttagctttacctccacccatcttgaccttttcattgctaaatatcctactgggccccaaatggtcagggtaccatagtcttctggaaggcaaacccactttttgctatgtaatctctaatatttatattagttatttttgctgtaacttaatcttccttagtttattaccaccattgtagtagatgttaggtgacattgtagtgacttttgttaaatttaaacatttaatttttatctcccttccttgtattttgttggcccctcaaatgacctcagatttatatttttaaaatgttgttattgtcctttttagggaaaaccaataaaatatctgcatatatgtgtggggtggagaggggtggtgcagagcaccatacctagatttatcatgtgaaatttctgatctccaagaaaaaatcactaagaatttctaaagagtaaaacaaaaacaagaaagttttaaagaaacaatattcagattgctttaaatttttcatttgaacgcttgggctgtaagcaaaatggaataatttcctcacagttctaaaggaatattatttttcacctaaatttctgtgcttagccaaactatcattgacatatgaagacaatattaagggactcagaaactactaccactagtgtttcctgaaagtacttcttggagatactgaaaacaaaaaatatatacagccaagaagaacacatagaataaaagagatggtggtaagcaaaaaaagaagtgacactgacagaaaaataatttttatgaagttactgtaaagattatggccgttattaaggtaaaactcacataaaattgggccacatcatgaagcaattttgaggctgggaggagttagggttagtgtaaatttattaaggatcttgtctagttttggatgga

SEQ ID NO: 124500 - DNA, 1048 bp, Homo sapiens
ttgccaagggtcgttcagctaggggtggcattaggatttgaatccaggtctgattccagagcctgaagtcttgtagtacacatcccatactcacaagcagtaagtgaagtttccagggggaaagcctgttactcacattgaagtggatgtcagtgctacaattgctgttgggttccatcattcagcttgagagaactggatactgcaagatgagggttaaagagaggagtgagagagtgtgctgtatcatgccttcttttattttctcagcaggaagtacatattataggtctctcttagatctaaaagtaagaatggggagtagaggctgtgcatttttatttctacttatcattttggttaaaatcaaaagcactgtgtctcctttctttcctatatgtagatttctactattaaattaaatcaggtaacattatgaattctcattgcctctttggccatagggttctttctatagctttttcagtagatgccactgttttgatcttgaaaagtctattgagacattcttcctttgttcttctattactcagtccctctttctactctgtggtgcctctgaaatctattcatagatattctacttttttcttctgttttatgtacttaaatatcttctttaaatggatctagttccattgatcagaatcattggcccagatccccttgctgctccactgtacccaggaagtcttatctattttctgttaattttactgagttttactctacatcccagcacagtatgaggaagcctttaagatttccctgggtatctgagcctaaatgtaaacatttaaaactgaatacctcaaggaagagtatgattggattgtgttagatcaggtgcacacctatggactactccactgtggccaggcaaagggagttttattattgctccatctgggttcaggtgtccacccttctagaatactactgttctcaaagaaggaaattgtgagccagccccagcttgactggggtcaacagtactaatctattctagagcacactgtagctcagg

SEQ ID NO: 124501 - DNA, 1049 bp, Homo sapiens
agtataaacaatttgggggcaagcattaataaaagcttctctgcaagcatttttaaagaggactaataaaagcttcatggttcaattaatacagcacaacatcaggttttttagaagcatatgggacccagaaggcctgcccctgtttttaaaatttacgaactctttaatgattcaccatttttactccagtgcattacccacagtggtgccatttagccattaagtaggaaactaaaaccaggacaaagctacaaacaaatatcataatgtccaagtgggtattttttcttcagtttgttcatagtgtgttaccaaaaaaatgaatgttaaatgaaacagagtcttagggcaaatcaaataggttatggcttccctagatgagtatgatcagttagctttttaatgaaatacaggtcaaatcccatgacaagtagctctacataactaaaatattttcaggccactggccaattatctatttcaagtaatattcaagaaaattattccaggataataaaacaaattagttttttgatgtttgttgtagcagaagttgatcacagggtatggtattaatgggaaacactgtatgttaaagttattaactattgttttggatttttttttttttttactactttaacttcacagttaagtgattcattcttttgccatttgtaagtcaaaacttctcaatctgatattcaagtttgaaacataaaccaaatgaagcattttattcattctctagtttttgaaggacagtgctttaataagtgaggcataaaccttttctgaaaatgttcagtataaatttgttttgaacatttatttgtttttatatttgcttttcacaattaattttggtgggtaattcaacttatataattttcattattgtaacactacaaacaaactccataatgcaggccaaacagaaaaggttatttctcgttcatataaagactgagtagagagctgctgtttttctaatggctaccctttgccccggacagcttctaactggtttgtgcttcttcagttca

SEQ ID NO: 124502 - DNA, 1118 bp, Homo sapiens
agtttggatactcagaggaaaatgagatcacatctggctcaagggaaatttgaagacggaagtgtttgaaatatccttgatggatgtgtaaaatttcaacaggcattgattaggggagggtggaggaaagggaatccacagaggtctggagtaggggaaaaggtgtgtgtcatggctggcagcagggcccaggagccaagatctaggcaccaattctctctccttttgctgagactttctggcctggaaacttgaagagcttgagaattctaaatttaaatctggtcctctaggtcattgtgaaggtatattttttcaaggcaggagggtaaaatgtattttatttgacaggtaataggttgatatatactttttaaaaatttagaaacatgatttctgggcttccatttgtactcttgctctatgtcgtacaagtattaggagcaggcttctgtgggggaaataaaaatggagaggaatgttttaaagtgtttcaaaagaagaatagccaatatgtgatgactgacgggaaaacagacaaacatagtgggaggtaacaaaggtaatttaaaagttcaagaatgacagtagaattagtgggagtgagacatattgatggaaaagatagctagcatttgttgagtttttctcacaagccaggggctttcactgcattttctttatgtcaatgaattattttcataagccttgaggtaggtactattcttatcccattttacagacgggaaattgagactttgaggggttagttatcttgctctatcaaggtcttacagtaaatctagctcttggatccaggtaccttaattccagagtttgtattgttaaccacagttctgctagttgtcaggagattggcttgagaataaggctgatgaagagtagttgaattcaaagacaggaatttaagaatcatcagaagagaggtcacagtcaaaaacttgggtagtcagcaagcatcaccttatcaattaaaaaacggaagaaagagagaagagtagagggacaagactaaatgtcactgaagctttcagggcagtatcttatacctgtttatggctgccagtcacttaacatatgatttttttttttttttt

SEQ ID NO: 124503 - DNA, 1053 bp, Homo sapiens
tacttaattcagaggtaaatgaaaagtaatttacaattctaatactcttgatactcatactttctcctttactgtttttatgcttgcaggtttcacttccttttagtaggttgagggccatttagataaaaaagatacagaattgcagactagtagatttaagagtttatgtattatgatttaagttgttaagatttaaggtgttccagtagcatacttggagttgaaatcatgattattaagatgaattctttttgcgtgagcagcttaacagacttctcttgaatcaccataatgtttttgcttcatgggcatgtcaagtatctgttatagtggaacctgagagaggtcatacaggaaatagcatagaagttgtcacagtacacctggaatgatgctcaagtggttgccatgggctcaggagccatttgcctgggttgaaactcagctcttcattcctttgtttcagtttgctcatctgcacaatgggcatactaattaagatatctacctcgaaagttcttgtgaggattaaatggatgaatatatgtaaagcagtttaaacgagtgtctgaacattatatatgctttataaatgtgagctgttaaaacagtccccacgtgcctaattgggtgaatagatcagggttcctctgtgttttcaagtgtttctctcagtacactattatttaggaaaaatagactaaaaagatattgtctgaggtgttactggctgatattttaaaaggtgaaccatgcattaaaagattgtgagtctaaattttgtgtaatttaatattaataaataacctgacttctttgatggtctacgtgaaatatgaggatttcaggcactttgtttccacagccaaaccgtgtatgttgtcttcattactggcaccgattttggcattttgatttttaaattattttgtgcagttttcacagttgctcccattagaggggaagtattgaggaagtagtcttccagttattgacagatcttaagaagcataaaatggtttggtattttggagaaatgtaggataatat

SEQ ID NO: 124504 - DNA, 1032 bp, Homo sapiens
ggtctcaaacattcattggtaatacctttgggatttggtaagaaatactgcacacagatacaatgtagaaatttcattgagatttttttaatagtaacttttaatagttaaaattttgaatagttgcttttgaaatgaatgataggccaatgaaaaatttgtgtgccatgaaagctatatttttatgaaaacctgattggaattatggaaaacaatctgtgttttatagtcatggaaacctgtgactgatgatcatttttggaatgttaattgtaatttctatcattgcagctgttaattggtaacaaggaggggattaaaggcattaaggagttttggaaaataaaacttaaacacacatcaaatagcaatcatttctggaattctgctcatattagttgtataaacctgactattaaaatatagaataaagtttatttcattattccagtttctaaactgtatattatttaaaaatatgtttgtatttacaaattaggtcaggagtaagcagggcctcagtgacgtaaataaatcccaatggaggcttgtctttggactttctcttttgtgtaattctttgtatatacaagatccttggccaagatcccattatacaaaagaaaaggtggggatgtgggggagggtgaatattcccagagaaattcagcctttcaattacttgattattcttgtggttgcaggaaattaaagaataataagtttgtttcctatgtgaatcataaaaaaataataagggtacacacagggccattgacttaaataaatggatggaccttaaaaaattcactttttggaggggtgcatcatgctttttgaggacacactgaaattttgttggtaatcccagttccaagcctttcaagttagtttaagtgtaggaagaggagtggcagcaactggataataaatttagtacaaatgtttattttatttcatttatgtattgcctcattcaaaaaatgattcgagatatcttttcttttttttttttttttgtcttttgaggca

SEQ ID NO: 124505 - DNA, 1763 bp, Homo sapiens
ttaatattttattatatacaacttaattgtcccttagttaagtcctaatccactgaataaacaaaagtaattagtcaacataccttgcttagcagctttacctttttcaaattttattttgtttatttattatgtcatttccaaattcctgtgggccttttggtctgtaatctccataaaccactgtaggcatagacattttaatggaaagggctagtgacttttctggttttgtgaccttttacattctgattcaacaaaactttattggtcacccgcttatataacagtcactatgccaagagatttttcataccttatcacatattactttccataataaacccatgaggtaaatactttatggtccccatttaatataggacactgctaataagcctcagggagaaatgagcccagatcacattgctagtaagtgctaaattttggctcaaacccatcttgacgcttgaagccagtgttctttctatagccatatctcttgctaagtacttctgacttttacttaagatatagtcttctctttgattattaattactctggtgtgaactgtgatcttttatgaaatctaagactgctactattatccgggcaaaattgtggaattgaatcattgagatgctgattgaattgttgttgatggttcaacaattttgagatgagacagatcaaattttcctttattgaaatcagagtggttggagcttaataaaaaagcagaacatcttaaggtaaaagagcaggtacttttttctttttttttttgagacagagtctcactctgttgcccaggctggagtgcagtggtgtgatcttggctcactgtaagctccgcctcccagtttcacgccattctcctccctcagccttcagagtagctgggactacgggcgcccgccaccacgcctggctaattttttgtatttttagtagagatggggtttcaccatgttagccaggatggtctcgatctcctgacctcgtgatccgccctccttggcttcccaaagtgttgggattacaggcgtgagccaccgcgcccggccaagagaaggtacttttttttttttttaacactgacattagttctctttttgactgctaaggataactacaaatgatacattctgtaaaccttttgtctgaaataataaagaaagtgaagcacagtaggaattctttaaaatgttgtcttgttcattgggcatttattgggtacctagtataatccagatattctgtggtgttctgtgatacaaccttaaataagacaagacatagatctggctctcaaaatatttatagtctaagggggaaactttgaatttataattagattgttaattttcaaaaattaaaattcaataagttgcttattagcgtcatcggctttggaaatttaacacttttctaatgaagaacataagttccagttaagagggtttcctatttcagacaatgtagaataaatcagcttgttccataacttttaatatttttcaaatataactcgcattttacctttagaactaaagatatgtcgagaagagttcattataatgtaattgagtcacttaccaagcctattttaaaaccagttacttccttttcttactttgcactctgtgacacatagacttccagaatcagagaagtattgtttttgtttttaggcacttgctatattatgtggaaccaaagccaagttaatatggctaagtaattttcagttcaaggtagg

SEQ ID NO: 124506 - DNA, 1758 bp, Homo sapiens
acctgttagtgcctatcggatgaattatactctttgaatgtctctttttctaagccgctgtgctaatacactttttattcattttcccctgtgttataataactatgtttaagtctcatggcaatcttctttagtctatatatgctgaaaagatttatttgcatttctatccagaataaatcaaaataaattttgctggaaatggcatcatgtgaattgagtttctttagcttgcaatttttaatcattgtgctttatctggtggaaatgttaatgtttagtggcaaaagaattgtaaacagtgtttaacacacctttagtcacagacactttcatagaataaagggggttgtttaatactccaagaattactattcttatttgaattttatttctattgttgccaagtcattttttaaaaagaaaaatgatcccagaagtagataaccttttttttttttaataaagcagataaacttactgaaaatgacgtataaaactcaatttttctggtaggtacatactcttttgattaaaagttatcttaaacgccacatacctgaaaacacagttttacccattcaacaatcttgatgttcactgtcactgtgataaaggaaatccaagatattagatagcaatattctagagaaaaataaacaaattatatttccttcccctgatgaagttgtctagaaagctcatccaggccatggggtgagaccaagaagtgagaagttctagtgtctgaaaggaactgcagttgaaggactttattcttagcattatatatatgtatttttttaacctctctttggttctcagatcaacaccaaaatgcatgtgctcaccttctcttgtctttatgttttcagtaggaggaaggctggcattagcaatacaactttgaactcaggaagaaagtttagcctgaaaaagataggctgactagggtaaagtttgcagccttccaaactagcctgttatctttataagtttatgaggtagtaaaatggaaccaacatttctaacagaatacagtcgtgtgagcctgtcattctgaaagggactttatgtgtgctgaggtcaaaatccagtatgggaacccatgcagggcaggatccaggttttgtggcttattagacttgtgcagtttcatggggccctctttaagaaaaagaatgtggaattacaaatgcaaaattagtgaaaagatctcggaaggggcctatgcaaggaaagggccctgtacttaaacttcattaattcacaataaattcacttctaacctcatacataaacctgtatctaataagttaaattgtgaattgataatacagctaaatattttaaaatgagattgaatgtcacattcttgaggaaaccttccctgattgctttctttgtaatgccactgtgtcacatatacatggtgtggtaacgatccatttacccatctaatttgctcattagattctaagctgcagactggctaggatgtcttgcccactgctgtatcttttgtgcctagcacagtgcttagaaaattgtagttgttaaaagtagagtgcagggatgctggagtcacaacaccttcgaacgtattccagcagcaggctcggtgccgtgcctgatgtgccgaaaggtgcctctagtgctattacaatgcagacacagtttccatcaatcatatggacagcagctgccaagttctcttttacttggtgagttatggatggcaaagatgtctttcaacta

SEQ ID NO: 124507 - DNA, 1141 bp, Homo sapiens
agactcattgggtaataggcagtggcatctgcgtttctccccactttacggcgatcaagctgcatcccctctcatggggctgtgctccccactacaccagtcccaagaagaggcaccatatgggctagtgtttaggactacctgagtcagctagataggcttagtaggcaacctaagtattcaagaatcccttaaagtgagaaaatgcctttccttatcaggaataaaaaacattgccaattagagagctctagaaagtgaaaatattttgagttaattttaagtatgaatgagtgctaattagagtggaattttaacagcagtcattctccactttttgataagattatgggatgtgaaggaccagagcctctatgtgggagttgggagctaggaaatgcagaaaattgatgcagaaggaaatagcgtttctcattacgttggctttggtttacatgcctccttcctaaaggacttgttaatttaactattacttgtatatgttaattgaagtactactcgatttgagtgtaattttctctaagtttttcttatcctttggtacaaagaaatcatttgtattccattgttaaaactgatgaaaacatgtgaaatcatacatgaagacatggaaagatacaaactgaaaaatgagttaacattgttgtaatattaaatgggaacaaattaatttccatcgaaggtaaaataatgagtgcatttgtgatttttgttgcttactcatcataattatgagacattatatttaagcacatataaaataagcacactttcacatttaaaactctagtgatcttctgtatggaacttacactgaaataactgccctagctggggtcgtctccctccttgattccatcgggcttggctgccttccctcaatatgtgttgagtgactactgtgtgccacgtttgttcctagaggatccaaaacccaaaccagaagctcccagggttgcagtgtaattaatatggggtgtaattatagccttttatgatagtctgtttctttccttgttactgtagtcccaacacttcctgagatgtgccctttaaccaagtttgtcccaagcctccacatcttaggaaaattataaacttttctgtgttctgtcttttc

SEQ ID NO: 124508 - DNA, 1483 bp, Homo sapiens
gaactctctgaaaacaatgcacaagttttgatttgtagcatttgttgatttcaaggtaccaacttaatgtcactgaacatggggttaggaagagatgtacacagttgggtccggttccccactgcctaactgcctatgagtttgaccagtgagtgaccggcagtattagaagtattagtgagtatttacaagaaaaaatatttatatgtatccaggttttataaacttttaaccacttaggctgattggaagttatttgcatcataacttaactttaatccttaactattttcaaagcatgatctcatacattacctttgaattttgcaaatattctgtgagattgccatggcagggaagatattagccttattttgtagtcgagaaaattgagagcaagtaaatttaaagaacttacctaaggtcacaatgctattaagagacaaagactgattatttctagtcatttctcttcactgtatactggatcaatactatgtaacaagctacaggttacaaccaagggggcctatgtgtacaatgctaagatactgacactaaggatatagtgaaatcataatttgggtatattagtagaggtgcttctacaactgcacatttctttgcattatactgtatgaatcatcgtcaagttgagacaggtagggtactccttccaccctcactggagttgttttgttgtcaaacgcagagatgataaacttgagagaaacagttcagagactggaaaaagaccaatgaggagctaatgtcacctggaagagtcttatccttgttccagtggctctcattgcatgatccctgagacctcctgcagcatcagcatcaactaggaacttgttagcaatgcagatccttgggtccccacctcagacctgcacacactgtgggctgtaatcgacaagtcttccaggtgactttgttgcttcctgaagtttgagaagagccctatatcatcccctccaacccagaaaccctagagaagtttgtgggatcttaaagaagagaaggcatgagtgtcttattccaagttgacagagtttaaatcagaagtaactgagtagtcactaattagattgcatttacttgaagtgactcaattaagttgtctgctgttagctggaattgggggtttaaggtaggaattaagttcagtttacggaaattaagatagttacacatcatacacacctgggtttgtagcttataaaatagaattttctatgtacactctggatgcacttgcaattttgtcctggaatgaaccaaacagatgaagtgaacagacagaccttggtgcctcatgtagtgtcaggaggtagttcatacacttggccgaattaagactcatgatgtacggctgtgggggtgggggcgacaaagcttttgaaatggcatgctgtggcaaaatatgatccacgtgagttttccttggcctttggcaccatggactctggccccc

SEQ ID NO: 124509 - DNA, 1067 bp, Homo sapiens
ggtcacttggctcaaccatgcctgcaagccaagtttcagtgtttcctgacactgaatcgcctgagtaccattgtggttatacatatggtgggatgacgtggccagttgaggtatatgtattaatatgctgaagaaaagagagtagtggcacttgcttcgtgagccaaaaaactgcaatcacttttaaatatatgccacaaggctgtgctgggatatgaaggaaggtaagatagagcctaggtctgtctagggattgggctgcttctgttatataaccacagcaagtcagttcagggattttagcaaacctttgggaatagcagggactgagctttagatgatggctctgaactgctggtttccaaccactagggtgctctacctgtgtcagattttcctggatcccatgcatttccccagtccatggtaaaggaatcactgggtatctgcttgtcattccccaatacacagcattctaccacattctgacttagaatttccttaccactattttccccccactagcctctgaggagctttctgaacatatagcccaactccttgtatatgtaaggcatttgttacactttgatggagaaatgaaattgtgtgacttaacaactattatattttcttttcattaatccttgtactatatttgcatgagtagaattttgtaaggttgtaagctctaggttactggaagaaacagaagtccgattgatttgttctgagaaaaatgactggataacaaagctaggcatatagagttgaatttaaatccttgagatgatctaacctgataatgtaacatcatccatctgtaatattttctcagtcaatttttctggtattcttcattttctttttgagaaagtgaagcatatatttatagcattatagcatatatttatgccattctctattcttaaggaatagagacagtattattttctcttcaatctgtatttcatagtgacatcaaagtaaaattctacttaaattgtgtgctaatcatagctttttatgttttcccttttctgccttctacttttttctactatatc

SEQ ID NO: 124510 - DNA, 1051 bp, Homo sapiens
tgataatgagaagaggccacgtggtgagcactggggcatattctcctttagtggtgaggggcacagaaaaaaactataaaagaaagaattgaagtaggagaaaaatcatgggtgtgtagtgttttggaagccatgtaatgaaagtaaaccaaggaggagaggtcaactgaatgagatgctgctgaagtgatggacagttggctttagcagattgtggttggatcaaaagtcatatgggaatgggtttaagggaaaatgaaaagaggagaattgggaacagtgagtagggacaaatatttggaagactttctcataaaagctgaaaaaaatgagggcagtacccccttcttcggtgcctcaccttcactagaaagctccatatttcttaattattctaacaaataattatagttaattctggtgagtgatgcatttctttgcaaaatattgtctcagtttcttcctcacagtttctcaggatgctctttgtcatcatttaaaaagaataataaactaatgagcaagataaggagagaaaagaaacagatctgagagaagattctctttctggaacactaataataagcttaatattttacaaaataaaacacttttaaaaactatcctgtaaaggtcttatttatgtactttttataggttagcttataactgtttctataaaaactaagaaaatgtggaaaattttgaagtcatggggagaatatctgaatagcttttcctcctagtttcttggaaaaacaggaaattatatgcaagactcattttaaggcctttacagtgtttaatttacttaagtacataaaaatgtattatgtataacttattaaatgtattatgtataactaataaagtcgtgtctgggataattaaattttaaaaatatggtagattaagaaagcaattgcagatttactaattgaatttgctatttgatgtttttaattttttaaatcacaaatagggttctaaagttgttgcagtgaaatgaatttaacatttcttatatgctcaattaattgggaagcaggca

SEQ ID NO: 124511 - DNA, 1003 bp, Homo sapiens
taatgttatcttttccagtttctcagaaggaaaaagaattaaatgaacctcacatgtgatttgaaaacagagatagtatccattccaggcctctgttttattttgctcttcccctctccttgacactttacttttgggcagatgtgcctgaggaagacttagtgtaagatgacacaaggtggaacagagcttagtttgtgagtctgagaagacttagtctaagatgatacaaggtggaacaaagcttagtttgtgagtctgaagcagaatcaggcagtgataagcagtgtgtttcctggaggatgataaactttctatatgatgaccttgttttatcgtggtattagtgagcatcaaaactattcactgacttatattcatatattttctcaagaggaggaaaatactgcatgggttttgcagccagtcttcctgttcagatttactctgcttaagtacttaatttaagagagagagagaggttgacaaaggattccgtaacttctagtcttcaaatgatcaaaactgaggacctggtgaaggtttcaggaaaccacttctttaattgattctctttccatgtaaaatgtatttcaaaggataatagcctacgatttgactccaaagcttcagcgtagaagaggaattcttctggctgaactatatagctaatgctcaattaccttagcttctattgaaccgtattctaaacaccttcctttgtaaccatcaccttgtgcagaagtctgtatttttagcctttaagcagagctcaagtgctgtatttagacatctgacttgaagactaaaatttgctcagtgagcagaacaaatgttcagaaaataacatttcaaggttagagttagtgtcctgaataaaatcccttttcttctttttctccgtattgaatataacataaataatgtaccctgactgacttttaagattaaaaatcagagaatacagtgaacttggaaagggaagagaacataattaaaaatt

SEQ ID NO: 124512 - DNA, 1066 bp, Homo sapiens
gaaacattcagctgcagaattaaatgatttgctcaaaaggaaacaggaataaatggcagaatcaaccacctaatactttggatttttggaaagtattaaaaataaacaaatcagaacaacaaagttctccatttctttgtttgtggagtattctcccctctggccccagcaaaagaaaaagttagaaaggagatcctctggaagttaaaccaatgtgtttaaggttaaaccctgcctcatgtcacttgtacaatttacacaacattcatttccttaagtgctaccataattttgtgaatgttaacataaagaagtccaggaggccaccaaattgttcccattggcttttttgtgtagtgtaggataatgaggcaatttttgctttgtctatatatattttgtgtattacttgattttatgatcatatattgtttgtgtgactttacctttaaagtcaatagaattataaatttaatttggtatttacaacacacatatgcacacacatatgtatatattttttcatcaaacattaggcaaatgatggttacatgaaacatgaaactctgggactacttctgtttcacaggttcagatcctgtgtcctgacttttggttgagaaaatataggctcagttaatgtattcagttgtgtgcttttacccaattttccattatctcctatttcatcttccaccaaagtaacttcagacaagaaaagtgtgtttgaagactaccacgggttaactgcctgtattccattataaaatctttgtatatcgtgttagtctttggttttgtggtcaggatcgactataatgaattctggttcttgatttaccaaatgtgagaacttggccgatttatctaatctttgggtaaattagtctccccatgtgtaaattaggaatgagaaaacttaacctttagggttgttgtgagaactaaaagagctccagtttgtccagtgcttggttttatagggactagatacaggtagatttctttcttcttcatttgatttaaatccaacactcactcttactgttgtcccaggtaaaatttt

SEQ ID NO: 124513 - DNA, 1053 bp, Homo sapiens
agatttagttcacaaactgtataatcttctgattctgcagaattgaaatgaataaacttgaacacatatttaagaactcaagctctagtcagcatataacttaagagggaaaaggttgaatttcctttcaaaataagcaccgtgcatgaccatgcttcctaagaaaaaaagaaaaggtaatatctctaaaaattgtatcatcattattttcataccagttaccatggttcaattagtccctctctatccagtctagtggtacatttttctaaattgtgaaaattcaataataattacatatatagtaatatgtatttatataatattatataatatgtaaaataataattatagtttatataaatgtgtgttttaagtggtcttattatgtatgatatttcaaggtgtaagcttatttttcaggatattgtgttttggtacctaggaggatcagctttgaatcatttctagttacatatttctaatttgggggaaaatcagtttttataggaataaaatgtggtccaagtctttagcagagtgaaggataagactgaattataaaaagagaggtttaataaagtattttttaagccttagaggaagttaataaaataattttattgaattccatcatgactcatcttctaatattaattttgtaaataggaaaaaggtaattaaattactaaagcaccttcattttaaaggttaactttattattattgctcataggaaagtttattttttaccacttttagaacactaggtctttttaaattgatgcacaattcatttgggtgctttctatgacacgcagtcagacttgcctccttcctgtgtgggctctgactatctaataaaagagataatgtaatgacttacatatctagaacacaaggtaatgattccattaccaggcatatccctgttctgatttgcagacagtttaatttttacatctgatctttaactagtgcttcagatgaagcagaactgggtatttgaaaggaatttaatttgttttgcccattttaatggtagttttttct

SEQ ID NO: 124514 - DNA, 1010 bp, Homo sapiens
ctgacttttccaaggaatgacaggggttaagatccgtttttaattggttccactcctggtggaaggctttcttctatacatgtcaggttttctttgacttatcaataccttcatgaagaaacaatgaagtgaaggacattttaaaagcaggttgtataagccactaaaaaattttgaataatgcctagtctctgcatataagtaaaaaaaaaaagcagtttaacaatatgttaattatatgtagacattatttttatcacaataaaattaagacatactacaagaacagattgacttagtttttcagtttgcaattatcttcccagttaaatataagtaaagatcttaataaatgtaacattaaagttcttgaactatataccacacaccattccacataaacagaccggttatattaaaactagcaaagccgtattttgtctgtgcttgctagaaaataaattttgcatatattctagaagacaaagatgattttgtatatgtaattgacaaaaaatacttctaggaaaaatataattattgtattaaaggttatgaaatggcagttgaaacccctaaagtcatggattctagttaatacagtataataagggagagctcacactattcctcatgaatcatgctgagaaaactcctgtcaaataaagaattattaagttgagttaaagaaattaatttgtttcttcaaaactgaagttaagaaatgcaaacatttttttctctggatgaaaacactgtttttttttcccgcaatgcaattttataaataaaaggtttattgcaaatgtattttgatgaccttattatactcattttgtgtgaaattatttaaaaaataatattccctcaagttaaattgctcaattgaaacttctcgcttctcaatataagcatcagaataatactttaaggtcataatatcagaagctattgactaagtgatttaaagatagaatgtctgtattctcagatggagcaaattaatttaa

SEQ ID NO: 124515 - DNA, 1009 bp, Homo sapiens
gctattaagttttcagagatggcaaatgggtagttatggaataagactcttttttttttgagacggagtcttgctctgtcgcccaggcaggagtttagtggcgcgatctcggctcactgcaagctccgcctcccgggttcctgcctcagccttccgagtggctgggactacaggcacccaccgccacgcccagccaatttgtgtgtgtgtgtgtgtgtgtgtgtgtgtgtgtgtgtgtgtgtgtgtgtttttagtagagatggggtttcaccgtgttagccaggatggtctcgatatcctgaccttgtgatctgcccacctcgggctcccaaagtgctgggattaaaggcttgaaccaccgcgcccggccggaatgagactcttacatttacgttgaaaagcataggtgctggagtccatggtaagattattagctgactaccaaatttcattccttctttttccatggaaacagtgcctaagcacgtggctggccagctaggcactatgacttccagttcccatttgagataggtgtggccatgtggctgagttcttatgaatagaatgtgagtgatttggcaatttgtgtcacttctggatctgtgctttaagatgttagttaggctccatgttccttccccgttctgctggctggaacctcacatggttttggtccagtgtcaaccttctgctgtagcagtgttctagaaatgtcagggcagcaaggtggaaagaaccttggttgctgaggtcctgccaacctgaagtgttacacaagaaagaaacttctctgttgtttacaacactgtattaattggtttctttgttacagcagcttagtataaaccctgcttgatagagagtcccatagaatttcgttgacctgggctctgcccagcattagcaaagtgttttgaatctccaagccccaggttcctcctgtgttacatggtactattgtgagattatactatataagagtttaaaagttcagcatttaaatata

SEQ ID NO: 124516 - DNA, 1053 bp, Homo sapiens
gaggagttgaaataaatcatttcaaggacaatgaaatgttcagcccaaggtacactcgtccttggtttaaacacccatttcctttaaggactttctaatgagaccttgtggattttccaaaaaatataccgtgccagtggcagcttattcaccttacttacatagttcgaggaactgcttgtttaaatttagatactgtctctgatgaaatgttttgacaaagtaataccagcttgatactatttaaaatattttgacagatgggaaaattgtttcagtctgagttgagcaatactttattgcagtattttgtgagttagaaaaaaaatggtaaaggtagcctcactgttccccaaaataacatccttccattctccctgaggagagaaaggcctctattcagtcatagattacagtatgtgtgctgagtatgttaagaattcacacagtttaaacaagagggaacatttggggactgtttccaaacagggaacatttattgttctataagcaaaccgaacctaaagaactttcgggaacatttgttgtggtagcatgttatcagagccttctcatgccgtgatgagattgttctcaattaataaaactaaatcactagattttaaaactgacttggatgaaaaaaaaagctcaaatttacctacttcaatatctagagttttaaaaaatatgctattataataaaaaatatttaaatatttcacattagttgcaaaggatgaaatccaggtggtccttgtttgtgatattaaacaaatgtgttgaagcaatgtggtagggcagtggtcctcaaagtgtgattcctggaccattagaaatgcaaattctaggctttctggttcagacactggtgcagcccagccatctagatttttaactcgtgttcctgatcattcagatgcacactttagcttgataagtgcccagatagtgtagagactttcaagctatcccaaggcctgccagattggaaagagggaggactgtggtgggggggtggggttggggggaatgatcaggaatggttcccag

SEQ ID NO: 124517 - DNA, 1049 bp, Homo sapiens
aggagagccatacagtgaaaaatctatttctccatcttttccttggttgtctctcttttctctctctttcctagaaacaatcactgttgtctctttcttgtgtagccttccagaatgctatgctgtgtgtgtctgtgtgagtatctgtagtaaacattaaaatattactacacattttctgtgccttgaatttattcctcttattttatgtttcagattttgttccacatgtggaagtgccttgtgcctcctttttcactgctacatagtagttcattgtgtgggttttccaaaattaatttaacagatcctctgttagaagacattaggtaatttataatctcttgcaagcctgattattttaaatttaaattacacctagggttctgagtcctctatatggtcttttattcttagcagaagcttcacaactctctgggtcttcagcagggactgataaagatcaaattgttgaattaggtcaggtttgtgtcaggaagttgcttgatctcagttttcttagatggctatttttagcttgtgaacagtaatcatggtaagaaatctttgtatcttgccctagacaatcttctcttggaaaattaaagtggccccctttaaaagatttaagaaatgcaatttgctaacagtttaatgggtttattagggactttgagggtatatttctagaaggagaaatatttttgtttctctgaaagttctagctactttattctccatagcccttaaaaacttttcagatttgtcttcctataattcgtagagatttggaaaattagacataaggcacctgttttcttaaatgcatggttacctattcctttgtcctatcctttcaagacaattctgggaacagtttgttcagctttacgaagaaaacatttcttcatcacctgagttttcggtcacccatgaattctaagaatattttagctgatttcagggaaaaagtattcaatattagtgattgataattatatgaaaaatagaccagtaaagcaatcaagtggaaacttggtagaaatgta

SEQ ID NO: 124518 - DNA, 1602 bp, Homo sapiens
ttatgacctgacactgagaattattaaggctcagatccaaatacttagttcattttctcttgctcagcatttagtaaagatgtggaacacactagtcagatactggttagtcaagctcggaattcaggatttcatatccttgtcaccatgtgtgaactttggaatatttggattttaatatatgcaaatgcttttataatgtgtgatgtgttaggtgaaaattattgcacacactaacaatttaatttaaaatgctactcttgaatattttataaaccactggaataataacatagccttaatgaatataaaactgtttcttcttcctttgttaaatcatgtgggctgcattctacttaatacactgcctcaatttatccttttgtgctaagattttaagttaaaatagaaaataaacaataaatcaagttggactgcaatcatgttcacttgggaaatttcacttagagacatttgatatatttttggagggatttcagggatctacattggttaagttgaatctgtaatttggttatacataaaattaaagttaatctaagtggacagaatcaatactcttgtgagtttaattagatggccagcttccaagcaagagattattctttttactatcctcctatcctctttccttaggcagcaaaataattcctttgccaaagtatgttggacagttccctggtgacaagttctatagaaactcatagctatgctgttagcaatgtgagacagaagggagggatatgtgggtgaggaggccattgtattctagagatagtaataagcctgccttatctccagatcatagcccagccaaagggatagtgtcccatttgcagaggatctgcagtcactgtttctaaaccaaacctataaaacaggatggtgtttctttcaggctgaaaaatcccaagacagaaaaacaggaaaagtcggggagataaattataaattagactggacttgcagtgtgagaatcctgctattaatagttacgtttgatatgagatgcctggaaatgtggcagtaaattggagtgaggttttatttcaggtaataactttccttttatctctgttggtgcattggcaagaaaatctagaagagttttaggaggactggatgctataaccttcattgttcttatatgttcagtgtcatacgcaggcttttacttattgaagagtaagttatttacagtgttttaagagtgagattttattctagctccgtgaaacaaaacaactgggttgagttgtcatggttgatattacagaaattatttgatgagtagatgcatttttagcaataaatttaaaataggtttagtaatatttaagctacatgattgtatttctaactttgtggctgtcttttaaataaatgaagtttgaaattcgtgttttatatttcagatttttattcttcatgttgcaccatcacaaataaatatgtgttaagtagttaatatgagcaaggaacagtgagaaataaagatcagtaagaaaggttctgtcttcaatggttcgcagcaacgtggttgaaaaaccttggcaagagtacatgaactaaataatatta

SEQ ID NO: 124519 - DNA, 1099 bp, Homo sapiens
cagatccttgtgatgatgacttctgtcacagatcacaagagagccagtcacaaactgggtgtctgcactgaagagagtcctttagagactgagtgtctgatggacctgtgtttgcaattgtctttttctatttatgtgacttcggaaagttactactgagttttatttcttcttctccttaaaatggtaatgataaaagtgaaaatacctagctcatagggtggttgtgagaatgaaatctgaaaacatctataagcaccctagctgcataagagctataccagtttttctcaaaatgttaagtacctgtgaagtcatctggagatctttttaaaatgcagacactgattcattttatttagttgatctagggtgaggcctgagattttgcatttctaacaagctctgaaatgatactgtgctggttcaagggccacactttgagtcacaaggtcctgcacaatatgcatagaagaaatgttcctattaataggagctgttaaagtttgtattaacagaatatttctgttgataactttgcactcagtttggggttgtctgctgaaatatgtacatataatgtataagtattgagaaatatggcatttagaatcttttcattgggaaataatgcattctataatggttttgtgctgcattgtgacaaaaaataaatttggagtcctctttggaataagattccattaaaaattcacccatgttgccaggtacggtggctcatacccataatctccgtacttgggaggccaaggcacatggattgcttgagcccaggagtctgagaccagcctgggcaacatggcgaaaccagatctctccaaaaaaaaaaaaaaaaaaattggctgggtgtcatggcgcacacccagctactcaggtggtgtattctcagctactcaggaagctgaagcaggaggatcgcttgagcccaggagttggaggttgtggcgagccaagattgtgccattgtattccagcctgggtgacagagcaagcctctgtctcaaaaataaaaaataagaaaataaatccagcactttgggaggccgaggcaggcagatcacgaggtcaggagatcgag

SEQ ID NO: 124520 - DNA, 1150 bp, Homo sapiens
aaaattattttttctagtcccatactttaggatatgaatgtgagcatcacaatttgaattacttggcctgtttctttttcataatcacaaactttgggcataagagaaagatttttggatgttgagaaagggatattgagtgtaactgtcatggttctaagctatcacagagtaactaatttttgtggattaccatatcagatatcacagaatccattttacctccaagagtatagttagatacatctttgatttgtcagtgagaataactttcaaggcttacttaatgggaacgtatcattttgatataccgcgtcccttatcttctacttagcaagagattattatttccatattgaaaggatctaattctatagacagacgcagaatgttttttgtttgtttccacctctacagtatgctggtgaggatcatgctgattgccgattggcaggggcatccaaggtggttttcttgttaggtgcacaggagaagaaagcagacagtcatggataatagtaagccgacattcgagaacaggattgaaggcaaagtgtggggtcactgtaggagagagaaaaataacagttagtttcaagatgaagaaagaagcaagaataatgtccccttgggagaaaaatacctccaataagcatatgggaaatgagaaaggattcatgaggggaaaggaggattctgggaagggctgggaagttggcttggggaagaaaaggtgcctggtttagagaagggtgtcaggatggagaaagtatgacagggaaaagaactccattactaaagggtggatgccattttaaataatgtcaacctcaaggatggttggcccacttctggaatgaatagcatcaaaggtttatgtgttatttatcctttcttaaggcctcctcatgttagaaagtagcaaacctactcttctagatgctcaggcccataaccttggagttatctttgaacccgttcagtctcccagactccatatccactgatttccagttctttcttattggctctactagggaaaatatatctagacccacgactatttctcaccacctccattgctacctccctggtccaaagctctattctctctgtcagattattacagtagcctctgacttgttggccc

SEQ ID NO: 124521 - DNA, 1044 bp, Homo sapiens
aattcttaacacagttataacatatttgacagagtttaatggaaacaatattaggcatatttcaaatcatcatagaattcagattatctacagaaaatgttgcctagtgtatggtgtgttcagctctgctgtgtctctacagaatattgagaaagggaagaaggagcgattttttaaactcaaaattaaaacagaaatttaagcatatttttatattaaagaatactttgcttaatgtacatttttaaaaacagcaaaatataaaacatagaaataaatttctaccttggatctaactagagagctcttttgccttctctacttttcttggattcagtaaaaataacaaccatttccgcatagattttatgggtactgaactgcattttctcaagaaaacattattttcttagtaaattcgcctttatatatgtatttacttctaacaaaaagaatcatagtattgttttatcaaaaagtaagcatagatgatatttattttaggatacccactaaagtaatacatagcctagtctagtctagtatagttcagaaatagtttagtaaacccttatttttccaataacccaactgtattgggtcaggaccaagtcatatctgccttctttacaatttcttctgtgttgagcaattcaatagaaatatcactttttagggtcttaatgagtaattgtcttgggggagtggcctttgacagaaaatattcagtttcttagcacatgtaatgtgaaaaattagggtatttcagattataagtaaaagctggaaatgtcttttcaaaaattatttttgttttgcaaatgctatgactagtgtcttgaacccagtagatgaaaatatctaataagatatcagaggtattatttgttgattatgtactatgtggtaggaactagatcaagcactttacggatattatttcaatgacttcttccaacaagcttataaggtattattatcctcatttcacagataaggaaactgaggttgaatggttaagaatattggccaagtagcacagaa

SEQ ID NO: 124522 - DNA, 1031 bp, Homo sapiens
gttccaaacacagcagaaacgacatgagtttaaaggtaggtattttaagttttcaggaactcatttttctcaattttttctagagagactaaagtagaccaatgctaatttagaaaatatagaaacaacattctgaatttttgaatgctaaatgtaattggtttaattacagatcattttgctaaagaaaagttatgttatggcccataatgaagaaagtttctttctccttcctaggatagcagtaattgtgctgcaaaaaacccaaaatgtttctattttaaaaatgtcttatgaattataaaacctttgaaattgatggcttgatgttgcagataaattgaactagatttcaaagtacagttaacttgacagtgctttgaaacaagggtcactcattgtcattacatctttatgactatttttatgagagaatttggataatttaactctcaaaaattgtcacatgctgttttagcttttgtagttttgcttttgttagatgtcacaaccgctattaacacaacttgcattttttcctttcatttatgttgaactaaaagatatatgtgaatattttctgggaattatttaccttagattgaagaggagagttgcagtttttacattgttcttttgctgtcattaaaagaaaaaaaatcatctgaccaggaaatagtatttttagtaaatatactctcagaatcttctccttcccatctgaaaataagatgtttttgctttttgataaggtaatggtcaatgggatcgaaagacacttttttcttccacaattacaatagacactggtatggtttattgatgattctcatcagttatatttcaccaaaatctcatagcaacaggagaaaatttcccattgtttggttgggagccagaagctgagagtgcaggtcatttttcttcatctgaggaaagtggaatagccaatccaccactttgttttctaggtctaaaatgatctgttcagtctttcctaattcatgggtgtggcattcataggagaggct

SEQ ID NO: 124523 - DNA, 1077 bp, Homo sapiens
aattgatgacattatttgctgtatcttgggtatcaacagcatataaatgaaaaacacagcagaatgcctggcctgtgttaccacattgacctacacatttggatctgaaagatctcgagctattttctgcctaagcagactttgcacctttgtgttttatagtgaagtagcaggtacacaactttttaaaatcatgaactcctagcattggattaccaccacctggtgtaagggataggttttatagaaacacaaagagcatggacttattcttttcatttttgttcttctttgccaattttaatgttatcttcacaatctgaacagtgtgacctgtttcaccttcttttattttgaatgttagtgtatgcacattctaagccaagggtggctttaccctttaagttaaattaaaccatttgggacttagcaaattctgggttgtatgttttaaggtgaaaaaaaagcactaaaaagaaaatttaaaagaaattttatcatcatatagggtgtggatgaatgattcaaatagaaaacctattttaaatcagccctactgaatgaactatactaaaaggacatttatttacctagttagggaaaaaagtcactttaaatatggtctctagttacttttcttcccatttattacatttgccacttcattgtgaccttactatgaccttgtagtttatgggctaaaggtaaccattatgcaataatgaaaatatgcaggccagtctttaccaccttgaaaaaattggtttcttatattttgtttaaattaacacactttgctatttataaagctctgctctacggtgcttgaaagaggagagaagaattaatcgcaactaatgtgcagatttaggcttttagagactgtgtttagtggaggtgagtcagcaggccttgttatattaattatagtggtttgattctctactggttttgattcacagagatatgcgctgtacgtaagaattaaagcatcaattgcttaggagaaaaaggaacttaaaaatcaaaccattaatacctatctttgctttcttcttttgtctaatttgttttatt

SEQ ID NO: 124524 - DNA, 1027 bp, Homo sapiens
gaggaacagactacagtgacattccccttcaaaaactggagattgaatcctgcaaaccacgtctgcattttgtgaaacttactttcctcttaggttttctttaatggattgaggcctgagtgtttagattgagctatcagaagctaaataaacagtagtgtaatttgcataagctagtctcagatgccttagttgtggtataaaaacgcttgggaaactcatctaaatttaatcttttgtaggctgtttatgggctttctggagaaaataagtcttcctactttttgttcagctttcattacttttaatcattttggtcatggcatgtcaaaggttttctctttgaaaagtgcttttagttggtatttttaatgaagtgttatccacttaaagtgtgatataattgtgatattacagctagcagggaacaaaacagcttgatagtcacttccagggctccttgagaaaaacttatactcaaggaaaggtcagctcctctctactctgtatacatcttttgggctcacttttgcacagctgctttgcatgattctatggctgtttgcctcatttgaagatgcagttgggaagaggagcaaagagtggctatgctggtggttggggtggccatattctgcaaaacaccgcattcttctgggagctttgcactttgcatgataagacttaatctgtccctttcaatcataaagtggcagagctagggtatactgtggtgatcatcatggtggtgatcatggtattcatgatggagaataacctcaatgcctcagcagaactggataggtaattttctcttgttataattgtgctcaacaacctgcattggtttttgcctcagttacatcatgtatagagtaaacttaaatgcatgagctttcaaaaaaacccatgctctagtcctagcctcgtttttatttttcttccatattctgctacgtacagctctcttggccagagttactactcatagttcacaatctggtgttacctgcctctggtatttttt

SEQ ID NO: 124525 - DNA, 1052 bp, Homo sapiens
ggatagagaagccattaacttctcactatcaatgtagtataaagtaaaagactgagtgaggtgggtggtgagctgggagtgtaaaacagggaccagttcatggagggttttgattgccaagctaaggagctggacttttatcatgaatgtatcggagtgccctcagaaggtttcaggcaagtgagaggcatgataagatttctgggttggagaactcactctggtagcagtgtgaataatgaacatagaggtgagagactggttcatatgtggtattgctgatggttgggatgaattttgtatgtaaaacagttgaatgaaaggttgctttcaggcacttctttactggctaggcacctcttttaagaacagactcaataaaaagccatatacattatattacccttcagagaaaattttgggtggcatagcaaatctaaaaaaaatccacaggaaatctgatgttctaaacagagcgattatataaaacgctggctgtggcttaagcaaacgcaatcacagaattgcctagctgtgagtcagagtcggcttgatcctgaaaagtcccttgcttgatagtaaattagtggcttagggaaatatgtttacatttcatttcatattgtacatctgattgcatgttttgagaattggatataaaatatctttatttacagatttggagctgggaattatattgactgtgtgtacatacagacttaaatttcccagttaagtgtataaatacagtgaggtatatacttacatagcaagataatgctaatttgccattttatctcaaatagaaacatatccaagatataataatggaattcagtgactcttacggtaaagtcatcattactatagaatggcatactaggtcttatgatttgatcaatactaatttattgggggaaggcagaacaggtttaactatttttaactatttctttccatgtacttccatatttctttctatcataaaatcgaaacacgctgttgcacttgttattttcctgggtcttttttctatattcaaaaatacacct

SEQ ID NO: 124526 - DNA, 1048 bp, Homo sapiens
ctccatttattttccagatgatataaagaggacatattctcacatctggaagttaatgccttggttctagtttattctccctccaagcacactaaagactttttcatttcctagcatcggtcttctagtggccaataaaatggcaagaaaagagttgggaaattcttccctttctcctcagtttccccttattttgttgcttcatttaatcctattctatttcagtaaaggaaacacggtctagttattgcaagggagaaagactagaaaggagaagatattggcaactagcaatcagccaagcaatagcaacaagagattcaatattgtcaggtgaggtagcctggttggagaatgcatatgccaattacaaatcgatcataaacaaatacttatacgcatgcagaaaatcctaatctattccactttgcccagtttctgtccatggactaatagtggtggtctctaaagagcactctattaggcaagaatgaggcattgattttataaaacagaatcttcaaaggagggggaagccaggcctgtggggaaagaaagcagaagtctggcaataggtcatgggaaaggaaggaatcactgtggggtttggacttggagagaaaaagtagcagcaggtcacaggccaacctgtcattagctttaagacacacacacgcgcacacacacacacacacacacacacacacacacacagccactgcttacctcagaatggattgggttaaaggttatttttttcccctctcaagactggtttcctatcttaagtttatgttaataattttactgcttctttacagtcctaagtttgcatatggagaggttaggtctcaaaactttcaatctcatagtccaaggtatgcccttaaagtgtaatgtggaaagggttctctttggctacacatgcatcagttttctatcaaaagttattttatagcagactgctattgggtaattgagatgcactttactaaaaatataacaggtttaaactagtggattttattaatacttgtttttgttttta

SEQ ID NO: 124527 - DNA, 1050 bp, Homo sapiens
gaatgatgaaatattggcaatgtatgcacttgcttctctgtaggagctcaactctttgatccttcatacaattaacttcattgcctagctggtattaaccggctggagagtaacaaccaattgttgcaggcacaacaacaccctaatatgctttgcctttaatgactgactgtttcaaattgaaagctctgttctctctattcctaaattcctgttgaagtaagttaagtccttaaataagtataggtactcattcacacctacagccttatcttttttgtggcaccttacccagtccccaattgccagagaatacttggtcattagcaggggtaagatgtattctgggttctctagacgtaaacatttgaatgttaggtctccttgcttgcttttatttctttattttttttttacctccttacttatttagtcattcattcattttagaatttgacttccatatgtctaaacacaagcagcctcccttgactcctcttccctctcccaatccacaatcaatctatctttgaatcctatctgctccacctctaccataatcctgctgatcctggcctccaccatggctcttggattattacagtaaccttctcattgatctccttggttttgtccttaatccccttcccctccacctctcatcgcccaccctggacacagtttctttcttcttctttttttttttttaaatattttcttttattgtggcaagaacacttaagagggtgagacccaccctcttaacagatttttaaatgtataatactgtattgttatctgtaggaataatgttgtacagcagctcttttagaaattattcaccgtgcataactgaaattttatacccattgattagcaactccccatgctctcccctagatcctggaatcactattctgttctttgcttttgtgagtttgactgttttagttacctcatgtaagtggaatcatgcagtatgtgtccttctgtgactagtttatttcacttagcataatgtcctcaagttccattcattttgtcgcatat

SEQ ID NO: 124528 - DNA, 1051 bp, Homo sapiens
aaatatagtcaaatttaatactcaatattgaacagttttccagggtgattgtgccaatgtatagtcctactggtactgtatgagagtgctggtcactccaattccttgtccatacttggtgtccacagttttgtaattttagctatgccactgggtatatagtttcagttttaattaaaatttttcttgaagagtcctataactgaaataaattgaactcatccttaacttatttctggatttatttcttacatttgtttaggattttagtctctatgtttacgaatgagattagtttgtaattttcctatcttgaaattctcttattagagttggcgccaagatatacccacataatgagttattcagtattttctcttttctggaagaacgtggtgttatttcttccttaaagttttgcaacagtttactgataaaattgtctgtgcctgcaggtgtgtgtgtggggcaaggggaggttttaaattatgggttagatttgttaaaaattgttttatgactattcaaatactctatttacttatatgtcagttgtgtatgtttggctagtcccttgtatctaaattttccatttttatttttataatggagaatcctattatatttgaagtctcctttaatattcctgcattatttgtttgaatttactgaacctctttgttctgcatattttttctatttaaataatttctgcagttacctttttaaaaaatttccttcagtttaacttttatttctttttctaagttttgaagtggttggttgcttattgattttgttttcctttatatattgaaaactgtagtttttcctctcagcatattatgctttagtttttcccagttttattatcatccaaataaaataattttttgttttccatttgattccctttttgacttatgagtgtaatacttgtcaaacccacagatgttatctgtttattatttattatgaatttctggattaattccactgggggtataggacatactcagattttaatacttggaaatttgttgagactcct

SEQ ID NO: 124529 - DNA, 1046 bp, Homo sapiens
cagattttaggtttagaaacccattcacttctagcttatttaaacgttattgcttattttgaagcttatgccatgtctgactttggcttagaatgtgttgccttttcacaaaagtgttgtggtctgttatagacctgtttacaaagaactatcactaattgttatgacttatctagcttagtttgatacctcaaaacaatctgagtcaatctttctttttctgtggtgtgtatatgcgttgtatgtgtatatgcatatacaatgtatgtattacaactgtaattgaactatttcatatttttctctgtagcaagttatgtcattcttctaatagaagtagaaagaaatagatggaaaatttgactatatgccaaatttcttatagcttagaactatttattaccatcttagtaatgaagattattatttgattgtttatcagaaatataaagttgtatcgttagtgttcatgtttttcttccaatctctttgcccagtgactacatttgaattttctaggtcaatttaaaattgtatttcacttttaaaaattcggacttattttgggctaaaatagaaatttcagttaagcacaataacagagatgattgtaaaaatgcagaaattccagttaaatattaacacttaatataattaattgctgcaggtcagctgcttaataagtaaataattgtttccagctatcttttttccccagtttattttaatcaaaataattttcttggctgtgtgctgtggcccatgcctataaacctcaggatttggaaggctaaggtgggaggatagcttgaggccaggagtttgagactatccagggcaacatagtgagaccctgtctctacaaaaataaaaacgaaaaataattagctggctgttgtggtgtgtgcctgtagtcctagctactccggaggctgaggtgggagggttgcttgagtccaggaatttgagtttgaagtgagctatgatcatgccgctgcactctagcctggatgacacataagaccctgtctctaaagataataaga

SEQ ID NO: 124530 - DNA, 1054 bp, Homo sapiens
aataattactaattatttgataaatttaattttggagcaaatgtgttgacagctgaaaaaacatgtaatgacttggatagagaccagatataacactagaacaaataatattggcgacttaaaaaaatagtaactgatgaaaaaaatctaattgcgttaaatattttaaagtacctaaaaataccaaggattttgtatcttttgtccttttctacttgaaatttcttaatcattttggtgatcatacaagataaatctttaaaattactgtgtgagtattcttaaaataaatataattctttggttaaactatacttctctaaattacatgcagtcttaataaaataattcctatggatgttaatgttcattctaaacaattttgctcaatccatatttttgtaaactgcattgctttgctttttttaaaagctactgtttatatagtcctagttcccagtttttcatatatactgtattgtgtctttaaaattagaaatgctgctgaaacatagaatatattaatccttgatgaaatgggacctctctttgagtataggactgttgcctgtacaactaagtctagtctttcagaacagaataggatgctgtatatctgttccctggaacttagatcctttggccttggttctacctgactttgagaaattacaatccctagtttttgtacatgtttcacttactttctgcatacgatttctggcttacttgactcttaagttcttgctgccagtcttgcctctgcagcagtccacattctctcaccaccaaagacataatgtcttgtggcttccccacttttatctctttgcctgctactcaacatttgttctgcaccagatgaaagtcactgttttaggtactttttaggggtacataaataattatttccttcaagaagccagcaatctgcataggaaaggttcacaaagcaattttgaaataatttaataagtctgcataatggattatcacatgagctttgtaatttatactattttgttggaattgtatagcaatatttataagttgt

SEQ ID NO: 124531 - DNA, 1014 bp, Homo sapiens
cattatattcaaagacaatatgagaaatttttataacatggcaaaatagttgtattgtagtattcagtgaaaagagcaagatgaaaacctttttacataggttggtctacactccaaaagtagatctcacagtgatttttttctacatggtaaaatcttgggattttctttttattttcttgaattatttttctttagtaaatatatctttttaattggaaaaataaatatatcatcaaaaattctgttaaaaatgttcatgcttcaaaagtttcaggttattgttggaggcagttcaaaaatgttatagctgtgaatcatggctgtatttaaatacaggtagcacttcgtgttagaaatatgtgttgggaggggtttatattgtgtgtttatgtaaagatagggtaagatttcacaaacttcttatagacaaaaacagttacaaagatttgtgtcattttagcataaaggtgagttccttaatattactttttattaaatcatttattcattccttcattcaataattatccattgagcaagggcttgggtgcccaagattcagaaataagaaatgtagtaggaaacaacacctaaaattgacttttctctcaccttttgggcaaaaattggaagacagttaaattcttttacgatagcagtatcctatgtgatcaaaaattcaaagcgtctttactatctaaataatgtctattgaattttcagatgttctctcagctctttaattaagttcactaatttctgtctcaatccagtgttgaagtcagcagccaaatgccacatatggaaaaatgttcctctggaagtaaattgaatattttaaaaattactgtcacttatcttaatatttaactcaataaaacttctgtttctcagtgtttccccacacattttcatgtgtctgttaaattgttggtaatgctgcatacataattccttggaaaactaaatggattctctatcatttagaagagttttgggggtaatgtggta

SEQ ID NO: 124532 - DNA, 2203 bp, Homo sapiens
cactctcttctagctgctttcgaaatctattgaacaactgaagcaaccaggcagtcaccttgaggaagcagaggaagagcttcagggggaccaggcgatgcaggaagacagagcgccctctagtggcaacagcactaggagcgacagcagtgcttgtgtggatgacacactgggacaagttggggctgtgaaggtcaaggaggaaccagtggacagtgatgaagatgctcagatccaggaaatggaatctggggagcaggctgcttttatgcaacaggtaataggcaaagatttagctccaggatttgtaattaaagtcattatctgaacatgaaatgcattgcaggtttggtaaatggatatgatttcctatcagtttatatttctctatgatttgagttcagtgtttaaggattctacctaatgcagatatatgtatatatctatatagaggtctttctatatactgatctctatatagatatcaatgtttcattgaaaatccactggtaaggaaatacctgttatactaaaattatgatacataatatctgagcagttaataggctttaaatttatcccaaagcctgctacaccaattacttctaaagaaaacaaattcactgttattttgagtttatgtgttgagatcagtgactgctggatagtctcccagtctgatcaatgaagcattcgattagtttttgattttttgcaacatctagaatttaattttcacatcactgtacataatgtatcatactatagtcttgaacactgttaaaggtagtctgccccttccttcctctctctttttttagttaagtagaaatgttctggtcaccatgccagtagtcctaggttattgtgtaggttgcaattgaacatattaggaatacaggtggttttaaatatatagatgcaaattgcagcactactttaaatattagattatgtctcacatagcactgctcattttacttttattttgtgtaatttgatgacactgtctatcaaaaaagagcaaatgaagcagatgcaaatgttagtgagaagtaatgtgcagcattatggtccaatcagatacaatattgtgtctacaattgcaaaaaacacagtaacaggatgaatattatctgatatcaagtcaaaatcagtttgaaaagaaggtgtatcatattttatattgtcactagaatctcttaagtataattccataatgacatgggcatataccgtaacattctggcaaataacaattagaaaagataggtttaacaaaaaaatttacttgtatataatgcaccttcaggaggactatgtcctttgatgctataaaatacaaacaactttgaaggcaacagaagacactgtttattcaagtcagttctttgtcaggttcctgctgttctcctacagaaaagtgattctgtgagggtgaacaggaaatgccttgtggaaacaggaagtccaagtgattcatgtactgaggaatgtaggaaaaaaaatctgaggatagtgctttactctttctgtttttaaagggcactctatgaattgatttattgtctaagaaaataacaccacaagtagggaaattgttacggaagcttttcactggaacatttccttcatattcccttttgatatgtttaccttgttttataggtttacttttgttaagctagttaaaggttcgttgtattaagacccctttaatatggataatccaaattgacctagaatctttgtgaggttttttctattaaaatatttatatttctaaatccgaggtatttcaaggtgtagtatcctatttcaaaggagatatagcagttttgccaaatgtagacattgttcaactgtatgttattggcacgtgttgtttacattttgctgtgacatttaaaaatatttctttaaaaatgttactgctaaagatacattatccttttttaaaaagtctccattcaaattaaattaacataactagaagttagaaagtttaaaagttttccacataatgaaagtccttctgataatttgacaaatagctataataggaacactccctatcaccaacatattttggttagtatattccttcatattaaaatgactttttgtcagttgttttgcattaaaaatatggcatgcctaagataaaattgtatattttttccatctcataaatattcatttt

SEQ ID NO: 124533 - DNA, 2269 bp, Homo sapiens
aatttctaaagttatgtttttggtagtgattaggtacatgtgcctagtgctactgtataagactgaagttctggagagaaagctacttcatcgatccatgttttattttagtggtgtaaaataattcacaatgttaaagtaatactatcttagtatcagctaagtagaacaatggactattatttgaaacaagattaaaatagtagactggaaactccattgctttgataaataccagatcatattttctattagatgtcagtggtttggttaataagcctaggtattgtggtgtttaatgttcagtgaccaaatttttctgaaacaacccaaaacttggaagacatgttttgacaagatttttatgtcatttttatgtgtggaaacagtctgggagaagttattcataaagaaagaatttaacatttaatgttaaatttaacatttttcaatttaacattcagcagcccatacatattttagtgggttgagggataacaggatagaatatttggaatttatgccatggttatgtgtcttgtactggagtcattatttagaaaatcttagcctgttgggatatcttgatctcaatttgttctttgttttttgcttattgttctgttaatttttttaactgttaatttatagtttacaattcaagcgctctgaagtttctgaagaagttacagaaaatggcactgaggaagctgctaaaaaacctaaaaagaagaaaaagaagaaagacccagagacatatgaagtggacagtggtaccacaaagctagcagatgatgcagatgacactccaatggaagagtcagccctgcagaatactaataatgcgaatggcatctgggaggaggagccaaagaaaaagaagaagaagaaaaagcaccaggaagttcaggaccaggaccctgttttccaaggcagtgactccagtggttaccaaagtgaccataaaaagaaaaaaaagaaaagaaaacacagtgaagaggccgaatttaccccacctttgaaatgctcaccaaaaagaaaagggaaaagtaattttctttagtgtattttaaacacgattcagtttttaaaagatcgatctacatacaatagatgaataaatgttttcagtgatatgaaaaggttaagtatgccagtagtttacaaaacagaaaatacttaactaggagtaggaggctttatatgctaaaaatgataaaactgactgtaaattaatttggggaaagccagtattgttaaaataccattttatacaaaataaaaagctgctctcactgtcagctctcatattcttccaggttttgcactctacataaaattatttctacaatgtcaagactagccaaaggactttataatacaatattatattactaaagaatgagttaagtttgagattttgatgatttgattttgtgtgtgtttaataggcttcaccttattacatgctattttattttgcttttttaaaaactcaggacattaactaattttaggttttcctttatcatggctttctacagtatttctattgtttaacataaaatagtttgccaaagaagtttctgaagtcttcacagctcttaaaagccaggccagtactgactgtgtggtggtaaatgctattcattattttcttttctttcttccaagtgcatgtgtgtccttgtcttcttaagtctgagaggttgctggaaaggactgttttcttgtacttgttcatttgtgcctcagccattctagttttgttgtgtgttggaggacagtctaatgaagacaggataaatgtgattctgactagtgggaaatttcagattactttttaatgattggaatgggctataagatattgtgctgaagagaaaacagttgttctgttcactgctttcattgagaaaatgtggaatgtctcttgactaattgacaaagtgtaatgaaatgacaagctggttgaagctggtaatcaatgcatggccatatttattcattttccacacacttgaccatctactttgtataacacattctgctaaggcccagggatacaatggcaaacaagatagatgtagttccttcccttgtggcatgtcataagagaaacagatgtgcatatacacacaataaataagaaaattaataattgtattaagtggtatgaaaaaaagggggaggattgttcactcactgttacctgtgttagtatctgcaaatgcatgaatggttgaactcccatgtcagcatttttgtt

SEQ ID NO: 124534 - DNA, 1077 bp, Homo sapiens
tataaaacgcatatgaggtctttttagaagttatatggggtttgcttggtttcaatgtagctaaagagtaatactgtcctccctaaggaatcctgcagtggggagttgagatggttttttttcttggacagggtggcgggggcaggttagtttatccagttagaaagttaatgtgcccagttagacagttaatgtgcaattacttatataataaagtttgagctttctcaaaacccagtggtattctaaagtgatgttttggcatgacatgtggtaagttttaattgaggtaaactttttccatattaaattagaccattaatttgatgtttgttctttgaagattatttgaagcttgtaaagtttggttcaccttttaactttgtggatgtgttctttatgttacgctctttcttccttcttcttcccagggtatagttaataaagtgtcttctagccacattggctgtttagtacatgggtgtttcaatgcctccattcctaaacctgagcagttgtcagctgagcagtggcaaaccatggagataaacatgggtgatgaactagaatttgaagtatttcgtttagactcagatgctgctggagtattctgcattcggggaaaactaaatatcacaaggttagtttatcattacgtaattatcactaggtacttaatttctatttaattctgaattttaaagagaattttattttaattttaaagagaataagcctctctaaaaatacctgtttataggaatattcatgctttcaaaccataaagtcaatataaacaatactcttaagtaatctgtaacagtgcatcaaataaatattctgaaacacagactagctaactggtctgtattttaatatttaatagttcaattttgctgagtattttctattttgttgttaactttttttttaaagttgacctctaaacttgaaactactgaaagcacaattaccttcctaactattggcctgctttgtttttacacacaaaaaattgtgttgattattgtcttctgtgccagatattttaatttctgtattattctgtatagaaat

SEQ ID NO: 124535 - DNA, 1028 bp, Homo sapiens
tatcagactgtcctgtacatgacagactcttttcttccctggcttctgcaaagtttgtgataaccatgactagtatcacaaatttccacatgtccccccttccaccaggggaccacagccctccttccccttgagaatcactctgatacttgagagacaaggctttgattagcggaaataaagtcttgataatttgtttttctgtctagtatggcagttaatttttcttcctattctctgttttctgtgtccctaacattgtcttagtgataggatgattccagcttaggaatgccacatgcggaaattaaaacctcagaaaattgctttcccgagtaagtctctgagttagggttttcctaatttggtaattcttaaagtgtattttctgtggcttctggctgttttactaaacaacatctgttagggataaattctttcccttattttatgtgaattgttagaagtttgagttcaacaaaaaatattctttgctatcaaaggccttagagtcatgtgtgaaattcaaacatatatacagataggttcaatacaattagattaagaacagtgagaaagttggcctataggagtagaggaatgatttcagctttgcctgggggagtcagggaagttttctccaacaagtagtgggtgtggtaatgaagccaccaggttttgtttgttttgttgttttttgttcctttgtttgagatggagtctccctctgtcgctcaggctggagtgcagtgctgagatctcagctcaccacaccctccgcctcccaccactaggtctttctccttaatagttataattccttaaaagctaagaaataacagtttgaaaaatagttgtcccttaatcatgactgttacatttgtagactaaagtgtcagtcagttcctaaataatgtagttgtattaacatttgcatttactatcaacagttgaagtttgggattttctctattaagtcattgactttaaaattcaggggcttcagctttaaccgtaatgcttccctt

SEQ ID NO: 124536 - DNA, 1052 bp, Homo sapiens
ccgccatcttccagtaattcgccaaaatgacgaacacaaagggaaagaggagaggcacccgatatatgttctctaggccttttagaaaacatggagttgttcctttggccacatatatgcgaatctataagaaaggtgatattgtagacatcaagggaatgggtactgttcaaaaaggaatgccccacaagtgttaccatggcaaaactggaagagtctacaatgttacccagcatgctgttggcattgttgtaaacaaacaagttaagggcaagattcttgccaagagaattaatgtgcgtattgagcacattaagcactctaagagccgagatagcttcctgaaacgtgtgaaggaaaatgatcagaaaaagaaagaagccaaagagaaaggtacctgggttcaactaaagcgccagcctactccacccagagaagcacactttgtgagaaccaatgggaaggagcctgagctgctggaacctattccctatgaattcatggcataataggtgttaaaaaaaaaaaataaaggacctctgggctacaaaaaataaataaataaataaataaataaataaataaataaatgatcaccttaagtatcagtttcttttgtaaatgaaacaaaatcacagaagatgagtagtgactcagcaaagatgcaatattgtcttattaagggtaatttttcttgattcatggtcttccacaattatcatgacctacttaggaaaattcttgcaagatggttgtaaacatgtactgaggacaggtttatttgcctcaaattatatatataaatttcttcagtcctatgtcaaacaatggttttaacctttccctgcaggtagggtcacatgactcccagtgcagaccaagccacagccaaatgtttaaaactaatcttgccccttgggcaaagggacttgaagaacacaagtccataatcacagggtaagtatcagtccagttttgctgcctgtctgatcctgaatttatttccggtttgccttcttcctaagtcctagtttttgcccaatttttatgac

SEQ ID NO: 124537 - DNA, 1026 bp, Homo sapiens
gcataactttgggtttaatttttaaagcagaatttataggtctcgaacatatagtggacttttaataacaaatatatagtgagcagtgggggatgttattaatcaaatccaaagatttctgatgtagcaaaaattatagcagtttgttttttaactgtctctggtgaagattacccacagctagagaaataatagcactgtaaaatggtcaataaataaccagaaaaacataaagtatatctagtggttaatatttgaagagttaatgtagcaacattgtttccacatttacttattttaaaagattaagaactttcattacctaaatttttatatagcaatataagtgtaacaaatttcagatatcacagtttcttttaaaaaagcggtaactattattgcaatcaaatttcaccttctgtgtattgcaatgaaatttcaccttctgtttattcaagtatcaattatttattattttcaacaacaatcaactagattaacattattttgtgaccatatcattacttcccctcaaagcgttgcatagcataagtgttcccagaattatttatgcttacctaaagtgatcggatatttaaaagaaccaaggtatcattaacaaaaaattcagccttctaaattatttgcataataagctcccaaattaattctatcttgaagcaatggagacactttctgatcaattaaaaatcatacatgtttgccctctaaactgacagcaaagtagctgatatgctttggaaaattcctgtgccccaaaataacttcttctcttgttaccaaattatctgaaatctcactacttaatggattctttttggttaaccatggtattaaccctatgattttttaaagtttttaacatggtataatggaaattttcaaatgcatacagaattagagagaatggtataagggaccactatatactcatcacccagcttcattaaccatcaactcaaagccaacttctttcatctgtgctcctgctggtacccaattcac

SEQ ID NO: 124538 - DNA, 1070 bp, Homo sapiens
agattattgggggttggtgttttcttttgttggaaagtcatggagccttcattttggttttgttgcagcttgaataaagtctaagaggtcaccaggaagcttctcagccctgagacagagtgagttatagcaatttatgtgtatgtacattcttaaccttttacgtcattaaccaacataaaatcagataaatgacaggaaaacactgattcccaaatacatttctaaaaagaaacatgaggctttcaggcttctttagattgttaaggtttataactgcttatttcttcaaatttctcatgtggtgacagccgtgccttcccataatttagttttgactcccagattttttgaatctctggctctattgtctgtgaaatggttcctaatggtgatagtcagaggagctttctttccctgaatgctattagtgacctaacagagaagggcgtgatttaacttgccagctaaatgcataactgtagctgtgtagaacaaatgaagagagcagatgctacaagctggtattcatgcgacctttaacatttcagtgatatatggctgctgtgaatgtaactgaactataaccaagagaaaagaatttatcttctctcttcaaagtatcgtaatcctaaagacattatctcactcaatttgttaacagtaagagctcataacagtaagaacttgcaaaaggacggcagaatgagagttttaatgtattttgccaaagggaaatttaccatctgcctgtcttcatgaatcacatatgctgagaataatattttagaagatactgacaataagacacagtaatttgtaaatgaaaattactgatgctgcccttttcaaagcactctgtggaataaatcagtacagaaaactataggattacaagtcaaagacttgaaataggagaataataaactatattattggttttttatcattgtaataaagatccccaatctttaaagtgttaattactttgattcaaacttcactatttccaaatgtacactttcaatgtgcccctgagataggtaggctaggaaaatacattatcaagc

SEQ ID NO: 124539 - DNA, 1038 bp, Homo sapiens
attataagacagttttagaaaagaaatgttttatgtaattctaacaactatgcatatccccttgtggttggaaataatcctttttgtgaatgattcttctcagaagagaggcattcactttatgtacacgacatcttgtctttggtcttttttttttttttaatgagcctcacaaaaagaccccctagaaatgatcaggagatgccaacttattctccacataaacattctgatttctaagagttaacagccaccgcctttgtgtttacctgaggctatactcattgccaaacttccctgacaagctttttgcccttacttattgttgtgctgatatccggtgtcagagcgttgtagattgtgctggaaacactatgtaattacatgggctttctgatctcaaagttacctcacctatttcatcactatacttttctaacaagggaacggaaacccaagatataagacatcagtgggaaattggcaccatggatattggagagccagtggcactatattaaacttcaaaatgaaagaaggagcctgatggcaaattcacttgcttccacttttgaaggtcaacgagtcacatcccgaaaactagagtgattcttcaagtgatctgtaaatacttcacgtgtttagaaatgagtgttgtaacctaatcattttggtgattataaattctcagacacctgctgtctgtcttccccctcacacctgaggacctgcacaatgtagagagactacaatagatatatggctaaagtagacaacgtgctacttctgcattttcgtattagtaaacattttaacacattttttcatatatgcaaattaaaattatttaaataaaatgcggtttcaaatacaaatctatctttttatttgaaaacaatatttgcccttacaaagtccaataagttgttttcaaccaattcgtgttttattgatagaagagtcaagtgttaaaagaaaaaaagtgagaatggcattaaaaatttaaaacaatctatttttgttatatcaaataaaatt

SEQ ID NO: 124540 - DNA, 1108 bp, Homo sapiens
tgcccaggctagtctcaaactcctgggctcaaatgatctgccgtcctcggcctcccaaagtgctagaattacaggtgtgagccatcgtgctggctgagggcctagagtttcagtagaattggagtacaggcctgagaatttagatttctaaagacttcccaggtgttattgacactggtggttggggcccacattttaagaaccactgctgtagtgcagttaacaaacattgaggatatctagtctacagttttaagttggccaacatccagaaaattccatggttcttcaagattccatcagatatactgaatctccctagaggatctgtggaactccaaacatctcacaaatcttatagccttctagataaagatgggaatatttgaaaaattagggggatggtactcctcaaatttctaggaaagcttaagacccctggagactccactgactcttgagtgcagacaatagagttaatcatgtagcctaactatgtgcttggtctagtgattttgttttgatttatgttccgcagcagagcaggccctgtgacaaactggcttctagcacccaacccttgctcaatgaatcctttgtaaaaacaggtccattttatacactcctaaatttgtagccatttcagtgagttttatgatgattataatttgctttctagtctctctcagagctgatacttttgtttgactaataagctttccttcctttttccttcttctggttttgttttctctgccaacagcagtaggcttatgacttgagtaatgtccttggtcttgctttagaattggagtataacccatcccaagcaaaaaattaatggggtaagttcgtctttaatgtgaactcacaatgctggaaagatatactctggggccaccattaaccatgatctctgcaacaaagagaaagactctctttagcatgataccaaagtttgggctcaggaaatgataccccgaaatatggagatttgacacaccgaaccaaagaagcagtctcaggtctctctgactttccccacttcttaatcctctatctctccgaaagcacagggtgaggctgttctctggatttcttttctacc

SEQ ID NO: 124541 - DNA, 1047 bp, Homo sapiens
taagatcaaattgacaagagaactgaacagcattagtcctcagaaacatctgtgatggaaaagggagagtacacaacatgtttgtagtgggaagaaatattattacaatactcgcatgttaaataatcatttgaaagtaaacaggattatcagttaggtgtcagcatggaatattaatgattaataaagtgtatcagcttatataatctgtatatcttcctgtgtaaggagctgtgtggagtgatgggggctccaaagacaagcaaaaggtgctcctggcttcaagaagcccacagggaagctggagagatgacaaaccatcatcacaggagaagttatacaacccagaaaccataaataaaagttcaattgaagccataattgaagagatgtcacaaggcagtaggtgattaattgcaaaatgaattctccagtcaataactgtaatgggagtttaaggcaaggagcaatccctccaggctggggctgtgagggaaaactttgtcagggagcttgagcttgaattggatcttgaaggatgcccaaaatgtgaatagctgtagggtgggaggggaagggaattccagacagaacagtgtaggtgagccgaggtgtagaagcaggaaaatacggggaaagcacatttgaggtgggaaaaaaaaaacaggaggcctggctggacctgacataactccagggccaacccctcaacccttggagctgctgctgtggaaaacacttcataaggcaccctggtactatccaatctcgaaccatccacctgctgtctgcctgccttcctacttctaggccagggagcccttggtaacacatgcaaccacaagatgggcaaatccttccaaaaatcttgtgttcttcccacactcatgtctgtttctgtttctcatgtgaattccttgagaagtacaatctatccaggcagcctgttaggaatatatcttttggaaagccagaaaattttaccatacttcccatccctgtctttattcttggagactttcttaaaagcaagttcctcctgttaca

SEQ ID NO: 124542 - DNA, 1164 bp, Homo sapiens
agggcgggagggaatcggggagggaaggagggttgtgttttgtcttaatgtctgagagagaacaacctccttctgggtgttgctctggagccgatgggtcgggtttcaaaccacgttttgtgatatccccctcctcccttccctccttctcccccaccccctgccggtgtgcgtggatcgcgggtttatggagattaatgttcggggggaggggggagaagaggagaggaagaagacgaataataataatcctaataacctgttgtcgtgtgtgtgtggtgggggggtttgttgcagatcagaagaaggaggaggaggaggaggcggcagcggcagcggcgatggctacagaaggagggaaaacctctgagccagagaataacaataaaaaacccaaaacctcaggctcccaggtaaaagcaaacaaattaaaaaaattcatcacgacacattaggagagagagggagttatgccctttgaatgtccagaagtaacagaataaaatgtttatccactcaaagcatctttctgagagtgtggaacttaaattgtaaattcatcaagttttcacctctttgagggtataacgctgtttaaaattacatcaggaattcagactataagaaaacggtgtgtgtgttcccaagggcattttgagtttaggaacataacactttacaaagttgtaaagaaatttccttttatttaaacttgatattataggacttgcttccttattcatatagttcttatctacttttgttcgtatttctttttgatttctgctgcttcctaaattgttatgtagagctgtcaaaataagtaaccccctggcaactactggcctccactaaatccgcccactttttttcccccccccctctcctttaccgtcccattttgggtaggactctcagccctctcctctggctttactggcagctacttgcagcaaaatagggactcctggtgaaaatcaagcaactggacaacaacaaattattatagatccaagtcaaggattggtgcaacttcaaaatcaaccacaacagctagaactggtaacaacgcaacttgctggaaacgcttggcaacttgttgcctccactcctcctgcttcaaaagagaataacgtttctcaaccagcctctagttcgtctagt

SEQ ID NO: 124543 - DNA, 2956 bp, Homo sapiens
ggatttgcagggtcaaattcagctcatttctgcaggtaataatcaagctatactcacagctgctaacaggacagcttctgggaatattcttgctcaaaacctggcaaatcagacagttccggtccaaattagacctggtgtttcaataccactgcagttacagactcttcctggtactcaggctcaagttgtaacaaccctaccaattaacattggaggagtgactctagctttgccagtgataaacaacgtggctgccggaggagggactgggcaggttggccagcctgctgctactgctgatagtgggacttccaatgggaatcaattagtttccacacccaccaacaccactacttctgccagtactatgccagaatctccctcctcctccactacctgcacaaccactgcttcaacgtctttgacaagcagtgacacattagtgagctcagcagatactggccagtatgcaagcacatcagccagtagttctgaacgcaccattgaagaatctcaaacacctgctgctactgagtctgaagcccagagctccagtcagcttcagcctaatggaatgcagaatgcacaggatcaatcaaattctcttcagcaggtgcaaattgtaggccaacctatcttacagcagatccagatccaacagcctcagcaacagatcattcaggctattccaccacagtcgtttcaactccagtcagggcagacgattcagaccatccagcagcagcctttacagaatgttcaacttcaagcagtaaatccgactcaggtgcttatcagggctccaactttaacaccttcagggcaaatcagttggcaaactgtacaggttcagaatattcagagtctttcaaatttgcaagttcagaatgctgggttatcccaacaattaaccatcaccccagtgtcttcaagtggtggcacaactcttgctcagattgctcctgtggctgttgctggtgccccaataactttgaatactgcccagcttgcatcagtgcctaaccttcagacagtgagcgttgccaacctgggtgctgcaggtgttcaagtgcagggagttcccgttacaatcactagtgttgcaggtaagttctgacatctttttaagtaccttttaaatagtttttcataacaattattgcttttctctcctaattctaaggtttgacgtagacctctgaagtaaacacacaatcataaggaaccagaaatagcaatattatactaacaaacatagctctgtagtaatcaatgtgacatgttcacttttgtagattttataataatgtgttaaatttgttagttttttaaaaagtattgttttatgggacagagctttctgattagaatcataattgccttctgtaatttagtggtcttatttgagtacattccagctcttcagaaagaaccctagtcgaaatgatatttatctcttctttgagggaaagtagttttaaactgaattggtatatataattgtgagtctgttgaacttttaattctgtggtgtaataaggctaacttttttttagtggaagttatttctcaagcttcagcatcttgtcgcccatgcttttgtgttttattacactggttttaaactagatactgatgcagttgagagataattttaagttgtaaattgtttggttaacttttatgcctacttttatgctactatcaggatttgaatgaataatccttcatttataaaattatatttaattaaatcatggtcattgtgtgatttgtagatgtttaatgtaaggttggtggaaagcaatgaaaaatgttgacagtaaaatgtcactaatttgaattaattgtggtaaagttatttttaaacctattgtaaaagcagttgttatttgttatgcatataaatagctccttctgaagtacttgggaagtagttttaatcttttttggaccagtcttattgtacctaataacttttgttttctagtaattaaacccttttcattgattctgatttgatgaaaacctcgttgtgttttagtgcctttgatacttccagaccttgttagttaaatatttctattttgataatgtgggataaataagtttatcacttttgaatgatctttcttgaaacaagttgcagaaaaattacgctagggttcttcttttatggttaatacctgaagtaggcatatatatgtaaaattgtaaattgccagataaagccttctgattcaggagaaccgagattatattttttatctagataccagtgcttctaggccagcgctatccagcagaactgtctgtgatgttggaaatgtttatgttttctatctacctagctacatgtggctgttaagcagttaaatgtgtgtggggcaactgaggaactgaattttaaattttatttaattttaatttaagtagccacatgtggctagtggcaaggacagtcatctagttagtgtttccattgcggtactttttctcctaaaactattacagcgtaattacataaatgtttctctggattacaatccttaacttgctttatttctactcctttgctaaaaactttgacaataattgtagtatttcagaaaagtgtttttggtgggttgaatgacagtttgcattgtcaaagcagaagttacttcacttccatttcatcttgcttattaagcattagtgagttgtgattaattaagagaattaacttataatttaggttagaagtaatcaatttttctgctctctagttgataacttttgcaatccagaggtttttcccttagccattgtgagggtaaagaaatgttttggccaaccaaacttagattaacttgaatggtgcattaaaataaacacaggatccagtttttggtactgtaagttttgaattgtgggggtcaagggatttgcctttcaaacaaactttccaggt

SEQ ID NO: 124544 - DNA, 1048 bp, Homo sapiens
ataaatactatggcagaggggaaagatactaaccataaactctttgtgttttacccaggtaatatattttgagcattacttctttggatgaactgcctgtaaaacagaaaagtcccaagaatcgtttgatgatcactgtaataagattatactgtttttagatggttagtacactaatacctgattctgtgattgcctttgctcatattttctgctctcatggaagattgctttttaccgttatttcctgttttatccatttaattgttagtggtcctgtttactaactttgtcctcttaccacttctcaactgcatatccatttctttgggacttattccttaaattcctactaagtctaagcacaaggctaagttctgagagcataaaggtagaagcctttgccttccaaaaggttatgttccagttgaggagacagaatattcattaaaataaaaggtaatgcatagaagtaatacaagtggcatatgctaaaagagagatgaatggtaaaagatggtaatactaaaattaagagcaggatgaatcttctgagagccagggcagaaataaaagactccatgaaacctggtaggcttgaactaattctttgagaaaaggagagccctaacaggaataaagaaggaaggcattgtacaaaagatagtgtgtccggaattggtgggttcttggtctcaatgacttccaagaatgaagccacggacccttgcggtgagtgttaacagttcttaaaggcggcatgtccagagtttgttccttctgatgtggggatgtgttcgaagtttcttccttttggtgggtttatggtcttactggctcaggattgaagctgcagaccttcgcgatgagtgttacagctcttaaggcagtgagtctggagtcgttttttcctcccggtgggttcgtggtctcgctggcttcaggagtgaagctgcagaccttcgcggtgagtgttacagctcataaaggcagtgtggacccaaagagtgagcagcagcaagatttattgcgaagagcaaaagaacaa

SEQ ID NO: 124545 - DNA, 1041 bp, Homo sapiens
tgtagagatggggttttgccatgttgcccaagctagttttgttttttaacagacgtaggagaaatggggaagccagtttcgggaccatagtattgactcagatatcagtgatgggaagtctgaacttgagtgtaaagtatgtggttctcaagagtcttaaaaaaataaaaataaaaaagaatttgatgtatgaatggagagaggaaaaatattttaagggtaattctgtagagtttgaatctggatgaccatgaaagtgcttgtgccattgaaagaaatgacttccagaaaatgaaagtgatgaacctgaattttgatatttgttaataagtctgagctaatagtatgttgaaagtgtctagtttgtatctggagattggtcctgagaagagatcagaatcagcagtctagatatgaaagtcttttgcatggagatggtgtagaaattatggcagtgtatgaaattgaggcagacagttttgagtttgaattgcagaattatgagaactgaacttagggttacacctggtctttgggggccaaaagcagaaagttaagaaaagtgagaaccatcagagaaatagaaagagaacagggtagtatgtcagcagctaagaggaatctcagatggtattgaatgttgacttgagagtattgagaaaagttcagcaggttttgtgtttgaatcatttgataagacctaagaactgtgctgttcaatatgaaagccgttggtcacatgtggcttataaacctaaaattaattaaaattaaaaacttatttcctcagttgcattaactacatttaaagtgctaattaccacatgtggcaagaggctatcatattggacagcactgataaataacttttctttttttttttttttgagacagggtctgtcacccaagtgaaagtgcttctaaaatgagattttaaaaaggtgagtcaatgtttggagaaccagtcagatgctgataatagaagggagaataaagatacttttgggtgacttctcagtaaattaggaggcaaaatcatct

SEQ ID NO: 124546 - DNA, 1107 bp, Homo sapiens
tgagtaaagaagtagcctaaaagatgacattttaaggttttcagtgtggataacaaggagaataggggtagcatttactgaaacagggacattagcagaagcaagactggaagatgaaatcattttttatttttaaactttgatttattaagcatatgctattgagtggcactgttattgagttattaggcactgttacggtactagagatacagcagtgaacataataggcaagatccctactttcatggcactttaccttcagaagtgaggtgaagaccaaattataaaaggacaaagtaatttaagacaaataagacaaaactaggtgatgatacagtgatatattgaggggagcttttagatgggatggtcaggaatggcatttctaaagaggagagatttgaactcagaccagaatattacaaaggaatcaactatgcaaagatctgggtgcaaaggcatccccacttagactggagagtatatgcaaagtccctaagaaggaaatgagcttgatttatttgagggccagaagagaggccagtatatcaggtgcagagtgagcaagggagagactaatagagatgagctctgagaagtcaatagaattaaacttaagtggggcctcggaggtcttgctctggagtttggtggcttactgatggcagtggaaataaagcagtatgttgaacttagctgtctgtgaaacatctagatgaagtcaattaacgggcttcaatatacaaactcaaatataatttgcctctgttattcattgaaataactttccaagttgtttaggcattgaacaaagaaatgctcacaatatggaggcttgaggagtgtgtcaaggacatggtcaggggaccagagggatcaggaatctctagcagttcttccccacccctcacccccagacttagctttgacttgaaactcatctagcagttctttaccaaaataaaggtcatcttaaatattattgcgacctttaaagtaatgactgttatataaatgttatgagaaaagtagtcagagaatcacggccaaaaatacctgtgtcttcaggggatgtaaagggtacttaccaacttaaaatacctg

SEQ ID NO: 124547 - DNA, 1794 bp, Homo sapiens
agtagctgggattaacaggcgcctgccaccatgcctggctaatttttgtatttttagtagagacagggtttcgccatgttggccaggctggtttcaaactcctgacctcaggtgatctgcccacctcggcctcccagagtgctgggattacaggcatgagccaccatgcccggctaggaaagggtcttactaggaaagatggccaaaagtttcatatgaaaaaaattggattataaaccagtaacttaaatattaataaggatattttatgttttaaaaaagtatttacacagaatcataatcagtgaaattgaccatttgaaaactaaaagtttttacctacctgctcaatttattaacatcattgctttggggactgtttgaatataggtacgtgttttcttgtgcattctctataatttcaggaaaagtactaatgcgaattctcttccaaaattgtgatgtttcttgtatttttgatgaaggagaaatactgtaatgatcactgtttacactatgtacactttaggccagccctttgtagcgttatataaaactgaaggtcttttgtgctttcagtttgtataaaaaagctttgagattaaaggaaaaaaaaaatttttacactgtggttataaatttcaagtttcttaaagcttttgtagacttgtaacagagtctttaaatttaagttggattttgtaaattgttttgtatattttatttaatgtactcttaacaactgatgtatctggctttaaaacatcagaattggtttgttgttttgtttggtacagaggagcatttggtagtgttcattttaattttattatataggagctgaaacatcaaatatatattttatctatcattatgctacacaatcagtgctataaatttttttatgcaaagaaactttcttaatgttttaatcatgtttcctcagagtgacactttttgttgttgttaataccaagtatgaacactctgcatcattattccatgaaccagttctaatgcaaacctatgtatgtccattagaaatggaagttattttttaatcaacaatgaggcctattataaatttatcagatgaatctagatagctttatagcatataaaatatgttaatttgtgttagcaggtgcacatttcaccactgaaattagaaatattttgacagtctgttctgcataccattctgagtctacttttctgtctttagaagaatcgtaaatttcagtgtcctttatttgactcagtgggatatagctgttataagtaatagggcacagatgtgcagtagagtcttgtttaatggcatttcactgttcattccctttaccaccgttataaaacttttctttattgtaattatcagtgcaaagctatgtatttatcatggtaaaactccagtgttagaatagttttttcttacagtatactttctttggttaggtttgtgtatgtgttgctgattacattagaacttgatgttaagtcatttatcacactctcatgagagcagtaataaaagtgtgtaatctaggagaaaaagttaatttgtcaaacttagataagcatgatgtttaggtcctatttttcaattttataactgttttattgcaacaatatttgtatttaagtctccattttaatgccttgtggtgtttttttatgcatgtcactaagttgtcatcccacataaattgatgtgcagcatagggtattaaatctacataatgattttaaaacagaaatagttgatggtaaaatgtaaatgttttgcaaaaa

SEQ ID NO: 124548 - DNA, 1075 bp, Homo sapiens
tgaaaccccatctctactaaaaatacaaaaattagccgggcgtggtggcgtgcgcctgtagtcccagctactcgggaggctgaggcagaattgcttgaacccaggaggtggagtttgcagtgagctgagatcacgccactgcactccagcctcggcaacagagcgagtctcttgtctcaaaaaaaaggataatgcaattagaaaatgtcattgtgtttttcaatttttaatatagtttgcttcttgtacttctagaaatttcagccacatgaaaaagacaataataaagaaaaagggataaatcaccttgaaaattgacaaaagctgttggtgtagtaagttaggaaagctgaagcagtgctaaaagcaatactaatagggtgtggtttacaatgccattggtaatgacaacttgaaaatagaaaaatatacagtattgtttattttttaattaaaagttcagatgcttaatttcaggggtgcagagacttcaagtgtcacagcaaacttgaaatactttattcctttgtgaaactgaataatatattgctatatttactgcctgaacagtaatgtctgcttaatatacacacaaccaacttgtaattcggtagcaggacttttaaggcatgtattttccattcttttaagattggctgattagcataaaccttgggctctgttcctcttagtaacaggtggcaatgaaataatttatttttggatacctgagagtaatgtcaagcagaaatagtggaaggaaggaagagagaaaggaaaggaaaaggagcataaaggcctatttataatgcagtgggttgatctccctggttaatagctaagcaccgtgccaaaagagatcaacggagagtctgaggatttcaggctggattcctggttcagccacttagtaggcacacaaccgtgggcaagttattgaacttttaagcacttatttttttctacttcatagaataaaagagcaatgcttattaatgttaagcattatgaataatacataggtctgttaagatcaaacaagaaaactatattgagtaacacatagttgtgttta

SEQ ID NO: 124549 - DNA, 1033 bp, Homo sapiens
gaaagaatgtatagtggggggtcttccagtaactcattgaaggagagttgctctttttgtgggttttctttcccaaatatgaatagaaatgatcatgatatttttctcccagaagcagtgacatttataccctactatccagtttgtttttacatgagttctcataaaactgtgagtttctaagttttggcttttttttttttttcagtgactttgcagggttattgcttctctttgtctaaagcttagtttgaaagcaatggcagaaatatttctcaggatattgtgtctgtttctccaccttctctttcacacactcggtagataaaaatcaagttgtgaagatctgtatatgctggcttttgtatttggtatgtggagcacataaaaaccctttgtcctacttggcaagaagaaggttactcaagctgaatgctttattgtaatctcccaaatcctgtggatagcgcttaaagattaaataagttttcgtaggttatactatcatttttttttctgacttttagaaaaaaaatgatcatttacttgattttttttaagttgtatttttaatttgagaggatttcacatgaactgtaatgtttgtgttttcagccagtgcacaaagactctattagccttttcatggcacatgttcacaccactgtaaatgaaatgagtaccagatattaccagaatgagagaagacacaactataccaccccaaagagttttctagaacaaatatcactgtttaagaacctgttgaagaagaagcaaaatgaggtatccgagaaaaaagaacgcctggtgaacggcatccaaaagctaaaaaccacagcctctcaggtatgaccaggatgtgttattactgagtaatatttatgctgtttaacagaaaaatatatttccttttgaagcactactaaatccatttctataagatgccagctggtgaaatttacagtttcatgacaccaagaatacactgctactgctttcaaaagcctacaatgggattggccgactcaca

SEQ ID NO: 124550 - DNA, 1721 bp, Homo sapiens
aagaagactcagtttgcagtgtgcatggggcagtgtgatacatgcacacaaaaggaatgagccatcacagagcctgggctaccctataacacactcccattcattgattctcccaaccatccccatttcccagagaggaaatcaagactctgatgtgaatttgctgaggtagacatttgattttaatcataattctgaactcattttagtaggactctgtagcctgtacttccccagggcaccatactttccacagtactgcatcacatcattttatatatgatgtgaatttatatacctgaattttataattataaataatgatatgtgcatttaatgaaaaatgtgtgtgtatataagtaccatgtataggccatatatactaagagtcagaccgatcctaccttcccaggactttgagctactcacagcaaagtctgttgtttaggatccacagaccctgagagctcaatacacagttacctactgagtgaaaggctggagaaagcgggcttttatcgtgcccatctacttcaataaggctggggcaagagggtagacattcaatttagggggaagttttgaacaaaggcaatgtgaatagcaataacaaaccctctaaacattagaatgtagaacttcaaaatgtaacaaaagaatttatgagcctgagtctctgaccagccataaacacagagtcaatcaagtgcttacaattttctaagtaacagtataatctcagatttatttttccctgattgctctttagtttccagggaccattaacccctctgttttaattctcccagtctcttgcaccgtaaatcctgtctgtatgtgcacttaaatgtacagaggaatgttatttttaaactatcatcgaatgtagctattttctacctagattttctgagtcagtttctgaaatgggatttgtctgtaactgtgtatgctacactgtggtcccctcactatcacttggagacaaagtgaatattctttaattcattcagtaatatgtacccaccacccagtacactacaacaaaccttagaagtataagctccatatgacctcgttattaaggaactcagagtctaaagaggacaaagtaagtgtgaatttccacacaatcatgtgtgtaacagtggttttctctttccttcttaaacctgcaatccaggttacttagaaagcctatgtccttaataaggatgctcgactgctttctgcgaattccaagtgcatttaaaacattcgacacagcatttttatttttatttttattttgtaccgggaggattttcaagttatctaatccttcatattgccagaaatggaaatcttgacccgatgaatatgggaaggaagaagttggactatttcaccaccagtatccattggcttggctttatttattcacatttgtatcatttcatgtttatatataagaataatgaaaatttaaatgtcacctggctcagggcgaccaaaataaaatggtacaggagagttaaactcattattattagtctatgatggataaagtagccagaataaaaatatgggcaaaatatgaataagaaaaccaaaacctagaatccacatatcccaactgaacattattccctaaaacaagtagttggtcttctctgtttgtgcttactaggaaattgaaagaaatttcagaagccacagttaatctgtccttaataaatcaa

SEQ ID NO: 124551 - DNA, 1018 bp, Homo sapiens
tgaccacagtttaatagaccacacacatcgtttaacctgctcttggtcattggaaatttacactgaacaaagtgcaattaactgtagaacagttttatttttattaaaacttgactgaacaaaaggggaccatcaacattgtagacactggacactggaggccttacagagtgctagcctcttccttcaggactcacctggggcctgctgcttttatattttgaaagagtttaagggctaataatttaatttgttgtttgttaaaaattaaaatctccgttctttccggctgcattgcttttgcatgttcacatatgatgtacttttatgatgtacttttttttttttgagatggagtcttgttctgttgcccaggagggagtgcagtggtgcaacctcggctcactgcaacctttgcctcctaggttcaagtgattctcctacctcctgagtaactgggattacagtcgtgtgccaccacgctcagccctgagttagtttctagtatttttttctgactttcactctaaggatagcgttgaaaaaagaatgcacgtgtgagttactaaaaagttagaataatgtgcatgggaacagtgcagcaacatgctagaaaatcctcactgcactccagcagaggctagaggaatgccagtgttaccttacgcttctagaagcagagccactccagccagaacccattttgcagtcttctcttcgctcttcagcctgaaggtccagatgtagctggggcctctcagtttggttctatacacagggcactcgtaggtctgtttggtttcttgtctgtccacgggggtggcttttgcaaagatgaccggcatagggcatgccagctccttgagacgggcttcaacaatggttcctgcttgggtgtcccagcgggcgcctatggcaaaaacacagcggttgcaattgtgtggcagcttgctactaatgataatgatcaagtaagttgtttgatgcaataaacattcaacattctggttttgtcata

SEQ ID NO: 124552 - DNA, 1028 bp, Homo sapiens
ggaggaacccaccctgtcagtgttttgcttacagccctcatgctctgaatggaacccatttctgtcgcgggtatgatggtgcacagttcagtagtaggttgcctgctctctgattttattcatcaaccaatttcttgcacatttaaaggaaattcagagggaactcataatatgaaggggaagcttttcatttttcatgttttttctcataatgctgtcagttgttttaaatgcatgtcttttttgtgggtctgtaacagtgtctttgtgctttttcttgctcttattttattaggtcgtggagtcagatttgagtgatgatggcaaagcatctttggtgagcgaggaagaggaagatgaagaagaagataaggctacccctagaagaagcaggtctagaagaagtagtattggtcttcgagtagcctttcagttccccaccaagaagctggccaacaaaccagataaaaacagttcttccgagcagttgttttctagcgcacgcttacagaatgagaaaaaaacaattcttgaaagaaagaaagactgtagacaggtgatacaaagggaagattctacctctgagtctgaggatgactctcgggatgagagccaggagagttcagatgctttgctgaaaaggaccatgaacatcaaggagaacaaagccatggtgaggcttcacggagggcgtcctgggagttggcaccaggctctggcagcagttgctgggctcccagaaccactttgctcctacagctgctgctgttgctttggcttctgtcaagaaaatatactctgggtattgtgtatccttttacttttccagaacccagagcaactattacatgatcagctctggtttgggaacagaaagagattccccagcaccatttttagcccctacatggtgccataatgctgcttactgttgaccaagctaagttctaagtatatagttgtgttggggatgagaggggctgaacaactagcccgttcccagcagagtaaagcaggggaagtgggat

SEQ ID NO: 124553 - DNA, 1217 bp, Homo sapiens
gctcaaagaagtatataattaaaggcggggaaacgcagtggggtagatacagattccccgccaagtgtggtgttacaaggggtcattgctatatcagagatggggggaagagacgtcagaggaaactggggacagactctagtcttgatgaggtgtggcgggcttgcagggggctggtctcgtgggtctccctttggcctgcagtttgttatttcctctttctttcaagtatactattaagagagttgggtttccatctttgcactatttcaaaagaaaaagtattagaaaatgccttttcttaaagagtcacattgcatctttccttctgctcacttgccacctagccatggttgttcacctctcacctcctgcacgagagaaattcctgggggtgaccttgaatgagctttccatcaggcccccatggtgtctgctcatggagcaagtctaggctctctggtggtgggcggtgggggctgagagaggccccagccttttcctacagagaagctcgctgttggtgaatgggaggcatgctcacccacttggaggagactccggctttgaaaggctgttggaaagggaagccaacacgtgggagggagccaggttttctcctcatatcttctttccatgtgttttggttctatgtgaaagcagacgtgtctggttgccagctttggcaggagaagctgaattccatgagcacttaccagtcacattagaagctgattgagactacacccaatttttaaaaattgtctgtcttgtaggtctgaattttgtaagctttagaaaatgtgtatatatgtaatatatacgtgtacgtatgcgggtttttttgagagagggtctcactctgtcacccggctggagtgcaatggtgtgatcttggctgcaacgcaggctggagtgcattggtgtgcagctcactgcagcctcgacctcccagggttgggtaatcctcccaccttagcctcccaagtagctgggactacaggtacatgccaccagacccagctaatttttgtattttttgcagagatgaggtctcactatgttgctcaggctggtcttgaactcctgagttcaagtgatctgcctgcctcggtctcccaaagtgctgggattacagggtgagccactgtacccggccagtgtttttttttttttgtggtaaaatacacataacatgaagtatatcatttcagctg

SEQ ID NO: 124554 - DNA, 1057 bp, Homo sapiens
agtagctgggattacaggctcccaccaccacgcctggctaatttgtgtgtgtgtgtgtgttttttttttttttttttttttttagtagtgatggggttttgccatattggccaggctggtctcaaactcccgacctcaggtgatctgcccgccttggcctccgaaagtgctggaattagaggcgtgagccactgtacctggcctgctttttgttactgtcacttgttttccctgttcgtgtccctaaatgcagatgttctctaagggtttgtcttcagtcttctcacttagtgaatcttgtctgttgtcctgctttgagctgttactgtattcttttgtggagcttgtcttctctctccagccccaggtggtttctgactaccagttggactggtcctggttgctaagggagatctgaaactcacttctccttcccttggttgtctttctggcttccccctttccccatcttgatttccatcttttgttcttggccttccctcccctcttccatctccttgactcccgtccaggagttgatgaaacttctgctgtgttcctggtgtccatccttcccttccctctgcagctgccgtagccctcgtagctcttacccgaatgctcatcccttcctactaggatctgttataggattgacctccggtcagctcctcccttagccctccatctgagcacagtcaggcggtggggagagcagagcctgttggatccaccttgaggagcatttgagcaaggcagaacatgtctaaagggccgagcacagagcctggcaggcaccgggcattaagaaacagaacagctgcttctgctgctatgatgactccttttgtagtcaggtgtgttctccccagggaggacagtgtgccaactgcttttcatacagatactgcatttaatccacagacctccctgggaagctgcagttttgcaagtgatgaaactgacgttcaggaaggtgtaatgacttgcccaaggccccacatctgggaagtaccaagctgggatgttccaaatccagggccaccacttctcagcc

SEQ ID NO: 124555 - DNA, 1027 bp, Homo sapiens
gtcagttgcaccttgttggaaaacactgagaacagacttgtccaatttgataatcttttagactccagagaaatcttaacattggcttcacatgttctatctgctgacctccctggaggaggaaattacttcacacttcccaagtgatttggttcacttcactcccaggatctctgccaaaattccagttcattaggtactcatctgctgaatagctcttctaagacctgtgtaaatacatatctaaaatgacttcccatttatttcttctcttttaaacataacattgactaccctgtggggctttttattgtggtaagatatacataataaaaggtactatttttaacctttcagtgttactaagtatagtcacaatgttgtgccgccatcactgatctctcatgagctttttcatcattttaaactgaaactctctacctactaaacaattacccctatgacctcttcctccagcccctggttacttctgttttagtttctgtctctgaggatatgactatcctaggtatctcatatgagtggaatcatatggtatttgtccttttgtcactggctcatttcacttaacattgttattaaagtttatccatgttatagtatgtatcagaattttttttcaattatttctcttttgagacagggtctcactctgttgcccaggctggagtgcagtggtgctatcgtggctcactgcgccttgacctcctgggctcaagtgatcctcccactgcaacctcttgagtagctgggactataggtatgtactaccctgcttggctaatttttctttttaaaatttctggtagagatggagtctctgtgttgcccaggttggtcttgaactcctgggctcaagcaatcctcctgtcttggcctcccaaagtgctgggattagaggcataagacactgtgcctgacgtcatttcttttaaagtctgaataatactcttatgtgtacataccatctttatttactcatctatttatgttgtcggttgtttcc

SEQ ID NO: 124556 - DNA, 1110 bp, Homo sapiens
ttatagtgatacacatgacctgcattcacttttttctagtttccttaattatgtttagaataaattcatttccctagaccgagaaccacaaacaggtagtgtggagcatacaccgaatttagaagcatgtggataaggtcagtgctcacactgcctagtccacagggagaggatgctgcatgaatatatacttgcctctgagtggaggagaaatcgtggcatgaaagagagagtaccagtgatgacttcttatccctggagctgggctttcactgctacccatatcccagccctgcgagtctgttctagccagcacagacaccgcagatccggaactgaatgttcctaaatggcgcagccaatccaggcttttcagaaactgggcaaaaacattaaaatggggacgatcgggtcttccgcagtggtccaacacaggatttcttttaaatgtttcaaaaacatgtccttaaaatttcagcctgcttcttagcgagtgggccagttttgcttaaaactggtgggggggcgggggggaagtttttaaaaattgccaaaaagttagatgcaaatgtattactgtataaagcaaagctgtatatactaaacattttttagcagagtaatatttatttgcatagtctatttattgtattcgtatcacactgttattaaatactgggatgaaatcagtgacctgaagcaagaaatcttgccttttaatgtatcattaattagggctgctgtgatattgtcagcttgcattaacaattagaagatagagaacccgccatcagggtgtctacctaacttctcagggactacacttggtagttttccaccatttaaagaactggtaaatatgaaacatttgttgagttaccagaattgccattaacagtgttttctttcccatattccatgctttctgcctctgtgtatatatataatatatatgtatatgactgtgctgtgtatttatcgaagctagtaagcaataatttatatgtaaaaatggccaagcaatataaggttaaaacttatataagtaacccttaccttatcttgtattttcaatttttttttaaaactgcttttccaaatatgagacta

SEQ ID NO: 124557 - DNA, 1028 bp, Homo sapiens
ggccagtgtaatcatataaggccatcctgacattgtttctgtgtttcaaaatttggatttttatttacattagaactacattgctcctagtagaacattacctttaggggactaattttccatggagaactatttcagcatattgcatgctgctcagaccccaagtcagatatgcccaccaagccagatgaagctacacaaatgtggtatttaaatgcattttgtacagtgacttcagagtatctcacatgacatgggtgtaaactggctggggagaaaatgatgcttgttcacctcttcctccagccgtggttaggtggtcctaggggtagcagagggaagggaggattttgtgcagtcaagatttgcttttccatccttgtcttctgaatgtctaaaatctctgcatctttctgaagtttaacaactgtctccagaggtttgccaggcagcagctctcagaagtttccaaagctttgcagaatcttagatctggaattaaagaattcaagcccgaattgtgagaaccagatattactcaacagaaagctctttctaaggaatctgagctgttcactggtggacagtggtggggcttgagtgctccttgttaataggatgggccatgcaccctctctggatattcaccaaggcctcttcagaatagggtttgttctggctagaagcgtggtctagaagatggctaagctctttgccagctctcatttggagttttattattgcataaaatcttcgctcactctgcaaatcttacgtaatctggcaccttcggcaccaggtggtgcaggggcacttctaagtgggctctttttgttacagcacaactctcagacagtcctgtgggtctttggattcgtcagcattccagcaaactagccctgcttagaagttagcacaagacagcagaatgcaggaccccgtaggcaaaatcacaaccttgctattaaaaaaaattttgttttacatacacatttgcaggtgttccctagagtgtggtgttttgaatt

SEQ ID NO: 124558 - DNA, 3128 bp, Homo sapiens
tcaaacaggtgggatggtataaactttaacacctagtgtgtttacttgctaaaaccaggaagccttgtttctattaaacctaagaattataagccacccatgtcatacaggtcttaaattatttcctcataaaatacatttgttatagaggagaaaaaagggggtttcaccaagagaaaaaaatgctataagaaaatgctcagcctcctgcatttcccttccctctgctcaaactgagctccagcagctcaccctgcctgtcccatgcataatctacaaagcaacaggatatgatgtcttcaccactcacctttccattgttttactgtagtgcagtttggccagtgttccccagcctcaaatggtttgcttgtgtgtgtgtgtgtttgactgtggtgcacgggcttgcctcgtggttcatgctgcttcatcctggttccttatcagcacggacgctagcagggtgtggatgtgttcacagtgcactaaagcctcctttggcccctcgattccttgactgccctagatatgtgagtggaaaagccccttgtcttgtccttctctgggtagactttagtccatacacatactttctgaagctatttcgtctgttaaccacatcttagagtctgttctgttgtatctgttcattcagttgctccattaaatttttttttccaaaaaatgagaataccaaagaattgtacaaaatctaaacaacagaaaaagagtgattgcattcatatgctaaatacattatcagcgattttcaacgcttctagactgagatataggacccagtgctggccatttaaacaggtaactgctgtgaaaggctacctaaaagggctcaggaaccatctgtcctgggtccgaatcctggctgtgacagttaacttgctgcgtgactgtgctcagtttccccatctgtggaatgagataataacgtaatttctaaataatatacaatgttaggtaataaatgctataagtatcctgccagtctgattgcctgacctgaggaatccattctgagctgaaaaagcatttctactgtaggacaaggacacctcttatgggattctgactaatgagaacccacctagtacatttactcagccttagtgtggggttttgttggtatgtagatacagcattactgctctcctgagattgtcttttttccccctctaaacaacaggtgacctgtctccaaaagagcatcaagagttaaagtcctatgttaatcacctgtatgtcattgacagccagcaggctctgtttgagctctcacacaggatcgagcctcgggtgtgagccccactgcctcacctcccctgtatctgcagcactttgagctacgggaatgtctatgccaagcacgttgctttcctgtgagaaaagaagttgctgagttttatcagtataacccaagacattcacaggaaagccagccaaagcgtgttcaggaagtgatgtcagccaccagagagggggagaggtttctccatgctactctcgggacaagaaggcagaaggagagtcagaagcattcttgagatggagaaggctggtttcttatgatcacattgttgatccagtccagttttcaatatgagatgtgccagcatcaagacaagacaacgtcttgacatgcaatgaccaaatatttcattaagagcgtgcatgaaacaggaaggagtttttactttgcctagttttagattactgtccataagctgtcaaagaagtcattcttttgaacacctgatgacagagacagcatctctagatctccagggaggagaggtttctgttgatacaacctgtgacatcaccaaaagccacttgtgtctagggagttagtgaggactgcagctagcatccatgctctgatgggcagatgaacaatgtcaaggtgtgcatcactttgcaccacaatcaactattgacacatgcttgcaggtgaaattagtttctgtacaactgatttgcagctataggcaaggtagatgaagttgctttgccagtaaggaaaaatagtaatctttaagaaattgactcattgtttaatttctggggattttctttatacttctaagcaggctcttatcttttattggacataatatgattttgaaaaagcacagtgcctgacacattgcaaacactcaccaactgcttgctgaggtgacagagtcacaaaagtctgcattcttgtgcctgatgatgcattttgcgtacctcatacaggctccttgcccacactatggaatgacagcagccagtgcagggaggttaagtgacatttaatgagtgaagcacttagcactctctaggtaataagatagtggtaattactagtgttttggcaaatgaaaaatgccctgaaatagccaaatgtctgattaatgttggcaacttagaagtcctataatccaactaccagccaaagcagggagcctttctataatttgcctttttttttttttttttcaaaatctgagtcttctaaaatcttattattcccatttttaccaattgaggctcctgtagcaaataagacctcttgatattttcaaggactggttagaggatttctttcaaccttcacatgaacaaaacagcctatgggtcaaaataatgaaatccacccctgcctgctagatacttgtcaccttgctaaaatgcaagggcctggtccattcattttccaaatgcaggagtcttggtgcacttctcactcttcctgcctgttcatctctttcatgcccacacagacctgtttcctttttgtctcatcaacgcctcattcatcctcattactgaggcgtgtccaatgctttttgacatctttatagcagtgctgtttcctgggctcaggaaccacactgagcttgagatactgctggaaggaaccatgtggagagaaggtttgggagaactttgagagagacttagtttggcccagcatgtaaaacttcagtcctgaacatttatagggttttatagaagggcatcctccagggctggtccattcagagaaatgctgcatgctgccgtcatggaatgtggcccacaggacaccagagccgtgagaaccggagagcagacttccctcacggctg

SEQ ID NO: 124559 - DNA, 1029 bp, Homo sapiens
ctctcaaatatgccaagactgccaactaaccatagggctggaaatgaaggaggtctaaatgatatgacttctattagggtcaatcatcatacccttaattctttgagaaagtttaagggaatagcatggcataaataatattttaaattcctaaagagaaattatattttataaaagaatgaagaaatgggtgcagttcagcatgcacacagcactcacatagcgcacacgcaagcccgtcaggcaggcacgggctcttcatttcctcagagggcaggctccacacctgggactagtgagctcctggtccacagcatgcctcatgctgacccctccttacacagagtagacaggataaaactgtgtccaggacaaaaagcagttttatgtcatatatagcattgtgttacacttggatgctggagaatgagactgacctttctaggagaaacactattttcaaggaatatttcttagtaaaggactgggtttctctaaaggtaaaacaggatcatctttcacgataatgaaccaatagaacctaagtgaattaacttgtgaaaagtcaattcctcatgatggatattaacttaagccagctaacagataattcagtgtattatctttatctgactgatgcaggccagtacactgagtcagaccccatgaaaatccagaagccctcatcaggtctaatgagatttctgttctttatgctacattccttgctgcctcagctactggaaatgttttcatctcaaactgtttcataaaaagaaacaaatggtttcttttcttctctttatccctcgatgttaagagcatcatcttttaccctgtctaccccctccccctttagaaagcctaaagatgaagaccagaactcaggtttcaatgccacacccactacccagccttacatcagtttgagccttgcacaagctacgcaaatggcatatgatagaaatcaatgtgacgccagagcttaaaatgagaaaactgacctgggaaaagtggtaaaatctgggg

SEQ ID NO: 124560 - DNA, 1012 bp, Homo sapiens
acacataatggaataattaagttatagactagctttagtttatattaagcagattgaagtcaaacatttcattatgagtgcaaaatatatactttcagtaaggtcacactgtttttacacacacacatatacacacacacataaattatgcacttttacatcaaataacacataaatccaatttcaaattgcctctccaagtgcatggaatgatccataatgtttaggaaaaatgaataagttgcattgtacctagacctcttcagccctgactcatgatccattcctaatgatacatacatctttttgtttttaattttcagatgtaacatttattcatgaaggaaataaaacttttttggataatcttgtcaattttgaaaagctggtacgtaaatttcattacttctcccttttttacagtaacagaaatgtatgcctttctttcctgctctaggaaataaatagttttagtacttttctccattggatgcatggcgaattcaaggagcttatttgcttcattcaaggagcttatttgctgcatgttgtacgctgccaacaaaatgtattccaattaacaacaagtatgttagcaaggtttttgtgaaccaaatatgaaaatctgcgttttgtttttaaaaatggaatatgataagatgaagaactgagggtatattattgaaccagagctaaaactgtaaggctgctgtcaggaggaatccacactcaggagattatgttttactgctttataggcatctctcagtgtctcagcctgcatgctttcaaggcacagagggaaaaagttcctctcctggggatatatgtttgtctctcaggactccaagcttaaatgtgaggctggaatttgcagggtcttgtgtgaagggaagggccactcctttatcagcctatggacaaagggtgccatccctgagcaccacggccagagcggctcaggcaaagtaccctccctccttacaagcaagaggttcccagggcaatcctc

SEQ ID NO: 124561 - DNA, 1081 bp, Homo sapiens
agtttcttcatagccttacctcctagaatttaccttatgagttaatgcagctaaagctctttagagccatgtctaacactgttaataaatgtaagatgtcattattgccactgccctcctcatcatccctaggaagaggggtgaggggcaggtgagggataaacctgtaatgcaggggaaatggactaagccactctgagaagctgtgtggaatctggaattcttggagagttagtagaggccagaccttcaggtggtatttaatgtagacagagtgtgcacaggtttgcatttgctacacagaaaaggtaaaacctgtgttgacttctcttttctgaataccgtgtcacggaatgaaagcttgtaattattttctgcaagcaaaatttcaaaagataataaaataaccagagagtttgtcaggagactgtgtaattagttgtgaatcgttttcctactaggacatcagtttacaagcaaaaaaaaaaaaagagaggaaaggaaaagaagcttatgaaaacatttcagtccacattggaagctgtgtataacgccttgaggaaagggttgcatcagtgtgtgctgtaactgtgtaactattgtcacctcctggtgacagtaaaagctttgtggcccagagttttggtggcaagttttaggaccacctatctcataattaccccatagggaccagcagaataaaaatcttgattaaaagcaaatacattctttttctatttataggagtttttaagacattcttttcccctcttttctatcaggttatttttacaagatttttaaaggctgtttttatttggttggttctccatatatgtaatataacatgattatttgcacatgctttaaattatagtatatttatttttgtgatacttgtctgcgaggattccctgatgctgtcatccaccctctgatccgattatggctaagtcatccactctcagagcttcagttgctacctttatttaatgtaactaatttccaaatctatatgtcttgaggaggcactcttttgtttactgcagccaacaggagatatttaatgaatatcctcact

SEQ ID NO: 124562 - DNA, 1080 bp, Homo sapiens
aagtaatatagctttcgaaaagtgttgatggagaagtgtacttcctttcttcaggagtggaattgagttgggaaaatatttgatagctgcaagttactccactgaccactccccactaagcaccaaataattcatcatgaaacatgttagttaaatttattgatgagatttcagtgatctctctttcaaaccaaggggattaataaaaggaaactctttttaatctggtgtataccgctgacattcagtgtaaatctttacctgtatgcttccagggaaagggggtttgggcattatccttggccgtattttgattccttcaagaggtttagtaggaatactctttcatccagcctcttttcttcagaggcttgtaacttctgctaagccaggccccagtggctggacccatacacatgattctagaaatgagctgtgtgggaactggattgctggttggcctggccatcctcattccccacttcctcccattgccaccacgcccctcgtctacccaataaagctggcattttctcttcagcttctctcaagaacagccagagcttggaaaattattgtgagttgccgtacatcgtgcagctactcactgagtcttccttcatcaaatatgaagcaagaatctctgtgaaacaggaatataatattaggacaatggagatagatatgcacagatgcgtcatccaagccgaaaatattctgttaaatacaaatgcgtgaaataaagagacactgtggtgcccaaataataatttaaaagtttatttgactcttcatatttatttgcttttaagagaaggtctgtgctttttatttgtggaataaaatatcttcaattagagggtgggaggtggcaggtgggaagtaacacttgggatcatttagacacaaataaagacaatagaaagtaggactgatgtaggaaaggaattgattgcaggaagaaaaaattttgaaacaacacatactttaaggtaatgagaaattagttgacaatatttctttaacttaattagatatgaacagagccttctgccatatattagtggtttcccccccaaa

SEQ ID NO: 124563 - DNA, 1050 bp, Homo sapiens
cttgctaaacgtatttcctgtaaacgccatgtctgtctttattgaagtgcaccatgacatttcttctgtttgtttttatgctaaccctgccggcacattaattcttaccagaagccaaagtgatttcggggctttcactttcattatgctgtctgccagggcagtgttttataatcagatttgtgcgtgcatgtgtgcacgtgggggtaggggagagagatgggggaggagcgggcgaactcactgaagtatcattgatcacattctactgttcccaagaccgtttcctaaattggctgtaactcactgaaggtgaacagaccagggaaaatattaagtgcactcagaaaagattactttgctaatctgagcttctagtgcctttctacagccagccaatgcagtgcaaaacatttgggaattactgaggatctttttgcttctgttggtttagaacccatttgcagaaaatgaggaatcacagcaaaggtcgatgaggattttgggaatgaacacttgggatcttgctctggaattaatgaattttgattggagtctattcaattcaattcacgaggtaaatgaggagtgacaagataaaatacaaatgctgttttaactgtgaattctttgtgaagaatatcaatgcgtgcggtgatgaaattatgctagaataacgtggtccaaaagatatttggggacttgaaatatattgaaagactgactcaattctaaaaaaatcagaatatgtgagcatgcttttatttgcccctagtgtgagcatatgcttgtgtaatgtataaatatgctgtatttcatgcatataaatatatatatgtatttggagatgaggctctaatggggttgatgaaccattttatctttgatattgataggtttattttttccatgaagcttatgatagttgtacaagaatcatattcatatttatgtatgtacacacatatccatctttttacttaagaacattctacaaatttagactgcattgtaagacttcaagtaatttattgaaaattttggatatat

SEQ ID NO: 124564 - DNA, 1117 bp, Homo sapiens
aggctgaggttggagaatcacttgaacccaggaggaggcagaggttgcggtgagccgagatcacactagtgcactctagcctgggtgacagagtgcaactctgtctcaaaaaaaaaaaaaaaaaaaaagtaatgatcagtgttggtcagtgtgcaagttttatacctattttttaggaaaatatattgtctttcttttttaaaaaataaaaatcagaaaacaatttggtagtttgtatcaaaaactttaaaaatattcattccctttgacctagtaattctaatactgggtgtctgtcttaagaaaatcatttataagcagacaaagatttaaacataaggatattgacttcagcaatatatattgtggcagctataataatagatcccatttaccaaaccccagttatgtgccaggccccgtgccagtacttagcacacatcatgccatctaatttatatgaccaaaaaaattaaccattaaatgttcaacagtagaggaaagattaaatgatggtataatgaactatcatataaccaattaaacatgacatatgtaaataattttggcaagtggataaagtgcttataagaatatgagaatataaaactatggaataattgcaaatgtatatgtgtatccgcaatagttataaatgcatatgcataaatcattgcaaatcaatgcaattatttgtgtgtgtatatatatacatggttatataaaaatcagaacaaaaatagacctaagtgtaaccagtgttaacatggtattgttatcttagatgagtaaattttactttttgtcttaaactgttctgtgttccaaacaatgactaaatgttataggaaataactgcaagaggactccactttctgaccgctgagcagtgagagctatttgtgatgccactggtatcattgtatagagtgtgcagaacttaattaatccactttaagttctatttacttttaagtatttttctttggcaagtttcactttttaagtgtactgtgtaggcctactgctgctactcttgtatttctgattattccttttttttttttttttttcaaataaagaaaagcatgaacttcagccaaatgacttagtcatc

SEQ ID NO: 124565 - DNA, 2007 bp, Homo sapiens
aaatggagtgtaaaggaaaaatttatgaattagacactttaatatgcagctttgggagatctcagcaactgtcaaagaagggatttaaaaatacagtctgtgtaccacagtttccactgtattatggtcagatggtttctacagtgagtacacacttgcgtgactcgggtctctcattacataatgaaaagattaaatactacttgtgcttgttggctggctttacaacatctgagtttcatgtgtttgcaagcacacatttatagacgtataccctcaggtgctcatgtacatatataaaaaatctaactctgtatgtgttatactgaagagaatagccaggtgggttgatttagaaaagttgatcaaggtgccttgatttggaaaagtctatacctcgtgaccactgttctctgtttccaaacaattcttttcacttgtgcagttttctgccacgtgtatataacagagcactcctatgtcagtgtgaaggcaaaagtttccagtatagcccaagagatcctaaaagtcgtggcagaaaagatccagtatgcagaagaggatctggctctggtggccatcacattctctgggggtaagttgttttctacccttgaatattaatctttcactgatctccttcaaaaggagggaggtgacatttttgtagagtaaaagtgcagctcctcccttctgggcccgcagctggatgaccacagtaacaataagaagctgcctaccagaagtgtttccatgacaacagttgggtactgtgggatactgaatttcctccccaagaactgaatagagaggcatgccagtgttttgaaatacattataaagcttttcatattttgtactctagataagccttctattttcctatttaaattaacttgggaaattgctaaagagtgaaattactttggggtggaaaaaaaaaaggaaagatggccttgaaccagtcctattgcgggctgacaatttaatagttaaagactccctattgaaagacaaactgtacaataagctgaaagctcacacggcaatattcctttaggtggacgtggggagtgaggcctggttacaacttctccttctgttgggccttatgtatcctcagagaatggtttattgtctgttttgaataagatcacacagattacaagctgacactattgatctatgcggcttgaacagacctcttcgttttcactggagcctgtcagatctcaatgttgctggcctccttttttggtttgcaatctttatttaatatctccttaaccctgagaaaaaaatacaaagaaagtgacttagcatcagtagttgaaaaatgtgagcactgtgggggctaattaaccagagatgcgggcaggggaggggagcagattaaccgcattcctgtttaccctttgttatcattctgcagttgggagatgaatatcagaatatacttgagggtaaagtatcttgttcctatggctttgttgctcacaggcaggtaaaatggtcctacaagctggttgattacgtatgcaaatgaagcccttctccctgggcctaatacataagaatccctccacctctcccagggctctaattgtatatcttagcaaaacatgatctagaaaaaagaatttgagaaacatatggcctaaatgacttttaatcagagagtggttcgatttttaataatatatttcaaattggtatgataaatgtatgttatgtttaattttcaagtgaccaaaaatataaaaggattttaaacagtattaagctttatcaatactgcttaattaagcagtattaagcttaagcatccacctctcaaggtagtaccactacagagagtgatcctggggtccccattcagacagaaggtgccagagaaggaagagctgaatgaactctgcagcaaaactgagacccgtctcctttgggagctgactgagagtcaacccagggcctcgtgagaagctggcaattaatgagcggctcttt

SEQ ID NO: 124566 - DNA, 1051 bp, Homo sapiens
ggggatcattcatataaccatcatggttctaaaaatatctctaaataccaatgggacagcctcttttttggaagcatggctgttataaattgcacttttatttgaagtgcatcactttgattatagtattttcattcataccactcaattactttcagaatctgcacagcagaaaaaaaaaaaaacatgaatgctggaaaagaataaaggaaagctctttgtatagaaaaatttagaacaatatagtagttaaatagagagatatttgagttatgagtattgggaatctgttctattcattagaatttttaactattttctttattaggacttcaactggagctgtttttatatagcctcattgtttttattttaattaatatttctatgacagataattaggtaaatgctgttgaattttaaatatgatattggcttaggagaaaataagcatttctgggtcaaagcccttaacaaaatattgtcatatgtgagctgattaattgaattgaatgccaaatgggtttgccaccatccaaccagactctggtagtcagttcattatctaaggttgttctggaatggaatgactggttatgtcaaagttaatggtttaatggtgttctttttaatctcagctactaatgaagtaaatcttgatgagagaatagttctaacctcattaaatgcagctaagtgtaagaacaccccaaagagtctgaacctctgtgtcacatccagcattttaaatgccaactccctctcagtgctgtcacccaatggtttctgcgcactggtggctcctatctacaagagccattgaaaaccctaaactagattcaaagctactctgttggccaggctcagtggctcacgcccgtaatcccagcactttgggaggccaaggctggcagatcacctgaggccaagagtttgagaccagcccagccaatatggtgaaaccccatctctactcaaactacaaaaattagctggacatggtggtgcatgccagtagtcccagctacttgggaggctgaggcacaagaat

SEQ ID NO: 124567 - DNA, 1152 bp, Homo sapiens
accattcaccaaggggcatctctctaaggtcatcaaaccagggactgtccacataacaaatccagtgctctttgagtcctgagcccgataaagcctcttcaagcagcatttaacactcatttccaatccttttctttcttgttggttattacatttgtgtcccgtttgtttgtttacagaaaggaggctattgactgtacattcgtttctctttattctgtttctctcctccttctctttccccttccttaactcatctttcccttaccatcgcccaaacatgaatatcccactcccttagactgctgcttatttttctgagaaatcatgttggccatagccatcctctttaggtactggctcccacaatcataactgtaaccctctttggcaagctctggtttttgatattttttcctaatagctttccttagagtaacctggggaacccaagctcagcaagtttaaaagcaaactcacctccctccccttatccttcccttatccagtctgagttccctgatgaagcaagcttaactcatatctctcttgtcacttctggtcttgaaaatctcccttcacttcccttttcctgtggaataagccccaggctccttagtttagcattcaaagatccttcaggaatttcctccaacctatttctttagctttacttttcaattatactatgtgatctcttctattactactacacaactgtgctgtagaccaagacttaccaacttgcatgtccacaggcagtaaaagtgagtgagtgaagactgccagagcagaagggtgatgaactggagagtgcctcctgcataaagtaggcaagttggctctaaacatggttgccataggagatgtggccctggtgttgccagatcttctgacttttaaattttgtcaactcacagaaagcatctctagggactaaacaagacctgcaagtcacaagaccacaggtttgtgactcagccacagacccacccacatccgttgctttgctcacatttgcttctccttttcctcctccaattcttcttggaaattcatagttctcaagtttttgttggcggattggtagcacttggagaattgggacaaggttgaaataattttattttataaaaataaataataggtagt

SEQ ID NO: 124568 - DNA, 1028 bp, Homo sapiens
acagaaaataattttcagaacaattctgtagccttttctgcttcagacttggacttggcgttcttgtctggcatttaggatatttggtgaatcttctgactttgaaatattttaatcctttaaatgagcttcatttagtgggaacatgaaaagtacaatttaaaattctccattgcatacctggctggatattgctacctaaattctcagtctaaaaacaaatatggttttagatgaatgagtatatgtaagcttctgctatttttttcttattatatccctttcaatattcttcacctgttatgaagaagaatttatgtagtactgacagcaagtaagctttttccccctaagttttctttgagtcttgcttgatatcacatattttcttttgtgtagcagcttacagattttaaatttactgtcatgtcgtatgttttgttaagaaaaaaagagagagcagagtgatcttttcatcctaattttggttctaattctcagagttggatatataaaatgtgacctttgatgtcttggttcagtttgatctgtatttgaaggcattgccagccattttcatttactgatggcttctgtagaacaattttagttaacccaagttctgccaatgctgattggcatagtgtgcatatctcagaattattatgacaatttgcactgtttgatagtctcccagggaaggtgtttgttcttccaaacaaaccaacaaacaaacatccaaggcactgtgtcttcgtcagcacattctagaaatccacagtagtgagatcaggatgaattaatattgttaagtattcttaacactccttgaatgtacctttcctacttttgataattgagaaaattgagaaccatatcatattgcagatcgtgtacttgagcttctggaaattttcagtgtacatgtgttatttgtgagtaggcacagctgcatataacagaaaagctctaatgatgatttaaacatggtataaatgtatttctctctcatgtgaaaataagtatgg

SEQ ID NO: 124569 - DNA, 1155 bp, Homo sapiens
tcaactgatagagtccagaagctcttgatggtcaacctagtgacttttttttttttttttttttgagacggagtctcactctgtcaccaggctggagtgcagtggcgcgatctcggctcactgcaacctccacctcccaagttcaagcgattctcctgccttagcctcccaagtagctgggactacggatgcgcaccaccatgcccagctaattttttgtattttcagtagagacagggtttcaccatgttggccaggatggtctcaatctcttgacctcgtgatccacccaccttggcctcccaaagtgctgggattacagatgtgagccactgcgcccggctgtgatgttttttaagcattgcactgataaaacattaagtaaagtgagggcaggcacctcattttctattaactttttaatcttgtctcctgccaacaccaagctcatgataatcccttgatatttaattatgtaattttcatggaggaaaattaagaatatctttcttcttccccttggaaagatagaagacaacgtaagtgaacttcttccttgcttaccttgccttttagcattcctggaatgatcctgggtgcctttcttccaggctttttctcccaggttgccagaccataataaccccgtagcagcatggcttttgctgtactaaaaatgtttgagggtaggtaaatatttagatggcggtaagtcttttcatgattttgtacaattgatatgcacatgacattatcttgtatttatatctttttatttctgtaaggtcatgtaataaacagaccagtgtagcttatctgtagctgcacattagcagcacctgtgatgcttttaacaaaacagcaatgtccagagatcctaattcagttgggctgagttggggcctaggccttaaggtctttaaaagttccccaggtgatgcaatccgcagccaagttgaaagacactgaaatagaacattgtcttacttccatattttgaaagaccaattctaggtttctattggttatagatatacagagagttaggaacaacgttccccctttacaacccctctgacaggactgtatgtccagcctcatgtccgctggcccctgtcctggagttctgcagcttgagaagttcataactgacaa

SEQ ID NO: 124570 - DNA, 1554 bp, Homo sapiens
attgctgtttagaatgacaaatatttttcgtttttaagaaaatcctggaggacttaaattattagcttattgcattttcttaggaatcagaataccaggaggtaaagtcacaattgttatcagtgatttggctggcaattagggcaagattagtgccttcctcttcttatgaaaggtgaatcaaatacattgacatccctgattagcctgtagaaccaattaataaggcacaatggatatttttttctctgttgggggtggggatatcctctttcatgtttgtacctgaccgtaggtaggtaggattttctgtaagtaggggaaacgtgctaggagccctaagcacatagtgccttttttaaagaggtgacatcatctttaaggtgaaacctacttactgtcaacttttcttcctttaatcttttgctccaatcctcagaaatagggaagctagattttcggacatgcatcttatagttcctttctcccgggctaccgtacgcttactgggtattgcacatcaggagaatttcacactaaacactctggaagtgttcatggctccgagttggaggccaccctgctgggtcagcagcaagctgtcctctgtgacagagccacgtcagcgggccacactcactctgggctgtggaagctgtgtgtgcagaaatgaatctgtgtgttcagccatctctcctttttaaaaagggactgaggtgaagaaagtctgtgcagtcatccatggcatccgaatttcagcctagatgagattctaactagagatccatttttgcttatattctggcaaaactagtacattataaatttgaaggccatctcaagtctgaaaaaaaaattgaattgaatgatggagtgggtagttttttttttcttgccgccttttaaagtaagggtgtaaagtaaatgaatatatgtattgattgcaactactgaatagggcttactcattgtcttaatgtttcaataatgtatattttgtatgattcaactttaatagagtgtttaataaacatctaccaggtaaaagagaatatagtatacatgcaattagtatgttgtgctttttgaaactttgaactttgtagtccctaaattgtttaggtagttttaaaaataaactctgaattccacctccactttgttttctatttcctttaaagtatttatgtctgtctaatgttttaagttttcatagcacttgagcctggatactttaatattagagggagatttttgaccagactcctaatttattctcaatctttgaagagatgatactgtaaagcaactctagaaaatacagcttgagttagctccattttccccccacttttaattttctctctctttttccttctctcatccatcatccctgtccacaattaaagcaagatgatgaagtgacgactgttcaggttaaagagcaagaccagagcgtcctggtgctgaagaaagtgcagtgctgtggcccagcccccacagctgggagtgcggagagccattggaggtgagagtttccctgcagccacagag

SEQ ID NO: 124571 - DNA, 1035 bp, Homo sapiens
taacaatctcatccattaccaaagcttaaataattcataaatttgtctctacccttgacctttgtccagaggcctagttctttatttctaactgcttgctaaacgtctgtggcaggcaggctgtcttagtacgaaacatcagcgtttaaaatcagaagcatctgtctcaccaaagccgctccttcatacacattctcccctgtttaatggtatttccattctcacagtcacccatagttatctttgattgtcagatcccatggattctacttttgcattgtctcttgcatttggccacatcttagggtgctgacccagttatacttatgttgtcatggagcctattaacttgtcagttaagagcagggtacttgcctcactcattttcacttgccgcttggtgtccagaacagtgccttacgcaaagggagcaagccctcactatttgttgaatgaatgtcaattaagtgttttaatactttacctgcatttcatgaactatttgtcattgaatatattttctgttattaattctcttaatacttttaatcttaaccaatcaagcacaagaataaaatttcatacccagaacctcaactatggtacttctgttccttctcaggatgagaaattagttaagcatgcaggggtcaggaaacattaatttacctttccttcttgagagccagatgtaattcgtaggattattacatttttatggcaattttagataacatatttccctttgtacattaatttttctgctttttctcttctttatttttaataggtcttcaaaatggaaaactatcacaatgacatagatgctattgatagtacatcaatatgattcagctcttcccctgcctggcagagtgtggctgctgtgtgcacagccatgtaatacatattagttacacaggcattagagaagcccttcccatccatatgtatgtgcatggcctgtggaagttaataatgccatatatcacatgcacatagaatgtaaaacgtacttcagaatgacagcaagct

SEQ ID NO: 124572 - DNA, 1050 bp, Homo sapiens
cctgaactcttctttctcggaccttccagctacctgaactgtacctctcaggacatatttctcagagccctttgtggctccctggggcagattcatgtgtcccctggccaacaaatctgtgtccacagactcatctctgctcagttcctttttttttttttttttttttttttttcaattttaaggtaaaacttacataacataaaattagccattttaaagtctataattcatgtctacccagttcttgagcccatcaggcccgaggcagcttatatactgggagccccatctccaccagccttaacctgcatgtctctgtgttccaagttgcatagacataggtgcccacaaatacagccttcctctaaagccggtccctgccgtgtttagctctcttcctgccttggtcactgattcgggtctggttggcacttcattttccccttgctgggtcttgagtgctgcctgatctgagctggttgagctgtggtcataccactgcattcagctcctgtcaactctcttcctctcttagaatgaaagcccttgtatggctttcccaaaccagacaggccatccagaactaaaaaccggctatgctagaacttttgactctcactttggcctagacctccctgttgcctgaccaaccaacagattgccctgcactgtcagtcagcacgagggaaagtgacatctcctttgatagctgtcatctagaatatagagcattggccatcttaggggacatctgtggttctggttaagggcactggtgtcgagcctgtctgggttcaatctcagcttcgccatctgtctgctctgtgatctttcttatttaatctctgggctcctgtctccatttgtaaaatgggaattttcatagcattagtctcataggatcattatagtgattaggtaaagtagtggatcttcagcccttagctttgcctgctgtatggtaagccctcagtaagtgttagttgtcataggtttatctgcctggttgtggctgattcctccccagttgcccattcctggtggttc

SEQ ID NO: 124573 - DNA, 1108 bp, Homo sapiens
tcttggtaagatgtgtacattgttaaacaaattagatttatctagtcattggtgattgaactgttgttggggtggcaggggactgtgctgggcctttatcatcttttttagtgcctaaaagtcccagaagatgcataatacccttatttcttagataatgctttggaatttggggagtgtatttttattctcccagcaaaacagctattggatggctgccaggatttggctgtagataaggcaagccctgtaacccatgtcctctcagtataggttgaggccttgtctgcagctgtgaactcagccattctttgaggacaggcctcttcctgggtgaaaactggctccaaagaccctggagtcagaatcaagctccatttctgcgtcagagtgctatgcccattactcagacttagcctagatctgactttaagctttggttcccagctacagtggactagattttgtccttttgttctgcagacttcaagcttgaattttccttttctacccaagcctacccctcggacttagttcctctgagactgaacctctgcctctttgcctttgctgacctctctgtccttgaccttgagccattctgatttacagtgtctgtccacttatccatcatttgccaggccatgcattcatttaacagacattgttctggatgtaaaaccaaaccaaaccagccactgttctcatgcagctgtcatcagagtggaactgaccctgccatttctcctccctcttctaccctccatcccactcccaaacctggtcatcagccaagaacttttatattggaactagaagcctgctggaaaatatttaataaaatttaagcttttatgataaacagtaacacctgtgtgattgactagccactctcaaaggtcacatgggaagtgcagagtgtgaagcaagctgtagaagctaaattacagtaaactgatataggcactagacaagaaagactgttaagaccataaagcatgtagaaattggattcggtcaagtaggaaaatgctaacacaccctaccctaaagcttttagattttttctttgagttgttttctggacagcaggaagaagaaatacatg

SEQ ID NO: 124574 - DNA, 1052 bp, Homo sapiens
agtgagtcagagtaaaggattaggggcacctcaagatccaagaaacacataatagtagagaataatggtgataatgagacaattaagatgtcagaaagtggcttggaggtatggattcacaagaaggctcaaaaaacttaatgagtcataaagcatatctgggtgacctcagaggtgcgagtcggggtggaatgtgtcaaggtaaaatttttgccctccaccatcaaagagaggagacagtggtacttcctacagatagttcttaaaacctttcatgatcttgccttggctaggatttagagaagtagaacaagctttatgttgacacccctgtgaataaagaattctaacattccccaaatggcacaatgcataataaaaatcccaaagtgagttttatgattgctggatgctatcactttctccctgctcagtcaacttattgttattacaaattgggggtttgtgatgatgcattatttttcaccatcagtctgagtagtctggagttttcctctgagagtcataggcattagaaagaactttagatatcatgtgtcttgatggcttggggaaggaaaactttatttctaaaactggcacctgctaaataggattataagcagtttcctctaaaaaggggaaaatatattctaagaccattagttcttttggaagtgcattagtcacaagaaaatgttaaaacatttccattgataatatcttctagcaaaagtaaataccttttagcctctgtaatcagaagcaattttgttaatagtttgttaacaaaaagtgtaattctttagtttgttagagaacttcttaattcaggctttgtgcttttatctctttgtgttcctgaagttagattttgtgaggccctaaagtgaggctgggctgatcgacgtgacccttgccctaagacaacacttctttagaactactcctcccctacctattagcagttagcccctcaaaaattagtgactcatgaaagtgggcacaaacaatttggccagcaaaaaataaatgggatcactcagttcttc

SEQ ID NO: 124575 - DNA, 1036 bp, Homo sapiens
cctgtgggtttatccaaacattgtgtgctaagagcaataggaagcttttgtgtagaatttaagcaagaaggaaggaaaaatgattagatttaaatttttaacattcctccgttgcaatgtgggaacagatttgaaggaggagaatgggtcacactcactccttcaaagcttcctggtcccacttccctcacagtcctctctgtcgatttcacattaagtagtaaccagcatacatgcaaaaggatttgctgtgggcagctcaagtcaggggacttcagttccaggaagacagaatgtccagtgatagttcacttctaatttattaccttttccctaaaatatactgctatatcaccatttttctttaacaagttggcttggagtcagtcctgtttttgtagaaatgaattttgtgcatgcatataatgtgaatatcttttgttaataaacaccatgcaggcagatatgttcgctttaaatacaacttactgtgctgtatatttgcctcatattgattcagccaaagtttggtgatttctgagtcattcatatactttggttgctaaagatgaggaaaagaaatttataaaagatgtccatgtaggatgcaaagaacctttttttccttttgcagtgggaagtgggtggaaaggaaaaattccatctggcatccagcagtcctaaatgttgttttaagatagcaaaaatagaagattgctgaaaatatcataacagaacataacagactgtgggcaagtgtacagtacattttttctaataaatcatgctaaatatgcgtattttacttataacatgaccaagttcttgtttgctgttacataaaaatttgtctttattttttgtattaaaattatctgctctctttttgaagcaaaaaggatgattgttttggtctgaagagatcagtgttgcagtacttaggtttaactggaataggtttttgaattttgcagttttcccctctttttccagcatttccctcctacatttaaaaaaaaatggagaaataagatgt

SEQ ID NO: 124576 - DNA, 1056 bp, Homo sapiens
gggcagaagtagtttgacctggaccttaaattaggttttgggttggatttaaagaatccacattgaagaagagtattcctagtgggaagaatagcattagaaaatgcacagagataccaaaatattagatgttttttggaactctgaaacgatttcatgtttccagaataccaagaattgggggtgtgggaggggaggcaggagaaggaagatttcatgagaaatgagattgggaccagactgtggaggattttgagggctgagaagttttacttcattctagaaataatgaggaacgactcagcatttgtttgcctgcagtttgcttcaggtagctgagatgttagtatttatctcactgacagattgttaggtggggttctaacttttcctaaggaagatggttgaggcagggccttcatgagataaattatattatttcaatctgactgaacagtgactgaatagtgagggagctgaagagtgattaagcagacttggggccagagtgaattcaagtctgattgcctctggagggtgtcttccttcagccttcatcactggagtgaggactgataggtggcccagaagccaaggtaaccggaaccacagcagtccttcgaaagagggcatgcactcagagggcagctctggaggacagagacagaaagaatacgtagggagggatgggggttggggggcgggaatgcagaaaaagaaaaggtgcttgcccagtcgtaacttagatttgaaaagcttataaacttttcatattttattttcagtaaaatagttacatcaaagtatatgactagatggatgtgggtcctatttccaggaatatagctgcactattcaccagaaaactgaacctgtattttcccgaaatgtagtttatgctttgtagtgtattaaattgtagattagaaataccaacaatagctcctaacctgacttcctgacttccaactgtagaaatgagcagtatctgtaaaatgtatgtgaaaacttggttcagcaatactttccctagggatcctgtctgtatccctccct

SEQ ID NO: 124577 - DNA, 4074 bp, Homo sapiens
ttagtttgctctgtccttcaccctcttaaagtagggtgatacgcagactcaactttaagtcttttggcatggtgctcttaggttataataatgtaacttcaatttttgaaaggcaaaatattttaccaagaccatgatttaatccaggcagtggaaaagatgagcttattataaggtgaactttgcggtggtgtcatgtcctgggactgtggttttaagtatatcttcgctttttctccaactcttaaggcaggggtgatgtgcaagctccaggaaagagatgaaatcggacgaattgaactagtccagaagctggcaaaagaaaactatcagtttttgcagacggacaaaaaagaacaggagaagtctgaacacgtaagccttttgcctcttggggatgcaggtttgaaggggtggaaaatgtttttgcctgattgcatgtttgaacgaaagactattttattttaaattctttaggttttgggggtttttttccccccaagagcatcctccttagtaaaaatgacagctgctcatagctctaagcaagtggcttatgacacaggatttataagagactcttctcaaaagtaaattatgtagaaatatgagaatacatttaagcaaatatgaatccttatctatttatgatcctgcttgggtggctttcaagtttgattttggaagttttgccttatcatatagtttgtagaacatgaattttgaaaaaacatttcaacatatttttatgtttagtacagaggtggatctagttgccaaatgaatgtgtcctaagtcactagaaatagatgaaaacacaaaaagagattatagatgctctcaccaagtgggagggtcagaagggagttttcccagtatcttatgaaggcttgtgttccaacaagagttatattgtttgaatatagttaaagctggaggaaagggacgttccgcttggtcctcctgaaagcagttattcagattgagccttagaactgagagtgctgccgtcatgctgggaagacaatgggaccactttcttgtgccacacattgttatctgttgacttggttgttgttggttatgagacttcactctcagtgctgcactatccaggattgctcatgaaggggaaaattcctctgcgcttatacatgtgtttctctgactttaatttttccttgagattttgttttcaaccctttccaagggggaaaacattgcttcatgctttttctcctccaagtctattaatacaaatggcagggttttactgagaaggagaggaggtaagatgctcaagtctggctggctgcttagtttaataacatagcacttctctaacagtgagacatcgaattgtaacagttggtgtctcaagaaagagaataattaggcagtttcaaagcgttgtgattgaactatttcagaggcgactattgactttaagtgtggatgtaggtctcaggcaaccttcactttgcttggaactattgaaaactttagcaccttgttcaagttgttaaaagcaccctgaagtttgactatatcatagactgacgcctaacctctgctgtgtccttaggatatttgagtatcctagtgtgcagcttaaatttttcaaaaattttccttttgattcattttaattagatgagcaacagttttcatatgccatattttattgatttcaagatgcacatttcccccacaatagtcttaacaattgatgatatgaaaacatgtcatagtttaattgtgagcatttttctttccttatggttcttaaaatgaatgctgtatcttacaactgattgcaagttaggtccagtaaaccagtaacaacttcaggtatggtaagatctttcaaaaatcaaacagtagaacagtagggtaccacttcaccaaagttagagatcataagctttaggcttatgattaaggcttatgacaaaacaactttgcacttattaaaaagatacctctgtgttgtctttgttgtatatttagttcagtccagaatattataagtagtcacggccaatgagattataatactcttcaaatctgtaactatagaaatctacacttcctgtgtccttgtgttctcactgggtgagaggagggggtagggatagcattaggagatatacctaatgttaaatgacgagttaatgggtgcagcacaccaacatggcacatgtatatatatgtaacaaacctgcacattgtgcacatgtaccctaaaacttaaagtataattaaaaaaaaaagaaatctacattggggctgataattgtaaaggcttttaacatgaggcagaaatttagtgattgaagatttgcagctttgctctggttatctgctctgtcacctttaaaccttcatttcacttgtaaaacagaacactaacattttttacttcttgcgtgactgtcatatcatgggtgcattaacagctctgaaacgtttttgtttctgagaggaaagatggtgtgtaaataaacattggaattatgactttttctatgtagactttcctgtgaagcttaaaataaggaaaggaatattagggatctttctttctagtgataaatataaacaaagccattctgtcatctcccttctgcaggatgacaccagtggaatctttcaactctcaaggctgatattgatgtagtcctccactaaatgaattatttggtactagatggttacagtttttgcagtaatttattaggaataaaaaccacctgctaattcacttcaatcttttatgtcttgggcatttgatgtgcctatacctttgcttaccccttaagttcacagtgttcatgaaggtggtgcagtgttttcgtttttcctgtcctcactttctttacagtagcagtcatctgctcttcatagaaactcagttctgacacacagcatggacagaggaaactgcagtttacttaacgtaaacctaggtctgcagtttcctcttcttgttataacaataatgaccaaaccctgaagttacatacagatttcctttcttttatgattttaaaatgcttcatcgacttcatccaccattcctgggccaaagctagttaagtcgacagtgataaaatttgagttagaatccaagttgcctattgagtcattcttttgactaaccttcattactttccagttctagaatgccacatagatgccaaagagagagctaatttgtagcactactgcacaggcaaagacataaatttgatagaataaagcctttgttgctggtacatcttgttacaaattgaaggggattacagctttctcagtaggcatttctaatattttcttaactgctaaatgctgtgattataaatgcatgccattagagaaatgcttcactctatgcttttgccaaggtgtttctgaaatttaagaagttaaatgtataattatcgcaagcttctcaggaagcactccatttttctattttctattaactagctgtaggcacaatgagcaagcactcattcctatgtgttgaaaattattatgggaggactttcagaaggggaaagaaatgggctgtgtcttctaaacattatgatagtagagttaacattgagttgttggttctttaaagaaattatctctgatgtaggcattgtatttcctagccttaattctgtgactgtgccaacagagcaagggacgtgtgttatcagatggggacctttgagcttgaccctgaagaatgactaatggtcatagaagaaggcaggggacagcatttcaggcagagggacccatgggaagatacatgactgcagtcctggtgattcctagggaatggagaggggtgggctgggagtcagcctaaaattccattatgaaagactggtaagctaaaaaagtctaccagctaccctaaggagcttaaacttgccttttggtcaaaggaaagccatcaaagaagggaagtggcataatcagatgtggcctttgtaagatctctctggcattgctttagaggaagaattgagtgaagaagagggaaatgttggaaagaacctttagaaagctacc

SEQ ID NO: 124578 - DNA, 1145 bp, Homo sapiens
actttttttttttttttttttgaggtggagtcttgctctgatgcccagggtggagtgcagtggcgtgattttggctcactgcaacctctgcttcccaggttcaagtgattctcctgcctcagcttcctgagtagctgggattataggcactcgccaccactcctggctaattttttgtatttttagtagagacggggttttgccatgttgggcaggctggtctcgaactcttgacctcaggtgatccgcccgcctcggcctcccaaagtgctgggattacaggcatgagccaccacacccggccaaaaaaaaaccttttttccagtacatttccttataagaatggcaatgaaacgggctactggtatcaattactgattacctctgtattaccccaagccagtgggataagtatttatgctctaattaaaggaaccgatatgagataccttttgctctaacgacattatcattgttttctgttgaataacttttccattgaatggacgtatattaaatcttaatcaaaagaaaacactgtaaaaacctattaagaagtagaagagaagcttggagagtcttagctattaaaaaaaaaaagatgtaagagttgaaatggagtcctctctgctgtagggcagggataaatcatgcaatcagtaaggcagcagggagggtggagcgaggccacccagaactctctcagtggcttgagttgccccttgtcaagtgtgctgagcatggagtatctgatgggggagatgggagcttttcagccacctctgctttcagtctccccacagtagatttattgggctgtctgagtgctatggctttcccgaacatacagcacacctttattcaaacgttaataaaaataatacatttctttcatgtagcaaacatttattatctttttctatagaaccatgggctggaaggcctagggaggatttggggggaaggcaatgggtaggaacacttaaaattgtgtaagtcattacggccttaatgacattgctgccagtgaccactcctgcctccactctcccagcacaggcccacctgggcacatctccatagcagggccctgggaactgaaaggcagccagcttccattgcaatcccagccccatccctcactg

SEQ ID NO: 124579 - DNA, 1073 bp, Homo sapiens
accttcccatcctgggaaagaagagctactcaggaaaaatagctgctgacttgctgtgactctgctgacttccagaggtgctgggggcagactttggggcagtcttctctgtgtgccaagactgatctgtgtgcaaaccagcacccctgcccacagtttaccctcggccatctctctggcctcaccctctcagacctagcccagccaagggagatcaggcccatagctttttacctgccctttctgttgccttgtcacccttcttcccacagtctacttgatgcaatatggggacagccttgaacttttccaacctgtcacttcctgacttcctcctttaggggaggagcctgcaacttagcatcgcaggagagaaggtcaagatctgggacttaaagagttggttcatgatatgcaaagaaaggtaacagaatctctacagattctgccatttcaagtctgttgtcttgccacaaagttctgctttgggtgttggaatataaatattaatgactttgtttttatattccttatcttccactctaccccagtggcaggtgggtctgacgaggaaaaccatcccatccacagataacaatgcaaaaaagcatatcaccatgttttgtataataatataaagtcactaacattgattaagtagtttaaatccatccctccttccacacatccatcccataggtttttatcatctcccgtttacaagtaatgaaattgaaacttggtgagttgatgtaatttcacaaacaattgtacaagaagtattgtaggaataatgctttatttttccctaatgtataataaaaggaagttcctttaaattctagcaggataggttttgatgggggttaaggcaaattttccagtcttatttcctggacttatcttggactgcccctgccccctctatttatttagtggctcatttggtgtcactgcttgtatttgcaaacacaaggacacctggggaattcttggtggctccactgtatgttttaaaattccactgtaatgtctactgggaagatttggcagtaaaattactgacaattcag

SEQ ID NO: 124580 - DNA, 1094 bp, Homo sapiens
tgtgttgactattctcagttttttctctctccataaaaacttcagaatcagtttatctgtatctacatctattatctcttctagttggctctttttttgttgtatgagaattttcgattttgtgtcccttaaaattgttgaactccaatgagttctaatagcttccttaaaaattatcttggattttccacatggacaaattcatcatctgtcaatgatgactgttttgtctatgtttaccaatgcatataattccttttttcccatattataatatttcattagagccttgcagtataagtttgaataatatcaatgatagttgtcattcttattttgcccctgactttaattaaatataatgttttctgattagaagagcaatataaatgaagaagattgtattaggaaaaaacaaagacatttctttcttacaacccctccccaccctgaactacaatacatttgggaaacaatctaggggtaaaaataaccaacaagatatatattactgtattcaaagaattcaaatatggaaatattagagatacctgactgattcactgtgcattctcaatgcttgagttggcattgagtgtggatgtgaaggaacaatggcaaggtacaaaagagcctaagtcataggtattgtattcatttgttcctttatcaaaccctagctgggcacaaactataagctgaatgcagtgtaagacacaggatacaatagtgagcaaggacaagtatggcccctgctgttttaaaatcatagcatatgtttcataaatagaatgcattaatgagtcagtgactgtcagagaaaggtaaacttcttattgtgattttaggaggtgatcaaacgcagaaccattaagcatggccttaattaagtagagttccagctgcagaatggtgttttctatgtatgcttcttatttttaaaactattgaatactttttaaaggagaagaaaaataagctaatatacatcaaataaaaaagtatttaaaatgatagctggcacatctggagcttgacagaaggaattgattaccctactatcttatgtcttgtagtaaaactgttaattaggg

SEQ ID NO: 124581 - DNA, 2156 bp, Homo sapiens
gattattatacaatatttgcatgtattaaaatatcatgtaccatacaaatatgtacaattattatttatcaaaaaagtaactctaaaaaaaagattgcaggagggagggcctggaaataaattttgctggagctgatcttgattctcgtcatgataaagagacaaatgtacagtccgtacaagttgggatgacagtgtcttgaaggataggatttgattttttaaaatttcagaataaagtagagaagtaataaaaaagttgtagcatgtcattgccagagaaagagcaagtaaatacagatagggaggctggagaaggggtggctgatttacacagagtgggattggaaagcctctgatttagagatttttgagccaagacctgaagttggtgagggagtgagtcctgtggctatccacagagtatttgggtggacacattatgccagatgggttcgagagactgcaaggaggcaagtgaatgaggctgagagaggtagctttgcaatgtcagatgaagaagtttcaactttctggaggtggagggagatgaagatgagcaagcaagacccacacatgttagattgcataatgtcaaagactggtatgaagtcaattttattatgttgtgatgtcactgtatgatattagcatgtctgttttccttacttatttgatcaatggagtttggaatgtgaatacaattttggcaacttctcagggacagagtaaagtgatctcatacacttgtactaatgatggggacataaattcatagtttttcaggaaagcagttgttcagtatattccagtaactctataatccaataggtttatatgactggaggtctggctgtaggacataatcagagatgcatgtaaagattaagatagaagaatatctgttgcattttttttaacagaaagtagaaacaatccttaattccttatgataaggaaataataaaattggtatatcagtacattggaatattaaacagcttttaaaatgatgtttgggagaattaatatagtaattttttcagtgaataaagttgtatacagtagcatgtattctctttttcatgataaaaataactattttttcttgctatcatagtagaacatgctcattgaaaaaaacttttataatacaggaatgaatgaagaagaaatttgaaagttatatatcatctcaccaatctaaccactaatactcattttatttccaaacattttttaatttttaattttaattttaattctttgtattttggctatttccaattatttttttcttttttctttttctttttttttgttttttgtttttttgagatggagtctcgctctgtcgcccagaatggagtgcagtggcgcaatttcggctcactgcaacctctgcctcccaggttcaaacaattctcctgcttcagcctccctagtagctgggaatacaggcatgtaccaccacacccggctaatttttgtatttttagtagagacagtgtttcgccatgttggccaggttggttttgaactcttgacctcaggtgatccacccgtctctgtctcccaaactgctgggattataggcgtaagccaccacacccagccaccaaatttttaaaattaatatgcagatatgatatattatatattaatatgctgctgatttaataaaaggatcatcttatatgtgctcttttgagataactttagatttgcacacaattgtaataaataatacagacagatccagagtatcttttatgcaaattaccccaatgataacattttgcaaaactacagtatggtatcacaaccagaacattaacattttcatcaacacagcgatccctcatgttgctcctttatagctacactgactttccactacctcttttctcttcttaattcctggcaatcactaatctgttctctatttctgtcatttcaaaaatattatataaatagaatcagacagtatgtaacctattgaaatgggctcttttcacatggcatgattttctgaagcttcattcaggttgttggatatatcaatagctttttccttgtttttgtttgtttgtttgttttgagacagggtctcactctgtcacccaggctgcagtgcagtggcacgataccggctc

SEQ ID NO: 124582 - DNA, 1085 bp, Homo sapiens
gtgtgagagcacctaggtgactgcctggctctagtggccagagagcagccctgagaagctggagctgcttgcttttattcagtgcaggcacagtgccaaaaacctggagccaacactacctgtaggtaattaacattcattgttcgcctttcagggaatgtcaggtgtacatagatgatcaaaggtcagttcctggtcaacacaagtaagcaagcttgtttaagataaattcccccacattcttttgtacctactccttgccctctgcctcagttttatagaacagctgccttcacctgttctcctccggggctctgcagaacctttcgacctttcagaaggtttgtgtcctttccctatagtttttcccaccaatctgactgatcccccacatgttaggagttgggaagcaccttagctaggtagttcctgctcagggtgtctcaggaggttgtggtcagaatgtcagccagagcctcagttatttgaaggctcaactggcactggagtatgacatttcttttccagtgccaacaggtcccttattaacacacaaagaaaagtgtagtccctgtttgtgtaattgctcagagttttagttttcaattcagtttcatataaacctaacaattatttgcaaaggccagctttgaatccttctaacatgttctgaagatttctgctgggagtaacttatgatgggaatgccttctctgaattttcattgtcctccctcgggaagttttttctctcccctcggtcctttctgtgttttctccttctgtctttgtataaatagggttgtctcttcaaccacctcttgtgggctaatgagtgagtgtcaattgcccaggataatgtgaagaaaaggcaaacaggtccctgcctcagtggagtttccagccaaaatataggcattagtcacacaactttaaatgattgattgctaggtcatttaaaaaaacaaaaaagaactgtgaagatgctgtagcagcatgaaagggatcttacccagtgtgtggtctgcttgatcagcactttcccctttgcgtcttgtaggaagactaacctatctttgggtttct

SEQ ID NO: 124583 - DNA, 1025 bp, Homo sapiens
acctctttgatgtgatgacagcagttattggggaaataactatctgttaaataaactatttggtggagaacagtagtttcttggctgggcatggtggctcacgcctgcaatcccagcactctgggaggctgaggtgggcagatcacttgaggtcaggggttcaagatcagcctggacaacatggtgaaaccccatctgtacaaaaacatacaaacaaattagctgggcatggtggcaggcgcctgtagtcccagctactcaggagactgaggtgggaggattgcttgaccccagaaggcagaggttgcagtgagctgagatcgtaccactgcactccagcctgggcaacagagcgaaaccttgtctcaaaaaaataagaaaataaaaaataaaagtacggttcttaagaagcatatttatttattttttctagaattcttaaagtccatactagcttaacattatataatggcttaaaagttgtatattttttgggaataaaacatggaagaatattagattatgtttcttcttacatttagtttaggaaattgagaaaaatgggctctgtattttaaaaacatttctatcatggcatcaaaatttaaatgtttctaagattaatagatttactaaaagcctttagggaatttgtgaattggcaattctattaaaaattaatttgtaaggacaacgctttggtaactaagacctttgctaatattgctctgtcctctcaaaatgagtttccttgatttttttttcttttttttccttctttttttttttttttttttttgagacggagtcttgctctgttgcccaggctgaagtgcaatggcgtggtctcagctcactgcaacctccgcctcccgggttcaagtgattctcctgcctaggcctcccgagtagctgagattacgggtgcgtgcaccatactcggctaatttttttgtatttttagtagagatggagtttcctcatgttggtcaggctggtctcgaactcctgacctcatgatctgc

SEQ ID NO: 124584 - DNA, 1036 bp, Homo sapiens
gataacactcaaatagcacttactctgtgtcggatcaatcagtcccgatgatttatacatgttaattcgtctaaatctcacaacaatcctatgaggtagaggactgtgactccaccccaccgtcaggaaactacagcttctctcaaggttggcataaaataattagagatttcctactcttgttttagacttttggatctcgggttctgaatcttggtcttctaggaggcttcacttgttagcagtttttatgcgtagaatttctagctggaaacagtcttcgctaatctgagtttatcccaatatcagtctttgtaatgtaacatccctacaaggttctacaggaatctgtccctacaaatgagagattgctaccatagaagatccctagaatgtctgggacttcactgttgatgtagttacacagttgctgtagtttataatcttacctccaaagggcacgatgattgagaaaagatatgtatggaatggtgtgtaacatagaataaaagacgtagtaagacatgagtttaaaaattatattatggctttggagatgctttgttaaataaactatatcatgaaaatccacctgagaatcatttatgagctttttgtagattgaataatacgctgggtctaccagaaaacaccaaaaaaagtaacttgagacataaaaattaaaattttaattatgtaaacataacgttttattttattattacaacaaaaattaaaatgtctaatatagacttatttccttaaaatacattttatatacaaatttttatttatcaggaaattcaggtagatcagcagttagggcttcagagaaattaccaatcagaggttgtaagagcagctttgaaaactgaagacacagatacacctgctcttttgaaaagatgttagtgtcgttagcttgttcttctgagttcttgtaaacatctgtagtttcttctgttgtttgtaccatgaaattcatgagatttccacgacaggaaatggtttccaacagttattttttatctattca

SEQ ID NO: 124585 - DNA, 1074 bp, Homo sapiens
gccctaacaaggtgttgagggattgtttttcaggatccgtgtcattctgtaacgggtaaaatggtcccccaaacatgaataccccacttggtacctgcacatattacattacagggcaaaaggtgctttacagatagaattaaggctacagacctagattgtctgtgtggactctgtctaaacatatgagcttttaaaataaaggagagaacttgcttttgtgggagtcaaagcaatatggcagaagtcaaggtgaaagaaattctaagcctaagaaggggtcatcatgtcattgctggctctgagatgtaggagcccatgtgcaaaaaccagaaagagggccctaggagctatgggcagcttccgggtgacaaccagcaaggaaacaggtacctcagccctacagacgtaagaactggattctgtcaatgacctgcatgagcatggaagaacatgctcccctagagcttccagttaggagtgcagcccagcaggtactttgctttgggccttacacgaggccttgtgagaagcagagaacccagttgagccaacctgtaactggacttttgacctatacaaatatgaaataataagcggatattaagcagtaaaatgggtgataatttgcaatggaagagatactaaactaatgcacatttcttgttaaatacaagaatttgaatttggatttgaatttgaatttgaacccataatctcctgattctaatacagcagttctcttttgaatgtcagaagctgccagggcacagctacttaagttgattgatacctctgacgtttcaaagtgaattttgaaacctgaagtctgtccttcatacatttataaaggcttcagaattctatagaaatctaaaagttcatttttaaagtaaagtctgaaagtaaagtctgaaaaagcactttaagcactgtttacacattttcactgaaatgcttcagcctcttttattctagttgcaatgggactgggctaggtaggtgaaatataataaatggaggaaatactgattgtgaaagagtttataatttaggtggaagaaagggcttaaa

SEQ ID NO: 124586 - DNA, 1099 bp, Homo sapiens
tttttaccagtttcctcgaataagttctgactggttcattcccactcctgggtgaatctttttgcagatccacagcttttttcagctttctcagagcagtctccatttcttcagatatttaaaagtccatttgagtccagtatcagagcttcaatcttccatccacttcaaagcatctcctttcccccaacctgagcatgggaaaagggccagggttggttttgttgacatttcccatcatatttttctgtcttttctcttccctacctcctcctctgcttcactgtgctgcttctggctcagccacggtttgagaggctagggagaagtgacgccatatcaagaaaggtctttcttgactgctacagttacaatccggcctcagggttctcatgtgagagttgtagaaatctcttttttttcctgtatgaggccattgtgtggattggtggatattcctgtgtctaaagagctctggattataattccatggccctgtcatttcctcttcttctgaaactttaggactgttcctccagcctctggcttccttctcacagttttcttctattggggtcaccctaccttttcgggaggcctgtttccaaaatgacctatacccaactctctactggcacataggaagcacgagggcattattgtcctgtcaaaccctggaaatggaggccatcccaacacagcacagcttttttctctttctctgcctccatgtgccccatttgccagccctcttggacttttacagatgagagcagtccctaaactttaggaacaaatgccagccaattcaagtgattaagacccctgtcatttgacttgaagtctgtacgtatgtataatatttatccttgtagcactccagcagctccctttaaataaatggtctttgttgatccctcctgaataatcttcaagtctccctcataattccttgaagtgggtgaagggatgagggttgccgacatggttttacagaattttgctgcttcaggactaatggaatctgtgggggtgcacctagctctatctttcggaggtctgagcacttttcaccaattgttcttgactttgggtttca

SEQ ID NO: 124587 - DNA, 1026 bp, Homo sapiens
attagcatttgaaattgagccatctaattaaatattaaacattaatactcaaatcctcaaaatcaaatgtgaaaaatctaattttattcagtttagattaatatataactatacactctggactcttaatgaaacctttcccattcataattcccttttagtacattttttctataagcataactagtagccagaagctatgaaaaattatcttctcttgagaaggtgaacaatgtttgtattcatgatatcaaagatctcaagaaaaatctaattctcattcttccaccatcccacttcttttttcataggaatttgctttgttaagcaaaacttacttgtctagaatatagacatcatgggtaggggaaatggggagatgttgatcaaagcatacaaactttcatttattaaattgagcaagttctggaggtctaatgtacagcatgagtggtgatgggtgttaataaatttgattgtgctaatcacagtgtattcacaaataatcatgtggcacaccttgaatagatatctttgttaattacatatttttaagtataaaaagattttggctttatgctaagtgagacgggaagtcattcaaggattttgagtagagggacatgaactaacttacattttagcaagactatgctggcttctgagtccaggtgagagatgttgtggctgggaccacagtggcagtgatggaggtggtgagacgtggtcaggtgagagatatgtcttgaagagccagtaggatttcagggtggatacaaggcagagtatgagagaaaggggttcaagaatgacttccagttggaaggatggagtttccatcaattaaggtgaggaagactataggaagggcagggctttttgttattttccttttgggtaggagtggacataatgataatgcatccagtttgatggttagagggatgagggtggaggaccataggtttttgtcatctctgcatcctcacagtgacacccttagatattgcagacctcttgaactta

SEQ ID NO: 124588 - DNA, 1614 bp, Homo sapiens
tctaaagtactaaatatataaagataaaattattaaaccattgcaggtctcttctagagagagacagtatataccttttttttttcaatactaccatcataagccaacttttatgttatggtagaatgtttttggcctaattttggagatctaagctttggcttatctagacttggaatatactgtgatcagagaaaagatgtccatggacattgtcctcattcagttgctctgtcccagtactttctatggttgcacatgcatgatcctatcccattcttttcacccctggcccacccctctttacttcctcatgccagtgtgatactcttgctctttcctctgctcttcttgcctttttccagtcaaattctacccagccctcaaggggaagccccagtcctgccttgaccacaaaacttccatgatgtctccagtccatgttgctactgctttcagtaacttactgctcttgcattttgtatttaaaaaaattccatgcttccatgtcattcttagttctatgatgctttgtttctatccattttattcaagtgccctcttgattcttacattgtccattcatttgctgaaaacccaattttgtgttccttttaataacctttttgacgtttaaaggctactgatacctacctgtgtgagcctatctacattaggcccctctaatttgctgtcttctaagtgtcttcaaaataatgcaaggaaaccatttaatggctctatgtaaacacaattttgttccatacaaatgcatttctaaaaatagtaaaggggatttttctcatttaaaaaagaatctttaaagcaggaggggaaatgaagctgttggaagttttctaagctagtttgaagaaacagaattttatacaaaataacttttatacccaaactgaatagataattagaaaaaaaaagtgactgaatcagttgtcaagggtactatctctgggggaaaaaagaacagttatggtatctccttccaacagacagccaaatcaagttatccagaatgtactgtttctagctcttttattttaagcagagagttgaggaagaatgggtgaggaatgatgaaataacagcgtaggaaaaggcagtctaattattcccttgggactggtaagatgcttctaacactaccttgtttgggcctttaggctgtgagggaacttgactatttcaattcagctgtggttatagcagctcccagcttgccaggggtgggagtgggtagggctttgaatagacagtctgtaaagcttgaatgcataaaactgtatcctaccacttacacaatagttaacatttatgctgtgattaagatagagaggactgctaaaatttaactcatattgcactcaaatatggaaagaaaatgtagcttctttgtttttctctaagtgatctgatgtttgtctacatgaactgccatcctgcagaatgaccaaaaaaaaaaaaggcgggggtggggtggggggaagaagcaccctttagtaaagttattctaatacaggaatttaaaaagtctctctagttaactttttagtgtcttttagtaaaagagcccagtctctgtatttctccctgtttctc

SEQ ID NO: 124589 - DNA, 1029 bp, Homo sapiens
tggcttctagaacactgtcctttcgtccagtgcagatctatggccataggagtctggcaactcctactggacatgggaattatgttatcaggttagtattatgtcttgaaggcacagcatcattattttattaagctatcagatgaaaatacacttgattttctagaggatgttacagtctggatggaaattatttttgaagataaatatttgtattctctcttattttctaagtgacaggtcatcttttgattcacttatttctcttacaattcttgcaaaaattattagatacttgctgattcatagactaatattacctgtaggagtccttcctctacttcctttcttctgaactcaatatgctgcttacaaacttttttcaaaatcagtgacatctttagttgctctaagtgtgtgatttatcttgtagttaggataatcatcagaaactgattttatgagtgggatgttatgccattttaattgactaagtaatcatgaacactttgatatatgacctatgaaaattagctgtttagactgaacagaaagtagatgttaactggcaactaaaataggtgatggatatctcttttcttagttgagcccagagaactgaaggattagaaaccgagcaatctggattatttatttagcccagtctctcagctgctagttggtcactgaaaagcacttttttcctataggtaataaatatcaagggcatacccctggtcctgttgtgaaagaatggtacagatatggacgtgggtgtaatcttcttagatagtcaatagtacctagcaccgaatactcttatttataaaattagttaactacctttgaagaatggaggtattattaggatacttgatagtttcaggcttttggttagcaaaacattttgtactaataccttttggaaaaatctctagctcttgattcctttaaaacagggtttccccaccttggtagtattgacatttgggttagatagttctttgttgtgacgggctgtcccgtaca

SEQ ID NO: 124590 - DNA, 1035 bp, Homo sapiens
tttattacacacctgtgtaatcattatccatttagccactatccagatatagtggattttcatacctcagaaggttccttcctgcttctcttcagccagtaaccattccctgcaaccatttttttaacatcacaaaattggcagaatctatattcttctgagccattaattgagcaaatccatagtgtggtgagaaaccccagtgaattaacactttaattaagcacatttaatcaatcacattaacatttacataggttttgaaaaatatgccataggctagacatgcgtattctgtttacaaacaatgcctttgtgtgtatggactcacggagctctttaaaaagctccaagatctgctgttttcctcccattagggattcattcatagcccaaggtctgagaaccatgaggttagagcccagaccaagtagacaggacagggagtaaaagggctgtggtggttggactacttcacatagaaactcactttaaaaaataaatgatggcatcacctttagaaacatctgacttctcctttttaaaaaaactaaatttatatgtgtaagtctttgagtagagtcgtgagcaagctcacagtattcattttatttacatgaggccatgtgtaacatcaatcattattctcattttttcctcctttattggatctccatggatagagattgaaaaaggattgggagatgaacattaatcaggttcatggaaaaaaatccatctatccaaattagaacagatttagggtttaacgggaatagaatggggagagagcatgtgttttcctgtgatctggccaggaccaccattcttttctaatctaaggactcattaatattctgggtttaaacatgaagtgctcatgtgattacctagggatgaatcattttcatttttctggtagtaaattgaggtaaagtattccccacataccacgtgagaactcactttcaaaactttgaaatgctttctattcactttatactgtaggaagaatcacactggtttctgagacgt

SEQ ID NO: 124591 - DNA, 1022 bp, Homo sapiens
tactaagaaaaaagtaaaactatgtaggcatgtacccccagtaatatattaattttcataaaccttatgaagacagcttattttcatttagccccctttgcttgtgaaacagcattgtgctttgggggaaggtgctggttatagagaaggaggtagtattataaagtaggacctagccccctctagatctaagaactacccttcttcatcctccaagaaccagagactcatatgggggaattagaatatttaaaaaaataagttaaatgaaatttttatctgatagttggaattatgaagtagatgaaaccggatgcttggaattgactttgaactctgcagttgaatgaagcttaagagtaaagcagcctgctgtcaaattgtgtcatggttcgagatgttcactagatagggaagaaaattgtttttccatcttccaagacctgtgtatgtttgcattatcaatatgcagacttaatgcataatataaagtcttcaatttgctgtattgatataaatattatatttaaaaaatagtggatgttttacactgaaaactttgtgtaaaagaaaattatttataactgtagttaaataaagcaggttagcatttggagaatagttacagcttagcagcataagtggaccagtagctaaaataaagtaagatagttgtaggtttatagctgtattggctaaaatatgtctcaaccttatggacttggttatgattttatatataaatatatgaatatatataaatatatatatatatatatatagtatgctattggtagttcacaaattgtcacattattgttctatatttacagtgactgtcttttccatttagatttatggagagaattcttcttgtgcaggaagagcattgaggaatattattatcgttcaagcagctgacctgataaaggacagagtgaacctcaaggggttttacaggtaacacagttttctaacaccttgtcagaaattctctttgaggaaaaaaaaccaccctgtgt

SEQ ID NO: 124592 - DNA, 1046 bp, Homo sapiens
ctacgggcgcccaccaccacgcctggctgattttttgtatttttagtagaggcagggtttcagcatgttagccaggatggtctcgatctcctgacctcgtgatccgcccgcctcggcctcccaaagtgctgggattacaggcgtgagccaccgtgcttggcccacctcctgtaactttttaaaggggtgttgaccttttatttcaaggacacacgtaatatcagacttaagagggtatagaaagatcgagcttctgtgggccttccaccttggagaggggcatatcttagaaaaaagaaataagattcaatcattccattttatgttccatctacaacttttaaaatagtttcagtccagcttaggaactgctttaaaaacaactatgttggtgatttaatcttaccctcagtgaaagatctgtgtggaaaagtagttaattgaatctgtatttcagggttctttaaaaccccgtttcctcccacgggttgctatctgtgtcgcagtttgcatgctgaagcctgagtactgacgttctctggtgtcgaactggagagttggcactcgggactcaggagggaatgtggtggacagtggagggctgtggggcagggatcaaagctgaaatccttgcctgtggagctctaatgaagctagcgtcctatatgtgaggatcatgattttaatttaaaaattgatatgcggtttacataccccagagtgagtagctaatgcaatacctgtattctgggtcagagagggagtttggattttactaaaaacgacattgaccatgtgccttcaggtcaggtattaaatgtagctgttgtcttataatccattgcatatatcacactcctgtttctgaagctgatatagaacctggttgcgtatagacatgatggaatctaaatacgggggactcctgagttactgatatttgactttgcagtatttactttctgaattgttttcttcagatgttgttagatttgattattcagaggttaatggcaagagaaagtgatcctaagcactttagcaaa

SEQ ID NO: 124593 - DNA, 1372 bp, Homo sapiens
tgcagcattaatatttagaaataaaaaagaatgggagattcctgtaataaatactcttttcattctttaaatttggctcaaagaaaactacagctgtccattcttttgttgaaataatctttcccttcaggtaagattgttaagactgttggttattctggcaaacctagatcagagtctgtttgtagggaagctttacttaaaaaaacattaatgactaagtatatcccatgcactgaatatgctgttttgggcccaaggttggttagtgttgccctctctctttcacctcctccccctgaccccccactgtatctgggtatatagtcatgcagttcaacctgattttaaatatgtaaatacttaaatatttatctactgaagatctgaagactcaaaggaacttttaaaaagtttttttcgtgacagtttaacatgagaattatagaatcactatagtgaaatgttagcatttaatatgaatatatatctgtatcacataatgagctcagagttgatctcacttggtaggcagagtaagagatgattaaaagcattttatttcagctatgtacctacacacatatgtttgtgtgacctgggtaaccatataaaatatactccttacagtgggttgcagtaaaaaaaagtttgaaagccagtgatttacgaaaacagccacaggttcttccaattgtgtgtctgtgtaccctgtagtgggttgctccctcaggcgtagaagggtgtaagaaagccagagagaaggtggctaaagatttaatgtgccacctgttggttaataggactgtgattgtgagaagtgtttgctgtccagcttgagatacataggacttaggtgaggactatgtgaaagaaattgcctcccatgagtcatggaattaatttataactggaaagctttcgaaaacaagtttcctgtgtgtgtcaaatctcgtccataataagaaatgggaaccagttgttgaaaacctcttgttagcatggaatctttactacagaaatgtgggtgagagtggagggagaaagtgcttttcacagaaagaagaacatcctgttctctgtaggtggaacactcctcattttacctttgtatttagggctttatttatatgatgacttttttactgcatttaagtacatatgtaaaaataaaacattgggaaacaattgtgctaattaactcctggagcttcatttgctcatgattacctttctaaggttgccattgaaaaccttactgaaatgaagaaggtttgacagggcattaaatctccccagggcgtggaggcacagcaatttacaggcaaagttcgagtgccctggtagagaaccttcaaccgggaggctttag

SEQ ID NO: 124594 - DNA, 1003 bp, Homo sapiens
tcaaagcatgttacatggtctcagtcatttaagggaccaacaaagtgtcatcctcccaggagtcttgaaggataaaagaagcacaaatgttaggaatgtctacctcagccattagacgttgagaatacacaaatgactaaaggaattatcccagtccttagctactcaaagtccagtggggaaggtaaacatgttgattgtattatggtttagttttataaaattttacaaatttcaaaatacatagtgtaactatagtgttagaacataaaataacagaaaatactttggggagtgcaaagatatagaatctacctctctgagtttggaacgagagcaaaacttcagtgtggaggtgatttaagagctgggagttgtctacccaccagagttagagctacattaccttggtaaggttggtgtctgacttattttatgtgctgcgtaacaggtaaactaataatttgggttgtaactctaagaaataggcttacctggttttgagacctcaaggaagaaattaaagcaatctgtcagcagtagaatagatccactagttcaaatgaaatgcagcaggtaagtatccttctaatgaagacttgctaaaaatacttttactgagcaattatgctactgacagttctttgatctcaaaagattaaacttgctgctgcagtatgaaaagaacaaagccaagtgtaaaataacaatcagggttagttattaggcaacaaaggttgcatataggtactttgatttgctcagagatttctgacatattttacattagatataaatgtgagtggtgtgttaacattgcaaacaatgtgctttataaacaaaagagtctcttcctcagatctaagagccatggtattgtcctcttacactgctgtattccccactggctttgcccatcacgctggacatggtcccactgaaagcacctttgtaaaaattgtaacagaaaattatgacagtgaaagagatctgacctaaccaa

SEQ ID NO: 124595 - DNA, 4313 bp, Homo sapiens
catggtgagaagaaactcgtgaacagaatgggcactggcaagtatgatggcaaggcagagaggcccaatccctctttgggtggaggatagagggagaggcaagggaaggcctggccttgaaagtgatgctgggcttcaccgtagagggtcctgaggggtccctggacctctggttagaagctaggactacttgaatgtgaatcaagggccatttctgtgcataaacatgggtggctagggtttggaatcggagaagctgttatatgaggaattggcattccttctctgcaattgcctagcaatgttttttctgcccctgcttttttttttccgcagacaccctcagcatcgtcagcttatacgcaggaattataaaacctttatgtgggactttgatcttgctaaattttgtcaccgtgtattgaacatgttctgaaatgcctgccaaaactacattcatgaagtaacaaatagtcgaataggataattacacctttggttcctttgcccataggttccagcaatgggcgtgttggtgagataaaacacatttttcatggtttggggggtcatccagatcatcttctacagtaacctcaccatgaagcaggactaccacacatactaataccaattctgcgtgtttattagttcttttatattgaaatgtcatgctaggttgaaactatttcagagcttttgtaaataatattggggtggtaaaggttgggtaccaacatctgaataccttgtcttaataaatgaaatatataaagacaaaacaagcccccaatctcaaattttctgttgttacaattctttaggtataagaaaaattctctatgaggaaaaatcaaccctggaatttttttccctctctttctgggtagttgggttgatacctacccagatctcatcttgaattaccatgtgttgtaggaggaacccggtgggaggtaaccgaatcatgggggcagatctttcctgtgctgttcttgtgatagtgaataaattttatgagatctgatggttttaaaaaggggagtttccctgcagaagctcttttcccttgtctaccaccatgtgagacgtgcattttaccttcctccgtgattgtgaggcctctccagccatgcggactgtaagtccattaaacctctttcttttgtaaattgcccagtccagggtatgtctttatcagcagcatgaaaacggactaatacagtaaattgataccagtagagtgggggcactactgaaaagatacctgaaaatgtggaagcgactttggaactgggtaacaggcagaggttggaacggtttgcagggctcagaagaagacaggaaaatttgggaaagtttggaacttcctagagacttgttgaatggttttgcccaagatacttgtagtgatatggacaataaagtccaggcttaggtggtctcagatggagacgaggaatgtgttgggaactggagcaaaggtgactcttgttatgttttagcaaagaactggtggcattttgcccctgtcctagagatttgtggaactttgaacttgagagagatgatttagggtatctggcagaagaaatttctaagcagcaaagcattcaagaggtgacttgggtggtgttaaaggcattcagttttataagtgaagcagagcataaaagtttggaaaatttgcagcctgacaatgtgatagaaaagaatatcccattttctgaggagaaattcaagccagctacggaaatttgcataagtaatgcggagcctaatgttaatccccaagacaatgggaaaaatatctccagggtttttctgttgtgaagcagaaaaaggtccaaggtgtcagagacctttactgcagcccctcccatcacaggcccagaggcctaggaggaaaacgtggtttggtgggctgggcccagggtccatgtgctgtgtgcagcctagggaacttggtgtcctgtgtcccagctgctccagccatggctgaaaggggccaacatagagctcaggctttggcttcagagggtggaagctccaagctttggcaacttccacgttgtgttgagtctgtgagtgcacagaagtcaagaattggggtttgagaacctctgcctagattttagaagatgtatggaaatggcagaggtttgctgcaggagcagggccctcatggagcacctctgctagggcattgtggaaggggaatgtggggtgggagcccctaaacagagtccctactgggggacagctctctaccacctagtggagctgtgagaagaaggccactgtcctccagaccccagaatggtagatctgctaacagcttacactgtgcccctggaaaagccatagacattcaacaccagcctgtgaaagcagcctggaggggaatataccctgcaaagccacaggggtggagctgcccaaggctgtgggagccctgtcttgcatcagcatgacctggatttgagacatggagtcaaaagagatcattttggacctttaagatttgacagccctgctggattttggactgatacagggcctgtagcccctttgttttggccaattctcccatttggaatggctgtatttactcaatgccttcacccccgttgtatttaggaagtaactaacttgcttttgattttacaggctcataggcagaagggacttgccttgtctcagatgagactttggactgtggacttttgagttaatgctgaaatgagctaatgttttgggggactgttgggaaggaaagattggttttgaaatgtgaggacatgagatttgggaggggccgggtggaatgatatggtttggctgtgtccccacccaaatctcgtcttgaattctcacgtgttgtgggaggaacccggtgggaggtaattgaatcacagggcagatctttcctgtgctgttctcatgatagtgaataagtctcatgagatctgatggttttaaaaaggggagtttccctgcacaagctcttttctcttgtctgctgccatgtgagatgtgcctttcaccttctgccatgattctgaggcctccccagccacatggaacaagtccattaaacctatttcttttgtaaattgcccagtcctgggtatgtctttatcagcagtgtgaaaacagagtaatacactgggttttcttatatttatatgtcagaaaacatggatgtgtgagggagtcaagggatgacctcatgcagctgaggccataatgataagtcacctcgtgttactcagtgtggcacaagttcaagtgtatgaaccctttggttttgctccattttctcttctttctggtcatttctccagtaaagcttggttgctgggtacctggagaagacaagcaaatggaagcccagaggacaggagcccaaatctgccaggaaggaggtagagcattcccagttgaaggcttccaggaagtggccatgcctgtgcatcacctcttagggggaacggaccagagggaagaggagagggggttctagtgcggaataccctggtaagagaatccaagccctggtcagggaacaaggaggagctcagtgtggaggaagggctgtgggggctgggggacccagacatacaggaatcccttttccaggctcagaccctggggcaaggatggttcccgcaaatccatcttgttttcacctccagtctagagtgaatgttctccctgtccccctagctgggaaaggagtttttccagttcagagactcaggtccactttctgtgcttaccatctccttctctggtttggtcttcagaagtctctgatcggccttcttcctggtttgtgaagattcatctccttacttccccttggatgagctatccatcttcactttgggttaggtttcctttggctttgtggttcctgttgtcttgttctcctctcccgagcttttctcctggaggcttctctggtgggctgttttcccagtctctcttctctgaatcagctcaggcgcttgtttgctgtcattgtttcccagcacagcactcctgtttcttcatcctggcaccaaaccatcagtttgcctggccccagctgagggctccatttggaatgggagagggtgcttgatgcccttttcaggagtttggatgattgaagcacacctctgcatgttaaaactgtcagagaagccctcaccccacccaatctattaattttttttagaatatttaagttctcacattccccacttcccataagaagaaaaggggaactgttgcaaaggcttgagtaaccatccacctggtctgct

SEQ ID NO: 124596 - DNA, 1968 bp, Homo sapiens
aattttggtatgtttaccttttaatgcactatgattacctgcatggaattactcttaattgtttttgttgtgggtggggggattccaggcctttttgagaatcaaaagatagcacagcaaaagaaatgcacattcagacataattttgcatctcatttcagagggcttgtggatgttctgaagcctgtgccacaagacccctggttagaaagtgcttctctaacttgccttccagaaagcagcatcatggttttacaattattttaccttttctctccttttcctctaaaaacttgatataagtactcattcagttgctagtaaattttttttgaatcaaaatattttactggtgttgaattggaaatcattcacctccaaatatagcaaatgcttcggtaagccctggtaggtggtggtgctgaaaatgatgataactattaatatttaacaaatcctaatataacatttatcatatcaggttgtttgaagtactttaagaacagtaactcatttagacctggtaacaacaatcttatgtcgcagatggtctcatggtcttcttttcccgaagagaaaaatgaggcataggttgagttgcctaagatcacccaataagagaaggagtcaaatttgaacccaagaaggctgactccatattatacagtctaacacttcttctgcatcctctctctaaataagataattaatgtatgtccttgattagagtctcttttttttcattttgacactttcaaaattgagatgtatcttacggttgctgtgatcatttgaagaagtacttactgttttgctccctataaagctattattaaattgatggtatatcttaaaattattggtgtccttgaataaaggaactatggtaagccatgtgttttatttaaaaaatatagctacatagtttatagaaatatcatagtaaatcacagctttaacatggggtatacaaacaatcccaatttatttatgaagtgggaaaaatgtaaattaagattatattaacaatctatatgaacactgatattgcttaggtaatgatctaaatgtgagaagagaataaatttaaattttttcctacaaaaagcattaatagccttagagtaatgttgaaggtggaagaaaccaaaattgtaagtgggggcagggggttaaaatatatatatgtgtgtgtgtctgtgtgtgtatatacataattatcagttttcttacagctttttttaggagagcaaaatttaaaagttaaactttccatataaatttcctaaaactgagaaccatgaatataactaaatgacattagatatagacatgcctttgagtcactgtaatttgtatagtgagttggcagatcttaccttctgtgactcagttaatctgttttgtattcatctgctttgttcatgggacattgacttcttgcttataaaatccttttcattttgtactgtttgtattatctgtagagaaaatatcattcaggacttctaccaaggcaaaacaaatctttactaaagttacaattctgaaaaccagggtttttgcatcctagttggttgtcttcctgtatttttttccaactggtctagcaacttaaactcagtccattggtggttttgttgttcagttgaatttgaccttgtcaaatcatttacctgcagctgttatgaggtgtacatgcaaatacttgtgattgcctaacacttaggactttggtgctgacggcaaatttattttatctctcattactgttgagggaagtgaacagcttatcacttctgcttgctctgacactctaaatgttgactgtaatgaacaaacactgcaaatggttgactcattatattgtgctgtgaatttgtacataggaatgaaatctgcaaaaaaattttttttacgttgagaagaggatataataataacttttggagattaggggaagtatga

SEQ ID NO: 124597 - DNA, 1084 bp, Homo sapiens
attcaccagttgtgccaaattgctcaccaaagaccttcagtgattcccagcttttggattggtcatcagaagggcctaattctctttaaccacccttcactagccagggttcttatggcctgtgctcttcaaaattgagaaactgggaagaacagctggtagccctctgaatgaagttctctctttttctttgcccagatgattccgtctcaaaaaggaacaaagtatccctttccctttgtacaagctggagtgctttagctctgactcaataccctcctctgctagaaacttgactttattgattgagaaatagaaaccgatccaaattatataccagtatgcccaatgtatcgccgttttaggcacctattttacaggcaaagcatgtcatttattctttgtgtttaaattgaaatcaatggctaacatcatagcacttaattatgtaccatgcatattctgatataaacttcaactctcactacaagcctatgagcctatgagttagatgctgctatttgcattccacagatgaagaaactgaaacacaggtgtaatttgcccgaggttacagagtgtgtgccagaagggaggtttgcatctatgtatcctgtttccgtagagccaagtccatgctctgaattaactttagttttcctcaaatgcattgagagggcaaagggtctatttactctaaactgtgatagccttatagtacctgctgatattatcttaccactctgagagaggtaaataaatgccattaataatgtcagacttttcacttttatttgggcacacagaagcttattattgacatattgggtttaggggaagtggggagaagcattgtggttataggcgaaaggtaactaatgtttacttaaattaaaaatagctcaagatcagcctgggcaacaaagcaagaccatgttgctacaaaaaacaaacaaacaaacaaacaactaaaatacaaaacaaaacagcatccatgtgtcataagcaaaatcagccatgctcacttgatcaaggtcaatccaaaaaccttgtgaattcacccagcttactttgttctcatctg

SEQ ID NO: 124598 - DNA, 1940 bp, Homo sapiens
agcttctcgaggctgcatctctcttttcctaggcattttccatctcaggtggaaaatggtccatcccaggtccatctcagaagatgttctgaggattctctgtgtgtgatgggacattcttaaagtcggtgacccagagagtttaggaattgcccacaagtgaccttaacatgtgtggcatttaggattgcctgcaaagtaagtgaggaaatgtgtccccaagatgtggtgtcggaataaacaagaactggagttatagactttgcaggaatccagggaaaagtaggtcaaattatgtttctattatccttgacggttactttttcatggcacagaatactgaagacatgagggctgccaggcagtctgcgacaagaattgctgagggtttctgtataaatagatctatagtatttatttgcgttcatactcatgtttcttgctgcctgggagggtgtcgtataccttgtcaatatacctatttagttttattttttaattactctgaatgtggttacctcagataatgtatgctttattaaccctctttgattctaatactgtattatttctttttgggactttccaaacacatttcgtaactgcatagccagtttttattgaaggaagtttgattgtcagtttttccagtgttggaaacccatactttttgactatttatttgactgtttatttcccctttcttctgccttggaactacctttgtgattttggaatcttccccatcaaaggagtaggaagggggttgaaagaaggagaaaaacaagtgaaatatgaacttgtcttaggcagctcaggctgtcataacaaaataccgtagactgggtggtttaaacaacaggaatttattttctcacagctcaggatgctgggaagcctgagatcaatgtgtaggctgattaggtttctggtgagggctctcttcctggcctgcagatgaccactttctcgtatatcctctcatggccttcccttggtaaacgcagaggaagagagggctccctcttctcataaggccactaatcccatcatgagggccccaccatcatgacctagtctaaccctaaataattatcaaaggcctcatctccaaataatgtcatgtttggggttagggcttcaacataagaattttgtagggggcatacacttaacagtccaaaacacagggggtttgaaagaaagagagatacaagtagaatatgtatcagactggttggttggtgacttgttagcatctgggattgtctggttaaccaccttggattgggcagtgatgctaatgcaaacaaatcatggcttggatctttttgtagaccttcagctttgtgtctcatgggccatacctccagactggagctgcgtgacttcagggataagttaacagaaatccattaccactagtaaagacacagctttgtgcattacatgagttagttgagttttcatctcctatattgaccaagatctgatttaggaatatgtgtggtccttatccatgctgccctgggctcccacaaacctggacaatctgacatcaactgacattaacaaagttctttgtgggttgtgttgctcaacccaggtgcattataggctttttttgttgttgttgttttgttttgttttttttctgagacagggttttgctctgccacctaggctggagtgcagtggtgtgatcatagctcactatagcctcgaccttctggctcaagcggtcctcccacctcagcctcctgaggaactgggatacaggcacacaccaccatgcttggctaattttttttttcctatttcttttagagactgggggtctcactacgttgtaggctatctgttactaggaaaaaatcaaactgccatttggttaatatgcctgagttccttggttcctcagttcagtcacttctagttgt

SEQ ID NO: 124599 - DNA, 1070 bp, Homo sapiens
gtgggtcatttttgctgtcaccagcgacgttgccacgacgaacatccttgacagacacattcttgacattgaagcccacattgtccccaggaagagcttcactcaaagcttcatggtgcatttcgacagattttacttccgttgtaacgttgactggagcaaaggtgaccaccataccgggtttgagaacaccagtctccactcggccaacaggaacagtaccaataccaccaattttgtagacatcctggagaggcaggcgcaagggcttgtcagttggatgagttggtggtaggatgcagtccagagcctcaagcagcgtggttccactggcattgccatccttacgggtgactttccatcccttgaaccaaggcatgttagcacttggctccagcatgttgtcaccattccaaccagaaattggcacaaatgctactgtgtcggggttgtagccaattttcttaatgtaagtgctgattccttaacaatttcctcatatctcttctggctgtagggtggctcagtggaatccattttgttaacaccgacaattagttgtttcacacccagtgtgtaagccagaagggcatgctctcgggtctgcccattcttggagataccagcttcaaattcaccaacaccagcagcaacaatcaggacagcacagtcagcctgagatgtccctgtaatcatgtttttgatgaagtccctgtgtcctggggcatcaatgatagtcacatagtacttgctggtctcaaatttccacaaggagatatcaatggtgataccacgttcacgctcagctttcagtttatccaagacccaggcatacttgaaggagccctttcccatctcagcagcctccttctcaaatttttcaatggttcttttgtcgatgccaccgcatttatagatcagatggccagtagtggtggacttgcctgaatctacgtgtccaatgacgacaatgttgatatgagtcttttcctttcccattttggcttttaggggtagttttcacgacacctgtgttctggcggcaaacccgttgcgaaaaaggtcaaaat

SEQ ID NO: 124600 - DNA, 1170 bp, Homo sapiens
acttaggccacatcgcactctacccacttaaatgatatataactatctcagagcctcaattcccacattaaaatagggatcgtagttgggagttgtgaactttcctcagtgtctaatgcacagaaaccattcaataaatgttattttagtattactgatactgcatctagtaatgagatagctttgttttctgggtttatcaggcctacctgttaatggaaatcagtaatcgttttccttttgattgacttcattttatgtctgctcacatttttgtttttgtttatgataggtaactgtgctcaaaagaaaagtgtatttgaatacagttctgtatatttaatttgtttgttcagtgggattgatccttgtctttcacaactgaatttgatagatgaggaaacaaacataaatgtataaaattttctaggtcttaggttatgtctagaagatttttatttcggaatttaatttctttcttctcttcacaaacattttagcctactttggggataaaggattatttggtcttctggatttggaggcaatcagcggacagcatggaagatgtgtgctctggctcggataagagatgggacatcattcagtcactagttggatggcacaaggctcttcacagacgcatctgtagcagagtggaacttgtactaacttatgatagaatgtatcagaataaatgtttttaacagtgttatgcttgagtcttttttgaattgaacatgctaggattatcaggtaaaaattaagccttttggtactttctcaaaacagggaatttatgtgtgtacctaggtgctatttaagcctgtaaatcccagcactttgggaggccagggcgggtggatcacgatataaaaaaatttttccaagttattcctgcccattgacctaacatatggattacagtttccctttgcagtgaattaataactccttctaggatattccgaggtagtaagaatacagatagttctgtttgtgacaaaccaagctgttacttcctcctctgcattaaagttctgactgcaagaaataaaggtcctggcggctctgttgctagggggtgggaatggcactggagagttgtgtgatttatttgtaggttaaatgtgaggctaaagtttccctcagttatattaggaaactaga

SEQ ID NO: 124601 - DNA, 1083 bp, Homo sapiens
tttggaaagtcgaggcaggtggatcatttgaggtcaggagtttgagaccagcctggccaacatggtgagactctgtctctactaaaaatacaaaaaaatttagctgggtgtggcagcacgtgcctgtaatcttagctattcaggaggctgagacaggagaatagcttgagcctgggaggcagaggtgacagaggttgcagtgagccgagatcataccacagcactccagcctgggtgacagagtgagactctgtctcaaaaagaaaggaataagatagcttgttcttcctactgattagtcctggacataatttcatactctaatgaagattggagacttctgtagcgtaggtaaatttagatagtactggttggtctagatatcattctaactatcctaggttggattacaaagaagaaaaagtcttgattgtaaatgttttgtctgctggggttttaattaatattttttctcttctgtcttccttgattcaggatttaagaggggtgcagatcccggaatgcctgaaccaactgttttgaggtactgctcttaaaactaaacatttcaggacaaatgttcatacagtagtactgaatcactaagatgtaaaagagtaatagtggcaggccttgaaatggagctttatcagtcagtatagttttgggctattggaaaactgcaactactttctcttccccctcctaatttgtatttactgtaccatgttataactacaatgaagcatattttaacagaaaaagaatttattatcctaccactttaaaatacgaactgttttaaatttctcatattcccgtcttatcctcattcagatgaatacaaccttttatatcgctctgacaagggtatgcaggattttgttttcacctaaaattttagttggctgtcccatatgttttccagttgcggtttacataggtttttcaatttttcagtattttatacaacaatacaattaacatttgggcagggtgtggtggctcacacctgtaatctcagcactttggaaagccaaggtgggaagatcatgggaggattgcttgaagctaggagttcaa

SEQ ID NO: 124602 - DNA, 1025 bp, Homo sapiens
caaattctaaaatgttggcaagtaattaaaagaaatttttttaaaaaagattgggatcaaagaaaacatggattcgggccctactgagtgtcacttcgtaacctttttgcagttcaacctcaggtttgaacaacctgattctgagaagttaaataatttgtccacggttacacagccagtaggaataagagttaggactaaaacccagtccctctgaatttaattaatgttccttccatgagaaggaaggaacacctgaagatgcgttttaaaaatgggtaacagaaacgcgaagttaccgccagccatgatcgcaaccacgcatgcgcctactactgccggcgaggcggaagagcagggaaggttaaaggcgatgaattacgacctctgctggcgacgctcacgactcctgccgtaaaggccgtgtgtggcgcctgcgcacctcctttccctttcggattcccgacgctgtggttgctgtaaggggtcctccctgcgccacacggccgtcgccatggtgaagctgagcaaagaggccaagcagagactacagcagctcttcaaggggagccagtttgccattcgctggggctttatccctcttgtgatttacctgggtcagtgggagaagaaccgggaaagtgactggagggaagagggtggcggagacagcagccccatttttggccgtcgggggagggagagaaaaataggggacactgccgtgcacggcccctgaggctgtctggtcaagtggggccgatctaacctgagttcgagttcccgttctatcgctttatagttgcatggtctttaagcagtcttgcaatccctccttttctatttttgcatccttaaagtggaggtcatatttctcgggattgtagggagggttggatgaccccagtggatgtgaaagtcactaattcactctctagcactaggtggttctcggggtgtttttcctcaccgctccatgtggtcctaagtggaaagagtcctgttcagggaatcgagacacctcg

SEQ ID NO: 124603 - DNA, 1061 bp, Homo sapiens
gtgactgggtaagtgggctcggaccttctggacgcaggagccgaccacgtggctccggggctaccccgtgcgcttcctaggcgcgcctctcgctgcccccacgccgaggcctcggctcggcgccgcggggaagcctccgttagggcccctcgggggtgggggcgtcctcgtggcgcttgggcccttcgtcccgggttaggacggcccgtgtccttgtgcgcttgaaggggccgccccctttcctcgaggatcccacccccactcagcagaagccgccaggcgcccgtcacctcccgtgcctgagtccctgccgtccacgcattcggcctacaggcagcttttagtcctttttcaattaaatgattgcattttgaggatcaaattccaaccgcaggcggaggcgccgagccccggacggtctctgggttcttggtgcactcggggctcctgcctgcccaggggctgtgaccgcgcggacggaagcctatttgggaagcgagtgagatctgatgtctgaagcgctttaagtttctaagcggggcagtataatagcggggttagcaaacacacggaggtcatttcactcgcgcagccatcccccaccgccaccagtgccgttcatttgctactggcccgcagtcagataatttaaaggcttggagggacgagtcttgctggagccgacgcctacagtaagttgagcggagtgctgtgagccctaataagggagcctgctttcctcccgaagattcgcttttttgggagtggccagagcgttattacagcacagggcccgcttccaacgtttaatcagggtgtgaggaggcccttcgtggttttctgacctgggaaaagtctgaactactgggttctttctggcttggaccaggacaaggtgttgaacgcctaacttaggtctactaaggtgtagaaatacgcaaggctgcccctagagaacgtttgtctggggaataatgtaagtttttggagcggctctcctgagcatcgctgagcatactaattgttcattactggtacaaaatgctatataaagggatact

SEQ ID NO: 124604 - DNA, 2075 bp, Homo sapiens
ggctttgttttaccattgctttaggtgttagagattcttattgagcccattttatttttattttattttatttatttttttgagtcggagactcgctctgtcacccaggctgtggtgcaacggcgcaatctcggctcactgcaacctctgcctcccgggttcaagaaattctcctgcctcagcctcctgagtagctgggattacaggtgcccgccaccatgcccaactgtttgtattttttagtagagacggggtgtcaccttgttggccaggctggtcttgaactcctgagctggtgattcgccagcctcagcctcccaaagtgctgggattacaggcgtgagtcagcgcacccggcctgccaaattgttttttaactattcagtttaaactgtgagagacaccatgtcaaggaagcagtgtgagctagcgtctaaggattgtgaaaactgagcaagtgcccagaactagaaacttcccagccccctgaactcagcctcagggtaagcgagtttaatagtgcttcctttgattttcaaatctgtggaaggtttgtttcagtttttcccagacaaatattgttgggatagtgtttcttttcaaaaatggataggattcaatgctcatcagtgggaagatagtgactcctgaccattttcctcctagctggaaactacagaagactcccaagtatcaggaaatttggagaatttgtacaggaattatattcagagatagcaatttatttactcatcaaagagagctattggatagccaccataaagaccactcattaaaaaacaaaattgcatgatattcttaacattgtctttcactttttttaaccaggcttggtggagtttcaagatgctgatgaacttaaggtatgggccgagtggaaagaatttggtttaagttattaatagttgaattgaaattgtggccaaggatgagaactctaatctgattttatgtgcttctgctgtgatggattaaaggatttacctgaggccaaattggtatgcaggaatttattaaatggaatcataccccccccccttttaaaattacgcttttggtaaaagggaaaaagctcttggtaaatggataatactactaagccaagagaaagacaggattttgagtgaaaacataaatttagatgtcacaacattactaaagcaacagtgtgtaagatactggacgattttatttacttacttgcacagtttttgtaaacagtctagacagtactgtattttgctatttagtaatacctactgtgatacttcttttacaggtctggcgcttgaaagaatcagtgaagcttttcaagtagaggaggtatatttgaatatgtaacctttagtatctacagaatagaggttgcttttttttttttttttttgtccctttcacagtggtagcaaggttgaattttgagatggccccaatcatctataggaatattatttgacagttttggagacacaaaactgccttatagctgacttgatcctgtagaacatttctgtggaattcaattctattatttaaggtagtttttccatgaaccagctgtggtctgtaacttgacagtgttaataaaacaagtagcaataccttcatcatggttcacatggtcaacaaagatatgacttaactctaagattgttattttacagtatagtcttttttttttttttttttttataatagatagtttcactcttgttgcccaggctggagtgcagtggtgcaatcttggctcactgcaccctctgctacccagattcaagcgattctcctgcctcagcctcctgagtagctgggattacaggcgcgtgccaccacacccagctaattttgtatttttacacatttttgtttgtttgtttgagacggagtctcactgtcgcccaggctggagtgcagtggcacgatctcagctcactgcaacctctgcctcccgggttcaagcgattctccacctcagcctcccgagtagctgagattacaagctaatttttgtatttttgtagagacagggtttcaccatgttggccaggctggtc

SEQ ID NO: 124605 - DNA, 1099 bp, Homo sapiens
ataagtcttcagtgttttctttaacagtacaattttagaattttgtttgttggctttaggaaatctcagtggcattacatgaattgcattatagcatgtacttagaaaaaagaacttatggctgggtgcggtggctcacacctgtaatcccagccttttgggaggccgaggtgggtggatcacctgaagtcaggagttcaagaccagcctgaccaacatggcgaaaccccatctctactaaaaatacaaaaattagccaggcatagtggcgggcacctgtagtcccagctactcaggaggctgaggcaggagaatcacttgaatctgggaggcggaggctgcagtgagccgagatcatgccactgtactccagcctgggcaacagagtgagactctatctcaaaaaaaaaaaaaaaaaaaaaaaaaaaaaaaaacagaacctattaacctattagacacttgaaaaaattcctggcttgtagttgattatatgtttggttaattccatttcatctaaggaactaagtaatttaggaaatgtgttcttaactactcttagaagggtacttgtagagaaccagagtggtgattttgtaagcagtattttgtcctatacaatatgcactcttccagtaactccagtagtccacatagctgactcacctcctacaacccgactttgttaatatcaagataactgttttataattgtagagaaagattttttacaaccagttgtagttattattttctttgcattatgttattgtgatagtagtggtagctaatatgtgtaattaaaatgatcatcttatcctcaaaatcatcctataaagtgcatagaatccccattttacagaagaggaaactgaagctctcaatagggtagaggacttggctaaggtcacctagctgctgagtggcaaaactcagccttgaacacaggtcttaggactctcactttatatagcttggtaaaagaagatactaattaaatcctacctaatagagatgtatttaaaattcactcaccccatctgtcttacaggtaatagttttaaggtaagataaaatcaaagtgttctaaaagtaaatcata

SEQ ID NO: 124606 - DNA, 2467 bp, Homo sapiens
ttttatgagaagaaagtatcagagtgcaaacaaattactcgtctaatatgtagaattcccagtggtctcacagccctagatcaaatgtgtcagacactagatcattataatcttcattggttttgacagctaattaattagtttaataatattgacatatggcttcttaagtatttgaattctagattgctaatgatccttatttttgcagtaaaaaagtaacactttatatttttcttgttaactataaatggaatcagagctgtaaatgcctgaaattttaagtgtgaaaaggggtgccacccttttatatactgcacaacaaatttgcatttgtatattctttttaaaaaatctctgaagacttgctcagtgaaatggttctgattttttgcttcaaatgatttgcactaattgattttctggagagcggagttacgttaacaacaaaattcttttatagttcctttgatactatttcaaataaggattacacattgaaagtttttatagaaattatgaaaattggataatcttaactatggtaaccattactattatccatactactttctccccactgaactttcaaatttgaaaattggggtagcttttgtaggtcactttcttataaagatgctgatggtcacagatctcctaagtatccagaataatatttttatcatgagaaggattccacacaaaattggggtcttgcaccccatatttcagaggatctgaacagaaattgtggcttcattgcacattttaaatctctatagattcttgaaatcacccaacctctcacatttgaaaacccaacggcctggagtattctggtggcactggagccagcactagctttttggaatccaagtggggagagaaacaaaaatagacttttcaagggactgtcccagactacccagggcaaatgtcttcccttcccttcctgaagccacaggaaagcaccctggagtcctttgtataccactatggaaatttttaaggcaagctctcaagacttgaagagttggaattctcggcatttaaatgatgcctgaagtttgttttgaaaaagcaatatttcattgctcttttcaattgtgaagcaactgctcagcaaatattactcatttttttaaaaagttgaattaaagggaaatatatttttaaaaccaaaatagatcaaaatgatcccagttttaagggattttgcctattttggaagaataaaactaaaatgttaaaactgttgaattacagagaacagatgtactctgagacataattttaaacaaatatttaaaataaggcaggttaacatttgcgtttaggcacaataaatctgtattaaagggaagcacatcaaggaaatatatacatgttgaataatgtaactgaaaaatattttttaaaaaccacttaaaaagaaaaataatttgatgggtactttaagcattgtagatagaaattaatgtataatagtgtcctcccagtctttgtatgaaaaattaaaactctctagtcctttaatgagcatgaatttatacttctacatttgttgcttagtaaaattatactcagtactttgagttattcagatttatgtttaatattgttaaattcttcatcagagagcataaatatattgtcttctatactttgtaacttgtgcatatctaaagaaactaacaacgaacattttgggagatgtttttgtgtttttttatagtagagttttagagtacatttgtcttaataggaagtttttaccataaacccaagattttatttcacgtattgttgctttctcttatatggaacttattgtgtacctcttacctttatttctaatcatttagtgatactaatcttttcatagtaaatatatttgtttctaattgtattcctagagtttacattcctaaagaataaacgacgactttggctatttttgtgtgttccctaccttcttaaggctatggaaataaactggagtttagttttttgaatttttgtatatttgtgtaaatgttctccatatgtagtactttatacaacaagtgttgcctcttgttttattgaaataaaaactgaaaaaaatattttttccagatcagtttactcatttaaaaaattattataaaaatttgcagaagttttgatatgaaggaagagaataaaggaggaagacttaggtaagttgagccattgagagcttttgggggtaagtgataagacaatgacctcattcctggctttgtgctttacatgtcatagggctgaggagtatgacaggtccactcgtattcatccaaagatgaagatgagctctatgggccatgcaccagtggcggattatttgtcatatcagaagcacaggcaaatttaggtaacatcactttgtccttctaactttagaatctttattgccatgtgtggtgagtagtagtcccaactactc

SEQ ID NO: 124607 - DNA, 1031 bp, Homo sapiens
ctagatttttttaatttgataaaataatctacaatatagagtacaaccttctaaaaaagtctttaaagtattctaataccaattttttaaaagttccttggtaagagctttgattttatactgctttgctactgaaggagagttcacccctagttttactgcgtgatatttctaattgtttcttatcttttgcatgaataggagaattctttctaaaaacttaatggggtatggtttatggcatgctttttgtttaatacactataaattactgtcatttaattacagtgaagtatttttgacattttataataaatgttttgatttatcctttgattttctataatctgttgctttataaattatgctaaagcttaatttatgtaaagcataactgatttggtgttaatcatttaaaaagattgcttaaaatacttaatgttaattaatctttgtcatttctttgtttaggaaatacagaattaacaggtcaagaagaactgatggagatatctgaagttgacgagggattttattccagggctgcgtctagtaccagccagtcgggtttatcaaacagtagtcacaattgtagtaacaagccaagtataggaaagaaccacagacggtcaggaggaagcaaaactggaggaaaagaaaaagaaactacaggggaatcttgcaaagatcactttgctcgaaaacaaactcagagagcccaaagtgagaatcttgagcttctctctttgaagagacttactttaacaaccagccaatccctacctaagcctagtagccatggtttggctaagaccgcagcgactgtatttagtaaatcctttgaacaagtcagtggtgtcacagtcccacataacccgtcatctgctgttggttgtggggctgggacagatgccaataggttttccgcttgtagtctccaagaagaaaagcttatttacgtttcagaaagaactgaacttccaatgaagcatcaatcaggtcagcagagacctcctagtattagcattact

SEQ ID NO: 124608 - DNA, 1660 bp, Homo sapiens
tccagtcaagtaacacattcacagcttacccttctcatgtcttctgtatgttttctcacttttatttattctaataatttaatctcataacagaatattcactcaattcatcaaaaaaagatgtattgagtgtctactatatacaagctacttttccaggtactagatacatagtagtgactagatgaaaattttaaaaactccttcctcatggaacttaggtctaggaaacaagataaataaataattgtaggttagagagtgttaagtgctaagaagaagaaaaaaggaagagggtatgtgaaacgtgggggctattaaaactttggatgggttgaccaagggagacttcactgtaaaggaaatttttgaaaaagatgtgaagtaaggaaatgagccattcagccaccaggagaagacagcagccaggacagcagtaagacagtgtgggtgggaatgtcgggtcacagagttatatagggaaagaagttggagagctgatagagagcaagattaggtaacaaatgtttgtttggattacttaattatctttctttattctgtagttttcctgagaattatgtttctgttctttctagctctgtacagaattacttgctcttcttataaatttaataagcagtttaaaaaatctgccattgttaaccatttttgagtgataacaagtatcaattaattaggtaaagacttatgcttgtgggaaaacacatgatcttatttttctacttgccatttaattccatgatttttttaaatgtaatatcattacttcttgggctgcagacctttattctgataaaagtgattacatttcagttgcgtggtactgctttatgtaatattctccctgtcattttctagtttttcttgcaaaatcctgaatttctgccattgaagcaccactttagattaacagctttcattggcatctcttaaaaaattgacccaattaaaaaaatacacagacctaaactcaagaattattactttcctaggatttcttccagacttttattttctccggctctccattcaaagtaaattgtttgctttttgtaaaatggccaggaatctacatgaataaattaaacctaactgtgggatgtcagaggatatttaactcaaacggactcgaatgaagagttagagttagtatttatagtatgttagaagagacatttgaagttaaaagattttactggttagcttcccccactgaatagttgtgtagctcttcctgaacttcagtttccttgtctgtaaatgggaatcaaattgcctacttcagaggctcactaatagattgttttgagattacaattgaataatatatgtgaacactttcaagaaagcgacttagggcaattcattgtaagtattgttctgtattctattaggcctatgcttagcttttaaaattttattaaattttaatattcattgccttttttatgtctggataatttccgaagtttgattttttttggactggagatccctttagtagatcttttgtgaaacagcttccacaatgtaaataaacaagtcttggctgtcactccacagtgccatggcgattttatctcagttgcagtgacctctggcatgtacctcaataagaatttatttgccctaactt

SEQ ID NO: 124609 - DNA, 1117 bp, Homo sapiens
gataaagaaatgtataacatagggtgagcaagttgttctttcttttcttgttttgttgaagaacagtataacaacatgatagtaaactagattaggggatatttacttataattccagtatttaaagaattttcatttagttttttctatgcatgtatgttttcatggttgtactctatttaaacttttttggtattttgtttttgtttagttaatattgtcagacattttccctagttctcctagtaaatacagttattttaatggctacatgatatcacattgagttaatattccatcatttgcttaatcattcttctaatatgttaagaaatttgtttctgagttttgctattataaataacactgtaaggaatagcttaatgaatacagataacatttttctccattgaacagaatatattataaacataaaatgactatattaaaggatatttgttctggtatggcatttaaaatatctacatctcataaattgtaaaagaatgtgtatgactttgttttggggtttattctaagttaaagtatttttcataattcatgtaaaaaattgtatgatgcagacaaataataaattatatttttaaagcttcagcttattattttcacaaataagtttgtaagcaccccatgtcagagccagatgcctttagactcaaagtaatctgagtacagagatgtataaattctatgaataaataaattattcttttattaaaattctcacctttagtaaatatggcagccataaaacaaataaaagcaaaagctaaggtggttttgtaagtgacataataaaatagatatttgggattataaaatgacatttgagagaaatcacaacttttcgtcatcagttttaataatatttgcaatttgcttcactttttttcttaaagctggaagaaatttttttgggcaaaattatttgagtacctttgagaactaatttggaaatgtctattaaaagtattctttaactttcatttctacatgtggagagtttacctatttgtgcatatagggggttacacaaataaaatatatcctgagaagtttctttttggatcttttttgagctttttgaattatttga

SEQ ID NO: 124610 - DNA, 1292 bp, Homo sapiens
tgtcttaggattgtaccctcattaaagtagcattcttatcacctgtaccccttcacaattctaacacttgggaaactctgtttattataacaataaagtcacagatgagaatatagaagtgaatgaactataaaaagtaagtcacatgcatggaacaggtacagaatacagcttagccttgtttatcactcttctttagtgtgaattccctttatccagtggactctaaaatactcttaagtccttcttatttgcctctacaggtaggttgcagtctcctccctttttagggtagtcttggctttcccttctagagcagtaaagttaccatgttcggctgaatttgaaaggtttctattttccatcctcatggtcctgcttcctacttgaacacattgtttttctaggctctctaacaggcactggcttcctgtggggaaggtagacacctttgctgtacttcttagatatatagacaattctcaaattataaatagatttttaaatttaattttgtttatatataaattacaaatttctcaaattatagattttttaatttaattgtgttaatatataaattctattgttaatatttatatataaatcaaaacaaaatttgtttatacatttctttagaaacaatgttaaagggcttgtagatcccagggtgagccacaacagcctttttatctcataatgtttctgaaacataggactatagaatgtaagttcagtttatggctgtatgaaaatacatttagagtttctatatttaatggaactctaaatgtgtttcccattccacccactcatatccctactattccctcaccacaccaaccctcacagtaggacaaatttcttcccaaaccctcagctgtatctatcatacagtagaaacaaggaatatcccaccttaagccagtggtgatgaggattgggaaaggagaagggacgagaaccatgaactttaagaaatattctttttttcctctttctccttgcctctttgttttcctagtttttggaaagaagaaagcaattggcccttttttctttttttctgttggagctcttctctttttcttttacttatttgtctttatttattattgcatttcctctaatttctcctctttctatcttttctgggtagaagagggaaacgagtgaatgaggttttctcatggaagacgccaagtaaaactttcctttttgcttttttttttttttccatctccctttaccataaaagaatatacgtaattaagccatgtgaatgtactggt

SEQ ID NO: 124611 - DNA, 1044 bp, Homo sapiens
aggtatggcatttggaaaaaggtgaataggctaatgcagtagttaacaatagagggtaaggctgtgataggagctgaagctagaaagctaggtttaggacataaccatggtgggcctcaaattccatcttaagcagtttagactttttttgcactgaggggttaggaaggtggctatgtggaggatagattggcaaatgaaaagatggggaatgcaagaagactaggaagctatgacaatagcctaggagggagctgttgagaacctaaacttgggcagcgtcaggaggagtggaaagaggtatggtagaagagagggatctgaagtacataattccttttgtacttgagtttgattgatggcatgatagactctaacagcagattcagtggtaaagtaacatatcctggagtccagtccaatatggatctatgtatctctgggatgaaactaccaaaattgagggaggctcttcttttgagtagttaacctcttttggagggggtatagaatatcccactcctactggtaatactataatgcgtatcatgaattttaggtgctgaagggattagggagtatattgacaagccaaaaaactttaactggaataactgaattgaagaatcatatttgtcttgtctcttccttcttcccaaagcttcttaacttgtatagaatgcacaggtaggctgttttcttgaaggattttactttttaaatattgagtgaaagctgttttaaggttttccatgtttggtttagaattatatatttcaccaaatagggtaagtatagccatacgctttatgttttttaacaaatgttgttgatcatttattatttattattttgagaagcttaaaaattattctgtcatgaagtatgttttaactaggctactttggaaagtgtttgtaggataaatttatgattggctagattagtttatagcattccttttattcagataactctagtgaatatagctctaatggttcagagcagtgtttctcaaactactagtgatgatggaccagtttt

SEQ ID NO: 124612 - DNA, 1036 bp, Homo sapiens
aacaaaacaaaacaaaaaactttgattaaatcttgtgtgtgtgtgtgtgtgtgtgtgtgtgtgtgtgtgtgtttcctgcttgtgttatctttgtgattaaaatagtctgttatcacggcttttttttggcagattgatggaaatagtcaagtttaacagttgaatgctatttcttctagggcattcttatgttaatgatgaagtaaaatatgcaaaagcaaatgtcgacagctatccattctttaagatgggagttgtggaaagagagcatgttaaagggtgggttgtaggggtgagatcagctagtaaggtaaaaaatggaaaaccatgactgatctccttccctttccatctgtttgtttattcccttcccctcctggtttggatatatagacacctaggaagtgcagtaccgaggagtgaggggcagagcagcggttaacagcagtagtgtctgaggaagtaggtggttggggtgaagggctgcagaggtggcgtgtagaagaatagccagagtagttacattggtagattggttacattgagcaaataagttgattgaagaaataagtaaatattttgaggataatgggagttagatttctatctgtctgaaaaaggaattacaatcatggaacagcgaaagccaagaaagaactctaaggtgttgtgttggaatcattatgaactcatgggttctaagtatgcatatgatacatatgtgtgtatgtatctgtacatgtatgcatgcatatatctcctagctttgttcactgggaggacctagaaacaatggcaccctggtcgcagtgagtacactaagctcccagatcttgttttccaaataccatcttccactacaagaaaccagagtatgaataaataggaaatattatttaagtaatattttatcaatataacatattatgtgggtaacaatattttattaacatttttcataaatttaatgcaagcatagggaaacttttcctttaggaggagagagtgaatcatggcctgcaggaaataaaatgta

SEQ ID NO: 124613 - DNA, 1043 bp, Homo sapiens
tttgccttttcattctcctagtggtatcttttggtgagtagaaattcttactttcaaggaagtccagtttatccttttcccctccttgtgattagtgcttttgtgcctcttgtttaagaaacctttgcctagcctaagattatgaaagtactctcttgcattttcttctaaaagccttatggtttactgttcacaattagatctgtggtccaactgaaactgtttttatttttgcatacagcatgatctctagggtcatggttctttttgtcctccccatgtagctatccaaataacctagccccatttattataaagagcatcctttcctcactgaatttcagtgtcatttttgtcataaatcaggtgaccatatatgtgtgggtctgtttctggccactctattctgttccattggttgttttctattcttctgacagtgccaccactggcttaattactatagtttttggtaagttttatactaagctttgctgttggaagtccaggtcccacagttctgttgttcttcaagacagcccttgactgttcttggttccttgtatattcctcttgatttcttttaatttttgaaaaattaaccttaattttaactggagagttattttgaatttttgtaaaaattttacctccccatttctatgtaacttgatgtagtgtggttccatttgtgataactttctgtcctaatttattaaacaatggaattcatacaaaagaaaacttttgtgcatttatattggctttgctttacaaatatacataacaacataaaaaaagtagatacaggcagacagaaaataacagtaagacaaagagaattggttatgaaactcacagtattcataatataaaaacaaacaagttactccaaaggagagattttcctagtactgaaaacttaagatgtgaattttctagactctgttggcttttaaggaggataaatgtcatctagcagtgctttggtaacattttggacataatttcaaagcccagtttctccaaacagacagttctat

SEQ ID NO: 124614 - DNA, 1060 bp, Homo sapiens
cgccgtggctttcacctttaatcccagcactttgggaggccaaggcgggcggatcgcgaggtcaggagatcgagaccatcctgactaacacggtgaaaccctgtctctactaaaaatacaaaaaattagccgggcatggtggcacgtgcttgtagtcccagctactcaggaggctgaggcaggagaatcgcttgaacccgggaggcactggttgcagtgagccaagattgcaccattgcactccagcctgagcgacacagtgagactccctctcaaaaacaaaacgaaacaaaaaaagcagtagaagagaaatcctaattatgcttgctgtaatttgtgttgactatatttttatttaaaatgtttttataaagggaatccttctagtaagcttccctactatacttataatatctaatttttaacaattgctgttatttggagatgagattttttttttacccatgataatgatgggttgagaggaaaggaaggacaggccaagaaaaagcatgtaaagaaaaataagactaaaactttttgttttcactatgagaacatcaaatatgtcatacaattttaggttgcacctcagaaaggccagcctcttcatggaaatcatattgagctagtcacaagatggtaattaaagcagatgctctccatgtcaccagattatagagctccaaagaatttattgtaatacagtgtgatttactgaatttaggtttcatcaatcaggaattagttattggtgaaagggtctaagcagatgtttggtttttctataataaaccctttcttcaaaaacaatgtgtaattgaaaaagaaatgcttaaaatactttagggattaaacaatcttataggactttcaattactttgggaggaaccaagatagaaatttttgctctgctaattttagcctcacattcagctacaaaacaacgtctaggttacattctgctatactagtataagacagtattattgaaaactttatcttaaaaataattttatatttcagcctctgctaaaacaaattgactcttagcccagt

SEQ ID NO: 124615 - DNA, 1543 bp, Homo sapiens
tcttgctaacacttaatccttatttctttttcttaggacattgatcagaacttctagaataatattaagttatagcagtgaacagtgaggatccttggcttatttctcatttaaatggaaatgcctttagggtttcacagttgtgtgttcaaaatttttatttatggtatgttaaggaaatagtcttctatgccttttcagggggaaccaagatagatattcagtttgatcacatgccctcttaatgtaccttgagatgatcatatggttttccttcttttacctattggttgatgaattgtgttagatttccaagtagctttcatcaaacagttgctgttttagggataaaggcaacttgataatagcatatctctttaaaatagtgctatatttgatttgctatatgagattgatctttagtattccttttgtattacctttttaaggttttgatttctgaatatgccagctttgtaaaaagagagactgagagagaagctttccatgtttccatttttgcatgtgctctggcaattaatctcttccttggaagatttgaaatagattggctctaaaaatgtctaggtctttttggactgaatacaattataaagatcttaatatgtgcttgtgtactaagtattttgcataattaatttcatttagtccctatataactttgtgaggtgaagattattatttctattctacagataaactgagactcagaggttaagacagtcgtccaccatcaataaagtacacaaagtttaaactcaatttctatctgatgtaatagcccatgttttctaatcagtaccgtaatgtttttcttaattaggactctttcttcaccccatattactgagaagtaaatttaatcattttatttgagcatcttattaagtatttttcctctttgcacacttagttttaatttttggtaaccctgttatattatcactgttctgttctgtgttgatgtgtcatcttttgctattttaataaatactgtgatcttggagtgaggtgggatagggtgggggaacttaaaattgttgttcatataatgcacttaatataatttacattttaattcgttgagtgttcaagatcaatttgcattcctgaatcttgtttgtaccttgtaagaatgttatgttaagtgtaccacatacaagagatcaaagagttttggaaacacagtacttttccattttagtttgaattatttttgttgtgagccttgcatcagggtagctttttagtagtaatgttaagtgatatatgtttggtgtgcgttttcttgaacaaagagtcttttcatagttgacaaacattagttgctttctcatataaatacatagaattcagtcatttgtacttgacttaatgaaaacataatatatgagttattaaactgtaccatgaagattaggttttagctactggaatatttatatttactattatgttgagtgatgtataggcttggaaatttaagagaataatgtaagccttaaaagtgcttaaattggcc

SEQ ID NO: 124616 - DNA, 1011 bp, Homo sapiens
ctgctcttaaataaggatccccgccccctcctgtgttccccggtggagctagttgaagaggagtcctcctgttcgtgctaatttagagcagaagcagccatcgataaataccatgccatcttctaagggcactgtgcgcctctgttattaagaggagctctttgttctgtccttggtgtgtggtgcattcgtgaaattctgcagcacatcggcgaaaggtgggttatgaaaagaacggattttaacgctggcgaaggtgaaacaaagaggctttttttttttttaattccataacatctacaccgataagcatagaaagtcactttttcctttctgtaagctttatttatagataatacacatctaagtagatttgtgggaatgtttgggttttgttgactgggatcctgtttcaaggggacaaagcaggatgtgagttatgtgtaactgcaaaacctagtttgctttgtctggtggttctgctgggaatatgggcaacagtagaggaatttaagatttttatgaagatattaacttctggtttctataagcaaacgctgactgctgggattttgtctttgttcaccagctcctgctacagtgcaccagtgcagtctgtgggaatgcttttaaatctttcctggcctggcctttgtgctgaagtactgtgaatgcctgaattcgttaatttatgtaactgactttcatgtatctattttcaaattcatgttcctttcatgtaaacctttttgtatctacaataccacagacttcaaattgctggtgcatttagctattgcctgcctgtaatggtagttgaacatagttaaccagggcttaaactcgttgaagactcattaggttccctcccactccctcgaatatatgttttcattcgtggatcatagcattgtaaagcattgccttaatccctaaatagggtgaaactggattgcagcagcaaatatttacttgaggagcagaggattatctgagactgtccgtttagct

SEQ ID NO: 124617 - DNA, 1476 bp, Homo sapiens
taaaaagtgactcacatttcttagctttggagtatattaacatcacttatttaccgttacaatagaagtacaattactgaaaaatcagggttctgttactgagtaggaaggaaaaaatggttacctggtgaacaaccaggggtcccctccacaatgattaactgaccttaatctgccaggttctcctgttgtcagtggtttggcatgtgattcaaacagttctccaatagcacttttatcaacttcatggaatcatgcatcttttgcaagatgtgcagtttcacttcgcaattgatttacattatggttatattgtattgtcctgtttaacatcataacacaggaaacaattgaccgagaatgactgacaagggcagttgatgggaattggcagaaacagtggctggtctgagccagagtaggaatgtttgagtgaggaccaactttataagtgctcttgttctttagtaaatatttttgtgttatgactacttttacatccctttacaatctcattgctttaaggatcaggataatgagtgcctagatgacaaggacccctctgtaaacatccagaaacattccttcaagaatttgagaacattgtgagattagcatacctcagttccaatcctgctctctcattatttcattttgttattttagataacatgatttgggtcattccatctctctgtagtatagtggccgattctatacatagaggcaaaaggggattctgcagagccagcagcctcggcttcttctaaagccttttcctacattgtttttgtcatttctagccttttgtttctaagtaaactctccagtgaagtatgggatacatataagagggcacaaatcataaatgtatagctcaattattacaaagtgcacatcccaccaacaagacgagaacatgaccagtacaccagaggtccccccttatgcccttctcagtcaccaaccccacagtagtaacaactattctaactctgtaaccatcgaagttagagcagaagcaaccattgataaataccatgccatgccatcttctaagggcactatgcacccctgttattaagaggagctctttgttctgtctttggtgtgtggtgcattcatgaaagtctgcagcacatcggcaaaaagtgggtttttcctgtgtttgaacttatataaatgtaatcatatggcataaactcttgtgttttgttttcttaaagccaacattgtttgtgagattcatctgtgctgtgtgtagcgctacttcatccttgtggtatatagtatcccattgaatgaatatagcacaatttatccattctatcattatgaacatttgggttatttctagtttggaactattaagactagtactactttgaacatttttgtacactttgtacatgccttttggtatgcatatgtatgtattaatatttgtgttgggaaataccaaacaggaatttttga

SEQ ID NO: 124618 - DNA, 1782 bp, Homo sapiens
tctcccaaatctgactgttatgagccctctcatgattaaattccaacatctatgctcatcctctgaattaaaatgaaaggcaattgaattccaaatatgtgctcaccctggtttcttatactgttcagtttagtcagccagaaagcgtttgcttgagtgtttgggtacagtcagggtagcttcttcagcagctgcaatgtgggctggcttccattggaatggatttagttagcttagcacctccaaagctgaatttgtccaatttcaaggtagttgatgccacactttccggtatgttagaacgtccctaggattgatataagaagatctctcatctctgtaccaaacagcccagatgttgacattttatttatacagtcctaacccacattattttttgcagccaaaaacagaatataaactttggtttctggggaacagagggttttcaaagaaaacataacaatcttggcttttggcttgccagtctgaatcagctttctgtaatctatagactctagggctaaactcagttgggaggaatcttccatgcttataggggcactgtttaccatctatagaagagatttattcaatgtatattgatgcttctctggcataggactcattttgggttttttttgtttgttttttttttgagatggagtctcgctctgtcgtccaggctggagtgcagtggcgtgatctcggctccctgcaacctctgcctcccaggttcaagcatttctcctgcctcagcctcccgagcagctgggattaccgggcgtccaccaccacacccggctaattttttgtattttagtagagacggggttttaccatgttagccaggatgtcctcgatctcctgacctcgtgatctgccggcctcagcctcccaaagtgctgggattacaggagtgagccactgcgactggccaggactcattctttttcttagacaattgttagagatttgccagggtgataatactcagctaccaggtatcatagagtttcccttttttccctattatccatcctgcacatttaaagcttaattttgatatcttttttgaaccctatgttcctggcaacctaatgctgaaatgattgagttctatctaatgacaaagccttctctcatttttgagaggagagtgatttacatttgtagccagcagttctgcagagcacagtttgtggccttgcattccttacaattctgagcttcctgattgttctgcacttttgtgtgcccattaagatcctgtcatgctgtgaaattccttgtatctatgaatcctgtctcttggaggggtttgtcctcctttcctctccatttgtctcagctggagaatggcctttaacattcctttaaggcccgtggtcccacagggaccactatggcccttacagcatgctcctcaaaaccttgcttttcctcagtatttgaaatttctaggccttgcaaactcagcagcagcgcagacatgttcctttctgtcacctatttgtgtcaaaatgggctatgtctctagtgttgcattttcctctgtggtacatctgttctttcaggcagcctcagctgacttgttaacctgcttaagttggatcttttcctttctacatcaggtagctgacctttttagattagaatacctttctttttcttttccttatgattttggtgtttgttttgcttgcatacatattcctctaatgcctttcctacagaacttcccctagtggaaaataagagagcacatgtgttcagaattag

SEQ ID NO: 124619 - DNA, 1138 bp, Homo sapiens
ttaaaagcccagggttgaggtggaggttgcagtgagccgagattgcaccactgcactccatcctgggcgtcagagcgagactctgtctcaaaaaaaaaaaaaaaaaaaaaaaaaaaaaaaagcccagggttttctttttaaccttaggtggaaagacaaagaagcagataaatttcataatattttagccggcaagttaaactttaaaaaaaaaatagctgtagcatattgtgccagaaagaaccctggatttggtgttcagaactgggtccaagtcctacttcctctacttagtactattttatgagcttgggaaaaaaacaaaatctagttttatgtttctgttaatatggtcttaaaaagaagtacactaattcactcttttcttagcttaatttaaggcacatcttgggtggagaattaatttgcattgactatagaaatgttgggcttgctggggcattttcttccagagagaactgtcccgttatttttctgcatatttaacatggcctggaatgccgtggttcctcagtcaaacttgtggtagtacagatgccatttatgtttcttctcttcattgtagctaacatgcttgaatcaaagtcctttgaagtagaactcaaagatgctgaacctgatattattgaacaactggtggaatttgcttatactgctaggtgagttaagtattatttttattttagagaagtaatgttggtatctaccatggcaaagcattgtcgtaacaaatagttgcactacaaattcttcaaaatgaaaaaccgcaaggatggaagagtttcagtatcctatgccatactaattcaaggactgaaagtttaattttgtgtttaatttcaggggctattaggatacattccacagtaacatttaaataataaaaaatcatgggtaactaatattccctctaacttatttgcagaatttccgtgaatagcaacaatgttcagtctttgctggatgcagcaaaccaatatcagattgaacctgtgaagaaaatgtgtgttgattttttgaaagaacaagttgatgcttcaaattgtcttggtaagaaatatcagattcctgttgtgtgtttattttgttttatcctttatttctaatttaatttttt

SEQ ID NO: 124620 - DNA, 1098 bp, Homo sapiens
caggatggagcaggatgacgtgagatttcatcacacaactcagaacagcacacaatttcaaacatatgaattgtttgtttctggaattttccatttaatgtttttgaaccacagaaagcaaaaccatggataagggggactactctaattccattttcctacgcttgttgtgattcagaggctttaaagaaagggaagagcgctggtataggagtgctaggaaagcagggaggaaagaaaagtagaatgaaggaaagtataaagaggggtcaaagaatccagtcagtgctaagatatttgacccaggagaaaagaagaggggtgctaaatgacaagaacgcaaagactgatgcaaagggctcctgaagatgcttcagaattttggcaagtctcctctgtccctactttttgtaggctttcctccttccggacactttagtactccttcctgcataccccctcactgtgagcacagagagagagatcttggaaggcaggtggaaagcagcagaataaatttcaggaggaagtaaaagtcaggtgaagggaataaaaatgagacttagcctaatatccagaaaagggattggactagatggagcaggaagagaaatagctatgcaggtgaatatactgaaggaatttttaaaaggtagccatgggtctacatattgaaaagatccctatattagaaaataaaaggccaatctctaatcctacctgtacagcagagacactctggcatgagtccttccatctctttgggccgtaattggggcttcactcatcaataagatttatattcctaagacttaaggttacttccattatataaataattatcttcagacaatactataaacggggaattaccttaattaagtttttggaaatgatggcttatgtatgtttctataactccctagcactctaaatttcctcctggggtgattcaactacaaagaagaatggctgaaatataggtaggtagtagatgtggtggtgcaaagcatagtgtggaacctggagtgagtctgtgctaagcacatcttaggctttgggcttctgaggagaccatttagtagttttgcctctgga

SEQ ID NO: 124621 - DNA, 1008 bp, Homo sapiens
atccatttgtgtccacccttttgcaatgtgacttggtagctcctcccatctcccttgtaatctgtggccgtgtgacttgctatagcctgtggaacattagcaaatgtgaagttagcagaggatagaaaaatgcttgtgctttgggatttgccctccattgttgctgggaactcttctgctgccatgagaagaaggctagagaccatagggcagagatcaactatcccagctggtgtctacaacaagttacttagaaaagaaagagaatcagaatgccattaattttttatctgcagcacaaaattagaacataatgtcacaaggttgcaaatgagagggagagaaaattgcatttcaaggcatcattcatttggatattgcaagaaaacaatcacatgtatcccttctgagaaaagtattagaagtactgaagctagctaagtgagagaggtaaagagctcaagataaggatgtaccggttaggtttcttacttgcaagcaaaataaaccaaatgttgctggtttacacagaaagggaatttatggaatggctagtgagtaactcatagcattgcccagaaatctcaagtcagattttaaaaagaaggatttgaataacacaaacttgttttagctagataacacagaatgttttacctagtcatcagagaacacagattgttttcagatacccttggagtatttacaagtactgatcatcagccacagaaaagctggagcacctaaaaaagaggagacacaggccacgtcccctgattacagtgcagtaaaactaaaaattaactatggaaggacagcttttctctcccaccccattctgaacacttgaaaatttaaccaaagaattatttagaaaattaatttttagagatattaaaggtaaacttataggctatatagaaacatggcaataagcacacaataaactgaaatctttggaatataaccaaagtatttcttagaaggaaattggtagccttaaatttt

SEQ ID NO: 124622 - DNA, 2967 bp, Homo sapiens
agctgggcgcggtggctcatgcctgtaatcccagcactttgggaggccagggtgggcggatcacgaggtcaggagatcgagaccatcctggctaacacggtgaaaccccgtctctactaaaaaatacaaaaaaaattagccaggcgtggtggcgagcacctgtagtcccaactactcgggaggctgaggcaggagaatagcgtgaagctgggaggcggagcttgcagtgagccgagatcgcgccactgcactccagcctgggcgatggagcgagactccgtctcaaaaaacaaaaaaacaaaaaacaaaaaaaaaaccagtcttttataagacagtatagtattggcacaagaatagacaaatcaatgaaacagaaacggatccagatttatgaaatttactcaactaattttcctgaagtcatgcttcatcttgaatgtatacttggtttttctaaaaatgattttctattcttttattttctttctgtgtttaggtataagtgtgctagcggagtgtctagattgtcctgaattgaaagcaactgcagatgactttattcatcagcactttactgaagtttacaaaactgatgaatttcttcaacttgatgtcaagcgagtaacacatcttctcaaccaggacactctgactgtgagagcagaggatcaggtgactaaattgccttctcacatttttcttaataaaaatgtctttattggtttcttaaaactcatgtttggacacatgacaagggaaagagtcatattaggaaagaatatgttctttacactaaacagagtattgtaatcttaggtgcttgccaggctggctctttgagaaataggccacttcatagagataaagccattgggtaccatggtaggcagaacaatgccttccccaaagaagtccacttcccaatccccagcatctggaatatacctgtgtggcagataggactttgcatatgtgactaagttaaggattttgagatgagattatccaaatgggcccagtgtaatcataaagatccttaaatttggaagagggaagcaaaagaaggcagcgtcaagtggtgcaatgtgagaaagacttgactggtcattgctgtctttgaaggtggaaggggaccataagccaaggaatgcaggcagctgctagatgctggaaaaggcaaggaagtggtttctcctgtagagtctccaggcagacacactggttttagtccactgtgacccattttggactctgacctatagaactgtcagataaactgtcagaagtgtaagctggttgcagtcatttgggagctgggtgggagaacactttatttaattcattcattcattcattcattcatttattgagacggagtctcgctctgttgcccaggctggaatgcagtggcgtgatctctgctcactgcaagctccttctcccgagttcacgccattctcctgcctcagcctccctagtagctgggactactggtgcccgccaccgtgcccggctaattttttgtattttttagtagagacggggtttcaccgtgttagccaggatggtctagatctcctgaccttgtgatctgcccgccttggcctcccaaagtgctgggattacaggcgtgagccaccgcacccggccttatttatttttttgagatggagtctcactctgttgcccaggctggagtgcagtggcatgatcacggctcactgcaacctccacctcccgggttcaagcgattctcatgcctcagcctctcaagtagctgggattataggtatgtgccaccacaccctgctaattgagatggggtttcaccatgttggccaggctggtctcaaacagttgacctgcccacctcagcctcccaaagtgctaggattacagatgtgagccaccatgcctggctgtgggaacactttaatatgcagactcacttaatctctcttttcagccccacatccttctctatattttaagccactaagtttgtggtaatttgttacaacagcaatagaaaactaatataggtactataagatcatatgttttaagttgcttttgttctaaaaacaaaaatttgcacttagcaatgttcttttgcccagtcttcttcgtggcccagagtatcaatttgcaaattgacaggttggacctggaggacctcactagataaatagaaaaaatttacttccatgatcaaaattggttgacttaaatgcagtatggaaaaggagtaacaagtaacattacactggagaaacgttataaacagtacctgcagatggtcagcattagcatcatcagtgatgtcatgttgatagtatgcacacttgatgtaatgaaaatgccattcacctctatgatcgtcctcctaaaaaaccataacctcagtctaataagtaacacatcagataaacccatattgaaggacattctcaacaaaatacctgaccagaactcaaaactgtcaaggttgtcaaaaacaaggaaaggctgaaaaactgtcacagtctagaagattctaaggtttaatgactacatgtaatatggtgttctttatagtattgtggaacagaaaaataacactagataaaaactaaagaaatccaaaaaaatatgaaatttagttaatgtgtcaatattggttcattagttatgacaaatataccatactaatgcaacaccttaacaactggggcagggtatgtggaaactctttgtgctatctctgcaacttttctataaatctaaaactattctaaaataaatttgtttaaaaaaagaccaattcccataaaaaattaactcagaaagagatcagaagttaggccttattaatatcactcgaaaattaattacaaatatcaccccaaaattaatttagtgggtatgggagatgtgtgtgtatatgaagcaattgattttttggggggtgtttaatgatttgtaagt

SEQ ID NO: 124623 - DNA, 1928 bp, Homo sapiens
tctgctacataaacctgattagataggtattatgagtagatatgaagaacatttaagagaatgatttagtttatctttgagggattgttccctgtacaatatgatcattattttatctctttatttcattctgtggtatacagtttctctaagagaacaagtgaaaatattttcccccagtttttcaagtgtttattgagtggaattgaagtttcacgaacatgttatgtttatcacattgttttgtgtgcccaccactgagtaacctacggggatattaattagagaataacatcctaagctattaaggctctattttcctggtcacctaaaaagcaaaatgttcatctttgtcaggagtcaaagtattctacattaggggctcttcctttcctaagagaccattcctgatgttctgtgatactttaatccaatgaatgcctgaaacactggatacgatcataggttatcagtcagattttctcgaaggaaactcaataatcacacatagtgctttccttggtgagattgggaatggtatgaattcctatctgaccctgattattttcagaaaatagcaggaacgctgtagcttcctatctcaaaaaaagagagggtccaagatactataactttaggggcatccccccatgcacatacatggaagggcggcacaagcattcttcgatgctatcaaacatagtgaagaaacagatgctgtgaacagcccttactgtcaagtactgataggtgtgtatttctaatcattggggtgaaaagtgagtatccagagtacttagaagagattactcaagtatttccttataaacatcaacagttttaaagtccagctgactacattggctcaactcaatatagaaaattaataaagaagtccacaaaataccttctggctttagactatcagtaggataatggcaatttgagcttcatattatccattgattacttatatcacactatatatctggcagggaagggatggagacctttacatttgaaaaagcttttttaaaaaataaaacaacttattttagaatcttcttgtattgtcttcaataacagaaggaatagaagacagggtggtgatggtatatccaaatatatttaagtttattttagagccagaaaggacccaaagcagtcatgtgcctgccttttgccctccgccccatctaatcaacattctgcagaaaccacacaagattaaattggtaatagtctcaagccaaacatttgtatgtgtagtctaataaattaacatattcttatatgttttttgactgtatctttgcattgtccttttcagttatatttttttccttactgaaagcttcccatccttttctgctacaggattatagctggacagacatccgctgcccctttgaaaaacgaagagatgcagcatgcgtgttttgggacaatgtagtatacattttgggaggctctcagcttttcccaataaagcgaatggactgctataatgtagtgaaggatagctggtattcgaaactgggtcctccgacacctcgagacagccttgctgcatgtgctgcagaaggcaaaatttatacatctggaggttcagaagtaggtaaggacttcttaagtattttggtttggggcatatgctttaaagccaagtatcttggctttcatatttaaataaacagctggtattatttgtccagatactttcttggtaatttaaatatgtgtttgtcacattttagagctcatctccctgaaggtttatgtcgttgctttacaaaccattaaattacagaactttagcttcctagattaatggcccattttttttatcataatgaagcattagttgacattatctgaattatagttctaaattatttgggctgcataatattatttgttttaaagat

SEQ ID NO: 124624 - DNA, 1196 bp, Homo sapiens
atattaaataagaatatgatcagatagtagttttcatattttaaggtatgggtctaccatctgtaaggaactattatgcttttccactttatataaacatttgaagtatggataattcccgtcatgcataatggggcttgaagacatatataaggcttcttatttaatttttcttttgaaatcaaatttatttttctaaagtttaattaccaataaataagtatttccaacagatccttttaaggatgttttccagggtctatacaaacaggattattagcgttttcttaaactattcctacactttgttgttgttgattgagtatgaaaatggccgtatgaccctaaattcttccttccttaactaataagatctacagtcagttctttccaaacccccgcacacactaaagttaagcatgatggggcctttttcttttacaggaaactcagctctgtatttatttgagtgctatgatacgagaactgaaagctggcacacaaagcccagcatgctgacccagcgctgcagccatgggatggtggaagccaatggcctaatctatgtttgtggtggaagtttaggaaacaatgtttctgggagagtgcttaattcctgtgaagtttatgatcctgccacagaaacgtatgtatctatttaaaatttattttacagttaactgtattctataagctctgtaggagatgtcaaaagaccagaggaacccaacagaagaattttgtccttgagtgaagagtgtatataaacttttgagtgtgctagggtcagtggcatatttatgacctggacctttcccttacaccagaaatggcttgaacttacaccccatgggaacctctttctttctggttctgcgtgcaataaatgcctatgaatgagacacatctgattgattcgtcaactcataaaatgtttttgtttgagcggtcaggaaatgtagaggaggaggggggagtttatgaccagcaataaatttatccttaagtagaaatattagatattggctcatggcattaataaatcatgcctccctagttctttttaggtgtaaacttcctaagtacatttagattcatgtttattaaataaaattattcttaaatcaactgcttttaaaaaggcaaagtgtgtcaaaaaggtaaaatgctaaagaaataactggttagccagtttt

SEQ ID NO: 124625 - DNA, 1609 bp, Homo sapiens
gaatcttaaataattgtcttaaatgaaagggagtcggaactgaatctagacacaagcttcaatttagtcagtactttaagcatcacttaagtgtaccagtaacttcttttccttcttctgtccctgtccattgctattttccataaagtgctaaaaggaggaaaaagaaggacatttgagtaattataatcaaagttaatcagaggggaaatcaccgattggtttattttgcatttttccagaatagataaaacatgtttaattttgtagaaaaaaatcaatatttaaaaagaaatattaaatgtctattgtgttaagagtaagaatttaggtggtggctatgtggacattcactgtaaaattattacagtttttctgtgtgtttgacatttttcacaataaaatattggaaaaatacaaaaagttattactttaagaaaccttagaattgttgatatagtttttcatgttgttcatgttttattcttttgaaggtggtctggacaatgtggaatattacgatattaagttgaacgaatggaagatggtctcaccaatgccatggaagggtgtaacagtgaaatgtgcagcagttggctctatagtttatgtcttggctggttttcagggtgttggtcgattaggacacattctcgaatataataccgaaacagacaaatgggttgccaactccaaagttcgtgcttttccagtcacaagttgtttaatttgtgttgtcgatacttgtggagcaaatgaagagacccttgaaacatgaaaaatgagtggacttcagactcatcagagactctaaaatatagccaccagtgctttgttccaggagtttggtgacaaagttttggtttggtgttttggtaaagaaagtttcaagtgaaatgaggttcctataaaatagatgtttcttttatatggatttccttaattcaaagatcatattttagctggccacaaaaccaagaacatatctagcaagaaaacttgaaaaagtataagcatttgttaaaaatgtgaatttcttgaatgaatttcacatttgtaactatgattttggcagaatagaagattggctcatcagtgaagcgcagtatcttagctctagattctattttcatgcatcacagaagtgctatacggttaggtctgtttgtgctcagtcaagaactaagaaatagtatgaattgtaagtcaagatgggcaactcagatggagcagcttagtctcacagtttgcttgtctatttattttatttagtgccaaatgtattccattttaaaagtaagccagagtgagtcaaggcatatacacactttctcacaaaacttcctaaacagatttgggggtttaatatgtccaactcctcatgaaatatattcaatccacttaaatatattccatctttttaacataaaatgtaaagcttagcacccatcattaatttatgtctctgttttatccagtggttaaaaaaggattctgcctctttagtcctcactgttaaataaaacccaatcatagtaagtgattaactagcaaaaagtaaagctatttatagcaaatttctagatcattagaaaagcactggtagttg

SEQ ID NO: 124626 - DNA, 1051 bp, Homo sapiens
tcctgtatttttatttgctaagtctggcaactttatccctgaggcccttttaggagttgcctgagttcaaaaatattttctgataatactaagtgattaattgccatttttcactgtgttgacatttgcactgttggtgcagcagcattgaggagtagaactacttgtatcttagcaagaatcaaggcagaggcaataaattactagtagatgtcacaataaaaaaatgtttaatgccatttgaacttaagaacttcctttatgaagagataaaaattattaattttgttaacccttgaccctgagtacgcacctttttagtattctgtgtgacaaaatgggaagcacacaaaaagtgtgtctgccccatgcccaagtgtgatgaacaatcttgtgtaattgttcaagttggactgagctagccacttttttcaaagacaatatttatttgaaaggaatgacaactatggttatttagaagaaaacagttgatagtgtttattgccaatgaaaaaaattaaaactttcaagcaaaaattgaaattacggaaaactttgtcatcgtgagcatgatggcttctcagtacttaaaatctcttctgattaaatggatggcaacattcacaaatgtgagggccacacgcagcagctcatgcctgtcatcccagtgctttgggaggctgcggtgggagaatggcttgaagccaggggtttgagaccacctggacaatatagcaagaccttgtctctacaaaaaatacaaaaattagcctgagtatgatggcatatgccaagactcttagctactctggaggctgaggtggggggatcacttgagttcaagagttcaaagttatggtgagctctgatggtgccaccacactccagcctgggtgacagagcgagaccctgtctctttaaaaaatttttttggctgtgcacggtggctcacacctgtaatcccagcactttgggaggccgaggtgggtggatcatgaggtcaggagatggagaccatcctggctaacacgatgaaaccccatctctacta

SEQ ID NO: 124627 - DNA, 1022 bp, Homo sapiens
gcacatggcccatacctgtaatcccagcactttgggaggccaaggcaggtggatcaaatgaggtcaggagttcgagaccagcctggccaacatggcgaaaccccatctccactaaaaatacaaaaattaggcaggcatggtggtgggctcctgcaatctcagctacttgggaggctgaggcaggagaattgcttgaacccaggaggcagaggttgcagtgagccgagattgcaccactgcactccagcctgggtaacagagcgagactccatctaacaaacaaacaacaacaacaacaacaaagatttggagggaaaggactttcagctgctctgaagatgcatcaggcattgatcggctctgcagactagtttttacaatatctaatggtaccgaatgtatgagcctgtcattcaccccagagatgaatctcgacaaaacaaaaggaaaaaaaatttttacttctagaaagtaacaccttacacagctcactggtccccagagaagtggacagaggtgactctaatacaactccagctttctaactagccaagcagcttctaaaaagccaaacctgagaccaaaatgggtataagctgcaacagggagaggaaaactcaaataggggaagagagaaccatccccacatgatttcgccacctcctggccttgcatatttctttagccaagattgcacggcccatggctataatcattcttttgaaaatgtgttaacttcaactcctctgtctcctcttcctccaagcacttggctggccaacctgtgctcctgggaggctgtctcctctgcccagcccacctgtggggtggagggctgcagaggaaagtgccctgtgaggttgctgcctgccacctcagtgaccctgggctgcagtccacgtggcacctccagtgggctcagcacctgttcccacagcagcaagtccataccttcaccactgtcttctcatctgtcctctctctgaggaatagcccacctcctgcttcacagagaaaacaga

SEQ ID NO: 124628 - DNA, 1011 bp, Homo sapiens
tggaaaaaccacaatatagttggagatttcaagatttttctctcagtaactcaaataacaagtagaaaatcagtaggaacacagaaaattcaaaaaaacactatcaactagcttgacataaatgacatttaaaaagaaaacactctacccaacaaatgtagactacacaaagtatatggaacattcaccaagacagaccattaaaaagctgtttatcagtaaacttcctggtactagtacgtgtcgcttggaatcttgaaggcattcctgagcctggcattcctttagccaagtgagtagttcagaatgggaaaaaaaaatgcaaaaatctgaagattattggcatcagtgttttcctaataatattgtatcaaatttaaatattcagaggatgtgtattgagaagccaagtgatggctaaaaaatattgactttcaaaatttttctttgattcatttaaagttcataaagacatagggtctgaatgcttgtaatcaaggtatttccaggagacttcctttaaaaaacaaagcaccctctgtttacttgatgcactgaatatattatgtatgtgcttttcaacagtaagaaataaaaagtttctttaaccactgtgaggtgattactaaatgaagaatggaatttgtttcgaatattgatacaggatttcatgatgtgctgggcaatgaaagaccttctgcttacatgagggagcacaatcaattaaatggctggtcttctgatgaaaatgactggaatgaaaaactctacccagtgtggaagcggggagacatgaggtggaaaaactcctggaagggtaagtcaaaagattcaaaccaaacacctgcaatttcctacttcagtaagtcttgtagatggtaaagccttttagatcacacggctcacgtcatttccacgaatgacagtgctctcattaccaagtggggaggcacctggacttggcaatattttctttagcccaacactatcacttcctaaaccacaagtaat

SEQ ID NO: 124629 - DNA, 1050 bp, Homo sapiens
atatctgttttaacaaaagaactgagcacatttataggatgacggggtcccattaacatgtcataaaggcagatgagatgaaatcagtggcactgaaacaacctggctttataaacagaaggtagtatctgcagcccctaaaggtgaaggaaagctgggatgaacacaagtgatggatgtaggtgggtaccaaatgctgactgagcttagctttttcagcctcagaggcaccttggtgaatgaatggggtgaccctctcagaagggctggggcaggagaattcaggagagaggtgaaagtgaataagatttagagggagaaatagtttccctaagttattcatcacagggcaaagtatagcaatgagaaatgagtaagaaagattaaaaaaaacaaacaaacaaacaaaaaaaaaagaccttcagcaagaacaggcttcccccatcccctctccctttaataaaccacctggctttttgcagtacaaacacctgaaatgtaaacgtgaccctcatgttaagatagaagggaaggacactgatgactggctgtgcgtggattttggtaagttattctggcgtattttacaggtaactgttggtactacgctaatcttgaattgttttcagttgcaaaaggattgagatcaaattgatgaatgtatttccaggtaagatttttgaagtgtgtttaaggtaacaaaagtttttttagttataatccaggtggtcttattcacatgtagaattttcacctaaccaaaccaaagtaccctagatgatgccctcctggaggaagatatatactacatggtgtgtatctactagccacacagatcaggaaggtggtggacaacaggataacatagtagaggcgggagagattccttagtagtggtagaggaaggtttgggggctgtggtgcataaatgagatgaggatgaggttattccaggcacaaaaaaggacaagagcagaagactagaattttgaaaagatctaacaactttgggtattaatgtgtacatagtttcaaagcacctcccaacaa

SEQ ID NO: 124630 - DNA, 1050 bp, Homo sapiens
cctcccttctccaattgtgacaatcaaaaatgactctaaacattaccattattacctaattgagaaatgctgctgtaagcaaagctgccctttgccctggagggaggcagtatctttctgttaagaatattcacgatacaaacattcttggatagtcaaaacaaaaggcagtcagtgtttttgcacaaaagatgtgcagaagtgtgttacccatggagaattgtcaccgaagagaatcctgacaccattagtctctttgataaagttactatcaccagcaatgttatatattgacatatgcctcctgtaggtacactgagaaaggcatagcatcacttctgtggtatttttgctgggatggagtccacagtgatgctaatctgggaaccacacttgagaaccactgctttattcctagagttagccagtgtgtgttgtaaggtaagaataaaagcaaatgaactattccttcattgtatctcttatctgtccctgacaggcagcatggtgattcatttgatgcttccagaaaccagagaaatctatgaattagagaaattatggaccctacgttcttatgatgaccagttagctcagatagcacctgagacagtacctgaagacttcattcttggaatagaagatgatacttcatctgtgactccagtggagttaaaatgtgaataaaatattttatgcactgcgttagtcatttcagatttggattgagtcacttattggaaaatacagctcctaaagtccgtctccttggttaggctgctcttaggacaaggcttgtgtacctcatgggcactcctgctaactggcatgcagagactgtcgataagtgagctatacctgcaaccaaaaatcagtacattctacccaaaacttatgacacgctgcctttatcctggaaatgtcatcagaatttcctggagttagcactggctcctgtgcttgacttctctgctcagatttttattaatttaatttagcttaaatgtaaatcttaaccctgtttgtttaatggaatggcaaaaattttaa

SEQ ID NO: 124631 - DNA, 1366 bp, Homo sapiens
tgtcatgagcctcactaagctattttgaagatttttaagcactgataaattaaaaaaaaaaaattagactccaccttaagtagtaaagtataacaggatttctgtatactgtgcaatcagttctttgaaaaaaaagtcaaaagatagagaatacaagaaaagtttttgggatataatttgaatgactgtgaaaacatatgacctttgataacgaactcatttgctcactccttgacagcaaagcccagtacgtacaattgtgttgggtgtgggtggtctccaaggccacgctgctctctgaattgattttttgagttttgtttgtaagatgatcacagtcatgttacactgatctaaaggacatatatataaccctttaaaaaaaaaatcactgcctcattcttatttcaagatgaatttctatacagactagatgtttttctgaagatcaattagacattttgaaaatgatttaaagtgttttccttaatgttctctgaaaacaagtttcttttgtagttttaaccaaaaaagtgccctttttgtcactggattctcctagcattcatgatttttttttcatacaatgaattaaaattgctaaaatcatggactggctttctggttggatttcaggtaagatgtgtttaaggccagagcttttctcagtatttgatttttttccccaatatttgattttttaaaaatatacacataggtgctgcatttatatctgctggtttaaattctgtcatatttcacttctagccttttagtatggcaaatcatattttacttttacttaagcatttgtaatttggagtatctggtactagctaagaaataattctataattgagttttgtactcaccatatatggatcattcctcatgtataatgtgccccaaatgcagcttcattttccagataccttgacgcagaataaattttttcatcatttaggtgcagcttgttgtgtagtatgttttatttttggttttcaattgaatgggaatgttctgaattttttttcaaactctacgcagatttctgttataccatgtccagccatggtacttaatgtgaaccttgataatactcttgcatatgaactaagaactagagcgttcagagtttttcctaacaaacactttgtttactttcttgtgttactggagtattctggaagggttacagaagtcctcctagaagaatattatcacctcaaagtataaaaataagaccagtgggctatgttttatattattttttaaaatttttgccattccattaaacaaacagggttaagatttacatttaagctaaattaaattaataaaaatctgagcagagaagtcaagcaca

SEQ ID NO: 124632 - DNA, 1050 bp, Homo sapiens
catccaaagaaactgatttgtccagttatacaagtgaatggcaaaaccagattcaaatcctgagtctgattccaaagtgtatgtactcaatcacttcaaaattataaatagctttgaaacccacttacaagttatatgtattagagactagaaacagtttgctttttttccattacagatgtaacaagctgtagatgaaatttttaaaattcctgttaagtgtctgttccataaaaagctaaagttttatcaggagaacgttaaatgccctttataaatataggacaatcctctcacacaaagtgatctgaaagagatgcattactttcactaatagctggcaccaacactcagacaggaaacaaaaggcaatcttctccaaaccttggtcaagatggtcctgctttttataaattagccaaaattcggggacttggaactcctaagtacctttcaacgctttccctttcataccactgcacaggttttgctgaagtacttgccgttttgcctccttttccaataactctgccagcagcaaaggatggcactctgatatgagcttcaagtttcacctcttctttaggactaacaaagttttcttctttaatttttccataaattcttccctgagcctgcagatgaaaacacatcctattagtgtcattcatgtatgaaatggaaaaggtcagttaacttgaaagatggcccaaatccaagtgggatagccctttgcagtgatacatctacatttcatagattgttgaaaataacatagaagagagcagttagaagtcctaaaaggttgacaataactactgcccatcacagtagaggcaactgaatgcttggtgaaagaaggataaaccatattcttctgatgaaaacagttaaaggcaattaataacctaataaaaacgaatttttgtgggcaaatggccattcgtactaaaattgtgataggtaaaacttctcatgctggccatgagacatcagttgcatttttctttcctttttgttggagtcagggtcctcctgttgtccaggctg

SEQ ID NO: 124633 - DNA, 1052 bp, Homo sapiens
gggattacaggtgcccgccaccacacccagctaattttttgttgttattttagttgagacggggattcaccatgttggccaggctggtcttgaactcctgacctcaggtgatccacccaccttggcttcccaaagtgttgggattatgggcatgagccactcactgtgccctgccttttatttttttttatttttttattttattttttttagagacagagtctctttctctgtggtgcgatctcagcacactgcaacctctgtctcctgggttcaagtgactctcctgcctcagcctcctaagtagctgggattacaggcatccaccaccatgcctggctaatttttgtatttttagtagagatggagttttgccatgtaggccaggctggtctggaactcctggactcaagtgatctacccacctaggcctctcaaagtgctgggatagcaagcgtgggccaccgcgcctggccaagacacttctgatatttagagtcaatacatcctatcacctactgcatgcaactatataaacaacctattatatataaacaacctattacatacagcaaagcagaaaggagcctgagagttggtttgacaagctgccagggtaaaccacaaaaaacaatagtacccaacacgcgttcactgattcagaaagctgagctcattttagggcactaccgacaaaacaaaattcatcttgataccctatattccaatgatccttaatgcctcaggccaatgacgtagatattactattacttaagacagtcaaaaagacactagggatatacactatcctccaaaactgaagctcttgaatttgtaaggaaaaatacggggtaggtggtttaccattccttagatctctaaagtaaaacattcatttagcattgtcaccaatcacataaataaaatttaactactatggcttaagtgttacatttaagttaactataaaacatgagttttattagtgaatacagggaaagaactttgaagttcctatcatacaaacatcataggagttgcaggacagtaa

SEQ ID NO: 124634 - DNA, 1064 bp, Homo sapiens
ctcagggacaggagggaaaacatctgaaaacaagtttccaaggcatattaacctggcaggtttgtaaattttaaggtctcaccttagcataggattacaaaccattaagcaaaattaacctttgagagacaggtaaatccagcaaccagtacagaactcttaaaattaaagacttttggttaatttcgaaatataattttgagtgtgattctactcagctcttagataagaatttccattgactctttctgagatttagacatatttaagggagacgccaggttatggactacctgtgcatttgttacctgtggacatagcacatactctagagcacataccttgaactgagcctctggtggtccagtgataatcaccatcctcactttagcatctggtgcttccgctggagcaatctgtaacagacccaacaacaagttatgatactttcaggtatcactgataggcatcttgggccaaccagcctaacatttgcatgtgactggctgaaatgcagaattaaagccttcgtgaaggaaattagggagaggcagcaattcctgtgggttcacaatttaggcctccctcctgcatatactatatgcttattctgtgccgggccctaatggagacctccacgtgctgtctctcagctaatcctcaccacgtcctgatgaagtagtattacctccacttcacaaatgcggaaatggaaggctggagaaattgagttatctggaccatgatcacacagctaacagagctagagggagagctgggtctgtctccattgcctgtgttcactacaccagtggtgctcaaagtatggtccttggcccacttgcatcagggctccttgggcttcctgtgtatgcaacacactctaggaatctctgtaccctaagtttcaaggatactgcacaccacatgcctttgtttgtctgaggcagggtcttactgtgtggcctaggctggagtgcagtggtgtgatcatagctcactgcagcctcaaccacccaagctcaagtgttcctcccacctcagcctcccaagcagctgggact

SEQ ID NO: 124635 - DNA, 1164 bp, Homo sapiens
gtggagctggcgtccttgagttctgttgtgtttgatatgtagcccagaatttcatttacttgttaagaatctaccttgagagtggtagggggctcttacttaatttttaatgcaagcatgtcccgctattctaatatgattaaactttacaacatctacatatcttttaaatccataactcagtgacattttaaagtttaaggcaacagtagagaaaagtgaaattttaaataccactgttttcaggatgactgtatgagatcttcttgacctattaggtaaggtctggtcaacttcttatggtagcttttccttaaactttcctggtattcctactgcatgagaaggtgtccttcctaaagctaatgttaacaaaagcctgatttgtagcaaataaacatgggtgtcctggctttcttttctaacagcaatcagaaacggagactgttcatctgtttatcccagctctatcagtcggtgccatcatcggcaagcagggccagcacatcaagcagctttctcgctttgctggagcttcaattaaggtactgttctaccagctgtggttctctggttctttaagtaagttacagaaatatgaatcttcttgccactttataatttgaatagaatgtaaaagacactgttagggttacataaggatatgaagaaacccccaaacaacagtggcttacaccaaggaggctaacttctctgtgcagaaaacacagttaggaggtgaacatccgggctgggtgttggctctgcccccaccaagtccttggacctaagttccttccaagccaccttccccaggtacggccttggtccctcttggttccagattgacaccattcagtgctccaggaatcaggtctgttgcccagccagtaggagaggagaacataataaagagcttttcttctagggaggtttcttgttagctactgtgggatatttctacctatatttccattgcccagaacttggccagacgaagttgaaggggcaaaatacaggctatgcacagtcagctaaacattttgtaactacagaaggtaacataccagaggacaaataatggtgtctgccgtaatagataactgtgtgttctgaagattctgtattttgatgccttatttaaggaaaataaaggttggccag

SEQ ID NO: 124636 - DNA, 1042 bp, Homo sapiens
tttcaaactgaaaaaaggataaaggatcaaaattggcagcatccttatttaaggacactgcctgaggatagcttttcatacttctgtttgcctcatgttggccagaacataccactggctgtgtctagctgcaagagaagctgggagacaatccctgtgtgagggcagcaatgtgcccattaaacacaggatctgttactaaaggaaaatacatgttggggacagctatttgtctgcttcactggatttggcactattgcctgttaaaggagcctcccagagcctggaagagaggaagcaagcttttaagttctctcaaaaagcagaatctaaattctggaggagaaaattccatattccagattcccattcctgtggttattttcatctaaataaagagaaaacaccattattcagaaaatcatattgtccctggatacaattagagtaaattctactttcaaacagctgctaggcaattttctggcttaatgttcaggggaacaattctttaacaagtgttgtttgagtatataacttcaagttgcagggggtggggggtggttgcaagtactcagttggaatagctttgccttcactatttttagactttgttctttttctaaaccgaaatcactaatacttaactattttgtgtacctagtggtcaccactttttgaaatacaaataaactattgtttttaaaggcagtaaatttcccaaagctttaccagtttctttgcttatcattgcttcttttttttttttcttttggagacagagtcttgccctgtcacccagggtggagtgtggtggcgcaatctcggttcactgcaaactccgcatcctgggttcaagtgattctcatacctcagcctcccgagtagctgggattacaagtgcgcagcaccatgcctggttaatttttgtatttttattagagacagggttttaccatgtttgccaggctggtctcgaattcctgacctcaagtgatccacccatctcggcctcccaaagtgctgggattacagacgtgag

SEQ ID NO: 124637 - DNA, 1014 bp, Homo sapiens
ccttcccccaaagtgtaaccactgttgtttcttctgtttccttctataaattatgcacatatctccaggtgtatatttgtactggatggtactgttttttatttgtacgttgtgttctggtagtaggggtttaggaatatggttttgagtaagagactccatcactgaagatatttcctgaagtgaataaaataagaactattttagaagttaacttctgtattttttctccccttctattcatgcattgctagaatgctggccaattgtcagcaagttttaagctgtacctaacacagtgcttcccagatggtaggtaggaagtaaatgtttaatgagtgaatattgtctttttacccacgaataggtttacttattctaattttatggccacttttctatttacagcacagaagagatccccttgaagattttagctcataataactttgttggacgtcttattggtaaagaaggaagaaatcttaaaaaaattgagcaagacacagacactaaaatcacgatatctccgtgagtgctcctttgcttttgaataagaaaactttccaacactgtaagctgcatgttgtgtattgggcttagcttcccactttacagctgcttcagctagcctgtgctgccgtacttacacatggtttctcaaatacagcttgctgcctgttaggtttctgacccgtattgaaagcattatctgcttctggcaggaggaaccaaatgctttacattcatgttttctaaagcagtcttaactatgttttatgacatttattcccaaagttggaatatataacccagtttattatccattgtcgtgtaacgcattatcccaacatttgacagcttaacacaatgtgaacattaattgctcagctagtttttgtgggttaggaatgcaggagcagcttagctgggtggttctggcttggggtctcacaatgctgctgacaagttgatgctggctgttggcagaaggcctcagttcctcccacatgg

SEQ ID NO: 124638 - DNA, 1125 bp, Homo sapiens
gtaagtctattctggagattatgcataaggaagctcaagatataaaattgtgagtaaagaagattgtcctgtgaaagaggttgatatttgtgctcttgtatttttgacatctctgacacaattcttgggaattgccaacaaacagagggaaatgatatcctgatgagctacagtggttggcactgttgatctggttgtgaagtgtatgtcttttaatatttaaatattttcattcacatttgaacataggcgagtggtgataacggggaagagaaatgcagctatagaagaaggcaacttggggaacctaggaccaggaggtatcctggattaacccaaaacaggagccccaaatcttgactcatcctttactcggagctcattggagctctgttcttgtccactgcctggccccaccttggagcagcagggagtgtggaggtggggaagtgcctaagtctcttctaaggcaaactggagatttatctgggtaatgcaggcgggaactctatttcttccacaggaactttgagtgaaggttgggttctgtgccacgtttagcgtacagaacagcgctgcactgaaagtagaatcgagagtaaggcactggagttagtgtggggacctcattaccaaccttaatttgtagagaactttaaatatgttttagtaatattatatgtgggtgccatatcataagaatgtaattattaaagtaaaaattttaaagaagaattattttagtatagagaaaaataggcctggtgtggcgactcatgcctgtaatcccagcactttgggaggccgaggcgggtggatcatgaggtcaagagatcaagaccatcctggccaacatggtgaaaccccgtctctactgaaaatacaagaattagatgagcgtggtggcatgtgcctgtagtcccagccacttgggaggctgaggcaggagaatggcttgaacccgggaggcggaggttgcagtgagccgagatcgcgccactgcacgcctgcctggcgccagagggagactctgtctcaaaaaaaaaaaaagaaagaaaaaggaaaagcccaccatctattaaccacaatgacattttaaacagttttatatatatatgactggga

SEQ ID NO: 124639 - DNA, 1175 bp, Homo sapiens
tattgcgctccagcctgggtaacagagcaagactctgtctccaaaaaaaaaaaaaaaaaaaaaaaaaaatgaaaaagagagaaactctcccccaaatagtgtggtagaatgggcacactcttttttttggtttatcaccacccctgcctctttgctccaaatcagatcgtaaaccacaaagtcagggactggctcataataggtactgagtgtgattggtagaatttaatactcagaatagtctcttgtaaatggtttagagatatttgtccactggttcttaaaatggttttaaatacttcatattttagaggctgaagtgaaggaagtatatatttctgatgtctcttccactgtggtttggaaacattagccaaggcaagaagcccacttgcttctctcttgctgcttagctattcctaaaccgttagtaaccttatgggttaaacttaaccaagagtttgacaaaatgttttttgtttttctatttttcattaggagatggcacataggttccctttggaaacttgtggtctttttccccactgtgcctgtctcaaaggaaaatgtgtgtgggtggtggtggtgcggggtgggagaggggaggattatgtgtgttgcgggtttgctgcttgtgctggggcttcactcagaagtttagagctagtaatgctgagtagaagagatgggtgttgctttgctaaaagatgtgtcatatagcctgattccttttcccacccctgccccttttcaactttcagagcactagacaaactgaatggatttcagttagagaatttcaccttgaaagtagcctatatccctgatgaaatggccgcccagcaaaaccccttgcagcagccccgaggtcgccgggggcttgggcagaggggctcctcaaggcaggggtctccaggatccgtatccaagcagaaaccatgtgatttgcctctgcgcctgctggttcccacccaatttgttggagccatcataggaaaagaaggtgccaccattcggaacatcaccaaacagacccagtctaagtgagtatgctgagtgtgtggtgggtgttcatgagaattccccttggaatcttagtaacagtgtgtcgttctggtacttggtgcccttctgaacacagccatgaggactccttgtacagtacttgggaatgt

SEQ ID NO: 124640 - DNA, 1053 bp, Homo sapiens
gtaggacagtgatagaagactgaagtgagaaaccgagaatcattctgggccggagaatgtcagcgagccctctgtctgcttgcccaggtctgccttccaggtcctagccctcagtgacctttttggtactagaactgtcacccactccacccccttttttctatttaagaattgagagtagatttgcaaataaagcagtgtataagccggaaatgaccacaccaagcaactagaaagagaccattttatgcctgtttttctttcccacctggggtgaactcagggccattggaacagaatctgagcaaagaacctgagtgacactgggaagtgtggggacttctttctttttgtttttcattttgttgtgcactggggagttaaaaagggatgtattgttaggtgtatgtttatgaaatctgggctatttcgtctctactagtttattattttcccttctgaaaacataacacacacacacaaaatgaatacaaaacaaagcaaaacaaacaaacaaaaaaccccagaaaacagaacacaacaatttggatgaatattacaataaattaaaagtttccagatatgagaaaatacatatcatgtatactcatatatatttacataaaatttttaaataggcagaattaatctatggtattagaagtctgcaaggggtaggggggcagtgactaccggaagcaggtactgttggggcttccggggccctggtgtgttctagttctggatctggatgtgtgtgttcaccttgtgaaaattcactgaaatttatgctcaagatttgggcacttttccttgcatgttaaaataaagatcaagaatgaaaaagaggctgggtacagtagctcatgcctgtaatcccagcactttgggaggccaatgcagcagatcacttgaggtcaggagttgaaaaccagcctggccaacatggtgaaaccccatctctactaaaaatacaaaaattagccaagcatgatggtgcatgcctataatcccagttacttgggaggctgaggcacaagaatctcttgaacc

SEQ ID NO: 124641 - DNA, 1375 bp, Homo sapiens
catttcattagtttcattaaaaatggaagtatgtgtttagtgaatgcaccttttcttgttcctcagagcgagagaggctcacctatttccttccctcttccagagatgttgagataagccagtcaaggacagacattactcatgagaggatttgtcatgtgtgacaaagaaataaccccctagaaaatgtgtagacattgagttcttatactttcttttgtttggggttatcctgatgtttatttttgttagggaataggaatgtttattcatactttgaaacttcaatcattctgaggcaggagaattgcttgaacctgggaggtggaggttgcagtgagccaagattgcgccattgcactccagcctgggcaacaagagcaaaactccgtctcaaaaaaaaaaaaaagaaagaaactatcattgcagttcctttgtatcattgtgaagatctgtataaggtaaatatggttatgtttagaagtgtttgaagcaacttggccagtggctaaaggtaagaaaattcccatttaaactttaacaattatgtaaataaaagatttattttggaaaaagaaataaagcagtgagacaaagggattttttgccattcagggataaccactgttaaatttgccatagagttttgtagactttgtcccatgcattataactttcagaattacaaagatcattctgcagagttttgtgggtttttcattcagtgtatttatactgattctaatctctgcatagtgttggatcctcaccacagtttcctatcccgtcttctgttgtgtgtcatctagggtatttgcccataccgttttgttttgttttgtttttagaaccaatttagtcatgaagccttacatttgggcttcatccatatttattgcattacggtacatccttaaaatcatattacccaggctttcaataatgattgccaaattgtcaacctcttattcttgatacaaggagataattgaatttatgacttttcaataatgggttaaacctcattttgtgaggaccctgtattatatacagggtgatatctgggaataaaaaagaagagatttttagacatggaattttatttattttagtattattttttgagacaggttctcattctgttgcccaggcagacttgggagtgcagtggcacaatcatggcttaatgtagcctcaacctcctgggctcaaccagtcctcccacctcagcctcccaagtagctgggactacaggcatgtgccactacacccagctaatttttttttttttgtagaggcagggtctcactgtgttgccgaggctgatctcaaactgcggggctcaagtgatcctccctccttggcctcccagagt

SEQ ID NO: 124642 - DNA, 1825 bp, Homo sapiens
atccatcccttagttctgcagtccaaagccccagataattttttggctcttttccatcacaattacttagtgattttaagacatattcctgcccttgataataacttgggaaactcaaaatttataattttctctccccctcctgataggtgctggatagtttactagtccagtatggagtggtggagagctgtgagcaaggtacatgtcttctgaattgctttcaaatttgtaaaaggaaggaagtagaaagaaaactaacttttattctcttcgtttttctcttcctctagtgaacactgactcggaaactgcagttgtaaatgtaacctattccagtaaggaccaagctagacagtaagcagcttgaagcttttaatctatatataataactaagttaagtacagtaacatattttgcggatttctcaactgagaagggctggtaggtggcagagagaaactttattttacaaaatttgaccctgtaatcgtgcctttctttttaagtttgaatgtctagtaaaaatctacattggttaaagttgtattacattttcaatatatctttaatgccaataatagagtggtctagtatgaaactgaatcacaccctatttgcagaagctctgggccttggtattgttgccaaataacataaagtctctccccgtctccccctcttgtatgacacatatattatggctattttatctgaagctggtaagttggatcatgtgttaaacaacagtgttaaatgataagtcttcttactcactggttacctgattaccattgtcatttaggagcgtgcagacattggattaatgtaatttgctcttagatttatggaaaaaaatatattccagtgcagtaaacaggcaatacttgacagatcaaacagtctcccctaggaaaagataattctataggctggaaaagatctaataaactgagcactagagagagaaatgggggtcccacaaatatggcctttaacagatctgcccagaatatgaacatgaaagaatggcatacaaagtgctcagtagcacagcactgggtgttagctaactatggaagcctgaactacctacctccagataccatactggcaggagcaggctgactgtcctctgtgtcagaaaggtgaaagaaaagaccacactggctgactctgagccctgaaggggaaaagtaaaacgagctgcaagagtaggagctcagctaggttactataggcagtactcactcaggagggactatgaaagaaaagactgagaagaagatggaaatgtgtataaggtaaatggaactttatttgtaaaatcaataacactcacatggttcaaaatataaaagatttgaagatgcacatagtacaaatcttcctcccagtattattccctaactaccttatctcttgggagataaccatgtggaaaacaaatgctacatgtatgtattcctccttttacacaaatgataccataacatttgaatgttttgtgtatataaatatattttttatagttacatagtatttgattgtacagatatggcatgactttgattaatcgcagtttggatatttaggttgtttccagtctcttgcagttatgaacaatattgtagtgaatctgtttttgcatgtcgtgtgtatgtaagcatgtatccacatgataaattcccagaagtagaactgcactttaaattgtgttgtagagctggagctagtttaaatttccatcagcattgtgggggagtctttctccaattctccctaacacaggactttatcaaactttgccaatctagtatgtga

SEQ ID NO: 124643 - DNA, 1068 bp, Homo sapiens
gcttgaacctgggaggcagaggttacagtgagccaagatcataccactacactccagcctgggagacagagcgagactctgtctcaaaaaaaaaccaagaagagaaatgtctattttcctggcatttttttttttttgaaaactatctaaaggccagtgtaattcagatttgatatttgttttcattttcttcctgattctaaaattatatactccttgtagaaaacttgaaaagtgaaaagaaaaagtctttctcccaatggcaacattattccgtgactaatagttcagtttaatgattaggcatttttcaacatcgttgggtcttgcatgtataattttatatcctgttttaaacatttttaatttttttaaaaatcgaactatatttgatgtcataaaattcacctttctgaagcatacaattcagtggtttttagtatagtctaaaggtttggaagtatcaccactaatcttaagacattttaattactcccaaaagtaaccctatagccattaacagtcacttgcccctcctatcttccagtctcctcccaggccctagaaaccactaatctactttctgagtctctagctttgcctattgtggacatttaatataaaaggaatcatatatatgtggccttttatgtctggcttccttcacttagcataatattttcaaggtgcagccagattttagtaggtacttcattcctttttatggctgggtaataattattgtgtgaatataccacttactgtttatccatccagcagctgatggacatttaggttgtttccattgaatgatgctgctctgaacactggtgtacatgtttttgtgtaaacatagattttcagttcttttgggtgtatacccaggaatggaattgctagatcatatggtaactttttgaagaacaaccagacagttttccaaagaggctgtaccattttacattcccaccaacgatgtctgagggttccagtttccctatatcctttgcctaaacacttgttattatttgtcttttcaattatagccatcctagtgggtgtgaagcg

SEQ ID NO: 124644 - DNA, 1042 bp, Homo sapiens
gcccaggctggagtgcagtgatgtgatctcagctcactgcaacctctgcctcccaggttcaagcagttctcctgcctcagcctcccgagtagctgggattacaggcacctgtcaccacgcccagctaattgttgtatttttagtaaagacagggttttaccatgttggccaggctggtcacgaactcctgacctcaagtgattcacctgcctcagcctcccaaaatgctgggattacatgcgtgaaacactgtgcctggcctgttggtttttcagttaatttttttctttttttgggggggtgggggtagagatggggtctcgccatattgcccaggctggtctcaaattcctgggctcaagctgtcctcccacctcagcctcccaaagtgctgggattataggtgtcagccactgcacttggcccgaggtcattgagttttattgatgcagaaatcactgaagttcttacaaatgttttcgtttttttgtttctttgtgttgttttttattttttggtggtggcaaatggaaatcttggtgccagctgtgttggcccttcactagcagggatcagatgttttggaaagtatattgcgggtgttttatcttgatctggttacttgctttaaatagttcaggttgttttggttaggctttctaatagtagttgatcataatactcagctttctattttggggaaagtttaatttcttattaaaaaaactttaaggaaaacctcagactttagtgttgaaaaaatgagtcacaaagaagtcagaaacatcagtgagggctgctccttatggctgtgaaattgagcaggctgtgcctccagatgccagcctcattagggtggattaatgctaagctcctctgagcttacacccatcattactccatgttcttctttctcagcaaatctgatgcccatcaattctgagcatgttctgtgcacttccagtattccattattgtttaccactacttgaagttgcccagctgaacaaacatttctgacttcagataatttacatggtat

SEQ ID NO: 124645 - DNA, 1068 bp, Homo sapiens
aaggaggcatgtgttggtataaggccagtttgagaccttagaggagacggctgcagttcaacatcagagctgagatggtgctagttcatggctcctgtctcaggcttgacactgacagttgacaacacggtgctctcctgggccttaggccattctgtcaccctccctgagctgtggagctgagctccttccctgtccttgcttctgcctcttcttagaagcctttttgaatttatcagagtgcctactatgtgccggaggagaatttgctgcacaagacaactttgatgtcttatccaagtcagcttctctgaactcgcaaaaaaacagattccttctagctctgattttcactaaatgtttctgaggtcttggttattctccacataaacctggagacatacttttcattaaaatataaggcagaggtatggggtttctgggtctgaacctcagaatagtcgaatggaagacagggtagggactttgagggcagcttcttactggctatgagactttggataaaagtgacaaccatacagagtccctttcccatctgtgaaaatgggattaacaaaaaaaagtcctttcagggtcaatgtgagaaccagcgaataagacaagtgcctcgccctgctgcactgtgaattaactttttttggaggcatttgtcctttggctgaaattcacatgctgtgtgctccagtactgtgaagtactttacttcctcaaccccatccttctcttagcttcaggactttttgcatacattttctttgccaagaatccatttgctcttttttttcccccccaacagtcttattttgttctggatcctttccatctttctttattctcaccaattatttagccctcaatttagacatcattcctaccacgcttggattagacatctctcctgtatttctcccatacttaacactatggtagcacttaacatgtaggcttgcattatctcatgtattttttttttcttcagaaaactaggtttattgctacacaatctgccagtaattccagctattttgggtgatttcattatttgac

SEQ ID NO: 124646 - DNA, 1064 bp, Homo sapiens
agagggtggtgcagagaaactgcttagcttttatgtatctctaatataaaaaaaatcaagactaactagttttgtgtgttttagactagtcttctaaaatgacatttgatgagtcactaaatcataacccccatcaaaatgcaaagtttggttaaaaggttagtttggtgggaagttgatctaagtctgattctccaaggtttctcagttggtcacaggtgatttgtgctgagaatatttatcttcagaacagtattattgagattaagctttgcaggaaggggttggtttttggtatatgctgaatatattgcaagttatataatgcactaaaaatatactttatagatggaaacggtgggttataagattaaactttttacatgttcctgttttagattaacatttatttagggaattcagtagcttgtgggataggtcctcaagtgttgtaatagcaagattactagttcaatccccttattttaagatgagccatattaaatatgatttaaaatgtaatttaatatgattttttttgttcaggagctacatctggtatgatgtagctttctatgaaacagccaaatggtagaaaccaagtttaagtaaattattagagtactagcatatctgctatgggcagagtttccttttaattcattcataatctcttcaaatttagagaatttagcttttagtttattgcattttcccttattctgggtatttgccgtatctaacttttcttaatttttgtatttcactttactctcctcattgtcctttgaggtagtgtcaagttagtggattatctctgttttcaaatgggcaaatatgggcacgcaagataaagttaattaagcaagagcacatactgaatcgtaagatgcttggaactagactttggaattcttcacctttgactccctttaaaaatttaatgattatttacatattgatcaacaaaaacaattttattgagagttcgttaggaataagatgggctgctgctgttaggtgtttctttccttaaaggcttgagggaacactatttccttttt

SEQ ID NO: 124647 - DNA, 1801 bp, Homo sapiens
tactttataagcatgggtctggctatgctcccaaaacatttcatggagttcacagctgttcttagggtatcctctgacagggtaattaaggcaaattgtgatacaggactaggaatcttataataaggttgactgagcccatgtaatttttttaaggttagctgtggcaagacaatcaatggtgctggttaaagctcctggtattatatgatttttgttaaagacatcccaagtgatgtaatgaacctttggagaaaaatgtgatagacacttctgtgtgcacgtactactacctaaagttggggacagcagtacagcacagtggtaagggtgggccagtggcatcttgcttggagctacacaggcctcagtaggaacctttgcttagccctgtgatcttgtgcaaactgattaaactctgagatttctgtttttaaaatctgtaaatgagggtaataagacctatggcagagggttgttgggaattaaatgataatgtctgtaaaggacttcttggattatctggtactaaagtgatattgtctcactaataagtttgtgtgtttaccatgtggtagtggaaaatgggggatgggtgtgcctattcccgtatgaccccgtggtttatggtttatgtttcatatatacggagacataggagtgtttcacatttctttgtaaaatatgggttatgcactgtgaataagttaagaattggtgctttatatctaggtgcatggatcttagaatccctaaaatgtgtttagttatggaattatcttaggagagatcatacgtaaaggaaataatagaccaggagatgaattcctaattccaaagaggtagaaacagtataaaaatgaacgaaggatgagaagtggcagttcagaagggcacagctgaaaagtcagtctgtgtacaaaaagatatccaatctaggctgggcacggtggttcatgcctgtaatcccagcacttggatgaatcgcttgagctcaggagtttgagaccaggctgggcaacatggcgaaaccccgtccctgcaaaaaataacaaaaattagccaggcatggtggtgcgtgcctgtagtcccagctaactggggggctgaggcagggggatggcttgagcccaggtttgcaccactgcattccaagctgggcgatagagtgagatcctatttcaaagaacaacaacagcaaaacaaacaaaaaaaacacccttgtctaactagttattagggaagtgccaacgataatgacattttctgcctatgaggttggagaaaaatgaataagattggccgtatctggtgttggcaaggttgtggaggcatggccactcatatagctaaagagtaaattggcaaagacttcttggcacactatttggcagtatctattagaacttaaaatgagaatacctttcaactaagtgttatggaaaacaacccagtcctcatggctttgtgtaatctgtaagcacagttttaatcagcaatatcgtacaatattgtaaaagagctccatccaaatcgccaagcaggaattggtaaaaagggtctctagtaggtgggagtctgtaaaacacagaattcttaggttatactatattacacgtcacattttaacagtatcgtacagataatctgaaactaacactgttgtctacttttcgagcaaaaaagatctctagctctaattttactgtttgggacattttgcaattgcctatctttgagttgtagaaggggaatttttgtaaaggaagacaatactgagagtccttccttttttcttctt

SEQ ID NO: 124648 - DNA, 2368 bp, Homo sapiens
ctttgctgatgtaactggccgtccttgtaacctttctccaaatgataccttattgttcagaagaagctggagtttttttttcctggcagagttgactgatcttaccctaagtgaaaatggaagctgctagtcttcttaaaggctgggctcagaattggcacattacttctgtcacattctattgattaaggcaagtcatcaggctagctcagattcaggggagatatggaaatagactccatctttagttggtagagtggcatgcatgtaccgagagaggaattgatggtggctatctttgtatgtcatcttccacaaattgaaggaagggtggagtagtggtttcaaaatgcttgcaacagaaaatacctgaaaattgcatttagcacagttgtaatattccggcaggagatgatatgttactagctttggaggtaatgagtagtggctattctctgtatagctgtaaggaacagccaacaggatttgctgatggattagctgaggagtatcagaaaagtgaagaattgcaagattttttggccagagcaactgggtggaagatggtgccatttaccaaaatggagaatattgggagaggagcagattcttgggtagaaaataggaactttggttttgatatggtgtttctaatacttactagaaatttaagtgaagaaggttagtaggcagatatatcaatttggagctcagggggagatgggacatagaagtgacatttggagacttcattagcttgtggcatttgaaaccatggaattggacatgatcatcaagggactgagcctatggctgtaggatgaaggaaagaccagcaaaggagggtgaggaaggacagtaaagtagaagaaagcaagcagggcaaactgtttctgggagataaatgaagaaagcctgtggagaaggagggtgtaatcagctgtgtagaataccaccgagagtgatgtagatggatgaataagtgagtgagggtggtgttaaatctcggcctggctctgctgtaaatagaaggagaacgatttacaaattttggagcaacctgggatgtaacctttctttcagaattcatttattcaatttttgttcactttcttagttttttatttatttatttatttgagatagaatcttgctctgttgacaggctggagtacagtggtgcgatcttggctcactgcagcctccgcctcccgggttcaagaggtcctcctgccacagcctcccaagtagctgggactacaggtgcgcaccaccatgcccagttgatttttgtagtttttagtagaggcagggtttcaccatgttggccagaatggtcttgaacccctgacctcaggtgatccacctgtctcggcctcccaaagtgttgggattacaggcgtgagccactgtgcctggcattttcttagtttctagaaatatctgagtacttatgtatatgttagagatggaagaatctcctcagtagatcctctgactcaatggacaaggcttgtctgtgacaaatgacgattgatctactctttttttttttttgagatggagtttcactcttgtcacccaggctggagtgcagtggcgatcttggctcacttgcaacctctgcctcctgagttcaagtgattctcctgcttcagcctcttgaatagctgggattacaggcacccgccaccatgcctggctgatttttttttgtatatttagtagagacagggtttcaccatgttagccaggttggtcttgaactcataacttcaggtaatctgcccacctcagcctcccaaagtgctgggactaccgctcctggccagttgatctactcttgcacttttttaacatttctggtgagtgtgagctcactttcgtttttgttttttttttttttttttgaggcagggtctcgcacggttgcccaggctggagtgcagtgatcacaggtgtagactacaggcacctacaggcacatgcctcctcgtctggctaattttttttttaatttttagtagagacgatgtcttgctgtgttacttaggttagtcttgaactccttggctcaagcggtcctcccactttggcctcccaaagtgctgggattacagacgtgaactactgtgcctggccttcactttcttacaaattcattctgctttcttattaacataacattgggaaaattgtctgaacctatcttaggttccaaaagagtgtagaccaagtccagttcttcttcttttttcgagtcagaatctcactttgttgcccaggctgaagtgcaatggtatgatctcagctcactgcaacctcctcctctcaggttcaagtgattctcctgcctcagcctcccgag

SEQ ID NO: 124649 - DNA, 1021 bp, Homo sapiens
tgttgtttttgcctgtgtacctctttcatgcagttagcaagggggaaatgatctttgccacgctttgaaactattatgagcgacacaagtttagttaatgtgtggttataggattgggattttgtattaaagtgaagctgtcaaactaccttcatgtatttgaagtgactccattataattgtttttagcagcagcatccaggcagcaacttttctagcaataactaatttttggaaggtgtgagttatccattcagtaactctggtggttggtttggtctgggaggaaggagaggcggaaagacgagatggttagctgtgctattcttagctgagtttcctttatcaactgttgcctctgattcaagcttccagagtcataagacaggaggtggcagtgtggtagcaatgaccaaggggtaggattggtattcttagttaagatctcagccccataaatctgatgttacaaattggcttggattgccagaattttgcttgaaggctgatggcaagcatacatagttttgagtgttccattaaaattaagggtgtaatgtatcatggtctgaaattgctgtttggcaagtattcagtattggtaaataaacacagttctaaatattgacatattctgtgaattttgttgccctgaaggggactactttgtagtacataaactatagatattttagagaattatcctgagaccatataacttgattaggaaatagtttaaagttattgtagaaatatccttgggccaggcgaggtggctcacacctgtaatcccagcactttgggaggccgaggtgggtggatcacgaggtcaggagatcgagaccatcctggctaacacggtgaaaccccgtctctactaaaaatacaaaaaaattaaccgggcgtggtggcggtcgcctttagtcccagctacgcggtaggctgaggcaggagaatggcgtgaacctgggaggcggagcttacagtgagctgagatcgcgctactgcactccagcctggg

SEQ ID NO: 124650 - DNA, 1084 bp, Homo sapiens
ctggtgctggagaatgcacgctgagatggatgaatgggcttgcactgactaaacaggggagcaggcccaggaggtgattggaggcttggcaggctggcctggctttgacttccagtggagcttggggggggaccctttcaggaagtagtaaggttgaatttggttcagaccaagcttagctcccaattactgaggtctcaagggaatgtggaaggaatgtggcttttctgcattcagatacccctcagttggggaagattatagcagttactttacagacattgaagtctcctgcagctggactaaagagaagattgcattggatatctgtgatagtgttgcactctctattctaaatataaaagatacagaacatgaagactttgactccgaagtataggctcaacttttttccctccaccttggaagtaagggtaggtgtggaaaatagttggtacttggaaatgttgtagctgtgtttggttggaagagctgctggtatcctgtggggccttgtttgtgcccctatgtgattatgtaaatagcactgatgtccttttttgttatgttgtgggctgttgggcatgggagagggaagaggaaaattgctgacactggggaactgagaggatggtggttttagttcaatttccattactttttaaaattacgaaaataatttttcatatgttcagttttttagaacctaacctttttgttgttgttgctgcctcctatgtgatgaagaacctaagcatatttttattaaacttcctcatgatttagcggttggcattgtttaggattatgtgtaggaaaaatacatttgaagaaaggagaaaaaaataataggatattatagttaatatttttctaggcaggatcctttacctttttcttcctttcagggtaggattttttctatttttatttttatttttatttttatttttatttatttatttttttttaagatggagtctctctctgttgcccaggctggagtgcagtggcacgatctcggctcactgcaacctctgcctcccaggttcaagcgatccttctgcctcagccctcctagtag

SEQ ID NO: 124651 - DNA, 1051 bp, Homo sapiens
gtctcccctgccgtccccgaccctttctcgccactccctgtcttcctcaagcccaccgctgagtgttcccggcgggtctgggctgaagcagagggcagggccagggcgccccctcctgaagaaagccaggggagccccctgccccgagtctgccctgtggagcgtgtccagggcggtgagagggtgggccgcgtccctcttgcgggcctcgtggtgttggtggcccccaggggtgggtgggggaggcttggagactggactgatacccaagtagtgggcccgccagcggaccctgctccccaaccatctgcgagttaaatgcccacgccgctcgagggggtcggcttctccctccgcctggagccgcgtccgggcctcgggggcccttcgagggcctcaggaggccatttgtgtcgccgcttgggctgtgcgggtcttcgggcagggagagccgctgaactcggccgaccgtctcacttcttgtgtgtccgcaggtaaaatagaactgcacgggaaacccatagaagttgagcactcggtcccaaaaaggcaaaggtgagctgctgcttctgtttgccccgattctgttctcactccgttattgggtggagagactcagctgagaacttcttgtcctctggtgcttaccccctgccgtgtggcgtggtgttccggtctttaatccttgcttttaagtttatggcgggggtgtgtgtgttgatgatgctgggcaggaattgaaagcttttctgtggcctctgccgcgggattatggttattggttacaaaatctctcgaaagctcacagctgaatgtcctcggtccgagcgggtcaaattgctcctacgggaaatgggtcccaacaagcagtttggggggtttgcagggcttgggaagcagcggatgattcccccacccctccaggagcaggagaggcgaaagcagctgcggacacgcgggggtccctcctttccttctctgtccggggttgggaggccgtgggcgcggccgagtggagaggaatttgcctctgccctgtgagctcgccagg

SEQ ID NO: 124652 - DNA, 1011 bp, Homo sapiens
cgcgtcgcccgcctgtcttgcccccaccccctgcccccctcacccactcccccacccctcctcgcagcatttccgtccatgccagccttagaaacgtgcctgcggctttgctggggttacacttctaatgccattaaagccaccaggcgagttcgggattgtgactctggttttgttgttaataacctattttgaaaaatcgaatgattaaaactacggtaactagcgctgaggaactgcctgttagtacctctgcccatttcctcattaaaaaaaaaaaaatcaatattccagccctccctcccaggatccgcccagaccagataaccctttacaaactcgagttgtgaccgtcagcgccccgcttggtgccggctgcggttcctttagcattttccttcttcctcctcccccttctcagagtccctctcccaatctcgtttcccctccccctcttcctctcgctcgcttttttctccgaaacccactctaattgaggctctgggattcctcacgtgagacgttgatttgtagtttgaacacgtggctcattcaaaaagccggacactcggagcggattttttccgcctcctgcgccttcctccctcctcctcctcctcctctcccctccctcctgccagtcacccttctgggttttttatggggaggcggcgcctgcctcacgtagtgtgatattttcacagtccgctggccgaagccaaaggggttgggaaggaagagacaaaaagtagttttttcccctcctcctcctcctttctcttgctaatcccgcctcctcctaagacttaggaagactggtggatgcgtttgggttgtagctaggctttttcttttctttctcttttaaaacacatctagacaaggaaaaaacaagcctcggatctgatttttcactcctcgttcttgtgcttggttcttactgtgtttgtgtattttaaaggcgagaagacgaggggaacaaaaccagctggatccatccatcaccgtggg

SEQ ID NO: 124653 - DNA, 1363 bp, Homo sapiens
gattaccgatacaggtaatgttttaacttgagctttctgttctaaattagatgatagtagtgttacttggcacttttatgttggatacatatgaataaaaacttgatttttaaaatagatcatatatgacgcctttgggagcagaagttagcagtctgtatatgtcagtattttgttgtgctatatacttttctggtctcattggcagaaagagaacttaatattaagtagttatcaccttaggtacattattattttgaatgatgaggaatttttattttcatctgcctcagtggagtgattatatagtatgctaagtaatctttcatttcttacagaagacgatcaccttctccttattatagtcgatatagatcacgatcaagatctcgttcctacagcccaagtatgtgaactttacttttgtagcataaaaaacctcatttctaattaatggcttactttagaatattagagtataaggtggaaggtggcagttaatagttggaaaaatatgaggcaaattaaactataattgttaactttttttttttttttttttttttgctttttctcttttaggacgctattgataacggaatggttgcaattaaggacattttttttcctcttttttttttttttttttttaattctgagatttccccaagctgtggattcttcctactccttaagaaaaaaactttggtttatttagcatctacacttttgtcagttgtgttgctgttttccacccattttattatactcttaaaagatgtaattgttgtcattttgaacagttaaacatcttgagtataaaaagaaccccaatgttatgttatgctttgtaaatttttttttttgcttttacctagataaacttctagctaatcaaataaggaaagaaactgtctttttaaagcttcttttgtgttagatactgtattagagatctgcatttatcatgagttcctttttttttttaactttatttttgggaaagtaacacatgaagtagttcagtcatgtcaggtttgtctggggtggaatggaacagtcaggtagttgaaagtttttttttagagatgaaaagcttgtgaactcctgtaaaacatgctgtatttgaaatacatctgttaaaacttaaaaactaaagtgtgattttttttgttgttgttaagtttattgaagtttattcccttaatcagtgaaggacaacccttatttattacctagagcagttgtataattcgctgttagaaattttggtattgggacagtggataagcaggttatcacatagcatagaattcttaaaagatacatgtggggaaaagtagtctcaaataaaagctaattt

SEQ ID NO: 124654 - DNA, 1062 bp, Homo sapiens
tttttgtatttttagtagagacgaggtttcaacatgttggccaggatggtcttgatctcttgatctcgcgatctgctcgcgtcggcctcccaaagtgctgggattacaggcatgagccaccgcacccggccacgattttattttatagcaatagtgggtttttgttttttgttttttttttgttttttaaaagaagatggggccttaacatttttgtaaggttaggtgaaaagggtgaatgtagaggggcttgactgagaagagtggaagatgtagtgacttaagtgaaccaaaggaagaataccctttcctcagaagcaaggaggaaggacctgagaatagttagggatatatgtataccttcttggaagagggaaggactttagccattttgtttcagtatttttacctaaatgtatttctctcaaaggtcgaggtcaaggagacattctcatagacgttacactcgatccagatcccactctcactctcataggagacgatctcgaagtagatcatatacaccagaataccggcggcgaaggagccgaagccattctccaatgtctaaccggagaagacatactggcagcagggtacgtggtttataaaagttaatgaagacttattttctcttttatgtgtttagtcatggcatatcttgcttttaggggagcttggccattgtttagaagtgatactctggaaacatccttaataagctgctttagctttcaaagtaaaggaaatgccaccatctttcgtaagcttaccatgttttatgacaaagaatgcaaaggaagtatattttcttttttttagacaaagtcttactctgtctcccaggctggagtgcaggggtgcaatttcgactcactgcggccttagcctcctgaatagctggggttgcaggtgtgcaccaccacacccagctaatttttgtgtttttagaaatggggtttcaccatgttgacccctctggtctcaaactcctgacctcaggtgatccacctgccttggcctcccaaagtgctggggttacaggcgtgagctaccatgcct

SEQ ID NO: 124655 - DNA, 2245 bp, Homo sapiens
aaattacttctgtgaaattgagataattatttacactgataatcaaggcttaactggacacagaaaccaagctgtccatcctgttttgatcataagtgcctcatatctgtgcagttaaaaaaaacaagcttatgatcagtaagttattttatttggaatgctttgatttacacccaattttttcagaaacccatcactttttggatatagaatatagtcactgaagggagtaccagtatacataaatgcataaattatgtaaaaactgaacataattctaaagagatggaatcaaagataaagactatgatataaattttgtaccttcttgcacattgtggtatgtcgtggataatagagcattttaaagtgatctggttgcaaaaatgtgtatatcaggaattaataagctaatggggaaattttaagaatttcatgcttattagttttttcggtatgtttgtcttcagaacatattttaagtcagaatgagcaaagatagtagtcaaagttgggagaaggtgtaattttactgatttttttctttttgacttatttgaaccttgacatgtgctatgggtgagtttagataggtgtgtacaaatatttcagcctgggatgccttgctctaactatatcttgatttcttagcatgacttagtgaaagcttatttttaagaatcttcagattataaagtagtgaaaatttaacacttaggtggggggaaattatagttgttagatttatatttgaattatattaaaattgctcacattttaggaactagaatgaaacatgggaggagggtgaagagtatggtttaaaaagcatttagagaaatttagtaaattctctttgttagaaactagagttttgaacaattttaaagactataaaattgttttttttttttttttttaaataaactagttacttgcactttacctgctggcttttccatttggtagataacattctgaactccagcagagttttataatccccacgtgcttaaatatactaaatgttctttttccattaaggttaatgttcgtgaagaaattgaagagttttttccaagaatgtggaagataaatcaagataaaagaaggctaatgaaaagtattaaagatcagaaaattaaaattgaatgggggaaaaaattgaacagaagattggtcagatagaagcacttgaatatttttttaaggctattttgaattgtttgaattggggaagaatacacgaagtatgaaaaatgaaaaactcaatgaagaatgaagagaagtagaaagcaagagtgaagtagaattaaaagaatctggaagaatgaatgggtcctaggttaagtaaatgtatggtttatgttccagtgtctgtatgatcaagttgtagatgaatttgcatgattacttagttaatagagaattggtgatctggttcaagtagggaattattgaggacagttagcagtattaacagtgggttattattgagctgaaattttttctggagggtgttgtctaaccatttgtttttcaggagcaatcaatataaataattacggtactttaaatgttaggtgttaggcatctacatgaccagtgccatttgtaatactgtcttctttgttaggagtctcgctctcagtcaaaatctccaacgggaactcctgctcgtgtaaaatcggagagcaggtcaggatctcgtagtccatcaagggtttccaaacactctgaatcccattctcgatcaagatcaaaatccaggtaagtgtgtttaagataatacttaaaatattcttctggggtttttgaggacaaagcagttgttggctgcattttgtgtagaaatttcacgaaagactcaaaattatagtttttctcagactgctctttgtaaatgaatactatatcccagacaaagacttggaagtatggcttgagcccaggagttccaggctgcattgattgcaccactgcaccacagcctgggtgccagggagaccctatctctgaaaaaataagaaatcaatactaaaatcatctcccagcccaattaatatattggatagttgcaaccagtacaaattatgtgtatatagccatcaatttaaatgtgtttggcatttgataattagtgtctggtttctatgccaacaatatttgcacaacaaaaaggcggttttctgcattggagtctcacatgtaatttaatgcagagaaagttgatgtgtgtatgcta

SEQ ID NO: 124656 - DNA, 1021 bp, Homo sapiens
caaccaacagcagggtcatcttgataataaagaatagtttaaacaagcaggccgggtgcagtggctcatgcctgtaatcccagcactttgcgaggctgaggcgggtggatcacttgaggtcaggagttcgaggccagcctggccaatgtggtgaaaccccgtctctactaaaataaaatacaaaagttagccaggtgcgatggcgggtgcctgtaatcccagctacccaggaagctgaggcagaattgcttgaacccaggagttggaggttgcaatgagaagattgtgccactgcactccagcctgggtgacagaaaaaccaaacaagcaaataaacatcaaaacaaaaacctgttaaagcaggttgtgctgtgagaagaacttttctgcctggcttctgctttatagcctataagatagactggaggcctatttaagacttttgttaaaattcatgatacgagttgagttattaatctgcccatttaaaccgggcagtgtatttttaatggttattggatgcaggagccagattactgaggaaatggtaggattccttgactggacagctttaagaacaagtagtctagtgaaacagggcagataccacccattcccagcaatcttttttgtttgcaatttcaattcattttccaaattgtggatagttttatgaatttctttgagaaaaagttgaaattatttcataatgaagacgagtcagagagaaaaggattagcctagcatttgtcctctttatataaaggacttcttatagcctgattcctaatgcagagttcagtgaaagtgacatttatttggtaacagcttttgagaaatgttactttatttctaaataattatatacttggcagtttattcttccagttaagtttactaatagttactgatttgttaatataagtttgtaagttgtttttgaaagttaaaatgaagctgggtgtggtggctcacacctgtaatcccagcgctttgggaggccaaggcgggcagatcaagg

SEQ ID NO: 124657 - DNA, 1168 bp, Homo sapiens
aatttaagtactatcatttatctgattttaatgctttcagttgttctcctctccccttccatttaagcaaagaatttgtaaacttaaaaaaaattaaaatctcaaatttttatatttgaggttctttcactgaaggatgttgatctgctcaatataagtagagggcaagattttgaaaaggagcagtgcaagtaattatacccacagcgcataactaattttacagatctgtcatagaggcttatactttgtaccactcattaaatggaatatagaaccttgagatctgaaagaatgtccagggatttaaatatttagggatgtgtggtttggaaaacactttgtctgtgggcttaattttgtaaatcaaccaaactctaacctacgatgtagcatgtgtattataagaagtgtgaaatgtcatcaataatcagcatagtagtttcctagaacttgactggcagaaaactttctttgatagtatcagtgggtgctcacccattagataactaaaagatgtgtattcacgtgctaatgaattaaaactgattgctatttgttcatatgtcctcacaaatttagcaagacaggcatggaggtgaaaaaaatagtaacaactagatgagggaaagattgtatacactgaagaaaagttgagaggagaatactaaagggaaatatggtttcccttccctccttttaagttacttatatatatagttatatataatccttactgtcccatgactttcaccaaagatggagtgactaggcctgactgatatgtagaagaaaagttgtgatctttccttgaaaccaggaccctatcatctgacttaccaagattcataaatactgtataactccagaagattagaacataatgttaaatcacattagtccttacaaacttgttttttctacctttgaaattgccacttatacattagttttttgaacattacaattgatcaggatatataagctatgagacttatgaaccacgtttaaaatttgtacaaaagattataaattttacaggtgatttcacaattatggcatgagtttaaatttgattatatgtgggtgtcagttactaaatcatgtatttatgataagacttctaaattttagagaataaggaaacatacagaattagaatatgttt

SEQ ID NO: 124658 - DNA, 1579 bp, Homo sapiens
taattcctcgatgttgggttttttctcttctttatatctcaacttttaatgctcttcttcctatgacctttcatctaaaaactgaccactcctttacaggtttttacggtaaaaaaaaaaaaatctgtctttctttaatcttacatagctgaacgaattcattggctcagtatttttaagataactagtcagtatatactgttctgtaacttaaaagatgacctgaaaattaacaggccctctcccatttctcttctcactctatcccccaccgaagagggctcagaaaaaagtttttattaatatatttggggtcggagaaatacaaacatcacaaagaatacgatatccccagcttaaatgtactggaacgtttgtcagtgagtttcatttccaaagtttaccctacatagggaattgtagaagtgagttagtagaagtgagttcgtgtgaaaccctggaaagaaaacaaaagccccatgcaacacgttccgggctgttgtgtagatgtttattctagtcactaggggaagcacataaaaacacctgaggtgtgtgtgctgaagggcgaattttgtccttttggggagttcatgatataaacatctagaaccaaaaagtcaaatcagaaggtcagtttaggctttagttctctttgaggaaagatttaaagcaatagactataatagttacccggtagactaaaaaatttgcctttaattcttttgattggaatttttttttacaaagtttggagcatggaaacaaatgaaaattgaacctgcttattttttaggatggtgtattgatggccccaacagaactttctaaaatcatgcgataaacatatatgatagtagttgtaaaatgcttcttgttttgaaaatgttgagtaattatcgatagaaattttgctgtccattcatacattccttcaattaactttcattgttaaaaaattgggggattgatgtttggtttggtttgtggggagtgaagaggactactggagggaccttgtttgcttgctttttttctttttttaatttatcatcaagtctaggaaaggagtaagttgccgacaattgtcacttttccctcctaagaaagtaacatgttaagattcccacctaccagcctgggtgacagtgagactcccgtctcaaaaaaaaaaaaaaagattcccacccacttttaagctaaagtatatgtaggcattaaagatttatttaatagaaataaagggccctcttacggccctttgtggtcataggaaatatttttttcacaagtggtacccaagtgtattttagtgtaaatcaactagtgcttgtaggctcacctgttgtatctttttatttttcgtcttttagtttttataggatgagataattgtctttatttgtaattggttaaagaattagaacaatgcgagaagcttgtctggagatgccctttttaaaatcgtttctggccgggcgcagtggctcacgcctgtaatccaacaatttttgggaggctgaggcgggtggattacttgaggttaggagttcgagactagcctgcccaacgtggtgaa

SEQ ID NO: 124659 - DNA, 1105 bp, Homo sapiens
gcagtgatcgcttcactgcacttcagcttgggtgacagagcgagaccctgactcaaaaaataaacaaacataaaaaaacgcttccaatgttttgttcccttacatcagaatccacttggacaatatttaaaggggctaaggtcatataaggctcatctggcgactgaaaagtcttcaaagaggttgacgcgtccgaggtgagtctgaagtttggaggacagcacgggaccgcgattccaaggcgcccaggttgagagcgcaggccgcccgccaacctccaccctcgctccaggcccagccgacacaaagcctcgcgggaggtggagcctcgtgacgtcacagagacgcccgccccctttacgtcgtgctctgaggaggccaggagatttctggcggcgccggcgccattttgctggagcctgcgaccgagtgggagtggagtggagcggctgtggttgccgactctttcctcttccccacggtccagtcagcgggttaattaggccatcggccctcgagccgagacttgtctcttatttagttctggggagcgcctcgtcgacatgagtgatgtggaggaaaacaacttcgagggcagagtgagtacaaagccgcgggagccgtctaggcggcggcccaatgctcggggtttcacgggaacaagcgcggtcgggcggggttgcgggtagtcccgcgaggagcaacctctggagccatcgcgattgattcctcccatcccaagatggcttctgggttccactccttccccaaacaccacggataacacccctcccccttttttggaggctgactgatacctggacttctgggtcctcttccctccccgcccccgcattgcttcctcccttctccccacccctgaggcttccttatgtctgctccgaggtgtgggtccccgtcgcggttgggcgggaggaggcggcagggagctcccctccgtccggatagtggtaggtgcttcctgcggtggcatttctggcgaccccgagcatcgtagagggtctcgggatcgaaagtgcgcggggctgctttccgggcggggagaagctggcgtgggactagctggggcctgtgtctccttggc

SEQ ID NO: 124660 - DNA, 1050 bp, Homo sapiens
gtcagttataagttacagaaaattagtcctaaatcaactggaagtgttcgccagttactacgtgaaaagataagagatgcttatacacatccacaatttgtgactaatgtaatgaagcctctgcaaattgaaaacatcatcgatcaagaggtgcagacattatcgggtggtgaactacagcgagtagctttagccctttgtttgggcaaacctgctgatgtctatttaattgatgaaccatctgcatatttggattctgagcaaagactgatggcagctcgagttgtcaaacgtttcatacttcatgcaaaaaagacagcctttgttgtggaacatgacttcatcatggccacctatctagcggatcatgtcatcattttcgatggtgttccatctactaagaacacagttgcaaacagtcctcaaacccttttggctggcatgaatacattttagtctcagcttgaaactacattcagaagagatccaaaccactatagaccacaaataaattaatttaatttaattaaggatgtagaacaaaagaagagtggaaactactttttcttgattagattgagtctgagaatattgataagccacttagtaaaaggaatatttactagaatttttgtcatataaaactcgaatcaggattttatgccccacatactctggagcttgaagtataatttacttaatataacatcaaagccagttgggttctaaattgtagttgaaacacagaaaatgccactttactgttcctgatgaggcccttttgtgcctaatattctaaagacatttcaagctatacaaattaccttcaagttttcatgatgtatgggaagattttcagtagatgtattatattcacataccaaatgctgaccagtgttgctccattttttaaatcttgaaaagggtttctgtatttacctggtttgccaagtatgccagtgtaacgaaactgccctcattttaaaagccagtcaaagattccactgattgacatttgataaataaacatcaggattatgtttattattt

SEQ ID NO: 124661 - DNA, 1035 bp, Homo sapiens
gctattgtcaatcatgacaaatgtaaacctaagaaatgtcaacaggaatgcaaaaagagttgtcctgtagttcaaatgggagaattatgcatagaagttacaccccagagcaaaatagcatggatttctgaaactctttgtattggttgtggtatctgtattaagaaatgcccctttggcgccctatcaattgacaatttaccaagcaacttggaaaaagaaaccacacattgatattgtgccaatgtcatctaaattaacaggttgcctatccctcgtccaggtaaagttttgggattagttggaactaatggtattggaaagtcaactgctttaaaaatttttagcaggaaaacaaaagccaaaccttggaaagtacgatgatcctcctgactggcaagacattttgacttatttccgtgaatctgaattacagaattactttaccaagattctagaagagaacctaaaagccatcatcaaatctcaatatgtagaccagattcctaagcctgcaaaggggacagtgggatctattttggactgaaaagatgaaacaaagacacaggcaattgtatgtcagcagcttgaattaacccacctaacagaacgaaatgttgaagatctttcaggaggagagttgcagagatttgcctgtgctgtcatttgcatacagaaagctgatattttcatgtttggtgagacttctcgttacctagatgtcaaacagcatttaaagcctgctattactatacaatctctgataaatccagatagatatatcgttgtagtggaatatgatctaggtgtattagactatctctctgatttcatctgctgtttatatggtgtaccaagcacctatggagttgtcactgtgccttttagtgtaagaaagggcataaacatttttttggatggctatgttccaacagaaaacctgagattccaagatgcatcacttgtttttaaagtggctgagacagcaaatgaagaagaagtcaaaatgatgtgtatgtataaatattcaggaat

SEQ ID NO: 124662 - DNA, 1048 bp, Homo sapiens
ctgtgctttgggagccttctcattctcatttgtttgtactgaggaaaataggaataaggaatttgttgactgctcccgagattctggtaaaagaagaattctaaaggttttgttggaaggaaattggaaccagactttgtacttcctcctctttctgaaatcagatattaccccctcattattctttgacctcacacctcaggcagatgttccaagacacatcaccattttttttttttcttcatagcagtttatcacaaactgagataacttgtttgtttgcttgtttgttgtcccgttcctattaaaatagtatccagaaaaacaggaatcctgtctttcatatcttgctttacctttcacatctatggttcctggcacatggtaggtactttgctattgtgaatgaattagtgaacaaatgaatgagtaaaccaagttctttcatgccttaaatagaactgcatgtagtaaaggttgtgtttgagcctaggcctttatgcactgccccccaccctccacctccaattcttttttctggaagtgtgttatcactatgtttactgatcatggtgaaggtctctacctttagaagactttgtgtttatctttgttttacttcatatgtttttatcttctagttttttgcctgtataaaaactaacatataagacttccgaaatccttcttgtagcaactttataatactttgatttatgtgaatacagtttacttgaaactttaagagccagcttaataatttagtgaatagttcaaattaggcatcttcaggatcattgtcctaaactgccattactattttctggttacattcttttaaagcaaaaaagaacaaaacttcatttaatacagtttattccgtatttacaaacacaatctttctaggggaagtaaggaaggtagtgtggtgtagagaaaaccctagacagtgagtcaggacctgtattctggaccagtaggatttctgccattaactgggtttcatttttaggcaagacacttaacatctctgggcttcagtttcttt

SEQ ID NO: 124663 - DNA, 1032 bp, Homo sapiens
tgagagtaacaataaagtattcatgatttttcacatacatgaatgttcatttaaaagtttaatcctttgagtgtctatgctatcaggaaagcacattatttccatatttgggttaattttgcttttattatattggtctaggaggaagggactttggagaatggaactcttgaggactttagccaggtgtatataataaaggtacttttgtgctgcattaaattgcttggaaaatgttaacattatattatataagagtatcctttatgaaattttgaatttgtataacagatgcattagatattcattttatataatggccacttaaaataagaacatttaaaatataaactatgaagattgactatcttttcaggaaaaaagctgtatatagcacagggaaccctaatcttgggtaattctagtataaaacaaattatacttttatttaaatttcccttgtagcaaatctaattgccacatggtgccctatatttcatagtatttattctctatagtaactgcttaagtgcagctagcttctagatttagactatatagaatttagatattgtattgttcgtcattataatatgctaccacatgtagcaataattacaatattttattaaaataaatatgtgaaatattgtttcatgaaagacagatttccaaatctctcttctcttctctgtactgtctacctttatgtgaagaaattaattatatgccattgccaggtagaagtttggaataattgtttagtctctcctattagatgtggacatttttgtttttgtttttgttttcagggatgaaataaaatatattatttctacctacaaagtattacagtcttttttctttaatgttggttgtgcatttaataaatgataaatggttaaaaggaatcttaagaaaaattcggttttgtttcaattccagataacttttccaaaagagaaaaattgaaggttacccaatagtgcctctcatttgatactagggtaggagagtctgagtgcagagata

SEQ ID NO: 124664 - DNA, 1057 bp, Homo sapiens
cgtcatctgttattattccccaaaacattgtttttaattttcagttaaaaatatttattctgaaatattgatcaaactcaccttttgctacattttccatgcaattttcagattgaagtggttatcaggaagataaatttgaaaagtagtctgaggtcaagatcattgcttttcaggccttatagtgcatacaactcacctggggttcatgttaaaatgcaaattaatattcagcatttctgcagtggatcatctgcatttctaacaagctaccagttaatgctgtagctcctggcccttggaccatactttgagaagcaaggatcaaaatcgtagctagaaaaaagatagcacttagtgacacatgctaggcattgtatctctgtaaggtagacattatttccattttacaaattaattcaggctcaaagaggtttacacctactatgtacccataaaaattaaaaataaattttaaaaatggacaaaaaagaggttaaagccctcggtcccacagcaaataaataggagagtggggaattgtaaccaagatctgcctgaatataggattcatgctattgtcactgatcatctttgacatgttagaaatggtatatttagagaatgatcagtaaggaaggaaagtgctttgtaggatttcagttcttaaatgaattatttagaattttcagaattagaacatggcactgctgctcactcttgtgaaatttattttttaaaaagagtatcaaatgtttaatcacagaataagtggttgttagtattaaatctgttcaagtctacaaagtgaatgtaaaaaaaagtcccatagttaatttattagactgattttaagagcaatttataatagcagaaattggtaaaaatatttgaaagcaagggaatgaaatatttaaaatgaatttgttttttgtattgattaaatgcagagtacttcacagaaagtcacctcaactgtgttgtatctgaaatatgtaaaatattgtttttgcagagtcagcgagcctcggtgaacatgatggttggtgacttgagt

SEQ ID NO: 124665 - DNA, 1033 bp, Homo sapiens
gtggagtctgtgaagggggagggggagatttttccagaggcttttcttctcgttccatttctcttttgtgccccacgactgggttcttgaatgtaaaactctcagaaaggtcagggcggagcctgttttatgccccgaggagtatcttgcccacccgtaaatgctgacagacagctgcgacttcggcccaggagacccggcggggactgggtccgaccagccctctctcgcgggcgcaggtccgggacccctgaagcgagccggccgggcgcagagcgcagtcagtctgggcgctcagaagctgggagggggctccacctgggcgcccagccgcggcgggaggggcggggcccggctttccggaggcggtggcacctcctcgcgcccgagcgcgcgctccccgacgtccggcgcacgcgcgaggccggctgggagcgcgcccaagcggcggcggcggcggcggctggaggaggaggaggaggaggaggaggaggaggagggcggctgaggcgcggctggctgcgcgcgcggaggcagcggcgggggcgaccggagctggggcagagtggggagcgagggagggggaggagagagagggaggcggagggcagtgagagacgcatttccagttctcaactacgagccacgagtttgcagatggggctgctcggcggcgcctgtggctgagggagagcagcggcggcggggagcgaccgggagcggcggcagcggcggcgcggaggcggctgaggtgcgagccggtgagttaactggacccccacgccgctcgggtaacggtcgcgccgcgcgccgggccggccgggggcgccctgttgctcggcgcggcgcgccacgcggggaccctggcccgccccgcccccctcggcacctgggcttcggcgggcgcggggaagagggaccggcaggcggcggcggcggcgccgcggtcggggaggctgctggccgcccccagcccggcccgcgcggaaggggcgctcggccgggctcctgcctctctggctgcgggcggctg

SEQ ID NO: 124666 - DNA, 2167 bp, Homo sapiens
aggggaggaggctttctccaactaccgccgctacttccgaggtacgagactccagttgtttggccaaagtggctgtgggccgagcacaggctgccgcgggggcgttcgctgctgagatcgtgctcgcggattctcggtacgtttgtctgaaaccaaataggtgctggggcttttttattttggctgggtggagggtcagcaggggagtcgattgaggtatccgaccgtgtggtgacaggatgtggattggttggtagatgtttttttgcagaaggactttttaacactttactgggagtttattctcaatcctaccagtttctgggattgcagctcgagattacatttgttaaacttccatcagttgggtgtgcatctgtgtagggggtgggggtgaagcgagggagagaattgaagactgccggggaagctcagaaaattctccgcattacttataaacagccgggtaaggtcaggctagccacgttttattctttcctacgcctttggagagtgttggaattttactttgtgcttcaagtatattacaagtggtcttgtagtgtagctgagaacgtttggggtgcgttaaaatgcgtttcaattggagtatgatttagcagccatttcttcccgtgaaattttgcaaatcatttgtaaacttatgttggtcgaatataccaggcgaagtaacatttttagtaatgcggtatatagtttccgtatataggtatagcaacggacctcaagtaatattgcttattgtaggcatctactgtgcaatgatagggtagtgggtagtaggcctgattatagttatgtcttctgaggccttgttaacagtaaacaaagaacttttgtgggttgtgtcattttgaggtcatttgtaccttaaatctatcatatatttaaataggtgtttaaatgcgtgtttgcacgatgtgttactctttaaggtccatgtttccttcattctggactacggttacataatacacaaatggtaacacttttaattgctcaattttgtcctatggagactgcacaccatctttatgaaagaggtgtgtatgtgtccttactgatgccaccgaattcttgacatctggaatgtcaaaatgaattattttgcattctaggttaaatcaacactggaaaaattaaggtgtttaagcaagtctagtagctctatataagacagaatctttttttttctttaggccaactgttggatttttaaaaatgaatcatatttttaaacatttgagggagcagtttgcttctgagtctcattttaggctgaaattgttccagagcactacatagcctgcttctctctttctctccccactccccctctttttagcttgagataaccaagaagacataactgtgactctatgtgttatctttttaaaaagttgttttaaaattgaagttgcttgtttgaatatttactatccctttacatgctttactacttaataatggattagcagaataaaacagatattttaattaaatgtctttcatatttttgacatctgagctttgtaaaaatggagtagcatcatattattgctgagagagttacaaataatacaggattagtgctagtcaaaggctaattgtaaaaaaacagccagaaaataaaattaaaagaggtaagaggacgcatttatacttttgacatcactctaatataaattacctattgctaggtgacttttgaaaaagagtatcttgtaaaattcacattaggtatataatagttaataatttttccttccagagtgattcacttgatgagtgactagattttttttttttaaatcagaactctacttcaggtaagtatagttaaccatgtaagtgatgtgctgatgtttatttcaggaagaatgaacacttacccatttgataaatactgaactgtttgggaatatgtcagttattccttaaaacttaggcggagaaaaattatgctagttttgttttaactgtaggttctttagaaaagtagtcttcacatttataaatataagagcagataagcacaagagatctctttcctgatatggtgctagtattgaattaaagattttatttttttgttgtagggaccagttttgtttagtcttcctgttcagtctcacagaagctgcaa

SEQ ID NO: 124667 - DNA, 1065 bp, Homo sapiens
taccccagtactggtaaagttgtttataaatcaccgagattttccgatactttgtatccttcacacagcccagcactttgttacctacttagtagcactaagtaaagatttaattgaaggagcttagcttatcacctttttatagacccagttcataattcttatgtttttggaagaaatcttttataaaaagtgattttcaatttcatttgataaatctacttagaatatttattagaataggcaatagagcaattttttataaatcttggtttattgtatagcatattaatggaactttttcatagttgctttgttctgtaggatattattagatattagttgggtaggattaatatttttaaaagatagaatagggcagctggagatatgtgggacttttaaagaaaaatgtatgagaaagtgtggggaaaatgattctctgagcagactgggggccatatgcttaggaaaggaaaagtgaaaggtgagggattcgtttagagaaattctgtggtggaactcagaggggtacatgttgggagaagttttaacttaggaaaatactaagctgatttacttaaatgcatatttcaaggataaatactttatattttgttctgtaggtcatttttaccatgaagtgactctggcagggattctttacctaagtgggcatcagaatcctttggagctatcctacgctaaaggattctaatttagtaggtctggtatggggcaggagcatgtttatattgttaaaatccccaggagccaccatttgagtgtaaaataatacatcctgtggaatattccattttaataatgaaatcattcaacaaagcttttgaggttgtatataatttaggtaactctaatgctggaacttggtctctcaccaggtcaatacttctgcacatacctcattgatccccattgctttactctcttgcatactcttccctcctctgccttcttgtttcttttctactaatgaatattcaggcatggttctccaaggaagccatcattaggtggcctcatccataatttatcttttcagta

SEQ ID NO: 124668 - DNA, 1099 bp, Homo sapiens
aatatgtaaatatatattatatatttttaatatatataatatataatatatataatatataatatataatatataaatatatattaactatatataaatatatataaatatatataaatatatatatatttgaatgtctactgtgtgtcaagcactgtcctagtgccagaggagacagaacaatgagtgaatttttagtgaggggaaacataagcaaaaaataatttcagatgagtactgtgatgaaaatgaaactaaaaggatggagagtgacaagactgtatgtaagggtggtagcgtagtttagattgaatgcttgggtttactttctggggaggtaatagttacactgtgacaaaatgaagagaatattggtatgtgtgtggatctctgggaagagcatttcaaggagagagaacagaagatggtaaagatgggaaatgagagatgggagatgaactggtctagtttgaaaacagaaaggagcccagtgtgactggagacaagcagacaaagggaaagagttggagaagttgaacgcagagaggtacagtgggtgacaaatcatgaaggcgctaagcggccatggtcaagagtgtggctagttttctaagtacagtgggaagcctttgggtagttttagcaggagagtaacaaaatctgttttgtgttttaaaatgatggctctagccactctggggagaatattgttgagaacgagagtgaaggtaagggaactggtcaagtgactactgcagcagacaggcaagaattgatggtggcttagcgtagggggatagcagtgaatgggcaagggagtcagatggcttttcttcagtcacctccattgtgaccgaattgaagaaccagtttatcattggatctgttatgaattctaggtatttttgtaagtatatatataaagtattattttgaaaacagaccctatcaatgaaatttattctaaaattacatagttttgggattcaaattagaacatttgataaaatatctcagtgattctataatatttcacatttatgaatgtttattaggtgtgtaaaacattttcaaacaattttgattcattatactacat

SEQ ID NO: 124669 - DNA, 1263 bp, Homo sapiens
aggtgaggggagatgattacttcatgatttgcctagggctgcctatattgaaatgtgtgcaggcaagctattgctaggccactggggagatcttttcactgagtccaaatgtgaactacatcattaatgctgttttatcaaaccaaagtatataaaggaagttctgttaaagcagaaaattatcattatagaaaaggacttgtgaaaagttctacaacatttgaaacaggtattttcatgtaacttaaatttatgaaggacaagttattgtctttttagttcatatttttagttcattttattaccagtattttcaaaacgtacccagctcagtctttagttgttagaagtgaagggctaacaaggatatccagttgtctatagtgttgatgcttgctatagggaaatttgcagtgaggaaaacatattaaaatagtactgttgttcagttgtaatttcatctatttaaagtgttctttcactacattgaacaaattatcagattgcctaagtttcttataaccagaagtctttcatataagaaatgtgaggttaaaacttaaaataacctgttcattatagattggataatctgctgtttcactgagttaggacctctttggaattcgcaaatttctgaaactgtgctaaataaataaggctattatgagcaaggttttatgtgtacacacacaatcaaagttttctaatatttggactatgttttaatattccatgcaaggattctgtgtatggtgtgtctgtgtttctctgtcttgttaatgtgagcattcatgcccagaagggatgactgggagacattatgcctttgaagaagataatttgtttccaacttatttttactgtcaaaaatgttttttgtgcttatttttaatgcagtgctttgtatatacttttgtgaaatatttcgcccagtactttaaaggatgatacataatcaaaagtaaaaaacacaccgagtgttgaatgaggcaggaataaaatacagtcgtgcatcacttaacaaaggggatacattctgagaaatgcatcattgggcgatttcatgatcgtgcaaacatagagagtactaacacaaacatagattgtactaacacacacatagatggtatagtctgttatacatgtgggctatttggcctattgttcctaggctacaaacctgtataacattttacacttgtggcttaccatgaatggagcttgcagaactggcagttgctctgggtgagtgagtggtga

SEQ ID NO: 124670 - DNA, 1002 bp, Homo sapiens
tttcatcatagatttgcttgtaagcagatctatgaacattcctctctagtaatgaaaacctttcattgttggggttcatgttttcaaacttgttaagcagcttgttgaagtctgcaaaaacttctgctaaacccttcactgtacattttcttgagagaattattcagctgcattataatcttttggaaccactgttgtatatgtagtctttggtcgactgaaataatgttatgtggtacatgactgtatccaaattgatgaggtaattctagtagcttataaaatatcttacataacaagatccatgtcatttccccctgaatcaaggacaaagaagaaaaaaggtttgttattttaagtataacatataatattcaaatgtgaattatgtttgattgtaggtcaataatttttgagccccagtttcttatgagaatggaattggtagtgtgccagttaaggaaaatttatggtgacactagataaacatggcagtaagtagaagcagttcattttgtataagttaaatcgttacatttataaatataaagaatagccatttaactattttttataggtttttaaattatagtttttacatcttacgttttagttgaatgttttactgaaatatatttcatgtcatagtatagataaaaaagaatttaagaaaccatgtcatctaaggatgactttgtcttctccaggtttctgtcctcaagcgaaaaaatcttgcctgtttttaactctagaaaagtggttataattatttgatttttcagcatgcaaactagtaactatttacacatgatagatatactttttttttaggtttttattttttattaaaactattaatgcacatatggatgaaagactagaggtgctccccaactctatttctgtttcttcctcccaggaggctactacatcgaacatttttagctgactgttttggtatcatgtcagtaaatggtgtgcttatgttgctaattcttattt

SEQ ID NO: 124671 - DNA, 1069 bp, Homo sapiens
aaaatgtaacatttttgtgactgtgaaactatgccaccaagaagtaatgatgtcccagatgtggcctagttgttggggatgcaaagatgatttctgcactcataaaacttagagtttagaaaggaagttgcacattaaataccaaaaaatttaattatataggtttatcagaattatgaagtatagagtactatgaaagtatgtcttaggagaagttatcctaattagggcagttagggacattgatattttgcccttaaagaatgagtgtgaattaggtatgcaaagatggttgtgtataggtggtggtaagtgcagggagggttttgcatcagggctggggtaatactggtatgtttaaagctgtgggagtggtgcaaattgaatctagcaatatattaaaatgcttataagccataaaatcacattttaattcctcataagttatatgtagataccaggctgttggggtagtctgggtacgatatgataatggcaaggactcattagggggtgatggaaagaaactgatagattctagattctagaaatatttacgaggtagaatttactgcttctttgctgtgtctgtttctactcctaccacttttaagctttgaaatacttttgaatatttttgtacagtgtttctctttagctattccctttgttcatgtggttttttgccttaatactttgctgctgttttaatagagattgtgaagaaaaagaatataaactcaggtagtcaatctaacatattttactgaaccctaggcccactgatttgaaatgtcacctttattgtatattgtttcatttaactactctgaagatttgtctgttcctatgataatactgcactatttgaatatacagtgtttttacagttgatagcaggtacctccttgacatttatgctttcctaaaaaatcatgttggctagttttacgtactttctttttcaggtaaattttaggataaatttacccaaaatgcttttgggatttctattaggatttattcatttttttttaaagaataatttggagagaattggcatttttac

SEQ ID NO: 124672 - DNA, 1019 bp, Homo sapiens
ttggttttccatgttaatatatttatagctacagtttctaaaaaaacctttttttctcccttcaatttctgtattttcttttttttttttttttttttttttttgagacggagtctcgctctgtcgcccaggctggagtgcagtggcgggatctcggctcactgcaagctccgcctcccgggttcacgccattctcctgcctcagcctcccaagtagctgggaccacaggcgcccgccactacgcccggctaattttttgtattttttagtagagacggggtttcaccgttttagccgggatggtctcgatctcctgacctcgtgatccgcccgcctcggcctcccaaagtgctgggattacaggcgtgagccaccgcgcccggccaatttctgtattttctagtgagattctcttcttccatagaaccaaactgtgaggctgatatgaaaaaatcttcagatgtgcttgggttctttttctaacatgattctgccttctcacatgactctcccctgacccccaaccccttgccattagtctttccacattcctacttctcctcacccaatttggaagcattaggttaatacacatactaaggaatggagttttcaagtcattgatcatttctgttcctttacttctcctaaagtcctgaattaaaccaaggactactgttgtctaaagtactgttgctgatcatataacattttcctgaagaaataaatggtcttcatagctcttacttagagcaaaggagtgaaagtcaaagggacgagtggtattctgaaccatagaagtataaaataactgtgaggatagatacggtgtaatggaattaacacatctagactggaagagccatgctaatcagcaacaactaaattagactgactgagatgtatgtcatacatttaagtgaatgagaataatgcatcatttattggattgaataattaactgcaatttaatgttagagtggctctctatataaagatgaagtaaagtaagctttaa

SEQ ID NO: 124673 - DNA, 1050 bp, Homo sapiens
attccttgtttttattatgcttaatcatttattttaataaaatgtaacaataacatctagagtttgagccttgaccctaggaggtcgttaggaaattctcttggtggtaagggactgtaataggttttgtaaataattagctgacttgtccagttttttcatggtttagttataaaaatgagtttttcatgactttcaggatagaactagaggccaagatttattatattgcatgatatacttactgtaaaatctatatattgcctctggttgaagtattaaatttggtttacatgaattaaatctccaagtaatatattttaaaactttacgaaaaagaaataaaccatggtctggtgcaaataacaaataagtattactactttaatatactcttattttttcaggctcatgagaggctagaagattccaaactagaagctgtcagtgacaataacttggaattagtcaatgaaattcttgaagacatcactcctctaataaatgtggatgaaaatgtggcagaattggttggtatactcaaagaacctcacttccaggtaactttccctatcactcaactctcaagttccctgtattcccaaagtattctcctttactttccagtttaaggtgatgttttcttcaaagattatttagggctataataggtaagtatgtaaattccaaccttggtattttaatgtcctcatatgctgaggatatataaagagacatatgtaacaataatgctacataaatgtacactgttacagaaatacatcacaatggatttttctttgtgccattaaagaaaacaaccttaattcaccgtcagaccacatgctggagccattttcctcactatgataatggatttttttcttcctcattcccattctgtttcttagtcaatactttttagtattgcttctcaagattgttgtgcagtcagtgaccatggaacatagagagctgtgaagtatagaaactattgtataacataatctccacaggtacagaaataagtatgattttagcaatggcctg

SEQ ID NO: 124674 - DNA, 1047 bp, Homo sapiens
tacaatgcctgaacataacagctgtcagaaatgtttactagattagtaattcaaagactttatggttcttctgatacctagctgtaggttactattatgccagggttcctggtgttaatgaagaaatctactatttcctttacaatagtaaaatagcattgtttaaaaattcaaaaattcacccatgacaaaataagccatttcagaacactcaaatcaattttttctcttttctttagcaaaatagtagcaactgatagttatttccaacactgtgattaaaaacatgaaagtatttttaatactaccaaaaattttattactaacctgttgaggagtaatggtatctctataacttggtaagatttttagggtgacacttccactaatatttttcagtaattcttgtaattcctttggattatttccaacctcatggccattgacttctttaattatatctcccacatgaagtagaccttgtcgatctatcattcccccatggaggattcgggcaattaccagatcattattttcaaccctaaatgtcacaccctatgaaaaataagaaacagatttctcattaattattagggagaaatgcttaaatattcatgagcatatgtaagaaaataattctaaaactaggtaaaatgaatcattcttacttttcccatgttctctcctgtctcaatatttcactcccattaaactgtgtactagtatagtttattacactagtggataggatgtatcttacaggctaaatggaaactcgagagagcaggaaaaggtatttgtgcattctgatggacttattcctggcttttccttttttgcactcactgttcttatagtcaggatccagaagtaataattttaccaaggaatagtaaacttcactacttagagagtcctagtatggcttcaatttttaataacaacttctttttatattttgatactgtcagtatttcttcaaagggtagttcatgtcttcaaagggtaggaagaaacataatagtcatcttctgaaattttttgcta

SEQ ID NO: 124675 - DNA, 1032 bp, Homo sapiens
taggactctctaagtagtgaagtttactattccttggtaaaattattacttctggatcctgactataagaacagtgagtgcaaaaaaggaaaagccaggaataagtccatcagaatgcacaaataccttttcctgctctctcgagtttccatttagcctgtaagatacatcctatccactagtgtaataaactatactagtacacagtttaatgggagtgaaatattgagacaggagagaacatgggaaaagtaagaatgattcattttacctagttttagaattattttcttacatatgctcatgaatatttaagcatttctccctaataattaatgagaaatctgtttcttatttttcatagggtgtgacatttagggttgaaaataatgatctggtaattgcccgaatcctccatgggggaatgatagatcgacaaggtctacttcatgtgggagatataattaaagaagtcaatggccatgaggttggaaataatccaaaggaattacaagaattactgaaaaatattagtggaagtgtcaccctaaaaatcttaccaagttatagagataccattactcctcaacaggttagtaataaaatttttggtagtattaaaaatactttcatgtttttaatcacagtgttggaaataactatcagttgctactattttgctaaagaaaagagaaaaaattgatttgagtgttctgaaatggcttattttgtcatgggtgaatttttgaatttttaaacaatgctattttactattgtaaaggaaatagtagatttcttcattaacaccaggaaccctggcataatagtaacctacagctaggtatcagaagaaccataaagtctttgaattactaatctagtaaacatttctgacagctgttatgttcaggcattgtattaggccctgggagaggataaaaatgcagtccagatcacctccagcttagtgtttgtgtcatgggtgaaatgactgatgaggccagaaaagaggatgggtataaagaaaatct

SEQ ID NO: 124676 - DNA, 1030 bp, Homo sapiens
aatggggggaacctggttattctagggatactgtttgaaattgtgtttcactctacacagaaaaatcaagtaaaaggggacatgtgttcagtaaacatataaagatatattgaaaatcataatgtgatataccattaagttggtaaaaattatagctgtgaatcaacagcatcttttctacattgctggtggcagtgtgtattggtataaacacattggggagaaaagtttaatgtctcttagagttaaatattcacatatatcaagctgcagtaattccctagagcaattcttacgtatgtacagctggaaacatgttaataagcatataaaccccaaaagattacatgcatatagcatgatactatttttttacgtttaaaataactatataaagagtacgtatagatgcagtagaactataatcaaaatgtaaagcaaggagtttgtgaacccaggattcagggtgaagtgtgccttggttggggaaaccgaatgatgggatgggatggaatgagggcaggagaatcaagtaggattttaatgttagttttaggtggcaagtgcatagctgtctattatattattaaaactaattgaatcgacaaaagcagtccttgcacgaaccagtgatataaacttaagaattatgattagtataattttggcctaggttagtagttagtagattttttttttttttttttttttttgagatagagtctagctctgtcacccaggttggagtgcagtggcgtgatcttggctcactgcagcagcgtgatcttggctcactgcagcctccaccgcccgggttcaagtaattttcctgcctcagccttccaagaagctgggactacaggtgtgtgccaccatgcctggctaatttttatatgatttttaaaataaaattttttatttggctgaggcttcaatttgtggccctcaggtatttatcagaaaggaacgtggattgcccttcaaaacttttttaaccaaacataccttcttgttatcttgctgttatcaa

SEQ ID NO: 124677 - DNA, 1032 bp, Homo sapiens
tttattaccttaaaattttaatttttatataggtgaatcattcccatggtttgaaaatcaaaaaatgtaatatgtattcagttgagatctccctctgaatccttcccactaccaacctagtcctcatccccccaccagtaacaaactttgctattaatttatctttccagaatttcttcattcatatgcaagtaaataaaaattacatatcctttttcacctttcacctcctttttcatagaaaggttgcatagtacacatgctattctgaaccttattttttttcacttaaccatctgtcttgaggatatttccttattggtgcatacacttcctattgacaaacacacacacacacacacttttttaacgactatatatagtgccacatcatgtagacctaccatcatttgtttcaccagttcctttttgttaaacaattaggttgcttccaatcttttgttattaggaatgatgtagtcttgtgcataagtcattttggatgtatctgcataacatagctgttgaatacattcccagacatggattactaggtcagagggtttatgcgtttgtaatcttgacagctattgccaaattgtcctcccaagaggttgaaccattcttccacaagcctattaggaaaatgcctattaacccacagttcttttgtagaatgttataaaatacaaggatttctgctaatctgataggaaaaaatgttataaagtagttttaatttgtatttctactctgagtgaggttgttgaacatctcctatgcttaaaagccatttgtacttccttttctttgtactttaaatcattttggtcattcagttctttttagtaataagaatatgaaatagaaatattttagtaggtggtgtttagttaatgatgaatgaacagttaacatccatagcctataagtgcaacactttaaattgcatttaataaaatataattatactaaatctagtcatatctttaatggttttagagtcattacaaaatggttagatcaaaggtt

SEQ ID NO: 124678 - DNA, 1026 bp, Homo sapiens
tcatttttctgtcttatccgccaactaaatttcctttggttaaatttaattattttggttttttcccgttgtcaaaacatggagctgcatgacattatcaagttagccaattgtcacactttagcaatcttaatgtttgtatgcttgctttttagatctaaaattatatatcaggaaaaaaattattgacctactgatttaaggattaatatttagcttttctagagtagttgaaaatgttctgaatgctttctatgaaaatcatctaattataaataactaagattttattacatgttcccagatttcgttattttaaaattattttgtatgcatcgatcacaatacttttaccacactaataatataatatgtctacttgtgttatttgaattttgttggttacagaagtatgataaacaaatagaaaaagaacattgttattttgactaattgtgtactttcttattaaagtttacatgctgattaatgctaaggcaattctttagaagataacatttgaatttctataaatatatataaaacaagtctgttttaagaaagcagttgggctgggcgcagtggcttatgcctgtaatccccataccttgggaggctgaggtgggcagatgacttgagatcaggagttcgagaccagcctggccaacatggtgaaacctggtctctactaaaaatacaaaaattagccaggtgtggtggcacacgcctgtaatttcagctatttgggaggctgaggcaggagaatcacttgaacctgggaggcggaggttgcggtgagcagagatcacgccactgcactccagcctgggtgaaagagtgagactccatctgaaaaaaaaaaaaaaaaaaaaaaaaaaaagaaagaaagaaagacagcaattggtctgaaccttccatcaaataccaaaaatgcataatttaattagaatttaaattaaagcaaataagcaaaatagcccaaatttcggagatcataactaacagtgttaactgacatacttttat

SEQ ID NO: 124679 - DNA, 1052 bp, Homo sapiens
ttgtcttacttaatagaatatggtctcaaattttggtcactgagatgtacaattcattaatttgattctaggctagccatgtaaaagagggaggaagcgctggtctcattccaagccagttcctggaagagaagagaaaggcatttgttagaagagactgggacaattcaggtgatgagctcgacacaataagtaacaagcagtcctttgtgaccacctttctttgtctcttttgtctaaataagcaaatgcatttatttaaaatatgtctagaatgaatccctccctctgctttctctcgctcataagtaatcttttttgatcccgttctgccacctgctggtagagtatcaaaattcagtggcttaactcacctccaccctcttttgcttcctaggatgccacattggggagataattctcccacccctgtaaaatactatagggcaattttttcatattctgatatactgcttaagttatatttgttttatcatccttcaggacctttttgtggaactataagtagcaaaaaaaagaaaaagatgatgtatctcacaaccagaaatgcaggtaggttttaaatactttttgagaagtccaagtgaagtagctatatgtcatttagtgtggcataaactctgaatatacagctttaagtgagtgtaattcagattagtacctagttgcaaggggctgacatatgaacacatggtgcaatataatataaattatttaaaacccacattatatatactaccatgtgctttattttgtgagtatagtttacaacacaaaacaaattggttaagatttttgtttgtcttaatcaagaagcagtatcataattgaaactatttgtccagagaattttgaaatagtaatttatgtgccatttctaaaggatagaatgcctttgtcaagatgttaaaagagttatgtttagggcaactgtatcctgccataacactgaccatgatagttttagaaaaatagcactggaccaaataaatcttagtctgatctaatagaattctgtcttaaatctttta

SEQ ID NO: 124680 - DNA, 1024 bp, Homo sapiens
aatatatttaaaaagaaagaaatggtaactatatgaggtgatggatatgtttaatagcttgatcgaggtaatcattcacattgtacacattcatgaaaacatcaagttgtacactttatatacaattcctgtttgtcagttgtacctcagtaaagctgaaaagatttttaaaaacaatgtaaaataagaccccagacctggattggctactcattggctattaaaaataaataaataggaaagaagggaaagaatggaaactactatatttattcttcccagttgcagaggatgacagaaataaaaaacagctctatgaatcagaaatttctggaggcttaatcaaaggagttggcaattttaaaagtactttcttgacttcagagctacctctatgctggtaataaactaaatagcacaccataaaagaaaataatatagaaggaagaagtaggcttgctttctcttaatattggtttaatctactgtggggaaattgtgcaaagaaagagttactattaggataataagctaaggaaggagtgttattactacagattgagagttacagtaataacaggtaatataatatttcaaatcatcactttggccctattattcataaaatatatgcccataaggcttttttgcaaaatagaaaatttgtaattttcccatcgactaagattataattttgggttatgtttctagtgaaacagttggatctaaaatttattttatatgtaaatttcaaaatcttaatatttaaatgtatgttgtcagtaaatgtcagtatgttgaattctaatcaaactgataattgttgatttgccatacaatatttattcatttatataattggaaggtcacttgttctgtggaacttacttaagcaaccacgctaggtttactcctgtcctccgtatttgctacatgctttctatatatactggtttgtaatttgattatttatattaaaggatttttactggcaaattgataataagtttcagtggatagaat

SEQ ID NO: 124681 - DNA, 1038 bp, Homo sapiens
tcgggaggcttcattgagcccaggagttcaagggtacagtgagctaagattgcaccactatactctaccctgggtgacagtgagccccggtcttaaaaacaataataaaataattattatttattgtactttaccaaatttgtaaaaacaaatctatgctaagtgggtacaagtcaagtgatatttaactatcaagacagctaagccattactagacagaattgcagagatttctttcatgtatataaaagttgactttgtattcccatttcctttttcatttagaatttgatcgtcatgaaatccagatatatgaggaggtagccaaaatgcctcccttccagagaaaaacattagtattgataggagctcaaggtgtaggccgaagaagcttgaaaaacaggttcatagtattgaatcccactagatttggaactacggtgccatgtaagttttctgtgttttccttgctatgcaattggcaggaaagagtatgggcatatggaggaaagggggattattatcattagttattgttattcccaaataagttttctttatggcagtgaaagtgaacaagtaaaagacattgaaaaatttagtaattctgtagctgtcttgaaatagtgctgcagtgctgttggcttgctgtctggtggcaagtgcttctctaaactattcagttcagaaatgttagaattaaatgcctacatttaagactcgtggcaagataggcatttaggattttcttgtactgatgtctatctaaaaagttggatttttcagccattttagtgtaaagaaaaggggaaagcttctgacccttggacatacccagtgtggcaacagctgtgtgaacttacgtggcctggcttgtagctctcagtcatgcaaggtcataaacctgatttttgatagcacataagagtgattcatcttttactgcaggcagcattcattaaggttacagagtctgatgtatagaataaaatagtactgatgagaagtataaccattaagtgaaccaagcactcattt

SEQ ID NO: 124682 - DNA, 1039 bp, Homo sapiens
gttattttagggagatgggctatgttatgcatcctgttttcaatttaacattgacatcttgacatcttgagcttagttaacaaatgaagtattactttgttgattgtgtcttcattatttgaagagcagctaaaattgagaattttgcctatcataaaaaattacttctaaaaaatcacattatgtagttgcgcagtatagaagtctaaggaatcagttgtagtcaaaccttcatgttctaatttctctgttctagaaatggaaagcagtttaaatatgtggcaacgtagattgttttttgaagtgttagtagagaataggattgtagttaaaattcacttgtaaactaaagaacatttctctaagaattaagattccctcagcatggaggtagaggtaatacatgtgcatatacatatttatttcaagcagcgcattcccctatatggtttcactgtaggacttcaccgaaaaaacattaatttttaaaattaatgttcacaatgttgaaccaagtcctattatgcatttatttggggagttacaagttgccttagaagtttttttatttttttatttttttaaggtttttttttttcccctcttattattatacttttaagttttagggtacatgtgcacaatgtgcaggttagttacatatgtatacatgtgccatggtggtgtgctgcacccattaactcgtcatctagcattaggtatatctcccagtgctatccctcccccctccccccaccccacaacagtccccagagtgtgatgttccccttcctgtgtccatgtgttctcattgttcagttcccacctatgagtgagaatatgcggtgtttggttttttgttcttgcgatagtttactgagaatgatgatttccaatttcatccatgtccctacaaaggacatgaactcatcattttttatggctgcatagtattccatggtgtatatgtgccacattttcttaatccagtctatcattgttggacatttggattggttccaagtctttgctattatga

SEQ ID NO: 124683 - DNA, 1087 bp, Homo sapiens
aacatgcctcaaacacttaccataattaagaacttcattgaaggctctgctgctaggtaaatatactttgagtttcaaagtgattttaagaagcatatttttggatacaaattttatttgggggactacctcttaaaatattcccctaaggtatcaagaaacttttctattaaagggccacatggtaaagttttaggcttcgcagtccatacagtctgtcacaattactaccaccattttaatgggaaagaaaccatgtatgatacataaacaaatgagtatggctgtggtccaataaaactttatttacaaaaataagaagcagatcagatctggtcatagcctacagtttgctgcacccagtggaaaaacgttaagccaccctatgtattttagtctattttttatgccctaaaatttctttgtacaaaaatctcaacactattttatttagttacttcacggaaaccaagggaagatgaaaaagatggccaggcatataagtttgtgtcacgatctgagatggaagcagatattaaagctggaaagtatttggaacatggggaatatgaaggaaatctctatggaaccaaaattgattctattcttgaggttgtccaaactggacggacttgcattctggatgtcaacccacaagtaagctgcttggattccaaagctgttttatattttattttctgtggagtttttttcatgtgtgtcggggttgttgggttggggttgtttgttttgtcagggtggaaaggtgactccctccattacctttgggtgatagagaatgttattatgtatacatagctagttaaataaatctctgaacaattagccaacagaggcttgggtggcaatagaaactgtgtgattagatctacaatagaagtttagtatgtatttatttacctgttcaagtaatgcataagtgcttgtgttaagaaatgttaagtttaaaactcaagtctgcaatataaagaataaaaaattaaagtcactccccctcctacctgacacacatgcacacctctacactattcattttgtcactctatatttctgtcacctacccctt

SEQ ID NO: 124684 - DNA, 1038 bp, Homo sapiens
gagctttttttctttgtaattgctatatagtatgaatatatattcatttaaccactctccaattaatcaacattgaggttatttctactttttgagtattaacagaattctacaattaacataaaaaagagtttacatcactcttgatgatttttggatcattgttttatactttgttcaagaggaacagactgagttcaaaacaaaataaatggatcactgttttaagaaagtactatatggaatgagaaggacagaacagggataagtattaagttatgtcctttaattcatagaacaagtgcaaacagcctttgatatatactaaagggtagcagaattctagttctaatattgtataaattggcttataattattcttttacacaggcactgaaagtattgaggacatcagagtttatgccctatgtggtatttattgcggctccggagctagagacgttacgtgccatgcacaaggctgtggtggatgcaggaatcactaccaagcttctgaccgtgagctaaccatacgattttccttctaaaatctttccttttcttttgagcatgtttaactgttatctaatttatttttatttatttatttttgaggcagagttttgctttgtcacccaggctggagtgcattgatgcgatctcagctcgttgcaacctccccgtcccgggttcaagcgattctcctgcctcagcctcccaagtagctgggattacaggcatgcgctaccaggcctggctaatttttgtatttttagtagagacggggtttcaccatgttggccagactggtcttgaactcctgacctcaggcaatctgcccacctcggcctcccaaagtgctagaactacaggcgtgagccaccgtgcctggccaactcttagctaattatgcttatgaaataaacatgctatataaggtgctacagaatgaaaattaattagatgtagttaggatctggaacagtattcttttacttgaaaatcattgtacactttattttaaatcaaaagtttagt

SEQ ID NO: 124685 - DNA, 1012 bp, Homo sapiens
cttatgtactccccacatcattccaaaatgactaaaattactttatgaaatataaacagtgcctggacaaaaacataaataaaagtatgtgagtatgtgttttggtggaggatgggcagcatgtaaggttaatcttcaaaaaacacttctaagattctctgatcttatagagaggtagcaagtttggctttgagcttaacagccactgcaaattgggtaccatgttgtacatgggccatgagataaaaatctttcgaaaaggatgatatagtggagctggaaaccagtcacctgcagtaattgttttgttactgtagattcattccaagattattttcagcagtcttttaattaggaattttatcctaatataagtgaggcaaaagatgcagaatactcataaatgtaaacatgagtgttgttggaaagaataagacatgaacagatggcagtgttgtctttaacactatatggattagattttgaagattaataccagaattaccagaaatatatctaacctatttattatattcacttctagttggagtttgagcaagtaaatatgcattgtaatacaaacatttccttttaaaactcttcaacaggactctgacttgaagaaaacagtggatgaaagtgcacggattcagagagcatacaaccactattttgatttgatcatcataaatgataatctagacaaagcctttgaaaaactgcaaactgccatagagaaactgagaatggaaccacagtgggtcccaatcagctgggtttactgatgattcagtaaggttaacaatgaaaattaaactcttaaaaagtgactgcaacaaataaaccttctactgagaaaatacatcacagatagaagattatctgctaagtccaggcatttttatggtgtagattgaaataatagtacacttctgaatttttatataaaatgtggttggaaggtgtactaatatataatttatcttaatttttctaactttgtatggataat

SEQ ID NO: 124686 - DNA, 1976 bp, Homo sapiens
catgtgtttacaccaaattcttggcttctcaaagcaacatgaattaaagcacagtatcaaggtgatgccctatgacaatgtttcaacacacacttgaaattttaagagaaatttcagttcttcactcaggaaatgtgctgtattctctaatgtactttcatgctgcagcatggagcctctttaaacagctttgggataattatagcagcacaagaagtttatctgcaaaatatttcaatcatcttggtacaatagatgacttttacatcatgtatattagccttatgtgatataaaatgtattacttagaaaatatacttaaaggaattatttctattataaatggtattcatgattgactacttaattaatgcacattagatttctcctaatataaaatgaaatgatgcagtttagttcatttcagtctagatgcccgtactaacaagaatacagttagataagttcattgtatctcaatgaagaatcattgaacttgaaacccaagtcccaaatgaatctgcaggaatgagcagtgctctgcgggggcaaacagccccagaggtcccagggttcttcctaggtaatgagagtatagctgtgatcaaggaaatgtgaacttctcttttgggaagatctgcgataattagctttatggaagcgaaaatggtttagagtggtgttgagcaattgttaagagttgaaatagacacacacatgcatgtgcttttgggaaacatgatgtgccaacgtattaatgtgcctgagggctccttgtggataggtcagtgtccacatttcagcactcagggcatgactgtacacaacctaagactatatatatattttttcattttcaaatgtacaaatacccatagaggtgatgtgcctggataagtcatttaaccatagcttagtgaaataaatgtgatggccctaaaaagtagaattttcactttcattacagccatgcctttattatgcagtctccatttctgtgtgatatttggtaatatcacatgtcaaatacatcaggactttgtttattttggctaactctaactatacaattgctgaacatagctttctgaaatagaaattataagagaaacccagtatgcctacagcattagtagcctaaatcctagattctagaatccaataaatttatagtagttcttaagaagtttcctttaaagcaacaaatagattattaaggcaaatttagataataacccaagttagcaataaaaccatgtgacattatagattatgtccagatactaactgctttgaccataatatcccaatgacaataaaaaatgatccttggtttaaaaattattaaatggtacttatttttatgtataacaagtgtcatgatcccagtgactggagttgattttcaaggtggatagccatagagttaggtaaaattattttgaattggcaaactaaagataacaattttgaaaattgctcaaaataataatctacttaaattttacttttgtaacttctgaaacagtactccattatccagaaatcacaggctagagagccaataattttgtagtaatgaaccttaactaaacatgaaaaaggcaatcctgaagttttatgtacatagatagcagttcattttttaaatgttcgagttgccatatattatgtatgtgtgtgtgtgtgtgtatatatatatatatatatatatatatatatatatatatacagctatgtgtataatatgtaaaattctcccaaaatgtatgaatataaaactgaatgtattcattcatgtaattataactagcattctaaaatttttaattactcccatttctttgacattctgaaactttttttagattgttttaaaacgctctggttccaccttgaagctgataatctttctgaaaaatatatgagaaactcagaaagtagtcattattataataaatttaattttcttaggg

SEQ ID NO: 124687 - DNA, 1211 bp, Homo sapiens
atactcacaaaatttaagaatacatttgactaataattgagcatcttgtcagtttttatgcaagcatatattgtatacctgaggaagatgacagttctataatttttttaaggtaaggttatttttaaattgcatttttgttctaacgttttgcaatttatattctttttaaaatatttcccataattcatcatgctagcttctgtgttcttggaatagtttttgaaaaatgcagagattcgaacatgagtccttaatatactaaacagtgaaagaatgatgatatctcatttctaaagtaagcatggttcacaccactttggcaatacactgcagtactttttaaaaaatattctctagtgataaaagtaaagacagggtactggccaagatcctaattctgacttctgactgtgtgatcttcgatgaaatttatatttccctttatcattactattctacttgttaagtaaggctaagttaatatttgtcttcgccttaaattctgatttgtaatttgtaactctgatgtggtagctgtgatatggtgaactgaaaaatccttattaggctactttatctgttctcttttagttattttaaagtgtacctgtttctgaagtaatgtagtgaatggtgaatacttttcaggaattcttccagttttaaaatagccccaaagatacagtttcagctggtggaaggtctgttctgctctcttagtcctaatcagaaagtcccttttatcttataatcccatactaaatccaaacccttagcaaatccttgctgccaaccagaccactcacaaatcaaacaaaatgtaagcaagcaatccagtactcggttacaccagaagactctgatctttgcccccgaaaactgtcctactttatccttatacctgaaatcactgcatacctgaaatcactgcagccctactgttttacccataccattaatttaaaaaggcatctatttctttatagaaagaaacattcacagtgaggtcttagtttgtgaacctcaaaatccagatattaatccactttagttattactttgtaattgcttctcagtcattggctgataatgcaatggtgtgataaatttgacttatctccacatacaaaagtcgatcagaagggatagttctcttcctttttttcccctcctactggctcttactgttttctaatctccagtgtaaa

SEQ ID NO: 124688 - DNA, 1070 bp, Homo sapiens
gctgggactacagaggtacacaccaccatgcctggctaatttattttttgtacagatgaggtcttgccatgttccctaggctggtcttgaactcctgggctcaagtgatccttccaccttaccctcccaaaacgctaggattacagatgggggccaccacacccagccagttgcagagaatttgatgctgtgtctaggctcaagtagaaggggactgtggtgctttcatgatgctggccctgtgttacctacttggcatcactgatccaggctattgatagaaatgctgcaataagtaatggggtatatgaagaaaagacctctcacaagtcggagaactctggcctgtgtattagctcctgacagaatgcctgttctgaaagactctaatacccggatgttaacattgggagaaagtctctagtggagttccgcagggctctgtcttatgtcctgtttcagtttaccagtcaaaactatatttatccatgagttggaacaagacagagcatatatttatcagcacatagagttgggacaggcattctctcagattaattctttaaaaactgaagattactgggtctgtttctgtgtggtgctagggaggaaccctgaatgtatcagaaactatgtgtcctgactagtgtcaccatgaagggaagctgtggggactggtttgccacaactggcttttctgagagggaataggaagcccagcttcctcgtgacaggcactgtggcatggcgagttccggatgggaggggtacagaggtggcagagattgttccacagtaactggatggctgctcccctgggaggccatttcaggaccagtgcagaagctgtgcatctgggcccagccacagctctgcctcccagcctagtacattggatggttgaatgctctccacagcccccttgccccagacaggagcacgcagggtggggaataacaagtttgcaaagatcagaaggactgaaatgctggaggagagcagttggcaaatgaaagttgctgccactcagctctgctgggactccggagtgaaccacagcctgtcaggga

SEQ ID NO: 124689 - DNA, 1078 bp, Homo sapiens
gctctcctgccttcgttgtcaaaaagcttacagtctttgaaaagggtgaatggagcctcccttggaggggaaatcggcagatgaaggaggcaatggtgtgtgtgttccaggattttaggggggcagttactgaaataaaactctgccatctctgtagactggaggaggttggttatcaagagagaagcagactttcccacttaatgaaatgtcacaaaggcaaagccaaggagtttacaggcaatgtctgtggacctaattttcctactctacagctggtgtgtgaacacacgtgtgatcctttgtaaactgtagttttagccaataaatcaaaacccttgggagaagttctggatttactaaagcctttatcatcaatacatatctctgtttctgtgggttagtaattcttgcttaatattccttgagcagcaggctggccaccaccttttggctctctgtcatgtccccatctctgtttctggggagatgttgaaaccagctctggcagtactgcaccatttcctcagtctgcatttgtacctttcactttttgttgttctttagaagagtgtagtggaaaagcacactggtctcagagtcagaagatgcagttcctgattttggcactgccactaacaggccatgtggttcaggtgggcctgtcacctctctggggcacattcttcactaatgagcagagacactgggttagatctaggtgatcagggccatccccctcccatgtccaagcagacactgccacttaatcacagctttcttcctccttactgtcttccagcccacactcagccttagaatccttttcctacagccaggcagtaatagctgatggattaatcaaggtgaaaataaagatgaacctgagtttctgcccagagctagataatccccttgggtcccttctagttttataatttctccacagcagactcaacaaaagctcctgctctgtcatgatgtcccctggggtttggagagccttaccaggctccccagggtttccattggaaactcttcctcgaggccattggttttttttttttttttttgagac

SEQ ID NO: 124690 - DNA, 1003 bp, Homo sapiens
attgacagtgttcaagatgctggctttcccttcagtctggatccctgaataaccataataaacaaaactctcttgtacccctgtattgtgcatgtagtatgagcaacaaataaacccttattgtaataaaccactaagacttagggattgtttctgaagcgtaacctagcatatccagactggtatatatatgttctttcaatatctctatttgagttctttattatcagctaaagtcaaactagagggtcttctaggaagaagatattctttcatgtgaactgttgtgaatagggagaaatacagtaattttagggaaaaaagccacaaaatagtaacttcttatttgattttaggataactttactttttcagataatctggagctttcaaaatgtttgccaaagcaaccaggaattttcttagagaagttgatgctgatggtgacctgattgcagtatcaaatctgaatgactctgataagttacagcttctaagtctggtgacaaaaaagaagagattctggtgctggcagagacccaagtaccagtttttatccctcacccttggcgatgtactcatagaagaccaatttccgagtccaggtatgtttccttgggtatattctataattagtctcggaaaggatgatcctttttttttttttttttgacacagagtctctgtcgcccatgctggagtgcagtggcgtgatcttggcccattgcaacctctgcctcccaggttcaggtgattctcctgcctcagccccctgagtagctgggattacaggcacccaccaccacgcccagctaatttttgtatttttagtagagacagtgtttcaccgtgttggccaggctggtctcagactcctaacctcaagtggtccacccacctcggtctcccaaagtgctgagattacacacatcagccaccatgcctggtcgatgattcttctttaatgcaagtattgccttgagtccagatactttataatgaa

SEQ ID NO: 124691 - DNA, 1039 bp, Homo sapiens
gatggatatacaaggtcatttattgcggcattgtcacattaaaatgattcaaatgattcaaatgtctatccataggaaattgtctaaattcatatacatccacgcaactggatattatgtggctattaaaaaatgaagatgtatgtacatccatggaaagatctgtaagatatattgttaaataaaaaataaaccaaaaccaaaaatcaagggatacatagcatgctaccatttatattttttaaacggagggagggataagaatatgtgttaatatttgtttatatacacatgaagaatctctagaaggatgcagaggaaactaataaagtgggttttctagggtgggagggtgaaggtggctggaattagagacaaggaagaaaggaagactttgccccaaattcttttttgtagatataatttttgaattatgtaaatatcaccaattcaaaaaaatatcttctctgactacttcaagatacggattaaacggttggggcggggtcttacgtataggagaggattttgaatatccagtcgtggacacatgcaagttgagtagtaatgattgttttgttttcttgaattcatatcctttcatttttttttcctcgatgcctcaggtttctagaggaagggaacttagaagaagctgaaatacaaaagcagaggattgaacaactgcagagagaaaggcggcgggtcttagaagaaaatcatgtggagcaccagcctcggtttttcaggttcgtgcctggattgagtaggtttttggttgataggtggtgccagcacgttatgcttctggtttgcagaaagtgaacagtactgtccccagataagagcattctccaggcttttcctgcttccacgtgggggtactgctcctctgtgccaggccctgtcccccgcacttaccttcaggctctccctcttgctgacttcagacaggactagggcctgcatttttgcattccttgagcttttccagtgccctcagccagtgagtttgcagaggagctcctcagtcagggag

SEQ ID NO: 124692 - DNA, 1002 bp, Homo sapiens
tataggcatgagccaccttgcctggtctacattgcctttcttgaacaaacactgggcaaaacccagttttcttctttgtcagtgtttgaatactagaaatgtgtgtcccctagttctttacagacattcccaggggttgggggagattatatttctaagcatcaatactctactgaaaagattggatacagaaataacctttacatttcatatcatcattttgcctgtgttaggaccaagatcttgctacactgttattctttgagtttatagtaaacatgaggtttttagagtgtttcctattaatttcttccccacagtgttgctgggcacatattaggacctgtctctatgctgggtactttggggaagttaagtgtttaagaatacagattaagggaccagacttccttggttagccccagctctgccactcagtggttgtgtgttctgggaccagatacttacttcctctatgcctcattttcttcatctgtgaaatggggataataatactgtttaccacaagtggtagttacataggataagtaggaataatgcatgtgaaatgcttagaagactgcctgtcacagaataaaatgcaagatatgtgttagctgttagtagtattggtggtgatgatggcggtggagtagcatgctttcaaaattcagattagtgtaatcaaagaaaattttttgagactacatgaaaaattgttttcaaaaatgactacaggcaaggcacagtggctcacacctataatcccaacactttgggaggctgaggcaggaggattgctttaggccaagagtttgagaccagcctgcgcaacatagcaagatcctgtctctaaaaaagatacaaaaactagccaggcgtggtgtagcatgtctgtagtctgagctactcaggagactgaggtggaacaattgtttaggcccgggagttcgaggttacagtgagctatgatcataccaccgcactccagcctgagtgacc

SEQ ID NO: 124693 - DNA, 1014 bp, Homo sapiens
ggttcaagcaattctcccacctcagcctcccaagtagctgggactacaggtgtgtgccaccatgcccaactaatttttgcattttttggtagagatggggtttcaccatgttggccaggctgttctcaaactcctgacctcaagtaatctgcccgcctccacctcccaaagtgctggaattacaggtgtgagccaccttgcccggcctccagcacactttctaaaatctgattcaatgggtatgataattaagtaacattgaaatatgtccaatcataagggatggggccagcatattcttcaaagcagatagaagcctggattccttaggaagggatttggccaaagagactccagacagttggggaggaggaggagatgctgtggaaccactggtcttaacagaagccgacagtgtctgtgacttccctctctgttgcacttaccaaccctccctccatgtctggaatgagaaaagaaaaagagcatcatttccagagcccaggtttgtcatctcccaggcatctcagaaccagtatcctcttggagagcattcaaggaaaaagtccagaaagtgcgctgtcagaccacgtcactaagagtttcatcaagctcttagagatcgctcctgcagggcccactgctgtgcttttctgaaacatccatttattaacagagccccactattttaacatgttccaggccctagcacaaaacacagatcttaaagaacgcttacgcagaatccatgccgagtctctgctcctcgactcccccgctgtcgccaagtcgggtgacaatctggcagaggtgggtaggtttctcgtctggtaatgtctccccagctgccgcccgctcccgtgataccatctgtcccattgcacgacctccctgcttcccctcatgggtgctgtccacctctctgccctcctcctctgggtgctggccacagctaggtcatggactggggtctcgggctcaaacgctttcttgagcgtatgctgctaattgcat

SEQ ID NO: 124694 - DNA, 1023 bp, Homo sapiens
ttgtacatgatgtgatcaaaacctaatgaataatgatttgtgtgtgtgtgtgtgctgtatgtgttaatgttttttaaaacttcagttcaggcattggaggccatagtggctaagccctcattgtacctgagggctcactagggaacagagtagctgaatgccagggttagagctgggggattctgggtcctgcagctggaagggctaacaagcaagaaggtagacagtaagactttgttttgaaacaattacaaacttacagaaaagttgcaagaattatacagagaacttctgtataccctttacccaaatacttcgttttaaatatttgccacatttattttatcactctctacacacacacgctttcactttttggaaccatttgagagtagaattcatacctcgtgttgttctttatggctttatactttagtatataaaataggaatactctgttatataaccacagtatagtaatcaaattcaggaaatacagcattgaagcaacttttatctattctacctcccatattcaaatgctgtcagttatcccaataatgcctttagtaccatgttgccccttgagtcagtttcattgtcattcctcttttgcctcctttaattgggaacagttcctcagcctttctttctctttcgtcaaattgacacttttgaatagtataggccaacttgtaaaaataaaatgtttctcattctggggttgtctgatgtttgctcatgatcaaattcagattacatagccctggctggcatacaccaaaggagatgttgtgtctttttcagcctattttacctagaggcacatggtccacctgactctcaccaatagttaattttgatcacctgattaaggtgctgtctaatttttctgctgtagtgttaacattttcccctggaaaaccaataagctttgtttttaaccctttccagtctttggggatacaaaaacaaaacaaaacactgatcactgaggatctagaagcaaagtgcaagtgtcaa

SEQ ID NO: 124695 - DNA, 1100 bp, Homo sapiens
atttctagggcttttggtttccccaccttcactgttgagcctgcctgtgctcttccctgcttgtgtttgtgccttgttttgtggctgcagttgctgtgtgctgtgacctgtgtcttccgctgatgctccatggatttgtcatccctctaagcccacaggcctgattctctgggcacaggacatggtgtagattctccttggcctcttatctccaaactcccaatccctcatccaggattcactgtgtcatgctaggagctttcccaatgcacagctaagccacaggccaagatttgcagcttaactgttgcatattaattgcaacagttttagaatcaacataaatctcaagcttttggttaggtcacctgatacacttgtgtacactctttggttcaaagtagtttatggactgaagataagcactttggaagtaaagaatgttccatgtacaaatgaaggtcatttgttttgtagaagccctaggtgcaaagaaaagcattttaaacctatccattactaaccgcctggatacatggatgattattgccaggaggaaggaattgagtataaatgagaaagcctggcagctttagctgtcattttcaacctatagctttaatgcttctatcatttccaaaagaatatgtgatttctcacccatttttagctcacaagaagcaagtttctgtggaaagtgttgtcttgagttctcattttttaaaataagttatcactcagtagaaagacctacctaggctgggcgcggtggctcacgcctgtaatcccagcactttggaaggctgaggcgggcagaacacaaggtcaggagatcgagaccatcctggctaacacggtgaaaccccgtctctactaaaaatacaaaaaattagccgggcgtggtggcgggcgcctgtagtcccagctacttgggaggctgaggcaggagaatgctgtgaactcgggaggtggagcttgcagtgagcggagattgtgccactgcactccagcctgggtggcagagcgagactccatcccccccaaaaaaaaaaaaaaaagacctacctataaaatgttttgtatttgtattaccatgtttc

SEQ ID NO: 124696 - DNA, 1044 bp, Homo sapiens
cattaacatattgtattagttcgttttcacactgctgataaagacatacccgagactgggcaatttacaaaagaaagaggtttaatagacttacagttccacatggctggggaggtctcacagtcatggcagaaggcaaataggagcaagtgacatcatctgtggatggtggcaggcaaagagaaagagtttgtgcagggaaacaccactttataataccaccagatcttgcgagacccacgcaccaccacgagaacaccatgggaatgacttgcccccatgatccagttacctctcactgaccaggtccctcccacaaaatgtgggaattcaggatgagatttgggtgggacatgggacacagccaaaccataccacatatactcctcagcaatgtattctttgttggagagatgaacaagtttaaatattttaggaagaatttactaattcattccagttcagaaaagattaatctgaaaagtctgaattataaaagagtttaaaaagaaaaatggtgctaatattttcagtagggatagagaagctggaattagagaacttggaaatgctttaagagacagataaatgtaaatttcagtttatttgttgcttaatataattggcactgttctgttttcttaaaaatagcataacaggccaggtgtggtggctcacgcctgtaatcccagcactttgggaggccgaggcgggcagatcaccaggtcaggagttcgagaccagcctggccaacatggtgaaaccccgcctctactaaagatacaaaaaattagctgggcatgatggcgcacacctgtaatcccagctactcgggaggttgaggcaagagatcgcttgaacctgggaggtggaggttgcagtgagccaaggttgggccattgcactgcagcctgggcaacaaggcaagactccgtctcaaataaataaataacagttggacttactcatagaaagccaaaatacatactttataaagatcatttttactctgcatttctttctcaaacttgttcccatagacca

SEQ ID NO: 124697 - DNA, 1092 bp, Homo sapiens
tcttcactatttcctagcctaactgtatctctgggtgtagctaattgtgtaaagcagggtttctcagcctctgcaccattgacattgtgagctggatgttttggtgtgggaggccgactttgtacagcaggatattgagcagtgtccctgccccctgccctctctctagatgccagtggcatccttctccagttatgacaacaaaaatgtctccagacattgccaggtgttccctagaggataaaatcacccctggctgcaaatgactggtgtgaagtatgggagggaaaagcctatatcttaagataaaaaagaaatttaagaaagaatactatcgttttttctgtttcattgatcagtctccactagaatagtttaggttatttcttcaggtacttccaatgaatcttagttctgtattttgacatggtcaggaattaataggttcttatttacccactattctggttaacaaaataaaagtaattatgaattcataatttttaaagaattagaatacctgaaaatatattgaatgctaatattgtgataaatgcagtttaatatttctctgtgtgatttgctttaagttctgtttggtttcttgttcattcttttgaacatcggttatgactcttagtgtaggtaagtgtagttatctgagcgttctagttattagactcagtcaggcagtttttaattgtgggctgtttggtcccatttattttatagataagggatcctgagtagcagagagattaagaggctgctcacccacggccctagaactgcttgagagactggaacaggaccctggacagttatttaataaagtgctcttattcttctaccttgtttaactcatagaaaagtgagtccagatgagtgcttgggcactgacttataacggcctctgagaagagatcagaggaaaggataacacaagattcctgtaaaattcctcttaaccacatctgggaaatgaaatacatttcaagaacacaatttaggggagacaaataggtgtgagtctgtttgtattgcttcttcctgtaaatgacacattaaaaagcccctgcaggtgcttccagt

SEQ ID NO: 124698 - DNA, 1072 bp, Homo sapiens
tgtctcaaggtcttggcccaccactattcctctacccaatgggatttactcctttttcttcatcagaatttacatacttaaactacagtaaaaatgcagtatgctataatatgtgacagaatgattaaaaatgtaagttctgcagtcaggtggcttcgtcacttggttttgtaacatcagggaagttatctaattctctcttcctcagtttccacatgcaaaaaaataaagaatactaataaatccaatctcaaaggttgtgcaggaattaaacatgatcatgtaagtatggtatttagcacattatctgacatatagaagatgcttaagtgttagctattgtagttgctctattctttcaacatatttattaatatctactatgcactattttaagtagtgaacaagacagaaaaggttcctgctttcatagagctagaaagtgttctccaattattttatattattattgcttatatagttaggtttatgtattatttcagccgaccccactggatagtatttcctgaggcactattcttttgtgttttaaatggcatgctgtacagaattgtggatacagcttaatatctctttgtaggccagctactcagtgccatttacttggtttgagaacttattttcttggtttgagaccccaacaatgaataaaccaggagaaatctcttagttcctactaaatatatacttagtactttactaggattctaagcaagttgaaaagatggtcactgtgatagcttgggaaaaaaagaccaaagcactggagataaaaatgaaagggaagaaaaaaaaaaaaccttagaagttaattaattgctaaattatttggtaatggacagtaataataatgtaatttacaggaatatgtgactgatgtggtttggataatttagaaatttcatggaaggaggtagaaaccaaactaaaatcctgaagagttcacatcgttggaaaagatcaagagaagattctgggaggccaaaatataagtaaatcgccaaagtggaaataaagacaaccattttgtcatcctcatttttatattgca

SEQ ID NO: 124699 - DNA, 3698 bp, Homo sapiens
tgtaagtttgacttttttagattccacatgtaagtgaaatcatgcagcatttttctttctgtgcttggtttatttcacttaacataatgtcctccagttcatccatgtgattgcaaatgacaagatgtctttcttttttaaggctgaatagtagtccactgcataagtatatgcaccacattttctttggaaatatttaatcttgtttctttatcacacagacacaaaggagccctacatgtttataactttgtatatttttgccatatttggagtgagggtggcattttgtatatttttgccatatttggagtgagagtggcaatagggaaggggcattaaatgcatgaacttaaaacaccatcttagctggaagacatggttttttaaagtcatttttacttaaattctcatccagtattgccaggtgaccttgagagtatctgtacttcagccacactagttttctttcactttctggagctgaattttctcttgtccttgtttcttgaactgaacttaaacttgaacctggtcttcctatctcagacctattcatataaaatctcaaggagctatgtgtttatgtagagatactgtcctacctatatacctatgttaaaagagcttgcttccttgaaggagaaaatgattgagacctaggtgttttcatttttacatctgacctaagacaaaatgtacaacttagggccatgaaaaccctaggaggagggttctatcatcttttaacttaaatactggggctcctgagattttaaaaacaataagcctcactttgccagtatgaaaacaacctgtcaataaaatctcttcaagataatttgaggagaaaggtatgcatagtgattagaacattaactctccaatcttgggtccacccattaattggttctgtgaccttaaactctccaaacctcagttttttcatcaataaaattggaataataatagttcttttctcatagcattgtggtaaggatgaaaaataagcacttattccagggtcagactcaggataggtgctgagtaaatataaatgtatgtttttatcattataattaacattaatttgaccttcaagtcttatttgtgaaagtcctgaatgcccatagtgaatagttctagctttttttctcccaggaacttttacagtatcatacgtgtatccactcatacctttttagtgttgtacaaaagcccactaaaatatacactgtatatgtgaatatatacttttaaaataaaaaatgccttactctacacattaataaaatgcttttgtgacgaatacaatagaatgtttaataattgggctacatttgacatctttaggcataacctatacctaaaacaagtgaaaaaagttgatgaattcttaccccatcctgctaagccttgcccttgcttgggtggtaaatgattttcccctctcgccctctatgccagcatctatctcttggtagtagctgcacagagcattgtgttaagaaggactttgcagctgagtctgcattcaggggaaagattgccgtgtttttagctgtgacttctgggcataaggcagggagagcacagcatggacattgtgtttgtcaccccttagtgatagagaagagttaaaatcaagagctctctgttgcaatctttatattgtgttattggatgaacttcaggcaagtgtaggttgtctcagttctccattcataaaatggaggaaaactcaactcctgctttttcctgtggaatgcggtaagagaaaattgagtgttttcagtggctaaaagacattgacagtctttggagaaaagtcctctgtaaatttaagaaactggtataattacggatgagctgcttttactttggccagttctggaagcagaactcacatgaccttgtttcaaaaaccgtgacactctacagaattggttctttttgaagtagatcacttttcagatatcgtgtcttcaccatagaggaatctacttttcttgtaggaactaaagggaccctgcttataagaaaaaaataggttgttggtccctcctgactgtcttaatcataccctattattctagagttctaagtggatcttcagtgttcttcctcatcccaggttttggctccactattcctttagctagaatgatctatgaaaccctgctgcccttttgaattatgtcatttccttagcaagaatttttatttattgcttaagcatttaaagtgatttttataaaaacaagattgctcattgtaaatcatttacatagtaaatgtgaattgctattctttaattaacttgtgtttaaatagctgctgataggtcaaataaaatgcctgaaaatgaccgtggtttgtgcaggtcattggtgtcattgtcaaatggtttccttgcagtcctggggatgaaaggctgattagagttgattcatgagagacaaggaacagaggaatggaacagcccagttctgccaggccccacgacaggatttgagagaagccttcacaaatgttctggtttggaaccttgagcttggctaataccatgcttaacactgccatcgtctttcctctttcaattgcttcattggttaaaaaagtatatggttgtttaagtactgggtcctgtttatacatccttttatttctcatagcacctaggacagggctttgcatgtagaagatacaaatcgtcggactgaatttattgaaaaccagcgacaaatatccttctattggggcaggtgagaatgtatggccaggtatacatggagaacatgcgggagcaaaaagcccacagattcttaagctcttccactccaatgacagttgtgaggatctgtaataaaatgaagaagggcttccccattgattttattctggcaaatgatggcatccataaatgttcttctatacctgtggtctgtgaaggaactactctattgaacgtctggaacaaaagtaaagacgcagctctagaaactgatgcttgttctcaccggttttgctttttgcctgctggataaccttgccatgttttttttaacacattctgggtctaagctttttagctgcgaaatttggataattttgcttacttttgagaactaaatgaaacagtaaataagaagcatctagactagcataggggaaacattcagtaagtgtagattaaattaatgaatgaataaacatgcagttgcttagtagaaagattaccattcacaaagtcttgtagatacattaagtgggttaaggaatatctaagtgggagggagaattgctattttaaaatgtgtaaaatatgagtaattgcaatttcctcttgtctttttcccactgcccccttacatttccttcctagaattttcaaagtaacacattccagaggccagattagcttgataaagatgaccaagtatgctttgtctttatcaaaagagtcctatagccttgagttttatttcttcagccaatatgtattgagagcctgttattaaaaggccctgagcagggatatacgaagctatgaaggacaggacagctgaacagttcatcataaataagaaatcaactctgattggaaagagtatgagtggtaaagagagcacagcctctattcagttttaaagtgtattgttagcatttggcatagaagttagcaatagagagtaaat

SEQ ID NO: 124700 - DNA, 1109 bp, Homo sapiens
ccatgcaagccagaaaggtaattgctgttttatttttacttcactgatgttttcttaattaaaaaaaattaggcaaaagaaaaaaaagttcaaaggagaaagtaaaatattacccaaaaaagctcaagcggaagataacaaatgttaacatttatttcagccatgcctctgtacatactgtgagagaggaacagaaggatgggtagataaatgatgggcagaaataattgtgtaagactgagttcaaacaaaacatggctttaaaagtaaaacattcaatttgatcttgaatttaacaaaagggaaagaaattgtccatcttctgaaaagtaattctgtagcataagagtatttgttctcttaggttcagaagagaggtgaaaaccatcacaaggttgggagtcaggatggattgagaataacaggacaacatgataaacatcgagtgccttctccctttgtccctgcctggctttctgatgtatgctgcttgttttatttttgttttgttaggctttatacttttaacactctgtagctctaatttcccctgggtatccctccacctatttattcctaatcaatgtactgttaaccattggtctttttactatggcttttcattcttaaaaatttaatgggctgggcatggtggctcacgcctgtaatcctagcactttgggatgccgaggtgggtggaccactaggtcagaagttcgagaccagtctggccaacatcatggtgaaaccccatctctactaaaaatacaaaaatcagctgggcatgatggcagctgcctgtaatttcagctacttgggaggctgaagcaggagaatagcttgaacccaggaggcagaggctgcagtgagccaagattgtaccactgcactccagcctgggtgacagagtgagactgtctcaaaaaaaaaaaaaaattaatgtttggtgggcaacatggtgaattttttttttttaaagaaaggggttttgggtgccatattccttgaatttggaaacatttcatgtttgaggattattatgtttggaagattattatttttgaaagacaacttttctgttgccaaactgtcttctaaagaggttgttc

SEQ ID NO: 124701 - DNA, 1034 bp, Homo sapiens
ccatcatcacattgccttctacatctcctgacgccctcttataaggacccttgtggttagatcagacctcccaggacaatccaggataatctccccatcatatctgagaagtcccttttgccatataaggtacattcagtgcttctgggggttagaacatggacatatttgtggaccattattctgcctaccacagacaggcacataacttataacccagagttcccaaattatctcttttcacctatagttctgaatttttttccaaattaaataacacttttcagtctgctcacaaacatttttgttagccattcatactcctccctctgtgccccacaatgaatacctccttttagaaaagacctattctagaaatggaaggaactgacaccaccccctcaaatgactgttcagacttgttggcttaccttgatgttcaggaagcaatggttgggaaatggatgtctgggagcatctgtcttcccacagctcactttttgcctctgaacacgtacttcctgtgagaatgttaaataatttttggaattaaaaaagtcatcttcacattctaccatgtatgtatttggcatttggattggagagaggtttgcctacttgtttttggatataggtcaagtttcagtgacaaaatctcattgatgaattcatttaatcagaaatccttcacctcaacctaggttcttaaacccttaaagactccacagaaggctttcagagagccagaccctttgggactgtgcaaaaccatataatcatttctggaaagactggaccataactttcattaaattttttaagaggttaacctggaaaggttaatgaccaactgaattgatggctttattcttcatttcccccttaggtaagaggccctttgaagtacactgcatatgtatttttaatatgtgatctttttttagctgcaactcagtgtcccccattcctattgaaatagacctcccactgaaacctgtgtcttttttgctgtcagcaataaaaagtttactttt

SEQ ID NO: 124702 - DNA, 1051 bp, Homo sapiens
gaaagaatggccggtggggaggcccctctacattcattcgtgttcttccttttagttattagatgttataatccagttaataatatccccaagaagtgttgctgtcaacagtactagagctctctacagtctcattcatgttggaataaaatgattcctttttatgttttaaaaaaaagaaaacatttgaggtctcactggaagtgtttattcatttgagctgaaagatgtaccgtgggtgttgtgattttggagagcttctgcagcaggtttatgtctagaatgttttgtccctgtttgtgtttgtttagactgaaattaatagtttttcttgcaagctatgaggatcattaatacaggtttctcccccgtggtgtgtttgtcagcccttacatggaagaacaaaatgaaagaatatttcttgttttaagctcaaagcttacgtctttaccattaaattggggaacttgggggaagaaaatcctgtgtgtgtgggtagggggaagggatttgtgtatatgcacaataattaagtttaagtcataaatactaatagtcttctggcttttgtaaaccagatttctttcctggatctaaaagtgtttttattttttgtgcccacatctgtagtcatggatttgatgtatatatttaataacattcagtgatttatttttcggttcacctttttcatttttcccctttctttttaccagaaggaatatgaagttacatataaattctgcataattgaaaaagtgattttgatttactttttacttgagcaaggagttgcttttacttaaaggcatttttatttttaagaaatttgaaaaaaccccacttaaggatccacttacattaggccactagcaaatatttttagataagattttgattgatttctttcagtctgattccataatctcaaatttcttcgtttcttttctcctactttccatcctcttgatgctacaatcaataatttgatttgggagattctttctttttgttggggctggtggtggggagggagatcgttgttttgaat

SEQ ID NO: 124703 - DNA, 1057 bp, Homo sapiens
tgcttgtaaagggatgtgcccaaaatcttaccactttaattgatggaacagacaatgaataaaaaaactagaaattcagtagaacaaagagaacacattttaaaaaggaatttcaacagactaaaagaactccatgagaagaaattaataatggttgaagggtgaaagagttaaaaaaggataaaacctgaattttcttataaagaaacaaaacagtatatctccattgaaaaataaaattttattaaggtaacacaagtatctaaaagacagatgggaaaaacctcaaaatgcagaaaaaggcctgttttacaaggaagaatacaaagaatcagaagtttgaggtctaacaatgagactaactttataaacagaaaatcttccttgatagatgtatatatgcctcatgtgcgtaagacaaaggaagatggccatttgatagtgaagctatgaacatggtaattctactgctttactcttccagtgttttactcttcagttcttcgtaacaacaaatacatggaatgggcaggtgggacataaagccagagtagagaaaactaatgcaggattggtttttaaaaattagctgtattcttttctgagtacccttatcccctaatgaataaaacagttctatccactggcatcctttgcgcatgtggaaatatctcagaacagggaagggttggttaactgggagccagttggcacctttgaggctgagtcaggggcaggctttgccctggggcaggctttgcagtatttcagtcacagagcagttttattgaagctttcatggctaagtgggtttatgcatgatgggaatcagcactgcgttcacatccagatgttgactgtgggtcactttcatcctgggaggagtcagtgagtattttccgtggagactgatccaggacctgatggaaatgggcattttcattagtgatctagaatataaagtggaaattatactcttagggtttgcataatctcatagctacaaatgagaaactcatagggtttcctcagcaggaccaagaactagtttgagtga

SEQ ID NO: 124704 - DNA, 1169 bp, Homo sapiens
atgatttatagttttggttatgttgaccttgctcatctggttgaggtagtgtttgtcaggcttctctaccatatggttattttttcttcgcctttccatactatactctttggaagtaagttattatgcacagctcatacttaaggagtggggagttacactgcacttccttgagggtggtgtagctacataaattatttgacattcttctgtgagtcggatttgtttcttcttctccatttgtttattcaatcagttttttttaatcagtgtggatccattgatatttattatatactttggattataatttagtagtactttattttgtttctgaagttcgtccagctttagctattaggagtgctttcggttggctcctgtatccctttgatgtaagtccatccttgtggatttttttttagcatgtcctttcttttcggcactacaaggtactcaggctaatcttgtatagtccttgtccctcctctagaatcatttttttgcatgggtgatattggtcttgatccactaaattgatttcatcacccactacatggtttactacccacggtgaaaaacactaatctgtttccactcctcacatgttaaagataagaaaatagacacctcaaaaggtgaaatggtttatctaaggttacgcctctttggtagcaaatcccaggctaggcccaggtcctctgaacttgtagtcctgccccttttttaccactccatgctatgctggcagattccaccactcagagtctggttcagtgtactcccatctcacccagggtccttgtgcataggcagtcagatgcgcactcagccagatgtgctactgtctgccctgggcagatgtcagcaaaaaagggaaagtgggttggccggattcttggtggaggctgccatggtgagtctgtgttgcctggttggaatggtgttttgtcatggtgaaccaattacagacccacagagtggcactgctgacatcagcattttgcagctgtggtttgaccacatgactggcctctgtgttctggggaagttggcagaagagtggcttttagactccaacacccccttctttggtttctgttcctttccatgggggaggatgaattcaagaaagaagtgaattcaagcagcaaacccctcagatttca

SEQ ID NO: 124705 - DNA, 1057 bp, Homo sapiens
aaacctaagtctttcaaagctgaactcataaactgcttttgtcagcataatctctctaaacccaatttcccagatcatttgtttttttaaaatatgagaaacttcccagttcagtttctgatcacaaactctgttgctgatgtccttccttccttcagcacttcttaccttttatcttcccctattcctctcaccctgttgcctcctgtgctagtaatgtattcaaacttattgcctcccttactagattttaaatgccttgaaggcagggtgagtgtgtattccttaggtttctattcctcacatcactaaacatggtgtcctatctatagtaactgctcaattgaaaaaagtattaattatatttgcttaaattttgttagagtattctgtgaaaagttaattggaatgtgacattttgttttctagttttctgatttgttttgatccacagtattttatcattttatgatgaaacaacgaatatgccatcatcattttatgatgaagcaatagaatatgccatcatcattttatgtcgaagtaacagaattccttgttaagtccatgaaaagcacctgttctggttgctctcatctttggaccaaggagatattgcaaggagatctcaaattcacacatgtagtaatcattgtctgtagaataaatattttgcctatgttatgtactattttttcatatctacggtaatgctgttactaaaaatgtactaaaattgttatggaattcaaatggaatttttgtgaatattttatggatcaatgaatatttcacattttaaagcagatttgaaagaccctttctgaattggctcctgcttccctgtctagactcatagctcaccactcaccattgagacacaattcacatattatacaagtcatccgtttaaaggtacaaaatttaatggattttagtatattcagagttgtgcaaccatcaccataattttaaaacatttatcaccctctaaaaaagtttgcacccattaccagtcattccccatactgcccgtccattcccctaatccccaccc

SEQ ID NO: 124706 - DNA, 1054 bp, Homo sapiens
agtgcctcgccgcaggactcgcctccctccgccctcccaacccatccggaatccggggtccctagttcccccgccgcgtcatggaatccgctggcttcttccgaggacatcgccccacctccttcccgaaaggcgacttctgattggtgagattgtgcatcactctgccgccctcccgccccctcggggccccgcccctgggcctctcaggcccctcccctgcgctcccgcccttgcgcggctcctcgggctaatcgccgggcggcgcgcgccgagaagttctgggcaaagtactcagaactggccgcgtgctggtggcgcccgccagccggcccgggagaggggacttgagcgcttcgcggccggtgcgcagcgcggctccggccccgcagtctgtctgcaagtggccatccccgcccccgactcctgcggccggtgcgggagctgtcagctgcacgttgcgggggtaccggagaagccggggttgccttctcccggttctgtgcgctaaccccggagcccggccccggggaactagggagcgtctccggctgcacagcgctcaggtgagtggcggggcgcccgcctaaatggggcctgggtgtcggggggcctggcggcggcgcgggctcggaagggctgctgtttgcggggcgccgcggttctctgccggaccggggtctgtccgagtcgcccggggaggctccggccctggggcagacccaagcctgggagcttgggtgccggctgcagctcccggggaaggaggacccgggtctcacccaccccaggacaccttccctcgagggacggctcagaggattgaccgccaggaggagccgagcgcaggggccgcggcgcaggtgcgggaggacgcggcgcgcggagctgtcctgggcagcggggaggcgctacgccggggctagaggctcaggaagcctggtaaattggggcgagcgcgaagctttaccacatccgcgggatggggcgcgccggagagactgagacaacgctcgcggggcaggcgctccgctcgcccgccttcccaaccccg

SEQ ID NO: 124707 - DNA, 1309 bp, Homo sapiens
atattgttccttgtctctcattcttatttctgttgtatctccttgaactcaccaaaacccctaggtcccgatcatactcttcagcctcccttcctcggccagcctctcagtgtatctcttccatcactgcattgcctacatcctctacctttgtcacttgtatttccttttgtggcatctgtcctgcaaacagcctgagaacagcccagcaatctttgcttccatacctgatctgaacaccgtaggagaaaatcacactgctgtccgtcagcaccactgtaaacttaaccgtctctgattcagctgaaccagcagaaaccttgcgcagctgtccttttatgtatccattcttatcccagtcttcattgttattttagatgttcatcatgctcctcatgattcttatccccactgcctttcttatagcagatggccttgcctcccatttcagatatgaattatttacttcctgactacgaggaaggtttctgctgtaccccatccttcactttgaatgttgttcttaattcagatatgtttcagaatggtcaatcacatcagaacagtcgctctacatattacaccccaacatggtcattctaacacccattctcaacccccttgtcctctgcctccctctcccataaaagttggaaggactacatgtctactttctttttagcccaggaactttgcatgggaagccacatttaaacaatataaattctggaaattaatattttctaattcagtttaacaaaattatagttgtctctacctgaattgggcatgtgtagtgcgtccagaccaagagatgatacatctttgcaatttggggatagcaggagaaatctgtagattttctaagtcacctgcactgagttggggcatgttgtgttgtcagtaagatgaaaacttctatacttgtttactggtgaatggtagaggaagacagcccaaggatctgagacctccactgacactgcataatggaaccttaggcacattaacctctctgtattttagtttcctcatctgtaaactggcactaattattttagcccttagggtggttttaaggattaaacaagagaatgtacttggcatgttgcctggcagtcagtaaacattcaaagattagctattcttgaactagatgggcaacaatttatcaaattgtttaacaattggacatattgcctgggagagagggtgctcactgagatgattcttccaagtgaagtgaacaggatggtttagtgggagagaagtgcctggaattagggatttgtattcctgactctggccc

SEQ ID NO: 124708 - DNA, 1089 bp, Homo sapiens
tatacacaaattttaaaattatgtgtgatcacaagactaaagataattaaaaagaaaaccacagatcatgactttttgactgtgcttgatttcatgactgatgcacaaattttaatgattaaaaagtgcaggagccctaaatgtcagtgcagcagccctaaatgtcagtgcagcagtgttaaccagtcatggtgctagattgtttacttggttttctaggactgcctcaactagaataacacttcactaattgactcttagtttctttgctcagattgagaactgcagcatttatgccagacatggacagaggaatgcctgtggtcatagttttgtgatgtgtaacagtgtataattacatactgaattatttcatgcatagtctgtgccatacacatttagagtagtccttggagattttatggagatggtgagcacaaggtaagtcataaagaataatgagaaaataaatctatgctggtgcagctgagaactgtatctttgtgggacagtgagaagactgagaagatgtgaatccatggtctcaaaggtgatagggacgattagataggtgttttaaggcctgaaagcaatttataacatatgagtcttatttttatttatagaaatgtggaaagcttgctgtaattcatatttgaagtcctagtctgagttctggtggggaatttaaaaatgcatcctggaaatcctttaaagatttcagactttgaaaggccttgtagcagaggacttggtgactgtataaagttagtggtattcagggacagtgtagcaagtagcttacaaggggacaattctggactaatgagaaagacctgaagtgaaggctagagagttgattttttttttttttggcatcctggaaatgatacaggaaacatattaagatagatacagaaatgtgttcaaccttccatcttggctagttgtggcgtttagtttgttttttgagacatggtcacgctgtgtcgccaaggctggagtgcagtggtgcgatctcggctggctgcaacctctatttcccaggctcaagcgattctctcacttcagcttcccaagtagctggga

SEQ ID NO: 124709 - DNA, 1114 bp, Homo sapiens
gctcttctaataaggggccagttcttttcgtgggcacatgtttcttccgtcagtcgttctgacatcctagaaggagtttcatcaatcaccttgaaaccgacctggacgggtgacctcgtggtcgccccaggagatcacaggtaggggagttgggatgtccccgggggaccgtgcagcctgcccctgagctcccattcacaagttcgagtgtcaagctactcctgtgacctgggcagatagaaacagccaggaccgctttttaaacatttgtgtgctttgcgttatcctcagggagaggtggctttacattgtagtaagattaaatggttaggtctttttaaaagttgcggttgtggtgattttggcttaatgtgttcgcccttgagcttcagatctgtgacttcgtgaccatgattgtctcttctgaaactggagtttgaattaggttccctctttgcttgggctttaacgttccttcacgtatacacacaaaaatacgtttttgaggaggtactcctaaaaatgtttttggtattaaagaatatttggtataaagagtattaaagcaaaacaagattcattctggtatttaatgacataaattagcaatggattggtaattaagtggctagagtggtcattcatttacactgtatttgttacctgaggaaaaatttactaagttgaagctttcgtttttagaattaaatatgggtgatgttgagaaaggcaagaagatttttattatgaagtgttcccagtgccacaccgttgaaaagggaggcaagcacaagactgggccaaatctccatggtctctttgggcggaagacaggtcaggcccctggatactcttacacagccgccaataagaacaaaggtaagagtcacttgttaaataaaacaacacaaaatgcaggaatataacatgtggcaaactatcaggagtgtgaaataaccgatgcattctttcttgtttaggcatcatctggggagaggatacactgatggagtatttggagaatcccaagaagtacatccctggaacaaaaatgatctttgtcggcattaagaagaaggaagaaagggcagacttaatagcttatctcaaaaaa

SEQ ID NO: 124710 - DNA, 1048 bp, Homo sapiens
tcccaaagtgctgggattacaggcgggagccaccatgctcagcctctaccttcttttcaaatgagtaacctgagaatcagagaggctgaggcacttgctcaagtttccatagcttttaaatggctgattcctgttccttattatcatcattaatgatgataattattatagccacaatttgtgagtactttctagatgtcaaaaatttacatacacctgtattttattcaggcatcaaaggaattaatgttcacatttgatcagtgaaaatatgaaagattatggttaagtacattttctaaggtcacacagctagttggtgacagagtggagtttgagcttttcatcgttgtaaagcaatacttttttatgtatgtttcacaaactcttcctatgtttttactaatggcactattgttagaataagtgacttatttccatggtgattctcaaggacaacatttttcattcatacgataaactatggcatacttattaaagtctcattgctttgcagttgtaccttccacatgcttctgttgtgacctatatcctttggtgatctggcagtgggtcattttcgtggtgatcaaatatgtatgtatgtaaatacaaaattgtttgttttattcatctgctttccttccagtctaaacactgagctgaaattgagacattggacatgatagtttgttgaagtttgacatttctgtccaagatttgtttggccaacctttgaaagcctgagtttaaactattccacaagcatcagtcaaaacacatgagaatcatgggaaaggagggcgcttttcctgcacagctgctctgcagaaggggaattgcatggcaaggcatctcctcttggccaatgttaggagagagagggcttttccttcctcaggagaacagctccccttctcttcacatccctaaataatgcaggaatgtcacattgcttgcattcctttgatgcttgtcctgactttgattttgctctggtacttgtctgaaaacagagctgtcagcaccttcatttttttgctcatcc

SEQ ID NO: 124711 - DNA, 1041 bp, Homo sapiens
ggttctttcattcatgctttaaaaataaactacgtaattaaatggctacagatacttcttttgtggggaggaaaacagcagtcagattctttgcaatcatgccaacagggcagtaggtttcctaaccctttggcaaaattgagaatcaataccaataagaaaaaaaataataacaaaaggggaaatctcacaggagtcacaggcgataaaagatttacaatgtgaataaaacattacaggtcagcattaaaacagatgatacgtctctctgacaagacaaagcagccagcctctaaccagaggtgcaaaaccgcatccaggggccaatgagaaagccccagaccagccacttcccttcccctcaaggaaaggagcctccttctcggggagacattcactccacaagctgcattcacagtttgacagttcaccttgtttgaaagtaaaattctctggaagtacaaatcttgcccatgcataatttctaggactagtatatttggaatttgtgaacaaagagaccagacttgcttttgaaaaggaaaagatgcttatctgttggttcattttgtaggtgaataagacttttaaaaatacaacctggagaaattatgaagtcaaaaaaggtccataaagacaggctgaattctgactaaaaggcagtggaagccatcgccaactggaggggttttatgaacatggtggaggggaactctcggagggtgatcattattcagggctcattagttcttgctgagtggactctcaatcatgggaatttccatattccaaagccaaattcttgaaaagaaaactcagaaaacgatattttggtgtccagccattatcaagggaatacatttgacaaatataaatcaaattttattattttctgccaaatcatggagagtaggtctatatgctcaccactcgaaagaatgcagttcacctccaatcagagacagcataactggatgcccaggcagcctgatctcacatcccttaaagttgccagtggacacacagccatggccaacagtc

SEQ ID NO: 124712 - DNA, 1107 bp, Homo sapiens
atatgcaacagtatgatgtgtttgggaattagcaagtctttatgtgtggcaggcagatgagcaacaggtaatgaggctaggagattggcaggggaaaaccaggaagggtcttgtgtggtacctataaacatttgaactgcaccctggaagccatggggagcaacaaaagcctgtaagcaggaaaatggcctaatcagctctgcttttgtagaaaatatattctggcagcagaaggcagggtgagttgttgggaggcaaactagccagttatgaagctgttagagtcatggagagaagacatgctgaaagccagtggcatggacaggaggggtgtgggtgggcgtaggatgagagcaggaagacccactgacctggagcaacacacaggaacgttcagggcagtctgttcttgaggcccttacgtacattttgctgattagtactaacccagggaataaaattggcgctcagctgcattgtgtatgatatttcgaaacattaaacttgcttggctgtaatcccaaattaattctggaagtgtaatattggaaacatctctttaactctttatggcttattgaaaatttcaccctcattcatcaaatctaagaaattaaccattgccaaagcacgctccaaagggaagggggcactgaagagaggttgctgaaaggaatattacacagggtgtgggcagggttgagggaagccaaccaggaagagggaagtactctggtgctggcagcagtgggaagctgtgaccactcccagccatcaaggggcgactggagagaacagctcctggggggagctgaggctgtaggagagggctgcctgccaggagctggggcatttggtggaggaaaccaaatgccattgccaactcacagctcagcaaggggggaaccaagggagtgaataccctgatatggtccaaggagggtggcctccaggggttaagacggtggggtgtggacatggagggtcaaatgggaaattgccagcatagtttttggtttgtttgttttttttttttggtcgcatgtcacatctatgaatacatttaaaaaaacctataagagaaataagttggttgaagaattccta

SEQ ID NO: 124713 - DNA, 1104 bp, Homo sapiens
gcacccttagcccctggtctttgcaggttcgcagatgctgctgctctgattccgaatgaagggctactagtgctgtcgctgtggtttttaggtgtttaaggaagaagtggacgaaatcatccgtttggttatagagaatacctttccttgtgtgtgatggctggcaagagtagttcggggatggggaggggagaagcaatgcccactgtcttcgctcagtacctcatgtacactggggtgtcgttctctgggacccgtgcccgacctggacgatgtgaaggaggccgtgacctctgggaggatgcatgtttttaagaacgactctcccggcctaacgcaaggaccttcgccctgttttcagcccaattgctgttcgtttttgctgcttccctggattaaggagccatggtcagggtctattcagaggccagccggcaggcggtccccctgtgacctaaccatcccctgcacctagcaatcctccttcctggaatttgtgtaacctcttattagcataacgaaaacaggtaccttggcagtcacttagtgactaacaagttccctttggtttatgggtccaaacccttctctggcttaacttctttctgaaaccaagtttaccaagatctgttgcttgaaacatctggtgctccccatggaacgtttgagttcagtctaatgacactttaacaccagtttccacaaaaccactttacccaaagttccttccaggggacttttaaaattctgtcttggctcaaactttagtgtttgcaactggtaacgatcaaccagtggtgatcaactaatgttcttcgggtgttgtttttgtggggcgcattcttatgcaaaatgggaattggggctaaactggtttgtttgttgctcttcagaattgccgtttgtgtaggctgttgccagacaagcttctccaccctcctggaggggtcattgtgtggaagtgctcggtgattcactgttatgctgatctgagcccttcctcttcctggggaccggaaccaatggggtgggggccagtgagagtcttggagggatccttctgtgttcaggatatactgtgggaggttcttccccactcactca

SEQ ID NO: 124714 - DNA, 1006 bp, Homo sapiens
agtttggttggttattgaagaagtggggtatgctagacccagactgcctggttttgaatcccagctctaccacgtctgtgaccttggacaagttgcttatcctttctgtgcttcattctgtgtgcattcccatgcacaatgggaatcagaaggggcttacctcagagggttgatgtgagaattaaaaagttcattccatgtaaagggcttagaacttgcctgtcacttaagtgcttagttagtaaatgttagctactgttaacttcaaagagacgaagtgctttgtcccataggaacataatttttaattttaaaaaatagataattccggtggcttacatttgagttgcaggagttttatagtataattttccataatttatgtacatatgcaaaaatattttggagtaggggattttccaagtatcaaaaggagtactgttttggtttcacttcttactggggcttatcatgatctgaaaactgactctggaattccccagggctgacacgcttcccttcataaccacagtcattcacaacggatgaagcatgcattcttccaagtaacacacaggttaaacaaagaaatgaacagtttttgtagaattgaatgtgtaaacgtatggaacagctgcctacagccagcttcagtatttcagagagctgttgccactttgaaactgagagggcttgtagtcattttgatgtggtttcctatcctggtacagagaccctctgctgggtgaggggtctggtaagacctcttgattaactgcctgaagaaactgttgggctgggccgggtgtggtggctcacacctgtaatcccaacactttgggaggccgaggcaggaggattacgagatcaagacatcgagaccatcctagccaacacggtgaaaccccgtctctactaaaaatactaaaaattagccgggcacggtggcacgtgcctgtagtcccagctactcgggagcctgaggcaagagactcgcttgaacctg

SEQ ID NO: 124715 - DNA, 1073 bp, Homo sapiens
tgctgggattacaggcatgagccaccacgccccgccatattccttttataatcaggaaaatgataaatgtaaaacatctccacagatctatacttatttacccagataagtccttctaccttaatttactttataaataaggagacctaaataattaaaaggctagagaattcttctaaacattcaaatatggttaccatttagagtgtactgcatattcagatagtttcaactatcatgttaaaagctctctggatgtattttttccctataacattaaagcttgtcaaactttttcactctttctgtttcttccaggaacaggacacactggcacatccttttcccaccaaaccacagaaaaacatttttaagtgaaggttgaagaaatggcaatttacagatgccagaagaaaggataaaaatcaaggcaagataagaaaaaaggaggctgatgttctgctggtccacttggtttactggcttctctgtctgattgtgcctaactctgacactgtgccttccctctagacactgtagatgatgtttagtcctagctcaatcagtctctccctttgcacatttccgttacaaccctgctcatgtgctcaagatattgctcctgctactctcccctctcttctgcatcaacagttctttctcatctactggacaattcgcatcagcctactatcatacacaaatacccccacctttaaaaacccctcccttggtcccacactagtcttcagattccatcccattttttgctccccttgacagcaaaaacctccaaagagtatctgtactcagtgtattttctcttcacccatcagcaaaatttgacttagttaccatctcctcctggaaacagcttcttcacctggcatccaagtacctctctattctcctacctcatcaagaacttctgctttgctgattcttcatccccttgatatccaaacatagcaatgtcccaaggctcagttctcaggtccaccaagcactctcccacttcacagcccttgtatttgcagccctttctgcctgtaagctctctcaaccctcttatc

SEQ ID NO: 124716 - DNA, 1031 bp, Homo sapiens
ctagcggttggtaatcacattgtggagggtcagggataataaactacagtgaagtagtctggaggagagaggctgtttaaatgcctctaagcgctaaaactacaaggctattgtgaatattgctgcaataaacatgggggtgcaggtgtccctttgatacactgatttcctttcctttggataaatacctgataattcttttagttttttgagaaatctccacgctgttttccatgactagtctaaatttgattatacctttgggattatttggaaagaggaatgctatacatatttggttaattctaagctgaagtgcttctgtaaaaataagcattactttaaactgctgtgtcatccaagtaaaggagttgtatttgttcaccaaaaggtcagtgcagatatgttcctgcgaggataaaagccaaagttccaattacctccagtgaattttcaggctgtgatgaaagcaactggaataagtcttccagagagaaagaagtatctgtcccattcagatgtctctgtagagaaacacaaaaagtgcatctttcacataaaagactgaactggttggggctttaggctttatctttaaaggatcaccaggtattatttccacactggatttttatgctattatgttccttggttggaagttctactttttattatattttgagacggatctcactctggcccagaatggagtgcagtggtgcaatctcggctcactacaccctctgcctcccaggttcaaaggattctcctgccttagcctccggagtagctgggattacagctgtgcaccaccacgtctggctaatttttgtatttttagtagagacagggtttcaccatgttggccaagttggtctcgaacttttgaccgcaagtgatccacccacctaggcctcccaaagtgctgggattacagacgtgagccactgcagctgacctatttctctgattatggtactcagtatttcaacatgcatacttaaaagtccaaagctaatcagtatttctat

SEQ ID NO: 124717 - DNA, 1527 bp, Homo sapiens
ttctaggttactcagaattccaggtattctgatttggactcacatctcgtattgtattgcctgtatttaactaggaagttactgccaacagcatctatctctattaaatgtagaggaattgacaaaagaggggaaagaaagttgttaggtaatagaactgcttcagaaatagggctattcatgtttgaagtgtttctccttcgtttttcagggcatctcattgggagatattcctcttccaggcagtatcagtgatggcatgaattcttcagcacattatcatgtaaacttcagccaggctataagtcaggatgtgaatcttcatgaggccatcttgctttgtcccaacaatacatttagaagagatccaacagcaaggacttcacagtcacaagaaccatttctgcagttaaattctcataccaccaatcctgagcaaacccttcctggaactaatttgacaggatttctttcaccggttgacaatcatatgaggaatctaacaagccaagacctactgtatgaccttgacataaatatatttgatgagataaacttaatgtcattggccacagaagacaactttgatccaatcgatgtttctcagctttttgatgaaccagattctgattctggcctttctttagattcaagtcacaataatacctctgtcatcaagtctaattcctctcactctgtgtgtgatgaaggtgctataggttattgcactgaccatgaatctagttcccatcatgacttagaaggtgctgtaggtggctactacccagaacccagtaagctttgtcacttggatcaaagtgattctgatttccatggagatcttacatttcaacacgtatttcataaccacacttaccacttacagccaactgcaccagaatctacttctgaaccttttccgtggcctgggaagtcacagaagataaggagtagataccttgaagacacagatagaaacttgagccgtgatgaacagcgtgctaaagctttgcatatccctttttctgtagatgaaattgtcggcatgcctgttgattctttcaatagcatgttaagtagatattatctgacagacctacaagtctcacttatccgtgacatcagacgaagagggaaaaataaagttgctgcgcagaactgtcgtaaacgcaaattggacataattttgaatttagaagatgatgtatgtaacttgcaagcaaagaaggaaactcttaagagagagcaagcacaatgtaacaaagctattaacataatgaaacagaaactgcatgacctttatcatgatatttttagtagattaagagatgaccaaggtaggccagtcaatcccaaccactatgctctccagtgtacccatgatggaagtatcttgatagtacccaaagaactggtggcctcaggccacaaaaaggaaacccaaaagggaaagagaaagtgagaagaaactgaagatggactctattatgtgaagtagtaatgttcagaaactgattatttggatca

SEQ ID NO: 124718 - DNA, 1895 bp, Homo sapiens
tgtgttaagtattggggtaggggggtggatttgccttactatggatttggcatactatgttgacctcaatttggcttgagtctgagcagtttgctatgctgccttatttgttattcacctatattcctgaatgtggatattttggaaggaaagtaaggtaaatttggttcagattctgtataaaagggaaaagttaatttttaatacaaatacaaaatttatttccatagaaagcaaaatttataagttaaatataaagattaaaatagtgtttgaaaagctcactatagtgctaacaaactaaatgaaaataaggctattttgcatttaaaactgaaatacctcttaaaataatttgatccccagtgtttgctctttttgaagtaaccaacttactcttaaaaaggatggctgccaagatggaaagtcttactgggttttcatgttaacctattctttggacataactatgaattttgtatacaatgcacttcatgaaaagttgtggctcccccagattgcccacaagtgtgatcttgaagtcctaaacatttgtccatgtaagcttcaaaacagcgttaactgagttattcaagtagcagtacttaaagatacaattcttgaagcagtttcaatggtttctgatccaaataatcagtttctgaacattactacttcacataatagagtccatcttcagtttcttctcactttctctttcccttttgggtttcctttttgtggcctgaggccaccagttctttgggtactatcaagatacttccatcatgggtacactggagagcatagtggttgggattgactggcctaccttggtcatctcttaatctactaaaaatatcatgataaaggtcatgcagtttctgtttcattatgttaatagctttgttacattgtgcttgctctctcttaagagtttccttctttgcttgcaagttacatacatcatcttctaaattcaaaattatgtccaatttgcgtttacgacagttctgcgcagcaactttatttttccctcttcgtctgatgtcacggataagtgagacttgtaggtctgtcagataatatctacttaacatgctattgaaagaatcaacaggcatgccgacaatttcatctacagaaaaagggatatgcaaagctttagcacgctgttcatcacggctcaagtttctatctgtgtcttcaaggtatctactccttatcttctgtgacttcccaggccacggaaaaggttcagaagtagattctggtgcagttggctgtaagtggtaagtgtggttatgaaatacgtgttgaaatgtaagatctccatggaaatcagaatcactttgatccaagtgacaaagcttactgggttctgggtagtagccacctacagcaccttctaagtcatgatgggaactagattcatggtcagtgcaataacctatagcaccttcatcacacacagagtgagaggaattagacttgatgacagaggtattattgtgacttgaatctaaagaaaggccagaatcagaatctggttcatcaaaaagctgagaaacatcgattggatcaaagttgtcttctgtggccaatgacattaagtttatctcatcaaatatatttatgtcaaggtcatacagtaggtcttggcttgttagattcctcatatgattgtcaaccggtgaaagaaatcctgtcaaattagttccaggaagggtttgctcaggattggtggtatgagaatttaactgcagaaatggttcttgtgactgtgaagtccttgctgttggatctcttctaaatgtattgttgggacaaagcaagatggcctcatgaagattcacatcctgacttatagcctggctgaagtttacatgataatg

SEQ ID NO: 124719 - DNA, 11790 bp, Homo sapiens
caaaaagggaaggctactaagatttttctggcgggggttatcattggcgtaactgcagggaccacctcccgggttgagggggctggatctccaggctgcggattaagcccctcccgtcggcgttaatttcaaactgcgcgaccgtttctcacctgccttgcgccaaggcagggggcgggaccctattccaagaggtagtaactagcaggactctagccttccgcaattcattgagcgcatttacggaagtaacgtcgggtactgtctctggccgcaagggtgggaggagtacgcatttggcgtaaggtggggcgtagagccttcccgccattggcggcggatagggcgtttacgcgacggcctgacgtagcggaagacgcgttagtgggggggaaggttctagaaaagcggcggcagcggctctagcggcagtagcagcagcgccgggtcccgtgcggaggtgctcctcgcagagttgtttctcgagcagcggcagttctcactacagcgccaggacgagtccggttcgtgttcgtccgcggagatctctctcatctcgctcggctgcgggaaatcgggctgaagcgactgagtccgcgatggaggtaacgggtttgaaatcaatgagttattgaaaagggcatggcgaggccgttggcgcctcagtggaagtcggccagccgcctccgtgggagagaggcaggaaatcggaccaattcagtagcagtggggcttaaggtttatgaacggggtcttgagcggaggcctgagcgtacaaacagcttccccaccctcagcctcccggcgccatttcccttcactgggggtgggggatggggagctttcacatggcggacgctgccccgctggggtgaaagtggggcgcggaggcgggaattcttattccctttctaaagcacgctgcttcgggggccacggcgtctcctcggcgagcgtttcggcgggcagcaggtcctcgtgagcgaggctgcggagcttcccctccccctctctcccgggaaccggatttggcggccgccattttcatggctcgccttcctctcagcgttttccttataactcttttattttcttagtgtgctttctctatcaagaagtagaagtggttaactatttttttttcttctcgggctgttttcatatcgtttcgaggtggatttggagtgttttgtgagcttggatctttagagtcctgcgcacctcattaaaggcgctcagccttcccctcgatgaaatggcgccattgcgttcggaagccacaccgaagagcggggagggggggtgctccgggtttgcgggcccggtttcagagaagatatcaccacccagggcgtcgggccgggttcaatgcgagccgtaggacaaagaaaccattttatgtttttcctgtcttttttttcctttgagtaacggttttatctgggtctgcagtcagtaaaacgacagatgaaccgcggcaaaataaacataaattggaagccatcggccacgaggggcagggacgaaggtggttttctgggcgggggagggatattcgcgtcagaatcctttactgttcttaaggattccgtttaagttgtagagctgactcattttaagtaatgttgttactgagaagtttaacccttacgggacagatccatggacctttatagatgattacgaggaaagtgaaataacgattttgtccttagttatacttcgattaaaacatggcttcagaggctccttcctgtaatgcgtatggattgatgtgcaaaactgttttgggcctgggccgctctgtatttgaactttgttacttttctcattttgtttgcaatcttggttgaacattacattgataagcataaggtctcaagcgaagggggtctacctggttattttctttgaccctaagcacgtttataaaataacattgtttaaaatcgatagtggacatcgggtaagtttggataaattgtgaggtaagtaatgagtttttgctttttgttagtgatttgtaaaacttgttataaatgtacattatccgtaatttcagtttagagataacctatgtgctgacgacaattaagaataaaaactagctgaaaaaatgaaaataactatcgtgacaagtaaccatttcaaaagactgctttgtgtctcataggagctagtttgatcatttcagttaattttttctttaatttttacgagtcatgaaaactacaggaaaaaaatctgaactgggttttaccactactttttaggagttgggagcatgcgaatggagggagagctccgtagaactgggatgagagcagcaattaatgctgcttgctaggaacaaaaaataattgattgaaaattacgtgtgactttttagtttgcattatgcgtttgtagcagttggtcctggatatcactttctctcgtttgaggttttttaacctagttaacttttaagacaggtttccttaacattcataagtgcccagaatacagctgtgtagtacagcatataaagatttcagctctgaggtttttcctattgacttggaaaattgttttgtgcctgtcgcttgccacatggccaatcaagtaagcttcagctttcagtaattgttatcttagagattatgccacgtgaatgtattttattgtacatatggttaagctgagtaattcatattctgtattgtcatatatcaaatatagacatgtccaccaaaaattaaactttttaagcttcgagtgctgctggtcataaaaattaatttgtcctggttataagagtaatttttaaggttatttctaatgcatatctttaaatattttcgtaactgagagtcatatggagaaacttagtgtttgttgtaaaaagttgtgtttttttggctgagatacttagaatcaccaccagagggggcagttaagggaaaataaatgatacttttcagatattgaatagtgaaataaaaactttgggtcataagtaatgaaccaagagttattttctgatgtttaaaaatagaaatttgcgtttttaggttgtagggttgaaatttttggtaaagattctttaataatcctttgataatcacggtctacatttgtttatttttccttagaaagttttttttttaattaataatttaagataatttaatgttgagtaaatttatatcaagcattaatgactttgaaacttgtgtagatcagctgaggcaattttttggtgtaacacaactaatatgcagtttaacatatggtttaaatttgatgtaagttttttttttccccccagaaaactttagaaactgttcctttggagaggaaaaaggtactctgccagcaggtcacctcatatttaagaatttaatttcctgcatacaaagaggaaaatgtaaataaaaattgaaatggtattttcctttgcagagagaaaaggaacagttccgtaagctctttattggtggcttaagctttgaaaccacagaagaaagtttgaggaactactacgaacaatggggaaagcttacagactgtgtggtatgtaaattactgaattgttactggatattagtcttttagctgtatgttaagtgaatcatggaggaaataactatcagcatagtaaaaaattctattatgacttcacttataagctataatgagattaaatgctaaagtttaccctttggtttgaaaggtaatgagggatcctgcaagcaaaagatcaagaggatttggttttgtaactttttcatccatggctgaggttgatgctgccatggctgcaagacctcattcaattgatgggagagtagttgagccaaaacgtgctgtagcaagagaggtaagcaaacaatgactgtcttgtgcattaacatgaagaacgctgccctgctgaaaatcagaaactatttctgaatttagttttaactcaagattttttctcttattaaaggtgtgttgggtttctggaccattttcttaagctagcttatttttcaaaagctaggtccctaaaagctattttatatctggtagttttaaggtggatacaagcgaagtatggtactacggttgggtgctttgaattatgcttgtgtttttttctgtttggatgacttttaccccaccactattttaggaatctggaaaaccaggggctcatgtaactgtgaagaagctgtttgttggcggaattaaagaagatactgaggaacatcaccttagagattactttgaggaatatggaaaaattgataccattgagataattactgataggcagtctggaaagaaaagaggctttggctttgttacttttgatgaccatgatcctgtggataaaatcgtatgtaagtgtctaaccacaaatgtactgtttttttccagtgtattcaattttgtgtatgttaacatctgtaactttattgaaaggtaaacttttgaagctgcttaatattgttgatttaatttaaaaggagtctgaatttttcattccagtgcagaaataccataccatcaatggtcataatgcagaagtaagaaaggctttgtctagacaagaaatgcaggaagttcagagttctaggagtggaagaggaggtaattttaattctgtttcttctttatttttgttcatatataagggcttgcttctaactggggcatttattgtaggcaactttggctttggggattcacgtggtggcggtggaaatttcggaccaggaccaggaagtaactttagaggaggatctggtgagtttcaagttctacgtgtttaaaggatgagtgtgcttttattttaaatatgattaggttttcattagtagaatcaagaaatccaacctaagtcaattttcctaagacttcaaatagattgtatcctggcaagctcttgtgatttggccagacaagaagttaatagagttgtattaataacagttgtatttatctggattaataatgtaacatgaagtgtcatccgaaaagctttgacccccatcaagtgtcattcttacgtataaataggatggaatctctaagattgagacttgttaagagtccaaaatttaggcggtagatttaattatatgctttcatgttttgtgggtaaactggtagcactggtgtgtccttttctgcggttcttaattattgtgctgaggtagtaagagaactgaaaatgaatattagcaataatgctgaacagtttatagtaaacgtaatctttttttggcccctaacagatggatatggcagtggacgtggatttggggatggctataatgggtatggaggaggacctggaggtcagttttcctctacgttttggtttgtttatgtgactaatacttaactatatcgtatatttacttcatttatattttgagtttttaaacattttatattagtgtctataaatggcttgggtgatagtggtccagttatttctaagtagttttgccatcttagctgttatagcctaaggaatagagtgccattttaaatgaaaatgtaaagataaccatcagagtatctcatcttttctcaagcaaaatgattggatctagatatatctttgtacgtgcttctctggaaaagtacagaatactggatttaacagagtaaaacctaagggggtggtatatgtaggaaaaaatatgaaatatgtctaaacccgtaactagatgggaagcatcccaggataactttcaaaaagcgtaacctacggaaatgttccaaaatgtttagtgtgctcctggctgcagataaggttgtgaactaccattaaacatgaagtgtgatatatcattggcgtacagaaaaggctgatacacactgacagattttgtaacaagggacatttaaaactgagctggtaatagacttgatttctggtgttgccactcaataggcatgactaaatagtgtatctcactgttctactttttataattaaaattttagaggaagctgagttcttgtatttaactacaagttagagactcagcccacaagctttttttttttttttaatatggtttcttttttttttttttttttgagacggagccttgctctgtcacccaggctggagtgtagtggcgcgtctctgctcactgcaatctctgccttcccggtccaagtgattctcctgcctcagcctcctgagtagctgggattaccggcgtgcaccaccacgcccagctaattttagtatttttagtagagacggggtttccccatgttggtcaggctggtcttgaactcctgacctcgtgaactgcccaccttggcctcccaaaaacgctggggttacaggcgtgagcaaccatgcccagccttttttttttttttatttttgttttgcagtatgtgaaagtgtaaatttttgtttatgtccgcacttctatttacagtaaagaacatactgtgtggagtgttgggtctgttttttttctttgaaatggggtctggctttgttgctcagactggagtgcagtggtgtgatcttggcttactgcaatcttagtctcaagccatcctcccacctcagcctcctgggtagctggaactacggggtgtgccaccatgaccggctaattttgtgtttttttgtagaggtgtgggggttttgctgtgttgccctggctggtcttgaattcctgggctcaagcaatccacccgcctcaacttcccgtactgctgggattacaggtgtgagctgctgcgcccagccaagaacattgtttcgttttttgagagggagtctctctctgtcgcccaggctggagtgcagtggtgtgatctcagctcactgcaacctctgcctcccgggttcacgccattctcctgcctcagcctccagagtagctagtactacaggttgctgccaccatgtccggctaatgttttgtatttttagtagagatggggtttcaccgtgttagccagggtggtctcaatctcttgacctcgtgatccgtccgcctcggccttcccaaagtgctgggattacaggcatgagccactgtgcccaaccgagaacattgttttaagatatgtaattcgtagagagacataatagaaactttatcttttgggccagtaggaggaagtgctcttttactttccctctagcccacactactagtctagcctcacagtccttacccacaatatacatgaagtatttcaagatacttaagatttttagttttgagggaaagctgtggaattacaggtatttaactgtgtgcacatggtgttatccatttggctgagtaaccccagccaccaaatgtttaccaaggatagttattcagtccttgaagctattttagaggaatttcattaaatatttcacatggaaacttggaaagctggaaatggatgtgaggagacagttcaaaatggtattgaaaatattaagtgattacttaaaggcttattttataataggtggcaattttggaggtagccccggttatggaggaggaagaggaggatatggtggtggaggacctggatatggcaaccagggtgggggctacggaggtggttatgacaactatggaggaggtaataaattcacctgcaacctttatgtgggaatttggaattaatgtctttgtaacacttgatcttttgtttccatgtttgtcactagatgcccataaaatttgtggataagtgtttgcttttatttgtttttatgggagctttgtcctaagtccttggtttaatgtttgtattgttctgagtattccaattttttaataggaaattatggaagtggaaattacaatgattttggaaattataaccagcaaccttctaactacggtccaatgaagagtggaaactttggtggtagcaggaacatggggggaccatatggtggaggtaatttataaaaattgaggttattcagatttttgtgattaaaggattagccttttgtgacttaaagggaagataacatactaagtagtttgtactgtgggcagtgctccatgtacggtcttagtgaaaataaagaaattttgcataaatctccacagaagtactcagcaagcagttatgacatcaaattgggattagggatgttggaggtgggggtgttcagtagtttaatttctggtggggactcataaacagctaaatacagttgcaacccacattgcaagtggtatacattggaatgagggtctttgaagttaaatccttaaaccatgattcaaaccattgcttagcttatttttgaggtttttagctaggagtaaactagctttgtcttgggcttgatgtacttttaaaaaaatcccttactcagtccaaatgaggatgagagggtgaaaggaccctttatttaaaagaatagggtcagccacgaaataaaaatgtctatgaacccgagtaatttatctcctgagtaattctgctaactggctgcaaaggattaggatctgcttgtttaaaagactggatggatataaaatagaatcaactgtagtgttaggctgatcatgggaaatcaaagtaagtttgttttctcttgctgttccaacaattataggaaactatggtccaggaggcagtggaggaagtgggggttatggtgggaggagccgatactgagcttcttcctatttgccatgggtaagtagcttttgagttttacaattattattatcttgggagacatagctgcaggagtaaaagctttttaggatcatgttatctttccttaaaatctggttagatggataatttcataacctattttttttttactctttacttctgttgaaacaggcttcactgtataaataggagaggatgagagcccagaggtaacagaacagcttcaggttatcgaaataacaatgttaaggaaactcttatctcagtcatgcataaatatgcagtgatatggcagaagacaccagagcagatgcagagagccattttgtgaatggattggattatttaataacattaccttactgtggaggaaggattgtaaaaaaaaatgcctttgagacagtttcttagctttttaattgttgtttctttctagtggtctttgtaagagtgtagaagcattccttctttgataatgttaaatttgtaagtttcaggtgacatgtgaaaccttttttaagatttttctcaaagttttgaaaagctattagccaggatcatggtgtaataagacataacgtttttcctttaaaaaaatttaagtgcgtgtgtagagttaagaagctgttgtacatttatgatttaataaaataattctaaaggaaattgtgtaattatagactttttattttaaataagttaaggagtgggtagtataattaaggtccgttgcaaagctgttgttatatttgtataagataaatgctggtcagatgtaagtgtgttgtctgcaattcatcaggattaaattatgtagataacttaagggatatctctgcaaggagaaacacctttttagatcttttagatgctgcttcttcaatgcaaggaaaggaaataaccccagcgaggtactcttcagggacacaggtctagtacaagagaactcttgacggctactaagttcagccagtcttaaaaaactgtgctgtttctacaaaactttaactacagtagtttataaggatgccaacgaaagctgagggtgtagagcaaaatagttctaagcttcagttaaacttctttaggtaagatcttatttacttttcctttcttaattttcctccctaaaagataaactaatactcttaaatggtctttcagtatagtggttcttacgtagtttaacatagctataaattgagtttaacaatttataaactcaagagaataatttttataaaccctgttttccaatctgtcatttacttaaattattttggttgtttttccctttttttccttcttttcccaccccctccccctccatgtgaagatttgggtgcttaacatatcatttttttccctgccggaattttagcattgatatgaaccatggacaagtatattctgctgccacaaagactgtaaagtgcttcatttcaacagctgaggcaagccaagtgatcattaataaagcttttcttggttccttcagtggtgttggtagtaaaatggtaggtaaaagttaggctgcaagttcaataaatcatgagatttcccatcgttacacccttgtgtattcacatttcttggatcaaacattttgagtgaactaggggtttttattaaagacatttgttgtatttatggttgtaactgtacatgcttatcaggatgagactgaaagaaggtagggcaaaaatggttgaatctattttcagatagtagttcatacttgagtgaagtgtcttgtctgcattatgaagcctggtatgtatccagtactaaataggtgggttaaatgtggtaattctagttcagtgtcttaccctgaagagaaagttgtaggttggctgttgaaattcattccttagatatgatcagtttgattgcccggctttattgcctttacaggaatgtgatactcagggcttactctatacaccaatgagtcttctttgatcctaagaccaccactgaagttgtttaggttcttttggacaaacatgataaacttcttcagatactttttttttcctttggcaggaaggtgtcttgctgcaggtaactaatgaagaagtggtcaaccacagagtcttcaagaaataagaaattctgtaccatctgaaagtagttcttgttggtgccttcatttaaaaagcactctttaaaataaaagggaaatgttttctgataaaacaaacatttagttgaggttcttgatataaaacaattacaaaatgagtgttgtttgtaaaacagtaacatcaaattggctagagagataaatgtatcatgttttaaattaggttttgtgagtagacagattacaattctattttaaatataaagtttataaaataaatactttttgtatccaaatacttggtgtaatgtttacacataaaatgtgtgaatcttgttctataaatatttggttgtctaaaagatcaccatcccctaaatttttaaaagcagtttcacaaagctatgcatattttaatattaacaggtaaatgagaagagcattgtggacattattggctgtccccaataaaatgctgttcattatgcactgtatattcagcgtttgagtactcctaaagtttctggctttacttttacgtttagcaatactggtggcattttgaaaatcatggattttaaaggttaaccggctggagtggtccagattaagtggctttgcagaagcactgaggtttacaatatgtgctagattgtcaaatgtcaattagttttattgtggtttacactgagtaaatgaatatcagtgttgctttttaaatgtgtttatttggacatttatctgaattaagaaaaccaaaaagaccaggttaatttgtttctatgataatttgttttggttttgataatgtgaggtatctaacaggtaagtcaaatttaacagcaggtaacacatagaaagcagctttctgtttgaaatagctgagttcgtcaattaaagacgtacaaatatcccaactttaagaaaattttgaaggtttaaaaatgtgtggatgtacaaagacgttgaactttgaaatacatcaggttgatatgcataacctcaaaataccaactcctatccagccaaggtca

SEQ ID NO: 124720 - DNA, 1059 bp, Homo sapiens
cttgcttctctgtatcaccctttaggtacttcctgcatagttgtttgttgcagtgttgttaaaatgagtgaaaattagtaaacttggtcttttaagactacagggccgggcgcagtggctcacgcctgtaatgccagcactttgggaggcccaggctggtgaatcacttcaggtcaggagtttgagaccagcctggtcaacatggtgaaaccctgtttctaataaaaacacaaaaaaaattagcccggcatggtggcatccgcctataatcccagctactctggaggctgaggcatgagaactgcttgaacctggggaggcggaggttgcagtgagctgagatcacgccactgcactccagcctgggcgacaagagtgtgagaccctgtctcaaaaaaaaagactggaaaaaaataactgtttccagatagtgtttttttattgtattattttggtggtgggttgtaagtttgaactaaatgaacaagataaagcattcttttattttattgtctgttgacttttaatctttccagaaggtgtctgccctgggatatagaagtaaaaatttatgtcgaatgtgataataatataagcaattgagccttgaaaatgtgctcaaaattcaagaggaatatttcttaatttctcttttgttttattttagcaaaaaatgggaaaaaaacagaatggaaagagtaaaaaagttgaagaggcagagcctgaagaatttgtcgtggaaaaagtactagatcgacgtgtagtgaatgggaaagtggaatatttcctgaagtggaagggatttacagagtaagaaactttagtgcatctttactatatgtttaactgcagctaagtggttttagaatttgtttttaacctggctcttttacctgctttcctgtaggtgtctttaaatgtaaagacactttgaattttaggtgtctcatttgaggtctatttcaaaagaaccaagactttattgtacagttgaaggtgagcagactagagactagtttattaccctggggagtcaaatttataaaattatggagtgta

SEQ ID NO: 124721 - DNA, 1051 bp, Homo sapiens
ttatttgcaaaattgaagtaataatgatacctggcctctggggcccttaccaggattagatgagataatacatgttgcaagctttgcacggtgtctgggacatagtaaacaattttttttggccttattgctattttggatttttaatggcataattttaacattattccccagtctcatcctccacagtccagtggagttagtttaggaggaaagatagaaaacagaggccacttcactctgcgttgttgctggctaaatgctttctttcctcacaagacgaatgattaaccatgagtgggctcacaggtgggctggcccgagaggcgggcgactgtcaacccatcttcccttcccaggtggttgggcggcttagaaacttgatggagatgcagaaatggagaaaaccagctggaactcattcaatcaaatttaatatactgcatattttctgggcactgacaatatgccaggcactgtgctaagtgctaaagttgtaaagcataaataattgggcaaggtccctgccctcaagggacttttcagaggacatataatcctcaagaaaatagattaatagataaataataaattaatatagactgcgacaaagtccgaggagaaaatgaaaggatagagttcctaggggagtctgctttagtgggtggttagggaaccctctttggggaggtggcctttaaaccaagatctgaagctgggaaggagccaccttggtgagttgggggtggggaggtggaaaggggagaatgtcgagagtacagcagcacgaggggactgaggaaggatctggcgaggaacaattttttttttttttttgagacagagtctcgctctgtctcccaggctggagtgcagtggcgccatctcggctcactgcaagctccgcctcctggggttcacgccattctcctgtctcagcctcccgagtagctggaactacaggcgcctgccaccacggctggctaatttttttgtatttttagtagagatggcgtttcaccgtgttagccaggatggtctcaatctccgg

SEQ ID NO: 124722 - DNA, 1122 bp, Homo sapiens
attgtcagggtgtgtggggttgaaaagagcccctggtgatttagacataccttgccttccatctcttcaaattgagaaacacagctcttcacagaatccatgggcatctgggaacatttacatctcttacttttcaattaaattttgaagggttatagaggcacactataggaacatggaattctgtcaattgatgagaacattggctcagccctctgaggctgagtcactgtttaattggattactgtgtggcccacttaaataaatactgttttggaatagaaaagttattttattttgaaattgtatgaacaagactttggagacatcctttaagattttcacgcacgtggatgttgcccttttgttgagagaggcagtgtcgaggagataagagaacagctggcattgcatttgtgtctgcaccaggctctgtggctttgggcagtgatttaacttctctggtaaagtaggacaaataagtcttgcactgcctgcctcgtcagctgtcatggaacagtgctttataaattacacaatatcagaaaacaaaagttacttcaaaaaaatttagtttctgtacattatggcccatagcacattatggcaaggatgtaattcatgaccatggaacagaacttttcactgttcacagatgactggtctctagaaaaatctaaaggagaatatttttataactttggagtaggagtggtctttgtaaggatggtgcaaagcctggaagccataaggaaaaccttcataaaattcattatctaataaaaagtattggcatagcaaccaccataagcaaaacaaacagattacaaaccagaaaaatatacttgaactttatgttatgtattaaggattaacttccctaatacaaaaagaactcctatgaaccaataaggaaaagaacaggaactctgtaagaaaatgattgaaagacataaacaatttgtataaaagaaaatagtggtgccgggcatggtggctcaagcctgtaatcccagcactttgggaggccgaggctgtcggatcacaaggtcaggcgttcgagaccagcctggccaatatggtgaaaccccgtctctactaaaaatacaaaaattagccag

SEQ ID NO: 124723 - DNA, 1025 bp, Homo sapiens
caggatgcttgcctcagccttgctgaactcatcttgtggggtgtatgagtgagcatttgctccagctgcacacagtccctttcatggagtcggacattcttgcccaagcgcctgctccctcctccataagggcactgggctctttccttggcacagggctcacttggtgtaactagactgttcctccctgtgtgatgtgacctgaagtgtgggctgaaaccccttttgaatgtatgtgtgcatgcgtgcatatctcccctgctctcctggatcatgatggctgcattctacttttagagattcatccctttaggataactgattttccccttcccaaatgcacatgcttcatactaggtataacagcagcttctaggcaactccagttattgacaccttagcgatgatatatccatcacttctttggcagggaatatcctgagtaggacaggccgaagtgggccccagagagttgcacaaaccatgaggaccccaccactgagggaggagatggggcactatggggagagccggcagggagggatgtgttgccattttggatgagcagcccctaaggttaatattaatatgtctaagatatgcttatgctgacccatggtaatattttggacttcctctaggaaagcatgcttttgatattcggaaactgactggaaactgactggtctggaactgatgaatacctttaacaaataaataatattagctaggatcctgtgatgctgggtactttgatgggaagcaacaagacagaacattttctcactccccaaaacctaaatttgttgttcctctctccctcctttcttcctccctttttcccctcccaccctccctccctccatttttctcagtctctgttatactcagttattaagtgttcctgtttgaaaaaatagttaagtttccataagaggcaatttacagtcttctgtaagcaaagaaaggcagctgggaatattgtcttcacacatacacaccaggtttcagagaaggctgttacc

SEQ ID NO: 124724 - DNA, 2165 bp, Homo sapiens
gcagttctgaagaatatttctttgtttatgatgccattacaggaatttgtaagtgtctgggttcgagatcctaggattcagaaggaggacttctggcattcttacattgactatgagatatgtattcatgtaagtatgtagtcagtagaaatagtaattttgagggacttttatgggatacattttatgggataaagttgacacttgtaaaagtttttctcattcaaataactgaatttgaatgattacaactaatgcttttatcttacatgaactagtaagatggttcctaaagttgaaaaattacttatttgaatcccttattgttcctttgttaatattaacattttaatgtttattgccttcacatgtgaagatgtgcacgcatctaaaatgcatgggtaaagagtacttatagctcattaatggcatttcttatgatctgctatagcatatttctggataatataatgcctgataaccttcaagtttgagaggatatagagttctttggaaaagagatgtgtggtgttttatatatagaatcagaaggtgggaaatggatatgtgcaattattgtgattaatttatctagaatctgagtaattaatgtaacgagtaagcaactagaaatgatgtgccttgcgtggatgctactgtatcacaatctcttgaaaatgttgtgtggtgtgtggccttctgtgaccatcttaaacaagggtaagcaaacttctctgtaaaggtagtaaatatcttcagtttgtgggccatacagtttctgtcgagactactcatttctgctgttgcaggtgaaaagcagccacagacagtgcataaatgaatgagcataattgtattccaataaaactttatgtgcaaagacaggtgtcagaccagatttggccctcaggctgtagtttattggccccgattttgaggataatactctttgcatctaaaccagatgcatatcagatgcaaactaaattagttcaactggggagcatagcaattgacccagattgtatccgtgacttcatagcacaagtgaagtaaaatttagccattatttaatcttcccattgtaaatagctaacttggtatattggacacccaaacaccagctgtagaacttttctttttttaaattctcctttcttctcttttttctttgaagtttccccaactttgaaaataaaagaaaaactcagaactgcttttttgattgtgttgtaaagccattccaggatatgccatgtattttgattctgttttggttttacttataagctcacactagagttgcattctgtgtggaaaattatgactatataagaataagcatttgaagtaaaatgaaatagttttagttgccttctaactttctgtaaaaaaattgtgcgtccttatcacacacttcatgataggcatgaaatttaattattcccaggaattaatgaaagtatagattctgctctgctctataaatagcctgatgtaaattcagaaatctccatctggagccagaaatgatgggttccacaaatactatttgatggtgtcctggcacttttctgaaatgctaataaattgacaatggataagccttggcttggtggacagcaaaaacaagcaaatagatttattagaggaacttaatcagttagtgatctcagtatcctctaatcttgaagagacttccacctgtcatacaattaaaagtggatggcagagctagggagttctggttggcttctcttagttgttaacccatagagctttggaggtagagaagctggtctttaacttgtttaaattaacctcaagggagatgatgtcacacaactctgggatcttaacatttacttggaattttaaattagtagaccctagagctgggtagccatcataaatactcccctgaacctgccctgcaaatgaaggacttatggatcgaccttagtctggtgtaggtaccaggtggatttttagttattgacaaccatggtggttgtgagcagagaaattaaagggaatttaaatggacccagcctgtgtgtgagatgtcaggaatccctgtggtggtctgggattctttagggagagggtaccgggaagataacctgctcaagccttgttaggggactagttctggtataacatgg

SEQ ID NO: 124725 - DNA, 1510 bp, Homo sapiens
gatgaagatttctgcaatgtctcataaagggtcatgaggaggtgtctctaagccccaaagtttcctccagcttacgtggatggtggtaaaatgcaacggatgaacctgagctcctacctgtcatttatatgttaggatttattttttatgatttattcttgaaagcagtgctcataggtgagtaggaggctccttcaggatgcagggagtggccaggtcatacctcaccctggggcaacactgcttatttccatcatcctggctgtcttcagggctgttatgttcctgggttatgtgcaagatttcagagtactggcataaatataaatatatgtttggtggtttaaatcctatttagagtgaatgttgagatcatattgtgaattatagatacaagaaatgcatttttttcctcaggtaagactcatttttctactttctctgtacagactaatagcatgtgttttacaatgaaaacatcctgtgtacgaagaagatatagagaattcgtgtggctgaggcagagactccaaagtaatgcgttgctggtgtaagtgatttagagtatactgtggagactttgtcattatattcagtatttaaaattgacgttcattaagatatataagatatgaaggatttttataggcttttgccttgattacaatatgtagctttagtttcttagctactgcatctgaatttaaaatttatcacttaaatttcaccaactttgatgggtataggccatgaaaggcctcagaaatgtttaaagatgggtttttctttaagctgacttcctgatacccttattatataactatataatgtataatcataattatagaataactgtgtgataataatcatcatacataatttgccttcactttgagggatttctgtaacagaagcaccttgagttaatcatttaaaaacattgttttttctttctcctaagacaactgccagaacttccatctaaaaacctgtttttcaacatgaacaatcgccagcacgtggatcagcgtcgccagggtctggaagatttcctcagaaagtgagtgtccagaaacttttgtggccagacaaggggtgtgagcaagtgctttacaagagctgcatggtggtgtggggaagagtgttcctgtttctgaaatgcaaataatctgcactagagcaaaacccagtggcccatttcctatattagagcaccatcttgtggctcacatcatctcgtacatatttgggaccaagtcttctagaaagaaaacaatgaacaaattgaattaaatatctggtcctttaagctgtcaagcagatctaaattacctgggcgtttagctgacaaaagtaaaaatttgccaggaaacaaatatgcctaatcatcaaaaggcacttcttaaaaactgtctttctttacaatgcttagaatttacagaccaaaatcagctcagtaacgggctgctaatatccttctgggttcctctaatagtttaacgctgatctt

SEQ ID NO: 124726 - DNA, 1944 bp, Homo sapiens
gaaagttataggctaaaaaatataaactcagtaagtctctaactatgaaaaatggaattcctactaatttttaggtttgaatgggattttcaatttaggtttgaatagatttgttcatgactgggagccgcttcccttctttactgaattcatcccattaatacaactacatttaccctacagtttagactttagtatcatggttttgtatttcttcaaatattaaggaatattaaagattttttacaaaaggctagtgttgaaccatgacagctagttttacacacacacgatttttatgtctttgtgttcaatagagggcaccacagcatagatcatgaatgtcttcaatgaagatttgtaggttttattttttcttatagtaagagctaaacaggctgagttaattttttttttctacatcaaactgctaaccttccatgtactatgcagttatgtatatatatcattgtattgggttcagcagacccaggacatccttagttaggatgaaatgattttgcatagctatatattctcagctaaaccagcatataatacatctaataaaatcatgttgaggaaaactgtgcttttcaactgtgtccagtttagggaaaaaaaacagattttgctttgtttagtctaaaactgttatggggaaaggaataacttctgatttgcactataaatatctttctagaaattcttttaaaatcctagaggctattttttattccttttataaaggtttgaaaatcatatactttttaaatggaggtttctacaaatgacattttattgactgttttacaaagtactctttatattaggtttgaaattgattttgggctattagatttgtttgtggaaaatatggcacaaacatgactaaggaaaaaatagtatttaatattatgatggtggcagtcacagccctctctgatagtaagccaaatagtactcaaaataaattaattatgctcacctaaccagatgggaaaacactctcaaaaattttcattttaaatttcagaatgaactatctgactaaaataagcatataaatacatttaaaaattatttttgcttatttaaaactcatggagtatggtggcatgaatttagccagagaaacagaggagattccaaaaaccaaaactgtacctagccgactcactggtttgaactctaggcctgggggagtgttcagatgtcccctccccagccacatctttctggctctttggaattgtgagctgggtgagcctggctccttctcttttcatctgtgtgtcctccagatggcagtattgagcagaaaaagaaaacgctgggaaataatgagtctaatgtacagtaaaattggaaattgaattatagctcaagaaaaaggacagtagccttgaggtcccgatcaacctggactctgatcacttttgtttgctgtacccatgtgttaagttactagcaagttaataacaacacgtgagcagttcaaggctcagtagaattgcttcagacatgaaataaagctaaaatgaatttgtgtccaatatcattggcattagtgctcattactgttgtggtgtaatgcctcaaaccatctaaaatcaattttaaagattacccattattttataaagaaaataaaacacatttccaacagaaacaaagccacgagtacaatcccatgaacagttccttgtacttatggcaggcaggaaaccgctgacagaggccacaggaaacactctgctcagacttcacagacttcacgatccaagttcgtattaatggattgttgctctataactcttctcttaatctgaagtatttaaaaacaagaatggtgaatatttgtaaatgtagaaaataaatctcaaagagtagtaagagggatttactacttagctacttgtacttggtaaattaatcattatc

SEQ ID NO: 124727 - DNA, 1530 bp, Homo sapiens
aaaaaagaaaatgatatagattatgattcagaaaggtatttccttgcattttgatttaatgtatatgtatttatataatacatagtatgcacatatgcacgtgtatagatatatatacacacttcacttttttgttgatataatactaagataatgaaaaaattaattgactgagattttattgagctgtgacagctcatcatagtagtcttcacacacacctccacactgaattaatgaatgcagtagaaattcaattatttgcattctgattatgtgactttcatttagtcagacttgaattattcgcgtttaaattatctagctaaaaaaatacccaactgcactccaaatggctaattaaaagtccaaatttcctgtctctctttgtgactggagataattaaagttctcctctgttactcaggctttgagtgtgttgtgaaaaccaatttcctctttttattattttccccctctcttcttttccagttcatcctctgggcttggacacagtagtgatgacagcagttcacatggatgtaaagtaaatacagctccgcaggaatcctgaaaaataattctaatgttactatcttaggaatagcaaattatgtccagtcatagagaagaaagcttcataataatacattcttacctaaagctcactgtcatgatgttaggtatttaaattcttaaagatgttgggttgtttattagtggtatttttatgttgtcttattttaggtaagcttctgtgtaaagctaaaaatcctgtgaatacaatactatcctttacaggcagacattattggtaaacaagatcttgccctccaatgaaatgacttacatgttttaaaaaaccgagttggttttattgaatttaaaaagataggtaactaagtagcatttaaaatcaagatagagcattccttcttgtatcagtggggcagtgttaccataaacacggtgtatatgttgttaaaccctatgaagagtaacagtgtagaccagactgcctctctcagatatgtgcctgatattttgtggatacctcccctgcactggcaaaacactatgcttttgggtgttagactgaaatattttaagagtatttaacctttccagtattctgtttcacgcttagatggaaatgtatcttatgaatagagacatattaaaataatgtttacatcttagaaaaaacatagatagtgctagtaatattacttataactgtaatatatagattcagaaatacattttcattatccaaaatcagcttcaacaaatggtttctggagacaaataatttgttttcattatcattgtataatcaggttaatgatttattttttgactaaatgtgcaatttcttatcactagataactttcagtatcagtggtggttacttattacttaaatcagaggaaggattttataaagattaataaatttaattttaccaataaatattcccataatttagaaaaggatgtcgacttgctaatttcagaaataattattca

SEQ ID NO: 124728 - DNA, 1046 bp, Homo sapiens
tttcttaccatgctaatatgtaaagttcatgccatccaggcatttaagagcgatcctcatcccttcagcaatatgtatttgagttcacactatttctgttttacagcagttttgaaaaacacatactatgccaccaattgtcatattatttttagatgatgtaacatagccatcaaaattaatattatgtaatgcctaatacttagtatgtaaatgtcacgagatcatttttacattaaacgtgaaaaaaaatcaactttgccggatcacttattttatacaagagaatatattctgccttagacccaaactcagtgttttttattttttatgaggaaatttggtaaaacatggtttaatattagctatagttgtacatatttgaggcttttagccttggtttagttgtttcaatgtccacacactggcttcttaaaactgatttcttgcagctgagatatttagatgaacttcagttcccagtggttttcttgctttgtctcttatttttctctggcatattttttataaagctttctttaggaaaaagaaaataattactgatgtagctaacttgaatagatgtttatttaacactatttttaatgtgacttaaatgtaaagaattctaatcctggattctttatgattacaatacagcaaaactgcattttccctggctgattcttaaagggtaaactattcacctataaagccaacttacgtgttttgttgtagaactagatttatatataacccaaaggtgtcaacagcactgaacgtcaacaacctgttacttcggcttcttataaagtctcacttagaagaaagttacttaattctagttaaaatttcaagttttaaaaattactagggacaaacaagtatttatttttaagcagatactattccttaagatatgaagtatcttgccagtttttcaaacctagtccacattttattgaataattaaatacaaacaagtgatatgcagtataaagtaaaagaacaaagtttcttttatgacaattaagaagttaaacaac

SEQ ID NO: 124729 - DNA, 1036 bp, Homo sapiens
atgcacacgcttctgaaagatgattagatcagcacggtttaagataccccatatttttactggtagacaagagaagccggctatgtagagaatcctattttaatcctttcataaagacaagaatcttagatcttagggaaacttggcttattttcacaaatatgcacgttctgggttccactgcttatagaggacccggtactggggagcatgtgctctaaaacctgttttagaggtaaaacacaggtgctgacctgccctgggatccgtgcagtacaatcccagctctctgcatagcggtgtactgggagccctgtgctttcgtttaatttttttttaaacaaaagaaattacagaaaagtgcaaatttaacgtgtgacatttaacattttgccgtggcaggcagcctccacttaaatggggcctttctgcggaacaacaggagccaaaaggccttgtgtcatggagtaatgtaagacacaatctgggctgcaaacgcacaatgaatcgggaaggatttatgtaattaattgaccagtcttaacctgttatcgtgatgtaaggaatttggaactcattaatttgggctctgacagatttcatattagagctggcaaatatggattgagcctcttattcttgtagcagctggaatttccatgacagtgaggcttagtgaagaagacctattgctggagtcaaactgcctcttgctaatcagtagccctgctctgtattaaagggataatgaaagaaaaaaaaaaaggaaaaagcatattacctagttgggggagtggaaggggcttgtgttcattctgctagtacgtgggttgagctcaagcatttgtagctgaaccaaacattaattgcaatcatagagttaggtgatttctcaacaccttgagagaagagaaggtagaatggtgtcagggtcaggtttgatattatccaagttaaagagggattaaaagacagagcctctgaatttcatctgtgtgcacatagagactgtatgaagaaagaggtagaagtctta

SEQ ID NO: 124730 - DNA, 1046 bp, Homo sapiens
agttttcccttattgctgtactatgtgataaggttaatataacagctgccatacagatcattaatacagggagataagcaaagttgcatgctggaaacatttgcagggtatcatttgccttcttctgctgataaagaagccttaggtaacaaatacagatcacaggcactgaatatttaactttttagacagaaatcccaattgatctttcctaatatgttattattcataaatgctctttaaagttgggtactgactgctctcaaaatatgattttttaaaaaaaatttgtatgttacctaccttttcaagtttacagtcaaacgtaatttactttttaatatgacaaatagttataactcttgcaaaaacaaagatttccatgcccccctcttcattcttatttttcttttttgaaaattgtcttaaattcaaccaaattccaaagtaaagaattttccttttagttagtgataatgggatttgatctatcaatgaagtgctcagtataaagatttgtttttgattatcttgttaacaagtgatttctttagttttggctctatttaaatgaatgcataaagataaatgctagaaatttgcatcaatatattaatgttatccttcacattgagagcaaagagggagctagtatttgttattggtagtattatttcagtgagaaggcaatgaggataaacaattgataccagcaagacttggataactagtataaaccatgacaagggcgattaatagtgtatataaacacacttcaagtttgtatacatgatctcagctctcacctagtgatttctttgtatttttttaaagggtgatttgtaagttggcagttacaaggctatcaactcatgtgctgtgtgtactgtttatatattagaggtatggaatagacatactgaagtgtgatttaccggagagagtgttgatttggaaggatgtctggtgaatcaggttctggctctgtggctggcacgtacccaaaggcagttcccaacctctctggatgtcaatttcctcatcag

SEQ ID NO: 124731 - DNA, 1072 bp, Homo sapiens
tcttgagctccttggctcaagtgatcctttcatctcaacctcctaaaatgctgggattataggcatgagctgccaagcccagccaacttttttaaagaaatgaacttaaacatcatgagcatatatgttaatgtaatgttacattatttaaatcttaagtaagaatatttatttatccttgccgaattaatggattaaggatatttaacgatcagttactgacccagcaactccacttctaggactctatattagtgaaacagttgagcaagtgcataagtatgtatgttcagtatatgcggcattgtaaatcatgaaaaatctgagacagcttacgaatatattaataagggaatggataaatgagccaaaggacacctctaaagtggaacactacattgttgtttaaaagttgagctacaaatgtatgtgctgatgtgggcggtgtctttgatatgttgttgagtggaaaaagcagcctgcagcagtgtgtgtagagtgtgagaccatttctgagaacagtgggaactctctctccccacctcctctgtcttcgtaggaacacagaaaacagtctggaaggatacacaccggacaacctttgagtgtgaaggcatgggggaaataagacgaaagacctgatcttttgctttatatacctccatattatttgaatttagcttctccagtgtttatggacactatgagttaacttgacaacctgattaaataatttaaaaaggaaatttcatgtcacagaaaggattggatgaaaagagataaatgtagctacttgaaatttctaacaaagaagcgtggtttccttccattcggttaactctggcactcaaagaatttgtgtctctctatgaattttaacaaatagaacctcaaaatctgggcgcatatgctgtcaacccagagtctatgtcatcctgggagcggctgtggtcctcagttgatttcttggtgccgtatttcaaatcagctcataaattattaatagtacatgtgtaggtcagagacacactaaccctgacaatcatttcataatattctctctttagcatta

SEQ ID NO: 124732 - DNA, 1099 bp, Homo sapiens
agggcccagctctgtgtccagttcagtaaatgttttagatgattgaatggatgcctgggaggaagggaggtgtgctccccagcaaacaactgagtgaatgttttccaggggtgagtcaggagtgatctgtaagtgctatcctctactgctttgtcttctgctgtttttctttcattctttccctcctgcattgcttctcttatactcatttttaaaatacatctttctaaaatttttaaaaaaattttttaataattaaaaaaataaagatgggatcttgctaatttgcccaggctgatcttaaaatactgggcttaaggaatcctcctgcctcggcttcccaaagttctgggattacaggcatgagctactgcacccagccgatttttttgtgcacaaatttttagaaatacctgccatgcaggggtttgtatatttggggcatagatacccaggtaatacccccatcccagaacagttacttcagttgttctgtggatgataaatcagagacctacaatgtagatttctcttttatatgtctttattgcctatattaggattcattagttacaatgaaaaggagaggtagaaacaacataattcagtgttctgacacaaggctgtttcctctggtccacaggctaatttttttttttctacttagaattagaaactgatgatacttccactttttcccttaggaaaatgtttaaggatttagtgatcttactttgagggtaattctccaatgatgctgcctaaatgtttctcctttaatttcatcccaaggccaagctttaatgcttgaaatgattagttcacactgcaactaatttagaatttgagttaacacaaacacagtttgcatgtatattctcataagaaaggtttgaaataaccctttatctgcaaggtttcagtattaccaacatgcagcatttcatccaaatttgtcaccattttacaaacaaagggctcaagaaatcaaggccttttgaatcatcagggcctactaaattttttaaaagactaaatgcttatgatgcatgaataggtaatggaggcatttacaaatttcaatttttagtccattaat

SEQ ID NO: 124733 - DNA, 1049 bp, Homo sapiens
ttggcctcaactttctaatataaaaatatcactcctgctagagtaaaagcaggtgccattttgtagcttgaactgcaatttacttcttgtttgaggaaagtgtcacacaggtactctcaaaggagaaaattaatgacactagtgtatgctggttaaagacagctgctttcgtggaggagaaaattccaacaaataagcagattctcatctactaccctcccctcccagctcccatgggagtctatttagaaaaccttgtgttctttatcacatcaaatgtgatgataacagtttaagtcagactagtaatagtaatagctaacatttactgagtgtttactatttgtcatgctgtgcacttttcattcaattcttataacaaccctatgaagtaagttctgttattcattaccattttcccgattaggaaacaggctgaataatttgtccccaaagccttagggtagtgagttacctaaccaagcctcacaccagcctccttgccctgaattgaacactgttctgctgcgcagtactgtgatgaattaaaaccaaatgcttatttggattctttgcatataataggcacacaacaaatgcttgttgaccactgatgaggtcaccatttctagaaaataatctgaagcatgtgaaaagaatcatccaataattgacaattggatagctgaatttggctcactagtcaggaaagcataccatggttatcatatcagatccaaagcagctgatccgcaatggagacgaaacttttatgcaggaacacttgacgttccagtccagatgaaaataggaagtcaatcaaagcagcagagtccagagaggacaccaagccaaactgacccttttctaaggaccttttcccatccttcccacctcctccaatgtgaagcccagtaaagggaccagccaggggagccttgaagaggactgcaaatccagctgcttctgtctcaaatagttgttttttaggagatgggttttaattgattggtttaaacacataaaggattgttaacaaactgtaccat

SEQ ID NO: 124734 - DNA, 1030 bp, Homo sapiens
aagtgtggtaatgttcacctgcagtcccagctacttgggaggccaaggcacgagaattgcttgaacaaggtaggcagaggttgcagtgagccaagatcgcgccactgcactccagcctgggcgacagagtgagactccatctcagaaaaaaaaaaaaaaaaaaacagaatctcagtgtattctcaaagtaaaaaggcataaccaagcactctcttatcttgccttattgctatactatttacatcccactgcagaacagcagatttgaggcttttctatatacttctcagagcactgaaaagaaaggaagggtttgcagaggagagtgtagaaatcccagtggtagcatgtaccaacaggtgagtagaaaggtagtgttagcctgacatttgagttatactctgtgctgcctgagcaagatttgtagaatcatataattaccttttcatgtatatttgaaatcagaggtgtttaaaatacctatgagataccaatgtagccttaacatatgtcaaaatgcattgctggttagataattatttggactacacataaactcctaatattgaatcattacctatcaggtattatctttatggaacttttcaatatctttgctttataaagattctaaacatgtatctgagctggtaatattttaaaatctccattatttgtgtaaaactgtttataagcagtgtttgagagggtctgctttaccattaccccctcaatatcatgatcatccaatctcaaatgtgaaaaaaaaaaagaaatttgattttagggattgtgagtaaacaagtttatatagagagacattgtgaagttaaagttttcagaagttacatttgtgcagttcttaccttttcctcatatagtgccattgaaatagactgaaattatcttggcaaaagttagacaaccaaagacgactttagtggactggttttcaaaacttgagcagctgaaaagcaaaagccgttgtttcccatgacaatgtagcctttgtggatttgggtttgtgctt

SEQ ID NO: 124735 - DNA, 1736 bp, Homo sapiens
tattcttgaaacttgaaattcattttactttgtttgtatctcactacacataaataaatttgagataaaaatacattagtcaatctggcagacatatgagaccggttatggagtattcacaatgcctaaagcagtggtgtatctgtcaaaggaggaaaaagtgggagaaaaggaggtataggtttgtttatctcaagttgcaaagtaaatgcaaaagtgactcatcgaccactctgttttagaggtagattaatattttgcctttataccttgagatacttttatttcctattgatcttccactataagggtgactctaacagcacctttaaattccttctacctattctttatctaaggtagtttatggtcaataataaaggaataataaatgccttagggaaactattttaaaggaacctatttgtgaattattttttaagcagttttttggtattattagtgtttccgtattctctaatttatctgttaaagtgtgtatattagattttcttaagaaggggcacacatctatcaacattctaaatcattttaggtcatataagtttaagaaataagtagtttattgtaaaaaaaattattttatccttgctagatgataagcttcttgaaggcaaatataatagcttaaggatcctggctttaaccttctatagcctcttacacatgaaaggtatccccaggctctgtggagagagagagtgtccccgagagaaggcttcctgaggtagtttcattttctaggttttcatcatgagtgattgtttctgtgttctgtgcccaataataaacaggctttgtgttataccttaatttaaatcgttgcctaacagcattttaaagtgtccagaaacaaaaagatgaaaatgtttacatttgcagctcaagctcttttaactttataaatagaaataacatttctaagaagttgcatacaaacgacattgtacttacaccagtctaaaggttaatattgcatattgttttcaattaggaatacaatagatatggctggtgggtaggagaaatgaagggagccattggcttggtgcctaaagcctacataatggagatgtatgatatttgagagtcctgggtaagtacattttaatccaatattctgtaatagctcatatgttctcttggtctcttcgttatgagtctttgcctttttaaaagtctttagagttttctgataacacaaagattgtgccccgaaatcttttttgttttgtttgatctggtttaatttttaaaataagaatttttaaaataaaaactttatggaatttactttggaaatgaatagattatttagagaaagttcttttgatagtaaccagctgttttcccaaacttcctccttttcagtaaaataccactttttatggcctttctgaagagttgaattgacaaaatgttgagtaaaaatacatttttccttggctaaaagtgtaatttttttaagcaggaaaaatcaagtttcagctgaatcaaaaattaaaatgcagctttccctttctcctgcagaaaaggaaaattcttctgcttgtctgcaaatgctttggatttagaagcgtcatgaaagcacgagtgacagctcctaacctctccttgttttattaaacattacttatctttgactgttattttatgcagtcgctcattaaaatattcctctgatgtgaaattaaatgaaggatattaatgtaaat

SEQ ID NO: 124736 - DNA, 1029 bp, Homo sapiens
caataagcatcactacacctctggatcttgatagcattactgcaggaggagaaagcagctttgtgttagtaattacctaacattgtcagaagctgactgcaggcctctttctagtgataacagaataaccgcataatgtagctttatagcacatgattaatagaaaataattacacgtcctacaaagggatgcaatatttcttataaattgactagaatggtttcctgtagattaaaggactcttcattattttatcagtcctcctgaagtacagtcacttgcctatgttagcatttcagctgatgttaagagctgaataggtgaaggataccagatggcagacctccttgtacctgaaaccttgtgttccataaagattacatgatgcttcctaacatttcaaagatttagacaacagcctggtatggattgtctattttttgtttgctaagaagataaagtttgagagttttcctttttgttttttaaatgatccacttgtgactttatagaacaatactataattagtttgtggactgcaaaacaacattgtatcagttgcattattttccactgtaagtaatatatcattcataatcacatttgtttgggggtggaaaagaggaaaggcatagacaggcagattttctttttcagaaggaaaccttgtacaatattgaatgttcaggccaaagtttagaatactgtactccaagaagcattttcattccaatttataggctgcaaatggtttaattgggattcatgttgctcaggaggctcatacagagaatagtaatgataaaagtaaaaagctcctgtatttgcagtcttgtcaacactctaatggctgcagtgtaaatccataaatttgcctcctgtatttttacctcactatatttgatcataatgcattaatttcaaacaggaatataatttgcaattctttacaaatataaggtaatattctggtttttagttttaccttttctgatttaaatctgatattttagagtatttttatcaa

SEQ ID NO: 124737 - DNA, 1082 bp, Homo sapiens
ggagaatcacttgaacccgggaagtagaggttgcagtgagctgagattgtaccactgcactccagcctggtgacagagcatgactccatctcaaaaaaaaaaaaaaaaagaacaaccagttaaaattgtaataaaatgttatattcctcaaatacttgttctctttgggagaagataagattctctttggaagagcagggtggagacctgctcataataatcagattgccttatagtgcgtcccaaagtactctgtttttttgttgttgccataatactttgctataccaattagtgggcagggagtgggggagggaatgaaaaagtgtttattgagcatttacaatgtcctgttctaggtacttaatatgctttcacacatataattaatataataaccctgtgaagtagatgatgttataattttacagattaggaaactgatgtgcagtaaggttattatggaaattatctgaggatacgcagctattaagtgccttctccaggtatcaatacaggtctgaccctaaagccttttctctttctactttgctacggttaagtgggacttgattaggactttaacttttcttctatatcagaggttaattgtaattatcacatcccagttctaaacaacagcgaaccatgttattgacagtatcttttacataattaaatcttgtatagatggtcaaaattatttcattttctaatcaacaaatatttggtgaacactcatgcaaagtactattttgagcaggatccagaaaagccacaaactgttattcaaggagactgcaattaagtcgaagagaagaccaatgcataaaatagataatagcaataaaacacaatgtagggtatcagtgttgtagtcctggagaatcccagaagaaagggaagtcagtaaatactggagtaagtaagtaatgaaagattcataggaaatggaacttgaactggaactttatgtataaatggagtttattcatttaacaaatatgaatgcttattttctgtgtctattacatataaaacctagaagaacggctgtgctatggaaaggggtggatggctat

SEQ ID NO: 124738 - DNA, 1046 bp, Homo sapiens
cctcagcctcccaagtagctgagagtgtgccaccacacccagctaatttttgcatttttagtagagatggggtttcactgttctctggtcaggctggtctcgaactcctgacctcaggtgatctgcccgcctcggcctcccaaagtgctgggattagaggcatgagccactgcacccggcaagtgttttaattttgtaaatgtaatggcagaaaaacatttaactagcttggggattaggttgttttcatttaaaaatcactacagaaatatagttttatttaaaaattcaatatattattttctgttttgcaagaaagccttgatggaatgttagctgtgctcagtcaacctgggggtgatttatttattttaggcctcttttgaaagttatacaaatctaagcctttatttttttttttcttctggtgcaaatcaaatgttgcaataaagaaagaagagtaggcagatactgtgcccttcctccttccctttttaacattttccaattagcagctatcatgtgacccctggctgagatagcccctccttcaaagtgtccagcatttccttaggtttcacctttgaacctcactaataataaatctaaacaccgcctgccttaaaaggcaagccagtactttttgctttatacttctattcacatagggttgctgctgtttttttatgtgttaaaattaaaagcttcagtagttcagtggagatttggaaatctcttttttctcttaaaaaatggatcaaatttataatgactgatgaaagcagaatttgtgattttaatgacagttgtattgttagtgaattaacaattggtttcagattcatttgatgggggaaaatcatatttgagatagaaaacctgtatttccttaagaaattgggttgtttaaaataatgctaaatatttttgttagttttcatttcatttttattaccactaaataaaacaggaacataatattatagctaacagtattttcctagaaccatgtttttgaaattttatcattttaatagcaggatcca

SEQ ID NO: 124739 - DNA, 1879 bp, Homo sapiens
ttgagctgtgtcttgactcccagaccagtgcttttccctttgttttctttcctgtgctccttctttccttccttccttccttccttccttccttccatccatccatcataaagcacctgcagtgtgccaggacccactctgacaactgtgataaaataaataaagccaactgtgataattgctagttagggtgcccaaagctaaggctggtcacttatttctctcagtcttctgctcattagcatgggtttttgttactgttgttcccagaaagatgttttaagttcttggacgctatagatagtcacatcacaactcttgattaagcctgttattaagcattaaattgtcctgagttaagataacagctttttggttaactacttaataaagaaatcaaactgattagtttcagctcctgtcaagaaactttcttggaatcattcctaaatttatatagctcacagtctttttaaaaccaatttagctgcaattgtgtataaaactaaaacgttgattagatttcacttgcaagttcagattataggagtgagtggcatatagctattatactccttttgtaaatatgaaatttataaagcccatgtggatctatttgtaaaaccctctttatgaatcaggttgtctttgttgctgaaagcctgggtagagcaccggcttccagaactggctgtgaaacaagccaccataggcatctcttgtttctactgttgcctcaggaaataattttcagttaacatgaaattaaaagtataatcataggtgtgtatcatacttttaggattccgaaggaggcagttcctgttttgtggagactaattttatttgtgaagcctgattagagaacaaaggttaaaggtgttccagcccatgggaagcacatacttccatctaacatttttaaatgctattatttgggagagagctgatcgaaagtacttcctctgccagtgttttgcaaggcttgaagtttcaccatcatgatcatatttattaagggccttctagagatgtgtaatttacctggggttcattttggagtttgaaaaaagagccaagaaagaagaccctgttcgccagcatgttattacctttggctgaataaggttcagtgttcatcgttactcagctgtggacctagtggaatcaacctggtaaatcttggtgaggataaaaaggagaagacatttagctttccttgatgagatttggacatattctgggctattgatgggtgtcttggctgcgagtagacaggttgctttgggttgagtatatgtttgtctttgaagacttacttccttaccttccttcagacaaattcagctaggaatctcttgagactttctagtagtctttattgacttggccttccagttttattgaaactttggcaaactcagactgtaagttaataccataaattcatttaatatgtgaataactgcaattttgaatgcttgatattattacaaattaagtacaattagtatagaaaccactagcatttttaggtgcctcgcagtgtgtttaattgagtttctcagagttatattaagattttgtggtgatgggatgaaattttacctttctgtttttttttacgccatctagtggctcagaatgagtggtgcaggtaattgcagctgttgtacacaatcaaaatggtgtcataaattcaactttaaatccagctatgggttattactttcctattccatgtcaataaaatattagcattaatcatgaaaaactttgttcatcattctgaattaaatatagaaattgtatatataaggaagaatacattttaaggattctaaaatagtatttgtagagatacaggaaatgtgtactt

SEQ ID NO: 124740 - DNA, 1051 bp, Homo sapiens
tcttcctccttctctctccactcccattgtcccttgtttttttaattcttagaaaacaagagacaaaatttaatagagggattttactaggttgtatattttctagtccatctttattttcttataagcaaaaagtagcattctatttgctaaatattcagactccatattattcagattctcttttttttggctttaaaatatttcttatattaaagagaattttaaaattttctagtaaacctaacactttgtataaatcacaaaaaatgtgtaataagatgaacaccctaatgacatgctaatctgactagttgtgttggaatcaccaaaaagcctgctgtttgagagccatgtaacaatactgagatgacaaccctggtccagcctgtgtctccacagttatcccctcagaattcaaagatgacattccagtgatggaagttgttagcacgtatatattctgcctggctagtgaacacacggacatcttattgatattacttgcattctttttgtgttaactcatcaaaactcaattatcatgaaattgaaaacaggaaacagttcttagtgtaacaaaagcgtctagtgtgtttagctgtgttccgtgtttcaggagatctgcactgtataagtgacaaagcatttattacccatttattgtggtcttacagagtggaaagtgctaaataatcaatcagttaatggtctgtatggcagtttgagcacatcacatccattgtgcttatgctgttagaaggatgagctgatactccagtgtatgttgcatgtttatttagagcctaatgtcctaaaccggggctgacaaaaatcggttgaaaaatgcagcttcaacactggcaatttcaaagttgctaaaaattttcaaagataactttggctttgggtacaaatgtccctaaagaaaattgctgcaattactctttataccgtttccacgttgttgtctttcattaaccagctctagggtttagtattttttttttaattttggttccttagttttggttttatatttgtacattag

SEQ ID NO: 124741 - DNA, 1035 bp, Homo sapiens
tttaaaagcaggagtaaaaacattgttttaatctttcacaggctggctaattaatttttttctttcttacctttttttaatcattcatgcttctcaggacaagaaacataatgtagtttttttttgtaatttttaaaatatagatcatgatgtggatagaataggaaaattaatccatgtagtaaagccaactaaacatacttaatttgtgctttaaaatgtatgtttatgatatttgcctcatcccatctttaaaaatacatatctcaactggattatttttcagtgtttaggggtgaacagtgttaacttttgcaaacctgcgcttttgaggctgtcggtgcttaattttttgtgtatgtttagctacactttaaattttaaaaagtaagctagaggagattgctgccctttaaggaacaagactcttcctgatttttgtgtccagatttcatatcaagaattcaaacattacttccctgagactaaggctaataaacatatactgccagggttttttttccccctacttacgattttttctgctttatagctagtattgcatgctgaaatagatagactagtaaatcatacatgtatgtagctgtgtgacataaacaaattattctttaacagagctctcatacgggacacaaaaatgaggttggtctttgggtaacatcatcatcaagattatagaaagcacagttgaaaatgcatctttttcccatattgccaaatcactagctctgttgcctctttacagcagtgagatttaatgaaatgctcatgatgcacatctagggagagatgcatcttgcacacggtgggggtctctcttcccctcatgtgctcctgtaactcccattagtgttaatgggagtttcagcaagcgtatcgaggggaagagagaccccaaagtgataaggattatgtgttagaaatcaccatatacttttcttttccttctttctctcccctcccctttgagaatctattgaataaaaactattgtaagagaatctgaaaaaaagg

SEQ ID NO: 124742 - DNA, 1591 bp, Homo sapiens
ggacagtttatagatacaacatgcagttgctgtcaaacctataagaatgtaatatagacatctgtgtatactttgtgcttgagcagaacagacttctgccattcagagactaacaggggacaacaagttgcccaggggactggcaatgtagacatctctgaaaaggtcaacttgacacaggctctgacagtcgacccacagctctgtcttctttgataaaaatcagataaacttaagactgctaattgatctgcagcctgtttaaatgttggccatgcatatcttcattgcatatgattaacacagaaagcaaatgaattgggtaagaaatgccagagtccagtgacagcagcttaaaaattggaaaaggacactagtggcctaaaaggctaggaaggatgttccccttatccatttccacttggcacatatccccaagtactaattatgaatgagactggaaaaataattgcacacactctgtacaaaatcacatgatacggacaacttttcttgcttgttgttatttccaaatagcaggagataaaccatatctgtagtgcaagcatgaggttagttttgataaaccagcaattattttacacggaaagaagagaaagactgccttcttatcaggactttacacctcttcatagccacatgtcagctggggcaaggtctgccatatcatctctgtgtcttgcaaaaagctagagttagggtcaccttcccctctctgatatgtccatacatcactctttcaagctgtcaaggccgggtggacaagaagtgtgtgttcaggaagtagctttccagagtccttcctactgtgacatgtggaaaggaaacagaggcctgattctagacctggacaggaaagcagaagtaggttgctacaaaaggttttggttagtgttttttcagaaaggaagcgagaacaaaatctttacatgttagcactctagtcctataaaatgaagctataaaacactgaggcttagtgaaaccttgaggactatgttcaatagtagtttaagtatatatgttttcggtttatgtatcatgaaacttctgccaaaaatatgtagttttctttttaagaaaatttcagtgcaggtatagaaagtggatacatacagatggttcttccacagatacaaatattttggcttaaagcaattgtatttttcaaaagcccttttaaagtaaacatctcccaaatttttgcctttgagggtaggaaaaaaaatcagttttcctcaaaggaatgcatcaaatagatctagcctttcatgcaatggctataaaacactacaataattcttatctttagtgacatgaaattcttttcaagcaacagttttaatgcttttgcatagaagtgacctttgctcttccctaggctgtcaaagatgtaacactagaagtttgtttgccatgcagggcagtgagttgacaagggtattactatcttgctgagcatcacatgacatgaacttctaaccttactcaagaatgttatatatatttcacattgactgattttactaaaccccccaccacagacttttctaatgtaaagtatgtaagc

SEQ ID NO: 124743 - DNA, 1348 bp, Homo sapiens
gcctattacactctctcatataccagatagcctcatttcacttctgttagcagcctgtgttttctttcagaaactaccttacttctcagttcttcctggaaacctagcctgataaggtgaaggtcatctgtacccataataaaatatcccatctccctatgttttatacttataagtataaaagacagtaacccaacacatgtagatatacatgtctagacactttgtgaatttgagcctaggtttttattttatactttctaagagctcagcattaatttaaaagtattctgcagagatcatctaatattctaataaatcaactgaaaaagaatactaaagaaaatgaaacatgaaatgagaaaagcaaaaagaaaacacccaatttttatgtaagcaattcaattattcatgcaacaaatatttattaggcagctattacatgtcaggcactgtgctagacactggagatacagtgttgaccaatatgactcagaatttattaattagaaataaatataacaaatgataagaaatggttatgaaaagaggccgaagagagactgatgaagaacaaagatccaagccaagtctatggcagtaaatgagatacctaaaagggcttgtctgttcagtgctactcatacccagtaagaaatatgtggttctgaacaccacctatagaacatactgaagatgaaagtaaaaggattaaggttggggagtttactaaatggagatccttttgaaaaatgtttaggtggggtaactattggtatatacggaagagaccagattatagcacattcaatgttatagggaaacgggagttcatattcatgaagagatttaagaaagagttaataagaaaaagactttgaaaaacaccccccaaatcccttcaacatttaaacccattttttttgcccctacaataataaaaaaagactttccaaaggaagtggtggaagaaaccccattgctcaagacattaaaaaccagatggtccaaagccccagcaaacattcacgtgggatcaatccttcacccagtgaaagcaaagagatgggaccagtgtaataatgtgttttgaatctctagcttagaaatgctatgaaaataacaattcacattgccttggacttttccttaatgtcttagctcttctctgtgctccttcagctttcagggttgacttctgttagagctggccacacaggaatttgcctgtttacttggaagtctcttctgctaggtccatgtattgtgagcttatcaggttttctccttacctctatgagagtgctgtatgccctgggttctggaagtgtttttcttaagtgcttct

SEQ ID NO: 124744 - DNA, 1126 bp, Homo sapiens
tcctcaggcctccctaaccatgctaaactgtgagtcaattaaacctctttcctttataaatttgccagtcttgggtatgtctttattagcagagtcagaacagactaatacagatggtttcagctctaaaatctgcttagagggttatccgaagttataaaaaaaaatgaaatcattcataaaatagggtcactacacacatataatatttattatttttatctttgctgaatataaatgtgtctttgctgaatatttgttcatagtattctttatgttgtttcataatatagtatgaagctttggaatacagttctgcctgtcttgtagcttttctctatgttgccattggcattgcaaattcctttcattacaagggatggcttaacacatactaaaccgaaaatatctgtgtgcacacaaaacatatatttccactggtggtgagataaaatgactcatttttgcaaattggagctacatcagtggttcccagccagggaagatattgaccccagagtatgtttggcaatgcctggagacacttttggttatcataactgggatgtgtgtgtgtgtgtgtgtgtgtgtgtgtgtgtgtgtgtgtgttacagatatgtggtgggtaagggccaaggatgctgttaaacgacctacaatgcacagggcaacccccacaacaaagaattgtctggcccaaacgtcaatagtgctgaggttgaaaaaccctggccacagggatgtaatagacaacttttggtttatcacctttttattcttatcacttgaattaataaagattcataacctaagctccatatgagttaattcatttttatggacacaggttttcttacatacatgaaactaggattacatagaatgtttctaggttttaagagatcagctggacttgcctatcacgtttccttcaaggagtagtattgaaattctatccatcttgtagaaatgagcaagccaggaagataaaaaatgaaggaagcattttctctattttcatgagctactatcttggaaggaagaggtttctaaaaataccttgtagatgtgtgaatacttgatttatcctattctgatagggttgttcttttgaggctgaaggaaa

SEQ ID NO: 124745 - DNA, 1799 bp, Homo sapiens
tgcctcgtatttctccttgcttgtagtatattgcactgtctcagaggaatgttgttgaactataaacaaaggccttttgaggcttcaagtcttcctgttgatattttagcatcaatatggaataaaaaagttttcttattccaaatgctcagacctagtttagtgtttacatgcctgtctgttatgtaacataaaattaattatctattagctacttgacttgcggccatgaggatcaatctaaaataaaaagacatctgaaatttaggaaacatatgaaaacatttaggaaattgtattactaatactctaggctgaaatgagcttttttggctattaaaaaatcagtagttagagaagaaaaaggtatcataagcaatataagcaagatttaactagtacatctcatgtagagaggccattttgctctgaatataacaatttaatgatgtaatgttaaacctttaaaattgatttcaaaaatacttaaaatgttccaaattaatgtacaaatgtcattttcaagacaatacagcataataccaagagtatggactttagaagaaaaaaatttaaattctggctgtaccattgactagcttagtgactttataagttaatttcttcatttataaaatggaaataatgtcattgggaggggtaggtgaagtgatttatggaaggctttcagcatagtgcttgatcccacaattaattgtaacatcaccatcatttttgttttattattgtatctggtgaattcttgcaagtgcttatgtggtggtacagtaatggttttctaaccaagtaaaaagtaataattttaacaatattataaatttaaggtataaaaactatgtatgcatctacatattgtattttactaccccagaagattagtataaaagtataattttatggggaatagtgatctgtgtatttcagttgtttagtggagctacatgtttattaaccccttcctttctggtttaccctaaggaaatggcatctgctgtagcatcagttatcctcaagtagggaagaatattccctggctgcttgtttttggtcacaccatatcattaatacaattattttagtatttaaaaatgtttaaaagaacttgtgagaatgtatactcataaaatggaagagtggaatacatttaaacacgatattactgccattacatccttttaaaaccctgcaatgaatgtgttacattacaattgttgaaataactgttaagttctgtattttttcaacttggctgttctctccccacccctaaagaaaaaaaaaattgatcaggaataaagaccagatattcatagttattttcataacaaagacctaaggaaggtctgagtagcttgaaattttaaaaatatgaaacatcttttattttttcttactggagatattattcttcattcttccttgcccccctcctcacccaccctcacacataattgttggaagtaactggttactttttaagtagtgttacttcttgctgtggtactgggagaaatttaagctgccctggaatttcttttcccctgcttgggatccccagttgctctgcaaagtgatcgagcttgatggagcctgcacctgtgccccgggaaggaagccgttgtaggcagctgtggaatgtctagttcccttcttccccaatgtaactgagagctgcttcaacatctgcacggttcagcaagtttgtcaagtttgtgccaacggctacagaggggatttttctagtaaaggccctaaaggtgtctcagagttagaggttt

SEQ ID NO: 124746 - DNA, 1050 bp, Homo sapiens
tatctgctgagtgagcttttcaaggtatatctgatctgattttccacaatgttagttctactttttatcacttctaatacatcatttgttttgctgctgcattttccacttccttatacagcatatttgttccttattttgccagtttcattttaatttctacttgtctcagcctttcctctttttattttatattacattgtttcatctttcatctctttcagaatctgtttacttttataaaatatgcaaagcagttggctaaagtttaccttcatttctcctacttcgcttgtgctttctacttctcaagtgctatgttatgtttctgttttacataatatttttatggcatctgtatttgctgttcctcttttcttatcctcgaacaagtacatgtctatgaaatctgagatgcttacctataaattggatttgtggcttctctctggttcatctcagtagaggctgatactgtcctcctcttggactgtatcagaagttctgatacatagccccatagcatatttctagggggtttggctaaaatgaatctgctagtctgagttggggttgcctaattttgctgcctaattgtcttatttctagattattagataatctggcccagaaagatctgttcccctcagctcttccaaactaaatctttatagtgctgattttatatctccaggtgtagactcccactcctcatgcatttccacctgcattcaagttacattgatgagaattttagaccgaaattggaggtagaaggcataggttttaggtcagatggacctggtgagtggagcgattgaacccttgcgcagcaagggagcagctttcctctaaatctggtccctgaaatttctctttcttctggagagtttaaggaactctctcaaaattgtccaatatggctttgatattttgcctcacattacttccacttttcgtagtgaacattaagttccttttgcaatttagtagatcattgggaaggtggcgcgaaagatctgataaggtgttctagcttttatctcggca

SEQ ID NO: 124747 - DNA, 1007 bp, Homo sapiens
cccccatcttgattaccaaatagtttgtatagaattgccggtacagcccttagacccagacaagaggagcccctgtactttggagggccctaattgggcccttttccagttgtgccctgtcccacaggttcagttcttggggtgaaggggaggtgcccaactcatgtctgcatctcatttcccctcacctcatcttctagactatattccagttcccagggtccctgaaatccctactgagatggccccaagcttgctcccagggcctgtatgggcctcttcaatggctctgtcttatggtagatggagcatattactgctgtgtatgtctataggcatgggggtaactatggattgtgtgcaggggactgtggacagggcatggaagggtgggcatctccacaagcctcctttgggtatcagatggagccagggtagggaaaaaagaaatggggatttcttaggagtccaacattctaaatttgagcccagtcttccttattattataatggtgtatatttgtcaagtttggaggatagaccatgttttggttaacagattcattagcttgatataaaacttcttaatatttagacatatgctctgtgggcctccatttatattcttgtgatatgccctttgatgtcaagggaaggtttgagtgttgtatttaaaactttgtttcctcggccgggcgcgatggctcatgcctgtaatcccagcactttgggaggccgaggcaggtggatcacgaggtcaggagatcgagaccatcctggctaacatggtgaaaccccatctctactaaaaatacaaaaaattagcccggtgtggtggcgggcgcctgtagtcccagctactcgggaggctgaggcaggagaatggtgtgaacccaggaggtggagcttgcagtgagccgagatcgcgccactgcactccagcctggacaacagagtgagtcttaaaaaaaaacaaacaaaaaaacactctgtttcctcacaggatc

SEQ ID NO: 124748 - DNA, 1058 bp, Homo sapiens
ttataaatcctactagaatagaaggtttttggacatcagatattattgtgaacttaactatgtaataaaaatgtttgagctaaaaatttttttaacctaaaaatctttaccttgaaatttttagatacgtaaattaagctttcttatgttcattatgtcagaatatattactataatggaaaaagaatgttttcctactttccaaattaaactttaataaatgaaaagtctatatactctaacagagtagaacaaatacattgtggtcttggattttgctagtgatacttaactaatggttcatactgtatttgaagtgtctgctgccattttgtggcattagctcacagagtattatactgtttctacatcaatggtagatgtgcttcttagtgcggagtcattttacattctgtttataattattccgaagagactatgttcagaaaattgtcagtctattttgtataccatagaactttgcgattaatttgtgtgtgtgtgtgtgcgcacgtgtgtatctgtgtatacatgtatatggtattaagcatataattaggggggagtgggatttaggatttggaaaaaattacaagaaatttacatgaatagaatttcagtttttcaacttacacacttgattagtgctagagttgcattttgtgctcatagtaacaaaaagtcagctttcttacctgatttttcttttgagctattataaaggggtataagattaatacattgtttggtgtttatatgctcctttattttcagttagaacagagccaatttaaattctgacagttttgggttatttaatttatgacatatttacatttcttaatttgtaatgtaagaaaaataagctaattattacttggatttatatactagttttttttttccttcagaatgctaagtgctttctgatttctcttataacatttttttctttttcttttttttcttaaccactgcgaagatgaagggatagaaaggttctttggcttaagatcacagccagtggcacagctgttgtaagaaaccaggacttgctt

SEQ ID NO: 124749 - DNA, 1052 bp, Homo sapiens
attgaaaagacattgcctgcagggaaatcatttaattgaactaaagtgcctttatttctgtagatcttggaacagctcactcactcttattttcagattagataatttatatcagataattttttcagctctataaatgataaaatattaagaaaagtaatcttctttttaagatattttgatgtttcatagttttccatttatatctgagttagaatttatggttcttaaaatgcaaaatcttatttttcaaataaaagtttttttgttcattagactaaattattaatgtgtttgggatacacaggtcagtggctccaaaataaatgtatgtgagatatatagaaatgagtcaacttcttttactcaagatcttttctcactgtcctttttgtttttagatcaggtttatcaggtataatttacatacaataaaattcatcctttaaaagtgaacaatgtgatgagttttggtagctatatgcagctgggtaaccacttgcacagtcatgataagatatagaacatttccagcaccccaaaaagttcccttgtgctcctttgccatcagtaccctgcctccacacccagcccctggcaaccacttatctgatttctgctcctgtagttttgccttttccagaaggtcatatcaatagtattatacaatatgtagccagagaaatctggcttcttatacttagcatgatgcttttacaattcatccatgttgtttcatacctctgtagttccttcctttattgttgagtagtgttctgttgtatggatgtatcacaacatatttttctactcactaatgatggatgttttaattcttttcagttttgactaataggaataaaactactgtaagtgttggtgtacaagactttttgaaggccatgttttcaaatctctatggagtggaattgctgtatcctatgatacatgtttttatcagaaactcccaaaatgttttccgcaatagctataccattttgcatgcccaccagcaatgaaaataacagttgctttgcattttcacctttctt

SEQ ID NO: 124750 - DNA, 1041 bp, Homo sapiens
tctgcatatgaagcagttcattttgcaagtatttatcatatttgattgcatttatttttaatggtacatgataaacgtcttttagaaagttttaaagtagttattttagaacacaataaacatcttttacaaggccctttagaggttttcattcatataaaagtgtttctcttgagtttaaatatttaattagaatctgttaatctatgttgcattataataatggcaggatactgatgtgttggaaatatttacactgaatctttttttttttttttttttgctggtgtaagggtgtttgaagttcctaaagagtgatttcgctgggattattttaataccaccatattagaagcctgctaactacaaactggactttacagaatattagataaaatatacagctaaattgctgtgatttggttgtgatgtgatttcatttaaagtatgtaaagaagaggagcagtaaatatctctctgtaagaggagctaaatcagatgtcagtgaaatgattcatgtgccaactggaatagttaacatgcattttattctactgtctagcaggaggaggtgggctatagaaaatgaattctccactaaataatttacaacaattatatcaaattttaataatgagctaagaaggcatacatatgattcatgttctcacagtttcctacattagagattaattgtgcttttgttaaacaaaaatgtactcttataaatatttttaattagtaaatcatgattagttttatatttatagagtagcatcgtttgatcaatttttagctgtagcttcatatgaagctaaaatatcacagctaaatctgttgtctcaaatgccagctcatgagaatttgctcctaatatcaagaaacgccctgaattgtttgttggctttatcttaactcaaatatgtaaaggggacagtagaacatttttctttcgaatcacagagagttcagtgacctttctgtggcaaattacatagaaagaaaatatttatattcatttaaaataacctctgtgaagaa

SEQ ID NO: 124751 - DNA, 1064 bp, Homo sapiens
tagggataattaatagtatttcaaaagattgtagtagggataggtacataggacatgccaatgttagctcttggttactgtaatgtcacaagatgaccaagggatggaataattgacttgattttagtacatattttctttggaatttttatccatgtttgaacataagtagtttaatttgtgttggacaatattttatttaatcatatcatattgtgagtagctaaaagataactgattatttttatgatttaatattcaactttttgctaataaatatggcaggcatttttacgtggtggttcataaatgtcatgacctgtgtgttgacctatgttaaatttctgtgatcttttttatttgggtgaatcgtatttagcttcctgtctgttagatagtaggaaagtaatgaaacaatagcatatgagaatttgatcaaaatgaaccttaatcctgagaagcattaactggattattttgttagaaatatgccaatggatttaaaatgtagataatcttgaaatttcaaatgatttcattctttggttggttgtttacctacttgatgaccaaaaaagccaagatatgtagttactgtcacattaaattcagaaaatattttataaataaagcttcattttaaatgtactaggaggtaacttttgagaaaacttattagtagatactgttttacaagtggaaggattatgttttgtgacaattattaacagttttaaaaatcaagttcttaaatatttgattttttaagagataagatctcacaatattgcccaggctggaatagtggctattcacaggtacaatcatagtgcactacagccttgagttcttgggctcaagcaatattcctgcctcagccacccaagtagctgggactataggcatgtgccagtgcgccaggcttatatttgatttttttaaattttctgagcacttttattttaacttttatgaataatttcaaacatacagacatagaatattataagaaaacttacatgtatccatatctcagcttgaacagttatcacctcgtagacagt

SEQ ID NO: 124752 - DNA, 1018 bp, Homo sapiens
ctgtttttgatactttcacattttcttctaagaatatcattattaaaattaatttttaaactaccacttggacatttaatattcactctaaaatatcatctcaatgtatcagtttttctctcttcaacttagattttgtgtgtgttctctttcctttgatgaataaatttgcttcattatgtgacctcagtccaataatatattaattataaaaaagataatgcatttaacaataagcataaccgaattagcacaggtcaccaaaaggccttttgtcaaatcagattgttgttttgtccttttgacttttaccttatggaaggcactaagaaagtatctaaacttcaatgggttataaactctaaacatgatatgtatttttcataatgctaatgtaattttcaaggtactgaaaaggtcaaacctgcacatctctatgtgcattctaagtctgtcttttgctttaatatttatttttctctattcctctggttcaaaagttcactcagttcccaaatggccacctaattttccagttattcccccaagccatatgtgttttggtttctttatggtttattaggtactgtaggaaagcagcataagttatatcttctaatgaaattcaagcacacttcagtgatgcttcgacttgattgctggtagcaattaaatcatagccaaggagaataatgcataatcttacaaggtccaggcaccgtatagaaattgaatggggatgaaaacaacaaaaagaaagtttccaaaccctgccaggtacgttgttttcagcctgcctttttttttttattggccaactgcctgattgatagcaaaatcataacttgctgcatgctaacaggcagagttcacttgtaggttattgtgagctgataaagggttagatgcagttttgattttcgcattggaccttggtacaccagattaatggaatttcaatgagagactagagtagccacagctttgtcagagaaacagatggagattctatagtcat

SEQ ID NO: 124753 - DNA, 1074 bp, Homo sapiens
gactttttgtgtgaaacacattttccctatttaggaagccattctcagacacaggtccatgatagattcacttgggcaatgctttgtatagtctatcatttttactgtttattgttaaagttattgaaattgattataagatggaaagtgtaataaagagaagttaggagaaatacattcttatttctcttgtttccataacaaaaaccaagaagtaaatcaaatcatactttacattctttaaactagtcatattaggttgaaaaaaaagaataataaatgtaactttaaatctcaacctaagagaggtaatggcctccctaccattctacaaaggagagactagactctgataaaatcttatgatttgtcttcccaaaagtagatcctccagttcaaagatatatgtatatatccctataactgaagctaactgcctttcttatgttcttcaaaattagcttaggggcactgaataagtattttcccacaggcctaggtttaagagaagctaaaagagcaccgaagaaaaatagaaagtaagccaaacacaatttacttttctcagcctctcatcttcatttttatttggctttcataggcatgtggaagaaagattatatttatacttaggcattatattagctatctattgctgaataacaaaattgagtagcttaaaacaaacagtatctcacagtttctggtggttaggaatacatgagcagcttagctagatgactctggctcagagtctctcataagaactgcagtcacctgaagacttgaccatggctagagaatctgatttgatgatggctcatctacaggactgctgactagagtcctccattcctctttgtctgttagaaaaaagcctcacttgttcacaacatggacttctccataaggctgcatgagtatcctcatgatatgacaactggcttcccaaagcaattaatccacaagacagagcaaccaagacagaagctgcaatatctttatgacttaatttcaaaagtgacatgactttactgctgccatatttaattggtaacacagaccaagcctgct

SEQ ID NO: 124754 - DNA, 1390 bp, Homo sapiens
tgctctccagttggtgggaaatttgtactagaaataaggaactcagcatctcactcaccttagtttgtccttcaccagcccgtctttctctttctgagagcctttgtctccctctcttcatgtccaacaagcagagaaaaattaaagtggcaccaggaaatttttctagcctctatatccaaataacctcttaaaaacacacttgatttacaactacaacatatgcaactgagtatctaaactgtaaatcgaatgtaaccattgttcctttggacatttccttaatttaatgagtgataaatacaccctttaaggactatcagttctaatcatttccaaatgactgatttccagtgtgctgctaccatacatttcctttatgtaaataaataaatatttctaaattgcttccattaatgtatagaaaaacatttgttatttatttgtaaatggtcatgggaggattataagcatattgccaaataaaattctataacaattctcttagtatattatgtttgaaaatgcaatatttatatagtagaaaccataatattaaaacccaacaagcttctataagtttgtcctttttaaatttaagctattaaaatatttttgaatatgaggagaaatcttttaatgccaattccatatcaaaggttaggattttgcatttatacagagcagagttcatgaactcctgctaatcatgttaacaatctaccaggtttctaaaggctcagcaggggttagaattagaaggctctgccatcaacatcaataacaggaacagtgacactcagaagagtttaccaccgtgctctcctaagagggttcagcacattcaggcactgtagcccataactgaaggaaatctatagttagtgattccaaaagggatctagagggacacattatttcagattttgttttaaatagtgagtcttaaaaattatatatgtgtgtaggtatacatattgtgtgcgtgctagtatatatacaatattatgatagtcatactttttatttgaaagagccttaccactcaaaaggattttgagttcaaatttttgttttggtaacaagaaagacgtgaatgaaatctcaaatgtttctctgggaggcaagaaaatggtttgaatccctaattcagaatgcagcctgttggacaaatgatgactcaaacaatctcatgtatcctgggcccaaggcaggtggcaaatcaattcagaaacacataaaaacaaagtgaatacctttgagtttacagatatacattaaaagctaatttcaaagtatttttaaaaataaactttccacaatatgaatttgttatctatggatttccacaggcaggaaaacatgtcctcttccacccctttttcaaatt

SEQ ID NO: 124755 - DNA, 2393 bp, Homo sapiens
aaccagtccctccaaaacaacacctgagtttatagctgaatatcagaagcaatattaagttttctttcttaaccacgcagatcagaaaatcttttgcaacattaacattttaaaatatcaggctgagcacagaggctcttgcctgtaatcccagcactttgggaggccaagatgagagcatcacttaagcccaggagctcaagaccagcctgggcaacatagggagaccccatttctacaaaaaataaaaaattagctaggtgtggtggcatgcaactatggtcctagctacttagcacgctgagatgggaggatcgcttgagacaaggaaattgaggctacagtgagccataatgatgccactgcactccagccttggcaacagagtgtgactctactcatctcaaaaaacaaaacaaaacaaaaaaaacttacatttcactgtcaatccctaaaatcacatttgtgtaacactggtgtaaattatatatttgcgtttttcagctatattccattttttaaagtacagtgatgatctgtgatagcttacaagctatttcttatttatcaacagtatgaaaccatgaatccatatcaaaactatgacataaaatcctacatatgtgattattaaccttagaatgcctaagatgaaactgttccttgatactgtcattaaaagaagcatttaataaagtactaaacatcacatgtttaaggtatttaatttcttttttaaactctttaccctttgctgaggttttttatttgacatgtgtccaaggtaaaaagacaaatctactcttttgctctttgataaggtgtcagagcttacttaaaggtttaggaatagagttgttgaactaatttttttgtactgcaagttatatatgagaattggtagcagtctgttgaaagaagtttacctgtggttaatagcacttatctcacttctatctatcatgccatcaatttctttattacaagagtttacctttgggcagctcatacaccagctgtcaatctgtcctcaccccgagactttgcagtaaaccaagctcaggtgtgttgaggtttcaccatgctagttgttttccttctttctccaactagaacaggtgtagtcaaaatgcaagcctctggcactccagatgtgccccatcacaagacagagccagaacttcttcattcctgcctcctagatcacaacttcgtatctggagattttctagatgttgcttcttgtcttaattttacctttcctgccccttcactgaagcattttaagtggtagctttaaaaagactaaaaaactccaatgtccatcaataaaggactggtccaataaagtatactccacgaaacgaattactataccttgtaaaaaatgagaaaggaaaaaatgaaaatgctctctaagtagtaatatggaaagatttccaagatacaataagttaaaaaagtaagatgcagaatagtattaccttttgtattttaaaaaaaatcataattgcttctatattcataaagaaacttgccaggagcagtggctcatgcctgtaatcccagcactttgggaggccgaggcggacagatcacgaggttagcagatcgagaccatcctggctaacacggtgaaatcccgtctctactaaaaatacaaaaaattagacagttgtggtggcgggcgcctatagtcccagctactcgagaggttgtggcaggagaatcgcttgaacccgagaggcggagcttgcagtgagccgagatcgcgccactgcactccagcctgagcgacagagcaagactcagtcttgaaaaaaaaaaagaaactctgaaaagatagaatacaaactaagaatactgattattggggttggggtgtttaggaactaagcatgatgaaaggagtggaaaggagaattttcatgacatgccttcttattctttttatttttgaactatattgcctattcaaaatattcaatttaaaaagaaagagataatagcttcattcagtgcaaggaggctaaaagaaagaagaactacactaagtaagaaagtctcattcttactcaggctattggcactatagtttgggggaaagaataaattatcaggaaactgaaaaataaaatttagaaaatcaccagtaaaagcagctaggactggttctggttgaaggacaggctaaaagacaaaaacattagctaccaatcttatggctttgctgattcatctgtgttttaacagtgagcaaaaagtattttgaagacaaataacattacagcaggatcaaatgctctctccttaagcattttcttcagttttctaaaagatatcccatgtgctgcttctctcacatcccagattacaaaggcagcatggtgaag

SEQ ID NO: 124756 - DNA, 1049 bp, Homo sapiens
accagcctagccaacatggtgaaaccccgcctctactaaaaatacacaaaaattagctgggtatggtggtgggcgcctgtaatcccatctactcggcagctgaggcaggagaatcgcttgaacccagaaggtggaggttgcagtgagctgaggtcgcgccactgcactccagcccaggcgacagagtgagactccatctcaaaaaaaaaaaaaaaaagggcagtagaacagggtggttaagtaagccaactgtcagtcaaacaacctgagttcaaatcccaaatccactacttacttacttaacctatgtgatttagggttgcttaattttgctaaattgcttaactttagtagcaacatttcctaactttggtagcaaagttgcttaacctgactaagcttcattttttgatctgtaaaataggggcgaatagtagaagaatgttgtaatgaataagatgcttgtaaaacaattaggaagtgcctggtacaaagtgagcagccaataaatgctggctatttcagtattgtttcaaaaggcaagtttattaggttacctagttcctaaggcctagagaacaggaagttaaaagtgaaagaaagtgaaaatgtttctgtagcatcaaacagtagcacattcactggcaagtgagataagtttcaaatgaaaccttatgaactattttagataagttaaacatacacgtagaaagacaatgactaaatactcagtcactaaatactagaatcagagctctatttggattccagctccatctattaatagctctgtgcccttggctttatgcctctgttccacatttgtaaaatgaggatgataatagtatatacctcataatgttggagtaaggataaaaataaatgaggcaatgcctgtctcagtacaggccttagtacagtcactaccaatgaaaagtacttaataattagtaggtactgtttcctttattacaaaaaaaaaatcagagggctatttgttaaccaaattgaaagcctaactctctgaacagagaaagtaaaatatagtg

SEQ ID NO: 124757 - DNA, 1008 bp, Homo sapiens
aattgatagcatgagtaataaggaccataaaaaaaaaaaatcactgctttctggccaggcacagtggctcacgcctgtaatcccagcactttgggaggccaaggtgggtggatcacctgaggtcaggagtttgaaaccagcctggccaacatggtgaaaccccatctctacaaaaaatacaaaaattagccaggtgtggtggtgcctgcctgtaatcccagctatttgggaggctgaggcaggagaatcacttgaactcaggaggtggaggttgcagtgagctgagatcacgccactgcactccaggctaggcaacagagtaagactctgtctcgaaaaaaaaagaaaaagaaaaaaaaatcactgctttctcttcaaagagtgagtattaagatcttccatattctctatggctacatgcattaggtgaagaaaaaaataaagcatagtaataggatagccaccctcaaattgcttccttccaagttgagttatgtttatgatatgacagtgatgcatggtcatttgtttagactaactgggttagatctgtgacatctaaagaaaagcaacaaatgaataagtaggcaagtggaaaaaattagagaaaagcactctcccaaattaattattcatgtgttaattacatgttctgtttctcagttttttctcagtgatatttaaagatattcattacacttttgcctgagacaggtaataaaagttcaggagctgaacactaagcttaagatatgtacagatgaacaggagggatgagaggactatggtaacagtcagtcattgccagaaatttgaaactggcattaagaggaagtcagcagctctattcaagtgacaaagcagtggtgtggttcttggcatcctggcatgtatagccaaatggaaaggtgccaggtattggctggaagagcataaactactgattttctcttccataaattaagggaaggaagagttttagcagcacagcatcaatgttttatgtag

SEQ ID NO: 124758 - DNA, 1044 bp, Homo sapiens
ggtaagtaagtaggcatcagaagagagctcagaaagggaaaaataaacatggggagacctaacaagggaggggggaaaagcaacaacccagtgacacaccctagatcacattttattgatatttcatttaaagtgcttttctctctctctagaacctgcgttaatttataacctagggtgtagaaacacaccattttaaatctcaacttgctaacctgacttcgaagcattaacgatctattattagcaatgtaaacaggtttaagaatgaaatattgatttttctgaccctgaaaaaaaaaaaaaaatcctagagtgactgaaccagaggattggaaagaacattttctagggtgcattttccagatagtaatcactgttttgttttatttttgtttttctctatcttttaggtctgttttgcctgaacccatcaacagctgggagattaatcaaccacactgaaaatgtggagggatttatgggggagggggttgaaatgtgggtgtttgaaacaaaagtgtataaacaaatgaattgttgataacttagttattgacctggagactggtagcttattaaagaaactccgtgttactcattcctggagttgggggtttctgtaggcactttatttctccactttcaagagcttgggcttggcccaaatcttagactgtccaattctgcctctattaccaatttaaatctatggcttgaacctgtgcactgaaaatcaaatcctttaaaaagaaagaggagaagaagaagcaaaaaagaaagaaaaaacacttattagaagccctagtcattttttggctttctgttttgttgctgtccattgaagactttgaacatgccgccttaataaatgtattaaaattgaaaaaagaggataaattgtgacgaattttatttacgaagttagactaaaagaagaaaaagaacccgttatgagccttgaaaaaagagggggagaaaaataagctacttatagcaaaggagaatttattctacaaaaaatatgcatgacaatgcatccca

SEQ ID NO: 124759 - DNA, 1072 bp, Homo sapiens
ctgggcctgaagggcaaggagcccgtggtgtacccctggatgaagaagatccatgtcagcgccggtacgtggcgccgcttgggaggcgcgggaggtgggccggggctgggcctgggttcgagggtcggggtcaggagggagaggctcaggggaagggggcctcgggaggggagcccccatctgacccgggctgcggtgagatgtgggtatgtgcgcgccagccagccgcctgatcccaacatgagaacccttttgtacccagggtccctttatcaggagatttacgagacgccaaactgttagggcagtaattatagcccccataaatttaattgccctggcagaggcttcaggccatgtgtctttgaagcttttcttcagccccaatgcccagcaccattctttatggctctcgggtgtttcccgttgtcaatagcctgtgaaacattttctttgccgttttatgtatcttgcgtgaacttggtgtcaggttattatataatgatgatgtccaattgctcttccccaccccaccttctctctcctcctcctttccctctcttccgctccctcctccttggccttctatttcggggttctgggttttcagttaaccccagttataacggaggggagcctaagcgctctcgaaccgcctacacccggcagcaggtcttggagctggagaaggagttccacttcaatcgatacctgacccggcggcgccgcatcgagatcgcccacacgctctgtttgtctgagcgccaggtcaagatctggtttcagaaccggaggatgaagtggaagaaagaccacaaactgcccaacaccaagatgcgatcctccaattcggcctcggcctctgccggcccaccagggaaagcacaaactcagagcccacacctccatccccacccccacccgagcacctccacacccgttccctcctccatataatcttctagagatcttaaccagtttctatcccttacctgcttttctcttctcttctcctgctccgttcctcatccacccctccccatctggaccataatagacaccaaaacaaacc

SEQ ID NO: 124760 - DNA, 1054 bp, Homo sapiens
ctgaagtcattgtgtgtaacctattaaagtaaacattggtatttcagcattcaagaagatgtgtccacatcttagtgggaacaaggatataaactctacatgggtatgggttctcttttataatgttatgtgtctgtgagaatactggattccttgttttgctgctctgaattttgggctccttattggaaaatattgcgttatggttccattttagttactgatttggtgatcttgcttgagtgatttcttggtgattgaaattagaaaaaaaaaagagtgacggggattctgccagtttaatttgagttacttacacagaaaatatccacactacttcatggccatattccaccctggggtgtgggaatgagcagaaagcctgttgaagtcatatccagtaccacagaacatagagaatctttccaaggaatgagaaaaattacaggctgtaaatattgtcagcttgcttatttctgtctgttttaatcttcacaaaacttaagtagaatttaagagagcaggcaaacccacatggccacatggaattaaaatgactttaaaaatacatcatgcagtcagacctatgtgttactggaagatttttttctttcttcctattttcataggaagcataataaagaggatggctggttttctgctcattctgtagataagttatttcttttgtggattcttttgggttgttcttgcagaggaacttactaagaaaaaatatgtctgtcactgagggctttatgaagacatccagcctcagccggtggcagaagtgcgtgtctgtgctcctcctcagcggcaatgtgcgggggctcgtttgttcccacaagctgaagagacaatatttctgaactataaatacaacaggaagcttctggtcacacttacttagtggtttgttagggtttccatggtctaatttcacaacattatgccaagattccctttctcctgctctttcccctgcttcattgttggcggctctgagagagcaagacagaatttcccaccaaaaaacagagtcctgttcatttgt

SEQ ID NO: 124761 - DNA, 1355 bp, Homo sapiens
ctacacaatcacataatctgagaatagggactcttttatatcttttccctcaatctatatgacttttattcctttttctcatgatattacactggctgggacttcaatgtgacttggaataggtgaggtaggagtagacattattgccttgtttctagtcttagaggaagaacattcagtctttcactattaagtaatatcatgtgacttgtatagtcacatataagtaatatgtaatatgttattacctgtaggttttttaagatgccctttatcagtttgagaaagttcccttcttttccagtttgctgagggtttttaccataaatgtatgttgaattttgccaaatgctttttctgcatcaattattatgttcctatgttttttcttctttagactttttttttctcagccagctgtgctttattgacaacgcgccactcgggccttgactgcgtacttccgcaggaggcacagcctctccttccgctgccgcttcttggtcttcaggttctccttgtgcttgttgaaccggcagcacatggcgcgtgtcttcttaggccacaggtccaggggcttatacttcttgcccttgtagaatttcctgagtttctctttctgagtctggttaataaccgtgagaacacgtccaatttgcggacgactcaaatcttagagagcttggaggccgcgccgcctgtcactttggcgacgtgcagctgggacagctccaccttcaggtcatccaactgtttcagcagctcctccttctcgtgcaggtctcgagccttgatcttggccattgctgcataggccaccgccgctgcctgctctgagggaaagagctagactattaatatggtggattacatgttttaaactgtggactattaagtcagccttgtattactgggacaaactgcttggtcatgatgtattattctttttatatattcctggatttgatttgctaatattttattgaggattttttgcatctatgttggttacaatactgttttataattgtctcactgtctttgtatgattttgttagcaaaatcataaagtaggttgagaagtattcctgctcttctagtttctgacaaagattatgtagaatttgtatatatttttaaattttcttttctttctttctttctttttttttttgagagggagtctcgctctgtcactcaggctggagtgcagtggcgccatcttggctcactgcaagctctgcctcccgggttcacgactttctcctgcctcagcctcccgatagctgggactacaggcgccggccaccacgcccggttaattttttgtatttttagtagaggcggggtttcac

SEQ ID NO: 124762 - DNA, 1004 bp, Homo sapiens
ttaaactacaactctgctaaaggctatgaaactttattgttgttctcagatcagattgcaaagaaattacccattaataatacgcttcatagcaaactctactcttaagtatccgtcatacaatcagaaacccttggaaatcttagagcaaaatacacatcatttacccctctcttttttagaatcactattagatttaaaaacacttaaacataaaaggcttttatatcaatgtattcatttattctcttcaagtttactaagctcttactcgatgaatagtacagcatttgagtcccaagaaggccaataagaagtttatatccggttaatgatactgacaggtccctgcaccaaggaaaaaaaattacttttgagagtgcaaaaagcctagtgtcatttacctttctaccaataattccttgtgagtgctttcaaagctagaaggagaaagctaaccatactgaaccaatattttgtttttgagtttgaaacaaagtcaaatgcaaaagcatagcaatctgaggtaagctgatcccctctctagggataaatggagagttctcttttgaaaatggtttgcaaataatcatactaacagtacagctataagtgaaaagaccttgaaagatgccttcttaccagaggactgtttataagattcacaagtgcatgtgctcaagtacgagaaatgcctttaagtttccctttattattttcaagaatcctcctaaattgggtagggaagcaagaatcaaagccgggaaattcttttttaatttttagacacagagtgcagtggcatgatcatagctcactgcagcctccaactcctgggcttaagtgatcctccagcctcagcctcctgagtagttggaacaacaggtgcacaccatcatgcccaaccaattttttaaaaaaatatttttagagacaggagtttcactatattgagaccaggctggtctcaaactcttggcctcaaaggatccttagcctcagcc

SEQ ID NO: 124763 - DNA, 2886 bp, Homo sapiens
gtgagccaccatgcccagcctcaagtgcatttatgataccgctttcgagatacccctcctccttctccctggtttgttgatgtctcatcttcctcatagcagctgtgatctcacatgcccctttcccttttgttttttaggttttcaccttgaagatgccatccctcccccgttaggtcagaagtatatcaagaatgggaacttgaaatcctcacaccaaatgtgacgtggtagaaaaacagagtggtatagtaatgcgagtaggatctggactcccaatttcctatcagaattcacattcctggtggacttatttgctgtggtttgtgggatgttgaacaagtcacttgcctctcacagtctcagcttctgtatctgtaaaataagacaagaattatagtgaccccataggcttgctgtgaggatcacctgagccatacattccaaagtgctccgtgaactcatcagcacctcacagaacatcacttgctgctctagtgatgccagtaggtgctcagtaaatgcaagcccccatgcagcccctggacggggatgctggaggctccagggttagccaacagcattaacctgcttgtccgtcaagacttttataagagctgctaacaggcaggaaaattgcaggatttgagtttcacctcctccccttaaccaggtcaccttctggaggaggtgctaatgagcagcaaaatgaccaaaatgtgggcagtaagggaggcagagaaggaaacagccaaggagcttggacagccctctgctagctacccagctcttgaagctaggcctaacaggcatcccagagcccagcacaaggcccctcttggcaccaaggggagaataaccatgcaagggccagagatgtggtttttgttccggtgaagctttgggaaaaaacccacatcaggcccctctctctctggccatataaacttggagtctccagcctccacagtgggcacagtggtgctttaataattgctctttctcttaagcaggttccattttaactgaccaccttcttgacaaatattgagccacagaatgttcttgacgagtggcaacctaagagtgccatcagcagtggagggtctcaagtcttccattccagacccacggccagagcaggcaggtccaggaggggcaggcacgggactggccgcttcccagacatccatgaatagatgtggcctcctgtgagtcttcccttaccatctgcggtgtcagcttcagggctccagggctccagggagaacctgaggccttgaaggagcaggctggtgagccccagcattcactaaccacgacatctgccaacaaacttcacccatcagtggctctcaagtctggctgcacatgagaaccacccggggcggcaatgctgctgccaccttggaaggttgctgtgtactgaatcgaggtaatgcgtattcaatacttggcacttagtaaatacagcaggtcctcaaataatgttgtttttcttcttttcttttttgagacggagtatcgctcttgtcacccaggccagactgcagtagcatgatctcagctcactgcaacctccaccctccaggttcaagtgattctcctgcctcagcctcccaagtatctgggacataggcatgcaccaccacgcctggctaatttttgtattttagtagattttgtatttttagtaggttttgccatgttggccaggctggtcttgaacacctgacttcagatgattcacccgccttggcttcccaagtgctgggattacaggcatgagccaccatgcccggccaaataacacttagttcaacgttattttcttacaaaattgatgagaaaagaaaaatcaattccagctggggccactgtctatgtggaattggcacatgctcctcacatccgcgtgggttttctgtaagtactccggtttcctcccacatcccaaaggtgtgcacatggcatgtctacctggtcccagtgtgagtgtgggtgtgtgtgagtgcgccctgagatctgatggtgtccgggctggggcaggttccgtcctgcagcctgagctggttccggccacctgccaccctgaactggaataagcaggaaaataattatcttgtttctatgaatttgtcttaagtgtatgtattgctcatatttatttcagtgtttaatgtcaggagcattctggtctttatttagaagtttggtgatgcttttgcgattagaactattccaggaacttagcttccgtttatagcaattagcttatgggaaaatggattttgttttatggcggttcacctaaacttgcagtttccaagaacctattggcaacgttaaatgaggacttacttcattccttttttctgtatttgtgcctctatatcttacaaatagcagtatataaaattaatatagtctaataaaaaccagacacaattggaggtgacactctagggtgctggtctatactttttcaccctgttgtgattctactgatattaaatcagaggttctcaactgagaggaaaggaagcatgctcccttaaggaggaacaaaggaaaggggtggaaggcgcgggcacagtacactttgcacacatcatgaactgagcttgatgctaacagacttggattggatccagcctccatgttttacctaagatagaaagtgtgtgacactcacactgatagcccatgatcaaaacgctttttgtttgtgtgtttttttgagctggagtctcgctctgtcacccaggctggagtgcaatggcacgatcttggctcactgcaacctccacctcctaggttcaagcgattctcctgcctcagcctcccgagtagctgggattacaggtgccaccaccatgcctggct

SEQ ID NO: 124764 - DNA, 1043 bp, Homo sapiens
aggtcaggagattgagaccgtcctagccaacatggtgaaaccatctctactaaaaatacaaaaattagctgggcgtggtggcacgcgcctgtagtcccagctactcgggaggctgaggcaggagaatcacttgaacctcagaggtggaggctgcagcgagctgagatcacaccaccgcactccagcctggcaacacagcaagactctgtcaaaaacaaaacaaaacaaaaaaaacacacacatacacaacaaaactcttacctgctccccaatgcaaatgtcagtttaagtcaggaaataaaaaaagtttctaaatttatttactgccagacctattctagggagagaaagaaggaaagatgagtatggggaactaaacattgattttaaagacgttttgtgggccagttaattttagggacttatagtaagacaaaaaactacatacctgggaggctggtgagagtaagtctaaagaattgaaattttctgatatattatgtagaagacaggtaccccccttacctctcttcaaagagcctaataacatagctgcatttatgaagcctggaagaagttgttagagaaagtttgagagttttaaaattattactgaagaaagatctgaatctttatcaggaatcttagttttcctacaaaaattacaaatctcagggcagatatgtcagccatctggggatcaaaaactaagccttttgggttaggagagaagatggccgaataggaacagctccggtctacagctcccagcgtgagcgacgcagaagacggtgatttctgcatttccatctgaggtaccgggttcatctcactagggagcgccagacagtgggcgcaggtcagtgggtgcgtgcaccgtgtgcgagccgaagcagggtgaggcactgcctcactcgggaagcacaaggggtcagggagttccctttcctagtcaaagaaaggggtgacagacggcacctggaaaatcaggtcactcccacccgaatactgcgcttttccgacaggcttaaaaaacggcgcac

SEQ ID NO: 124765 - DNA, 1008 bp, Homo sapiens
tcaaaaaaaaaaaaaaaaaatgaaaagaaaaaagaaaaaaagaaaaatgtcaaaagaaagcctttgcctattttgatcacttaacagataacaaatggagcagctcagtagaaacaaaaaatcagaaactgcttaattgtgactttgaaaaatattaactttgaaaaattttaactttgaaaaataagcagtttctgagtaaaacaaagtgatctccgaagttttcaactgacttccaagcatgcagtgagctgccgggggacagtgggtgcttctttgtctggcttgcagcagcagcatcctgcttatgggagacgttttttaaatattgtcaacgttggcaacattaacttgctcagctagaaacgtgtgtttaaatagcaacctttggcctttgggtcctgccttgtcaaggccaaggacctcagccttaccctgcttcctagaagcaagatcaaatcagcactctcctgtaaatgtcaccttggatccattgcactcaggaagacacagtgcagctctgggaagtgtcaggagagcctagggacaatttcatactggcgtgagcaagactccgggtcctgtccaggtaattcagatggatagcgggtgtaaagggaggccatgccctctgtctctccagatggatttgattaggctaaggaggaagaggaggccttgttagtctgcttgtgaagatggctagggagagcattctagtaaaatctacttgagaccaggtaaaacagctgcaaccctccctaagaaaactgggggtattctatatctctcaaggcaccatgtgtgaggcctcagagggccttgcagtccctcttgctgtcacctttccccaaccccactattttctgatgggaagatctcttccagcttgcctttgtccacatctctctcaacttccatatgggcacagacctgcgtcttataggcagggacctcctgtattcattcatcttaagctgttttatgtaatagtattgaaaagtgatt

SEQ ID NO: 124766 - DNA, 1296 bp, Homo sapiens
ttgtattcatcatttaataattcaagaatatctaaaggggatgaacacttctttattcagattagagcattaataggaaaacacagtaaatcagaagccctttgcaaccagcctacagggagtgctttcgaatgccttggttacaagaatggttcccgggctgggagacaggagacgtgagctctagccctaggtcagcactaagctgtgtgtgttgtagatctgtttccttctctttaaaatgagggcatcccattgatctttaaggtttgttttagctctaaaattctgattccccatagttaagggtttaagaaaacatgaggcatgtgcttctgacagtttttggactctctctggttaggtattatttattgctcatatagccatctcatttattaaggttttttttatagccaggaatagattcagagatcaatacatttttattaatgatagtccgtcatgcctggtaaagagatagcaagaaagctcatctagaatgagccacttgaataaacctgacacataagcttagcttcgagctgcattttggcaggcctctctgtgaaataatgacattggcagaggaagaaactatggaaaccttcttcacagccagactcataaaatcaaaagcaggtttggggtgtgtttctcagccctggctgtatatgcaaatcccatgactttttgagtgcagcattttatcttcaaaaggacaaaatttggcatttgctgtagtcattaaacatgataaatgcctaaaatactttagagtttggattactgtaggttagaataaatattgtgtcaatactaaacaggattttagagtggaaaacttctcatggacattgtcaaatcaaaacttaaaatcttttcactattttccctttaatcatacgaattgagcataattgttgccagttctccttgtaaaaatgatggtctgggccttttggaagtgaattactcctcccagcaccattaagagatagccttgtgccctgaaagagttaattcacttccagatggagcttttcagcccctctgagttcagatgatattaagttcactagtcttttatgtttgttttgagcctcttgaacttcgtttatataccatttatggatagaactgaagtattctatggtaattttagactatttgagacctcttccagaaatttcacttcagagtcccaatcccagagactccagagcaaatgcagctttcatctcgtctctctctccctccccttaatgaccttaaccctgacctgaggaccactct

SEQ ID NO: 124767 - DNA, 1068 bp, Homo sapiens
ctggttttgtggaagacagtttttccatgggtggtggttggaggaatggttttgggatgaagctgttccacctcagatcatcaggcattcgattcttgtaaggagcacacaacctagatccctcacatgtgcagttcgcaatacggttcaggatcctatgagaatgtaatgcagctgctgatctgacaggaggcagagcttaggcagtaatgcttgctcaccggctggccactcacctgccccgcaacccagttcctaacaggccacggaccaggtcagtactggtcctcagcccgggggttggagacccctgatctagggcacttcagtatctgcagcgacaccttttattttccctaacagctttttaaaggtatagtgtacatacaatgaaatttgctccttttatacaatgaatggcttttcgtaaactgagagttttacaaccctcaccacaattcagttttagaacattccatcacccctgcaaaatcccgtgcatccatttgtaatcactgctcattctcccggcccccagccattggcagctactaagctttctgactctagatttaaagctgcttcttggccaccagcctggttttatttcccaattgctgagcactgctgcaagagaggtctttctaagactgaaatccaatccggccaaccctgtttagaatgtttgagcctaggatacagtctggtctccaaagccatcctgctggggcttctatttcaccagcaccactgcccacaatacttgtcttttcccaaacgtgccatgctttgcacacctcagtacatttgcacatgccatttcttccatttggaatgccgccccttctggcaccgtgaccggttcagcactgttgtcttctaaaaagccttcctcagcaacttcagactcagtcgtttccactctgttttcacagcagtttgttgacatctttctcatcataggacttgccctgttacattatatttgcagctttgctcatttgtcttcctcaccagactgtgagctggacggcacagaatgtgtcgtatcagctttgaggtttgcgt

SEQ ID NO: 124768 - DNA, 1888 bp, Homo sapiens
tcctcctatccaattataccatgcttatttaattgtctttctccttaacacaatgtgagtttgggtgggctgtggctgttttgctcatcattttatcccagcttctggcacattgtcagcacacttcaaatatttattggatgaagtaatatttgcaactgtatttcctgttttgcagttttatttctccttgttttcatttaagaattttttaaaaaaaatttatgtcttaaagatttccacagataagattacacagggaaattttttttcttcaaatctgtggaacaaaacaaacaggtattgtggaaggtggaaaaatcgaagagacactcagaaatcaaggtttctgtctggagcaattttgcagttatatgaaagcgcttatttaaaaatgttaacttaccatagtatttataagtatcttattttttcagattacatttttccttctttcaaaccaaaacataaggaaccacagttccaaagagcctttaccaccagtctcagcgtgttctctcctcctgtttgatttaggatctgggattggcacaagactctgctaccagcacaaagagcccaatccttcttggcagtctggcccatcagatctacaggatgatgtgtgcaaagggctactcaaagaaagacttctcatccgtgttccagttcctacgagaggaggagaccttctgagtgtgccctttggccacggacactgttgggaaccaaactctgtcttggagcctccttttagctcactccacaagtaaatggatttaatcaaaggtcacctatctgcttttgattgtctaggtcacagtaatccctaggatttttcaccgcttattctttttgtctttttaacaaacatattatccgaattttttttctgcaagccactgatagtctctgctaactagcttaattgacctttttacaaagtttgatccccaagcatcctcaactaaatcattgaatacttcaatcaggatattatctgctttactttacaaataaaaccaaatcttttgtcaacaggatgaaacccatcttaaaggaaagaaaaggaattggtgtgaagagagaagttagagaagggaaatgcagtgaattactatctgtgtccatcaggaagtttgtcctgttaaccaaatggttactgcactaccagggttactggtttattttccagggagctgataaagcaggagaactgttgctgcatgttttctatttggactccgtcacaatatggtaggatatccctcaccaactcccgacactcagcagacttgtttttatatttttttctttcttgttcattcttactacgtattttttgacttaagaatgacatctttagatgcatttcagagccaatgatgatatttgctttagataattattatattattataaatatagccatattattttgaattcaaataaatttctatactggtaatactttcttggtgtttttgtttcttccccatcatttggtgaactaatgttctgacaaactgatgttcacactaatggggaaaggatgggaataaagagaaaggaggggaggtcaaaaggaacaaagctctgagttggccagtggcaagctagtgttttgctgctttacctgaatccttattgagtattcgtttgaatgttttttaggtcatcagttctctaggaattcagccagcattaagtgtaacatgccccaatatggagcacagtcaccacttttcccacctcagcctctagaaacattccaggtaatagacctagacaccaaatttggcagaagtattactactttcatcattttactggtgataaaaaattccaggcactgttataagtgctggggatacagtgatgaacaaga

SEQ ID NO: 124769 - DNA, 1035 bp, Homo sapiens
cttgattcagtgatacctagcaaaattgtgcttcccaaactgcattatatctttagaatccaagtaatggagcattttgattctattattttttctagggtccacattgaacagccgtttatgccatcagcccagtgatagaacaaatgatgtttctgcttgggcaagctttgttttatcaggatcagtaaccttatcagcagttgacccagaactataatgcatgtctctgaatagatagcatatgtcacaactctgtgcagacttgcttcataagcaagattgtctaataaagatttaataaataaggaaaagtttgcagcaaaaagtcttcttttataataacttttcttaagctcgtttacagctcctggctcatctcttgcatttattctcataaaaactaaaggaataaacatacatataaatgcattcacacagactcccatgatgcatcgtttatctgtcagtatttctttctgaaatatatcatttgtgggtaaagaatgtagaatttaaattatcatattgttttaaggttcttatgtgacatataaatgtagtaatgtccaaagactagaaaacccatgagtgtgataaaccaacaatatttttatgcaattgtatattattttttcttaataataggataacatagaaggttttctccaaatgcaaaatggtcctggctcaaaaatattcttatttaaccagtagtgtttagtactctataattcaaaattggattcttcactctcgtatcaacctgcttagattttagaagacatataataaatggagagagaagatggagcatccccatacataaataagtcacgcacgacgtgtacattttgacacttaacacttcttttctttgacctttgacaggttagggcttgacccaaaactactggctaaaatcctaaatatgagctcaggacggtgttggtcaagtgacacttataatcctgtacctggagtgatggatggcgttccctcggctaataactatcagggtggatttggaacaac

SEQ ID NO: 124770 - DNA, 1065 bp, Homo sapiens
ttgttgatttcgaatggaaactcagtcttctccagtgaagcatgacgttctaggatagactctgaatgacaattactgtgtattctagctggtttcagaccattacaagccttgggcacagtggaaaacagaggacttcagtaactgattttaatatcatgtctaattttaactgtcagttatgtatgtgccagagaacgaatcctcagaaagatgaaatgcaaaacacttctaacttgctctttttaatgatacactttgctgcgggtgggggcagggggagggaagtggagagggaataactatctcctgaagggaatcagcacggtggggaagcatcagatttgaaaagtgagaatgaaacaactgccacctgattttttgtgtgtgcccctcaggatgcttctaaatagtaatgtgttcaccagaaagggtttccatcaatcaataccagtacttttccttgaacattcaagaaaaatgtagggttttacaaagttaggataattagctttgctcaccattttgttgaatattatagaaaagagtgaatttccttagctgtaaaagctcttgtgagctactactgagtgtaacctggtagattagaaagaaggaaggaattctgctgctttaaatatgatgaaccatcttaaaagatctaagttaggaagccctgaaattatatttcaaatggagagagaaagtgacgttttggagtctttaaaagtattttctccttatggagcatattagatgtatgcattcttgaacatttggtactttgcagttatagcaaattaactaattgttaattgtgattttacttttcacaattattccctaagcacactggctttatcttttcctaagtgatatactacagtagcatactgatagcctaatcttatttaaaaggagaaagcaagcatcagtagcatactatgcatgcagtgaacttggatctttataaaagaatgaatgaaactgttgggtttctctctgggaatctacagttgaacagaatgaatgatagccaatttagactgaatttctgtatctgtt

SEQ ID NO: 124771 - DNA, 1980 bp, Homo sapiens
tcttcacggtttacagacatggtttaaagtgacaggattgttctctaatagagtatagagaacggccacgatttattgagctttgcaaggtgaaagagaaaattggcatcagcaagcataaattcccaagtagtaaattcccgcaaagtagtatagcatcaaaatggtgtagccacatttatattctgcccactctgaagtgaaattttttcagagtattaatgtcaacatttacaaattgagtcacccattcctgtgaagtgatcatttctgattaattttattctaagtcagtggtttttctggaacactgttccccttttttaaaaaaattgaagaataaaatcttacagtttaaaattcttattgaccctatgctcttttacagtgagtctttatggatgttagcaaaatttttaaatgttgttaaaaaaaaaaagtaaagagtaaaaaatatggtatacaatatattttgagattccttttttattagacctttctgctttctaattggattcctacataggcattagaagcatagttttatggtcctgaaagtaccctacttgtattagagaggttttgttcctgtgtatcacatagaaataacattgatgatgttttgttgttttaaattaccagctccactggaaattgattttaaaaaaaaatttttggtggtataacaagttacttgcattgccaaccaggcccaggctcctccagcaaccactgtattgtcttccgccaaaagaagcttgaagcagctgaacttctggaaagctgttcaagatgagaactttccctccaatgtagttttattaatagtttcttgcatactgcccttagaagatgttgcttttgcatttatgtgatgactggagccttagttgtttaccctaataaatataacagatggcaaaggtttgtaatttgtaaatggccaaaaagcttgttctttgtatgtatctatactgtctggttttacataagaacaaaacaaattatgtcactaaactgggatgtttgtgtcacaggaacagatctggaaatgaaacatctaagaccatgtcaatccaaatcattcacttatccatcatacaaatttcttaataaactcataaaatgccatcgtactggctagttgttgactattaagtttaccacctacttaatagtcaactactagccagtacgatggcatttgggcatacatgtaggtctgcattcaagctgtcccacagacttaagcttttctcatttataaaatgacaaaagtgattacatctatccactgggttgttgtgaagattaagtgagttaatccatataaaacttattaaatagtttctggcacatagtaggtgtcgatatgtggtaatgatatttgtggttgtggtgaggtggttattgtttgaaattaaattgtactttaatctttttcttcctaacatgtctcactagctggcattacatatttatttgtctgtttattacctgtcttcccatctagaagctccatgatgggaaatggtttgtttactcattgccatatcttaagaatatacctggcaggtattaggcacccagtgaagatttgtcagataaataaggagaggagggaggaggtaggggagtgagtgagtgaggggataagatatggcacttctcttgccaaaggtaaaagttatccaggtgggtcttaactcagccctcctggcagacaggcacagcctcctcttagcttccttcttactgtctccttcgctgcacgtgtagcacttggatatagcagatctgagtaaacattgatggataagtgattgattaattaaaactgacatggtcttagatgtttcatttccagatctgttcctgtgatacaaacatcccagtttagtgacataatttatttcgttcttacgtgaaaccagacagtatagattactcacagataatataaacaaacatttttggccc

SEQ ID NO: 124772 - DNA, 1041 bp, Homo sapiens
catgaatactctttgccatagccataaaatgtattgcctgtgcatttgaagttgtgcatttgaagctatattatcctttttatgtgggacccccatttcttctattatgttgaaatacaagaaacacttttctgtaaaatttaaacatactttggcaatgttgggacaaatttgtataagacatggttttagtgtgtagtgaattcaagtggtatgctaccatgtgactagtttatgtaccttttaaaaatatagtcccccaaatctgcactaaaagtgttcttggtggttcattctcaggctaaaaactggatagcattcataaagatgcaattcatatgcataactctttcattttattttgcctgtggtttagttactttgcattcgtatgtatctttctattaaagtggcatactttgcttaaagtgattcaggaattctgtttttcctatggatgatcatcttttaaatgcttaaggttaatgtcttaattttagcctttaatcttttgggttagtaatgctacatatgattaatcacctaattaatttttgaatgttttatatttcatgaaaataataaatatacatttcttactttagaaaatgcttaatgagcaggatgctttactcagttgctttcatcacattccccaaaactgcttaccaaatatatcacaaaacagaatagtgtttcataccatagcttttgataaaagtaataaaaagagccaacatacttgagatatttttgaaaacacagtaatggattcacatttcctcttaattaccatatcaagatgctgttgttttattgaattgcccttgtctcagatgtttaactatcttgacctattaagttgtcatgttgtaattgagataaaagaggaatttgctttgcgtcagcactaattggtttatcaatatcatgtaccatttacattttaaaattgaatgtccataagatggtaaagcatgtctgtacagagccttaataaaagtggtagtatatagggaccttttcagtgttatgtttgta

SEQ ID NO: 124773 - DNA, 1156 bp, Homo sapiens
acagtcgttgtctgtttccttgagactttccttctctcttgcctcctgagaatctcttatgtactagagctagtggatgtgagtgaatgagccaacaatcactgccctcatggaggtagtgttattctaggggatacagaccagaaacaaatgaaactgttaaagaggtgataaatgctatgaataaaattgaagcaggaaaaggagagagtgatgagatgctattttagattgttaggttgagtggtcagggaaggcctctctgaagaggtgaattttgaacagaggcctgaatgaactaaactataccagtcatgagtatctgggggaagaacatttcaggcaaaaggaatagcaagttcaaggctttgagatgggaacatacttcacctgtttcaagaacagcaaggagtgcaaggtggctggaaagcagcaagtgatgggaagaatgatatgaaatgaaataggagaggtagcccagagccacatcatgtagggctttgtaggacttgggattttatactgagagggctaggaagtctttggagggttgggaatagggaacaaacatgagctgggtgaactagatttatattttaagaggattcctctagctgctatatggagaacagactacagagacaagaggagaagagaaataaagtaggagactattgcagtaatccaggcaggagttacctgtagctcagaccgtggtagtagggatggacagtgagagaagtggctgaatcaccagtgtgtaccttcttaggagcagggacatttgtgattcatccttcacccaagggcttaccacagggcctgattcttagcaggtgcccagttaattgtgttgaatagataaaacaaatgcagatttcttgtctttcccattcactatgctgccagagaaagattttgcaagaagtcttcacagtgatgtcatcttaacatagtggctgtagaccactaaagttcttcttgacctgtgccagcctacttctgttatttataggtgcggcccaaacccgctaatacttaaaaagaggggctaaaattatcccagagaagacaatggcttaagtaactaaataggaaaatgcccacttcacaaattcaagttaaaaagtagtaagcccttacatttaaatagcat

SEQ ID NO: 124774 - DNA, 1045 bp, Homo sapiens
gatgaaaaattgcttatttcttcatgtatttgtgtctgtgtttatttcaggaaaagctaactaaactttgtttatctgactccagaagagtgctgtgagtgtttttgcttttctgtttccagcttggataatgccagaaatagtgttaacaaggggttatgttatgctggcttatgttaaaccagatcacccctaacatgtgcaaagccattcatctgtgtcaccaaaacccaagagaacatctgacatggactctgaaacagaaacagtgatcacttacaaatcaaacatggcacgctctaaactgattgtgcacggcaatcttttctagaaaggacaactaattgaacatgataaagtgtaaagttaattaacacccttaaatttgttgattactttcacgggattatattgttcgttgagtagcagctttctgtcccagctgtcgcctttttctgcgaatgtcgctggtaaacaatagagacaccatagcaagtcgtaaatggtccctgtgacagcagccccttgtgaggctgcatctgtagaaaatgattagaacaattgcattttaaagatggctcacattgcagcccaagtcccattggtcctcttcttgatctcttttgatggcacactggttaaaacatttaagttcttttgagtaaattaagtgatttactatgtttggctatatatcaatggaagtgctttggtggcaatgtttttacagtattaaagacaaatataatttgaattgtactttttagttttccatctcttccctctttggatttgaagccttctttctaatagtcatagaattgaaaatgatctccttatttgtaacttgggagtagttcgtctaagttatcagcacctgcatcatggtttatctatcataattctttgggtcagcttttcagtaaggctaaattccaaatttcagctctttcctactgttagatcaaagacttcgacatgtttaagctgaatgaatttacttgttatgtttaaattttttataacatttgtgtaatagctatat

SEQ ID NO: 124775 - DNA, 1806 bp, Homo sapiens
tggttagttacctttccttaatgttatgttaatgcaccatcagaaatggttgcaaaaggctatgcattggctgaggggctaccaagaatggcagagtggaccatactcaactcattgtaggagttggcaccctcttcaactgtaccccaaccccaaaatatgagagtccacattttcaagggattttcacatgaaagagataattcctggttagccaagtgtagcttattagcacagccttctcttaatctttagttttctgctgtccccagttttctactgtttgctgccgggttatcatcttgccttttgcttatttcttcttactctcttccctctctcctctgacagccattacttctgtatacctaccctcaaagttataacagaactcatgtgaataatcagttctctttaaaatagagggcacatgattattatgcctgtttttcttctcaagcaaactagacagggaatagggatgggaggatacccagaagggtgtggtattggtggtaattggattactgagaatttggttattggccttgttttactttgtgattgttaatgctgaatgaaaggatgcatgtgaaacttacaggaaaatagccaactccaatcacagaaatgttacaaaccacgtgttgcctaaagaaagtaaaatagaaggacataatgattacaagctatttggcttttttttcctcttatttggcttttaaaaatgacttttggctgggcgcggtggctcgcgcctgtaatctcagcactttgggaggctgaggcaagtggatcacctgaggtcaggagttcgagaccagcctggccaacatggtgaaaccctgtctctactaaaaatacaaaaattagccagctgtggtagtgggcgcctgtaatcccagctactcaggaggctgaggcaggagaatcacttgaacccgggaggtggaggttgcagtgagctgggatcgcaccactgtactccagcctaggcaaaaagagcgaaactccataaacacaaacaaacatacaaacccagctacttgggaggctgaggcaggagaatcgcttgaatgcaggaggcagaggttgtagtgagccaagatcacacccttgtactacagcctgggcgacaagagcaaaactccatctcaaataaatagtaaaaataaaaatgacttttaaagctgaaagatacgttatttgcaagacggagttttaaaaatcatattctccaggggcattaagttaactgtctttgtgctccagctatttagctttcaggagtttagtgttttattgtaaaccgacattgtgcaccatcttgatctgaggtgaatgccaaggaattgctttttaaagtgatttttagaataaaagaaaaccatttcatctctgatttgccctccctttaaaaaccccactctgcatttctgtcttacggcttctgtactgcatcagtcctcctcaagccagccagctccatgcggaacattctgttgctctttcagcataagcaggtctattgtgatatttatctgaattcaggcaaggctaattaaaagagctgctgacagttgttgtgatctgactttgactgcagcttgatggtcattatgggtaaataatgaaccaggtctgcaaatgtagcagctgccaacttgggatagaagaacggctattgcttccaatttaaggatctatcgaccgcttctcttctccctgcagatcttctgcagaaaactaatgttttctgctgctgtgtattgtggtttcagctgtttcagatatagcctataattt

SEQ ID NO: 124776 - DNA, 1008 bp, Homo sapiens
gtcaattgagaaatgtttttaaaatttgttttgatttctaatacagtaaataccaatagatataatccacataaacaaaagcttttgtgtcctcaaaaatatttaaagagtataaagaaatcctaagaccaaaaagtttaagaaccactggtttaaaatgatgaggccttggaaataacccaaatgtccaataagggagaattgattaaattacatattatgaatcagtgatgtagataaatatctgacatgaaaatattttacagtgttgtgttagtagtaaaagcaggttttgaaacaatacatgaattaatgtcacaaaaagttattaatatataatatgcttaatattgtattctataatacctaggtattaggtagctttttcttgaaaaggaaggtagaaaaagtttttttgaagttgtcataacagtattagactgcatcatgagatactgtttccttctggcttttggtgaaggtatttgctttttactagttttgtaacattggccaagtctgaattttgttctccttactttaaaaatcagatcaaggttgttaacagagtaagctgttcaatgtattttacttccctctaacatctccttagcttttaaaattctgtataatagcggtgtatctgtgacaattaatgcttaataaagcttcccttgaagtcaaaataagggtcttttgaaaacaagaacacatcttgtaaatatcatcttatttctgtgaaaaaaaagttttgtggaataatagctgtaatacagaaagtaaattatcatcatgcagatgcttattggtaaagataggtaaggtagcttatgattatacactaagtactaggccaggtattttgtaaaattgctgagtactttacagacatcatctcatttaatcctcacaaaagccctgtgaggtcagtactgttgttatccccattttactgatgtggaaatggtctcataaagaggttaaagaatttgtcctactcatttgtag

SEQ ID NO: 124777 - DNA, 1052 bp, Homo sapiens
tgtatgtatatttttacaaatatatataatttaccaagtaattccactttaagaatttatccccccagagtaagaatatgtgtaaagatttaactataagaatgtacttttagcattgttaagaacattggttctcagtgtaccctccatggatccctaggaggccataaagtgaaaattatttttctaataatagagtaataatactcatggtgcaaaaggaatggtgagtaaaactgctgcccttagcaagagtcaagacagtggtatcgtattcttaacagctacacataaagcattccacttaatgttccttgatgaagcattaaaaattattaattttattaaatcttaatgttgagtacatgtcttttgtatattttatttgatgtaatggaaaatatgccccaaacgatcctgctacagttggtattggggttgtcttgagaagtatttaggtgattgtttgagttgccagctatactatctgcatttttgtggaacaccatttttatttcaaagaataacaagacatcttatagaaagaaaaaagtgagtcttacttcaaggaaagcaactgagggtatttgtaaccaatgataaaactggatctttcaagtaaaaattagaattttggaaaacttgtatctgaccatatgaacttaacaactttctaatccttaaagacttttgtgaaaagattgttggtgcagttaaagaatgtgagtttctgttactgtatactgggaatttagaatatctgcataactaactgaacgagtattttccaattgaccgttgtatgatgttaccaaattatgcctagataaaagatgcaaagtacaaaatagagggatagattttaatgtaacatagtataaaaagttctttccacattgcaacaagcctttaagaaaccaccatttgtcaggtttgggtttaatataaaagaaggatatccacaattatctgaaaaagttattaaaattctctcttacttttttaaactgcattatctatatgaggtcagcttttcttaatttcaaccaaaa

SEQ ID NO: 124778 - DNA, 2224 bp, Homo sapiens
gaaaaggttttattcactataaaaattaaaacaaaaaaattaaggttttcctaattcaaatataagcattttagtgatttttaaaaatgtaatagaagcatacttacccttttttgttaatctgaatttttaagtggaaatataacatgctgataaaaccattttataacataaaaatacacattttcaatatacctatattacctaataatgccattcccacattttaaaattcattcctgtgggatagctatttgtccctgcaaatgcagatagttcctaattttcatacatattattcacatacttgagtgaaatagtttgctttcagttttaactagtataatttaaaaaaactgtggtcgggtctctcaaaacataagagatactgattttaaaaagtggttacaaatgaggcatttgaaaagcaattcctaaacaattggattttaggggtttaaggccaagcatataggcactctactttttcatttctgatcaagaacagagttaaaaagtaaaaataattagagaatataacactttgtgcttttagagtattgattgctcagatggaattgaggaaattttagtaatttctagaagcaaaattatagagttagtaaaatcatcttagcagagaataagatggtttcatgatatattttaaaatactctatactgggccaggtgtggtggctcatccctgtaatcctagcactttgggaggctgaggcaggaggatcacttgaggccaggagttagagaacagcatgggcaacacagcaagaccttgcctctacaagcaatttttaaaatcttagctgggtgtggtggcatacacctgtagtccagctactcgggaggctgaggcaggaggatcacttgagcccaggagttagaggctacagtgagctatgatcatgccactgcattccatcctgggtgacagagtgagaccgtatctcttaaacaaaagaaaataaaaaataaaaactgtttaccaaaacttcttgccttgtatttatcctggacctcctttccttacacattttccaagttcacttagcaaatgaagcaaaccaaaaaaaccaacaaccctccattgtccataagctttaaacctgaaacatggttacatttgacttgtgcctggccagcagccttttcatttttttagttttgtaatcaacagttaactgttattttcagagtaaagatcctaaagatttgtgcattagaaacatttcttggggactgatgtccagatatcactgtgtaatccctattttagctaaatttctgttggtatttgtatcattgcatgattcataaacagacattacttattccctttctcttctaaactgctatactctactcatgttgtggaaactgctattttgaaagtgtaactactgatggactctttttctcttacctcctcagttgattaaaatgtctcattttatgatgaggttgcttgggtgagaatcttggaattacagctgtaccttggaattttttctcagttgtcttgaatggattagaaatggttaaatggcttcaaatactcatctcaaccttcaaatcactgatgggttaaaatgagttattgaaaaagaacgaaacctcctaattgtagcggtaaggcgagagggtataggcagtggggagaggaagtgcatgtgtttgggagtggcatgactagggctagagggtgcaggggaggggagaatgtagacaaggcagtgagctatctcacatgaactttacctaatgaaatttcttgtcacttcttttctttttatttaaaagtaggtattagtaaaagctactacagcattttctcctaataattcatttttttttgtccaatataacttgttataccagattttcctttcggtcattaagatttaaatttcatatttctggtagtaaaatcatctgtcaagtgtggggaatctgcagctttaacaccacttcatgtctgattagaaggttttcttttgcaattaattttcctctcagctctttgtggagaacagtagcccactgcagagaggttagaatactgtggactttggctgttcatctttaatgatacaaggaggtagcaaagcaagaataaatgaggtactttttggtgagcaaaaaatgtgaactgtcagtgtgagatcggttctaggagcagttagccagcagtaatagggcacacttg

SEQ ID NO: 124779 - DNA, 2293 bp, Homo sapiens
atattcataaaaaacacattgcactaaatgtaacacacaaaatgaagctgttgatacatttgaggcatcatttggaagcctttctggaataggtgaggttcaaattatgttttaaaagattaatagagattttccaagtgaggaaggggaaggctgttttcaggcaaagggaatatagcatttacaaagatacagaaatgtgaaataacacaatgtttttgcttaaatatggaagtttgatatttctggattttggcatttctggttgtaaatggagaggaaagtgggaagagatgagattagctcgattgacaagacactcacatgaaggttcttctagaatcactgtattcagaaaagcatttacattgattgggggatataaaaggctagcatgagaaattaacatagcaatgtatttagattttagaagcccacaactccatttaaaagatgctgtttttacctaggttaacaagtaaattgttaaactaagtttcaaggggacagatttagttgtacttttagaaaatactgtctttataaatgccttacattgtgtgtatatgtaaatgcttgcagataaaataatgaaagttaaacaaaataatgaaagttcccacgctcttcactgaaggcagtcagaacttgtggtgggttaggtgataattttttttttttttttgagacggagtctcgctctgtcgcccaggctggagtgcagtggtgtgatttcggctcactgcaacctccgcctcccgggttcacaccattcttctacctcagcctcccgagtagctgggactacaggcacctgccacaacgcccggctaattttttgtatttttagtagagtcagggtttcactgtgttagccaggatggtctcgatctcctgacctcgtgatccgcctgccttggcctcccaaagtgctgggattacaggcgtgagccaccacgcccggccacaggtgataatcttaagtgagctgagagggctcaggtcctcaccaacttaaaatttacttctaaggagagacttggagagtctctgagattcgtagagtattttttaaatgatgttttgatcgtacccatttacctaattgaatttatatggtgcctcaatttagaaaaactgaaagctaaacttcaaattaaaaatgtaagacttagatgagaccatttgataccaaaatatgatggtatcagttaagttccttataaaaagaaaaatcaacttttctcttgcagtgttaatatttttcctgagatcctgtctcctgcctttaaccatttctctgttatttgagggagatattcaaggattgaagcgaacagagtccctcactgaaaggctggaaatataatttcacttaaccgtacctggtagtatcttcttaaatggtataagaaagtgcttttctaattcaaatgattcaaataatatttgctaatattatgaccaaactttgaagaaagtgatagttgtattttataggattaagtgagatccttatctgggactatgacgggattaacagataccttcagaatgctttacagctgaggtgtatgtagatagatgtagagctctaaagggattaggtgggtggtggttaagcaatagcagatgtcccttttaaaatcttcaaactagaggtctgttaagtacagtgcttattttttgctgacttggttccatgagaaaccttgatgttttttagtgcttctgaaagtatcaagaagaaactattcagatggtttggaaatttggggcctactctttttgctttgtaaaatggacagttttggataagcaggaaattctgactgatgggcagcagaacaattaattgcagtatagaagtgcattaggtatagtgaaaagagcacttacatgagaaatctgaactcagatctgagttcttttatttcctctatctgttgtgtgactttgggcaaattaacttttctgagtctcaacttttctgggtgtaaataaaagtgatgggactgttggtgctgagtctaaatgcattgcttattttgagacttaaatgaaatgatgtaccattgaatctcttggagtgggcatattcctttctctaatgccatttttagggcctgactttttgtgaaaatcaaatgagattttggtgttttctttttttctcaccaaaatcctaacctcagggctgactttatcagaatgttctaatgtaatcattgtggaaagatacacattagtacttacttgagaatgttgtaacccaaatcagaactcttactct

SEQ ID NO: 124780 - DNA, 1226 bp, Homo sapiens
cacaatctaggctcactgccacggtctaggctcactgcaacctctgcctcccaggttcaaatgattctcatgcctcagcctcctgagtagctgggattacaggcacgtaccacaatgcctggctaatttttgtacttttcatagagacgggggttttgtcatgttggccaggctggtctcgaactcctgtcctccagcaatctgcccacttcagcctcccacagtgctgggattataggtgtgagccactgcgcctggctggaaattacattttaatgagtatgaatatgcgtggggagataaaaatgttgcaaatattttctgccagtttgtcctttctttattcagtttatgataatttttaaaatacagaagcttggaattatcatacagttgagtgtatcagtcttctcctttatggcttctgagtttggtgtcctatccagaaaaggtttactgtcactaagtttgtaaaattaaaaagaaatttatgtacatcttcttttagttattttgtgatttcatttttaaaaacttaaattttttattcctttgcagtttattttagttgaaggggtgagcgtagaaatctagattactttttcttttaaaaatatatttaatgaaagtctgtttttttaccctaatttcaaatgccccattaatttcatacactcagttccagcatgtatttgggtctttttctgagctctctgttgatatctcattgttgagtgtttcctgagtaggacaactttccgttgctttattttactgtctggaagggtagttgtctttcattgctctttttccctcgctcagaattttttagactacttttgcttgtttattgttccaaagagacatgaaaatcattttatcatgttcctcccaaaacattgttaatatttttgttgggattgcactgaatttatggattaatttatggaaaattgatatatttacacaactaaatctttctatttaagaataagatatactcattgatttctttttgtgtgtctcttactaggactttaaagttttctttaggctgggtgcagtggctcacgcctgtaatcccagcactttgggaggccaaggcgggtggatcacctgaggtcagaagttcgagaccagcctgaccaatgtggtgaaacctcgtctctactaaaaatacaaaattagccaggcgtggtggctcatgtctgtaatcccagctattc

SEQ ID NO: 124781 - DNA, 1034 bp, Homo sapiens
agaggctactctgaatattcttgcagagatattttcatgtaaatgcaaatttatcagtaggagaaattttaagaaatgatatttctaggtcaaagagtatgtgtgttttaaattttggtagatgttgccagtcttttcatcaaagtttttacttccaccaacaatgtaggagaatgttgtggtccgaatgtatcccccagaattcatgtgttagaaacttaattcccagtgcaacagtcttgggaacttttgggaactgtttagatcatgagggctctgcccttgtgaatggattaataatgttagaaaagggcatggtggagggagtttggtcctttggtccttttttgcctttatgcccccttctgccatgtgaggacacagcatgcctcccctccagaggacacagcattcaaggtgccttcttggaggcagagctggaaccctcaccagacaacagacctgctggcaccttgacttggacttcttagtctcagaaatgtgagaaatacttttctgttctttataaattacccagtgtcagatgttttgttgtaggagcacaaaaggaaaaagagcatttattcatacatttgcaacaatctgtttgggggaactgatacattatctttacatttcttttctagtctaataagaagtaaaaaatagtatagtgtggttttgattttcttttctttttttcctccaaattacgatcttgtttgagcattttaagaacatttattagccatttatttgcctttttaaaaagtgattgctaattcctgtcctttatgcgtaattttattagatttattcattcagcagctatttcttgagtacttacagtttgccaggcactgtgctaggcattgatcttttctaattggtatgtatgagtatcaaatgctcattcatttattcaataaatattatctgtcatataccaagtactagtctaggcctgggaatatagcggttcacacacacacacacacacacacacacacacacacacacacacacctgccctt

SEQ ID NO: 124782 - DNA, 1633 bp, Homo sapiens
tgacggactaattggtacatacatcatatgtgaacacatttttgatatgatgtttgctttctgaaggggtccttaattattccctttccgtaacgaactaaaatttttgaatgggagcaatcacatatcattgtaagatgttctgcatttgacatagatgattatgttactgtatgtcgagtttgaattgtactcactttatgcctcttggtggtcatactttttcttttttttttcagtgctcactcagtacataaagcttgtatgggaaagaagtccttgtttcctgtctttgttggtatttgtaggttcctaatcttctaagagtcttgggatgtagatctgtacctcatgactagggttgggtagtttttatggtgaggaagaggggaaaagatagtattgaagcaattcctgtctaggtctgcaaagtgcagattgcatttctcttgcagtggtgttaggtatatggcccttttttgggaaagtgtttggagacctttatctttctctgttttgttgtggcagatggagttgtcctctggtatttttgctaggtatgataaatgttgtactaaaactgcttggtggaagtttattctggaaagattactgttcgtttcagtttcctgaagaaaatggaatcatagtattcaaaccattaagcaaacaagtccacaagcagaccagcaataataatgtgtacttctaattgatgcttgtgattcttattccttctttaaaacaaaggtttaggaataaaaaccaggattgattattagttttgtctaaaataaaacaaatggtagaaatagtcaaacatttttcttcataacttctagagagaaatatctagataatgaaggattgcccttattttataaaagaaaataaaagcaaagaagttatgtggttcttttatattccagaaataaaatgttcaattctcccattcatgtagcatagcaatctttagttttattctgattagtttgactaatagtatttttagataattgtgtacttctaatagcttttatgcagtctgtaatttatctacacttgtgttgaaagctgttagccaccacttacctactggatggaaataaatttttgattgattaaattctcccaacaaataaacttgttgctaaaaacaagtaggagattctaatcacattgcttggcatttagagacagagtttctttcttctttcttgggtgattcccactgcagatgtgctttgacacaactgggagtaaatttatagcctgaactgagtctgtggggtgattcgcaaacttttattatcctccatctcagctatttgccattaatattttcttatactaatacaggtaatcaaaatttgatcttggatctgaaacgccctcttcaaattcctttatattttattttctatcttataggtattctttccttcagtagttaggagcaaaataagatagcagcagcatctgcagtcttaagcccctctttttattggtgttggaggaaagtagtgaactatgatcaaaacagtaagtggtcttagtggtatctggagtccactcatgtctttgactatgattatggcatctgagatacaggatgcaaaggagtctggtttgg

SEQ ID NO: 124783 - DNA, 3192 bp, Homo sapiens
tccaaaaacctaagtccagctaagaatttatctgtgccaccaggtggcattgcatccaaacctgctaatgataaaaggattataaaatatattattttttgttaaagatataacgattttacttttgaagttgactgaaaactacatctgatatcaaggttaagtatctgcaaagaattgaaaagatttctaaactctaaatatttgtttttaggttgttgatattaaaacgaaagtaaatgaaaatgaaatatttggaggggattgctatttttcatttagtaaaataagcatttaacatttggcttttttttttttttttttttttttttttgcttgtctaaacactggagaggggaatccagcgtataaaaattctcacaaatatttcaaatccccgccccccaccatgtggcaagattccacccccctccctgggtcttgtaaaaaaaaaaaaaaaaaaagtgtcagcaggttttactgtatgggaatttttaaaaagagggagaaacctctgaaaggtgcaagttggtccttttcacaagcctaactatgagattcattaggcagttcatgttcatgtcttaaaagctgtttttgggaaagtaaattcttgagtttcctgtactgtttttcagggagtctttatagtcttttgaatcagctcattttaaaacagtgataatgtaaaaagcacaataaaaaaaggctcattataaattttataaaagtgtgatttttttcattaaaatacgtattcatgttctatttttatgaacccataaatataagttaataaactgtagcagaaacaattaaattacttaatacagctatccaggtgataggatatgttgtcagaataaataaagctcagtgtatattctattgatttttattcttttaaaaaatgtattcaccatgcagagtgatgtttaatgcttagctttgatcatttagcaaaaagcttagtgctactcattttatactcttgcctcttctgaggcttcttaatgtgcacaacctgttttaagaaatgtatatgttttcaaagtaaatgtttgacctcccaccttgatgttcccacttaaaagcaaaaccctcccctcccttatattttgaataacttgatgagaatgtgtgttgtactaaaactaaatatatgcacccttcagtattaccaaaagagaccttttggttttaaaaattaggaaatttcacttttgaaagtagtctagacaaaggtactcatgacatttgaccctgaaatttttacttttaaacttgatgcaacagtctgcttcttagctttgttgtatgctaatatttctacttatttaacatcaaaaagctgtagaggtttctctttatagattatgcctgtgttctggaattgcctcctgctgtccatgaattgcttcttggcttgttgtgttagaatttctcaccagggtcttttgtgagctatgtagccaacattaaaaaaaaaaaaatcaaatttgatagagtaaactggactagtaaaaattatacttactattcataattataattgaggtttcttggctcagcatatcaattttatgcagtaagagtaagcacatacaaatctcatgtaatgatatgcatacatatagttgcctacaatgactgtttttctagttatttctataatattaaaatgatttttttgctgaaattccagaaatctaaaaacattgaaaaataatgataatgagaaaaacaattcttacttgttagggtatatgttatttagtaatgaagcatttagattttggattctctcatttcagttggaaatagtattggtgtaagtgagtgttgccatgggaacctccacatagatataaaaggcaatactgtctaagtggaggaggaggggcgatgtactgaaataccactggcctaaatgatctattttatgtatgtgtgttggtgtgggggtgagagctaggatgaaaaggggagagaaagtactacagaaagtaaatgttagcagtcaaagcaatttactcacacttttggattcttttagatagaagtgttttaaagctcgaaatgtgattcttaattattggtatcatttgcacacactggggagtctttgcatatcttatttttaatgtacagtggaatatgtttaacttacttggttttagataaaatttaatttagtgaaatttgagagttaggatttcagtctttgaaatggctttatacatgttattaaagatgttatatttaattctttttaaatatctgaaatttagaaaaactgattaggacacagttaatgtggctttcaaagaaaagctggcattttggctttatagtatttttaatactagatttttagtaattttctataaatatataggcaaggaaacaatgacttactgtatctgcatgtgtaatattttatggttaaaaaaataaagaatgaaaacaacaaaacctaacataaaatctttttatatcccttaggagcacataaagattgtagagatagagatgattagagaacaaccaatttaactgcatgcaaagtaacatttttgttttttgtatgtttaggttacaaaaaaacaatgaaattgtgcccaacctgagttagcctggtaaaatgcagcagcatcatcattgcagttttaacactatggattctggttgtcagatacaaatataaaaaaaagaagagatattaactgacaaaaactgtttaaacttacctttttagtcaatccagagaaaaagctgccaaggtaataaaacatccagaagtttttaagttaaaacgagtaatttaaattaaaaggggtgagggggcatgagcaagcaagggagaagaaaaaaggggtgaaaacgacaggcactttgcttcctgggcctggctgtatctgatgtaaattaaccagcagtggggagtgtattgtttccaactccacataaacaatgctgggtatctctttgggaatgggtgggtgctgggatggatggaggttgttgagaagggaactggcaagcagagtttataatctattagtggattttttttggcatgcgaaacatagtaggaaagagtaaataatgagaaagtacgtttgcatgtaaaattgatcaagtgaaaccttaaaatgatgtgaaataattcataattgttagagaatgctt

SEQ ID NO: 124784 - DNA, 1663 bp, Homo sapiens
ggtttttctaaaaataaatgataattttgagaaaggaataagagcagcgacataattctgactttgagacctgtaatctttgatagcaaactttttttgtttttttttgagacaaagtcttggtctgctgcccaggctggagttcagtggcgtgatctcagctcacggcaacctccgtctcttgggttcagatgattctcctgcctcttcctcccatgtagctgggattataggcatgagctaccatgcccggctaattttttatatttttactagagacatggtttcaccgtgttggccaggctggcctcgaactcctgacctcaggtgatctgcccacctcggtctctcaaaagtgtcgggattataggtgtgagccatggcgcccagccgcagacttttaaatacagcatttagaaaggtttgatgacatcttatggtctttaattggactgaacttttacattcttattagtacacatataaaatcaacagcttttcatgattcggcatttacatcttaaatcctgcactttgctctgttaggaaatagagcaacactggatatttcaagctaataggaaaagtctacatttgatacagaaaagttaccttacgcaatattgaggagctagtgaacaagggttagggggtgggggtgccagagaccagagcatgcaagaatgagagagagattacattgtcctcttccattttagttggtagtttctactgaaaactgtaaagtttaactttttggaattgtaactatccaaagtgggaatgtaaactatattgaacaaaatttatttagcctgttaaaaagtcaacctaaaactatggttaattagtttatattattacatcacttttagtagagactcaacaatcagtgcagagtaagaggagctattatcaggtgagctgactgctacccatatggggctttaagataatgatgagtttaaatttcctcttagagctaagtgagaataaaactggaggcaataaatactcttggccaaagccattaaatgaaaaagctgggaattctccagctcttgacttaaattgtttgtttatcagctggcgcctagtctggagtcaagagctggagatttctatctgtgacagaactttgaaactcttgcaggacactttcatttcaacttaaggtaacttgagtttatagctttggctttaaagattactaatgatttactcatttccttaccatttaaccagagtggactttttcccaggaagggatctgtgtttatttagggcctttgtctgcggagggattaaaaggcagcccaccagcattgtgaacttgatggtcataaaaggtcaccaaaacacaccataaaaacattcttaccatggaattaattatacagtgtaattttacaaagcaacttggttactccatcttaccccctcccccatatttaaacatttcaacttttaaaaagtaaatctttggtataattttggtttatgaaaaaaatgttttatgatgtttaaatgctgaggaaattgtcatgtgcatatgtacagtttaattgcttaaaaatcttaaaatttttgaaatgaaaatgatcatttattgttaaactgtgggatgaataacttgtttgggaggaggttagagtagtcagaa

SEQ ID NO: 124785 - DNA, 1465 bp, Homo sapiens
attatgttagccatttacattttcccataattttacttatcactctgtatccataaagtatcctttctgtctctggagaatatctttagcctgggattttctacagtttgcacaagtagttcagaaatgtttggtaaataaattccaagggtttctttgaaattagtcctgaagaagaggtgcccataaaaatctctttttacattctttggcatgcctaagactgccttgcaacagttgtcatagacagtaattcatatataaggtgttaagttcttaacacattcaaagaagactggtgactcactgcccaagataacatggttgaggcagctccagcagtttgtcgcctaagaaaattacagaagaatgtgttagagaaggcaaggtgatcacttttacagtattttttattattgctctcattatttattgttagtaataattactattattgccaacaacaagctactttatttctaaaaatttacttttgcagtttgcaattcctttatctccagacctgaaggccaaattttaattgcactgtaatttccaatcaagtaaccatgacaccagctgttcttgccaggctctattctgtggtagagggggaacctgtgttctctttacatggttatgctggaaagtatatggataaggcaggggtcctgcctgaagtaatcccagggtatttttaatgtcctttaattgccattcaggatgtaagtcagacacaattgggtctggtcacagtttaggactactgagccctgtttatataaaggtgaatttagcaaataaatctgaagctattacttatgtacaatttatttttctttaacatctattgatttctaagcaatgtgaaactagttccagtatactctatgtattatatgtcttcattttgttttgtttgtgatccctggatagcattggcagtgaggtgggaggaggagatgtaattgagaatttgacaagggccttgctaccataatcaaactgaaaccttatcagacttatttgaagttttcaagaagtccgattttcttgaggtttgataatgttaacagatgaaaagtatatgacgttaagttttaagtctgtctttctatgtatttgccataaaattctgttttgcattgcttgggtgatgtagttgtgaacattttaaatttacatgcaaatttcatagtagtcatctttccttcaggtccaaggaaagtatggcagcagatatgccttctgtcttttgccttggagggattttgacctgacctgaaggtagaagattgttgtttttttgcatttagcttaggttacctacagggataggaaagatgtggatttcttttaaaagagtactaagaattttaacattagtatctgacatctttttgctttgagttattattgactgttagttttggttatcataattgtttatctactacagcctcta

SEQ ID NO: 124786 - DNA, 2364 bp, Homo sapiens
agtcaccttgatcccagctacttgggaggcagcagcaggagaatcgtttgaacccgggaggcagaggctgcagtgagccgacatcgagccattgcactcaagcctgggggacaagagcaagacttttctcaaaaaaaaaaagaaaaaaaaaaggaaaagaaaaagagaatgtaactttaaaaatcaaggtctgcatttctttcttcaacaaaatatcttgtacttgaaattatttatatagtccttataagattatctacttgtttctgattatacactttaatctcatcttctgtattatgctgacagcatcttcaccacaagggacttgccttattttccagttcatacaaagaaggcactagggataaggctttaaagatactcaaagtcctttgcctcttgaaacttatagaggaatagagagagttaacataaaaataatttcagtgataattgctatgaaggaaaaaaaaaaggaagagtaacagtttgggagatagaaagtattgagagtgctcttttggatagtggatgggatgccctttctggggaagtgatatttaagcagaaatttgaatgaaaaggtttagagaagagtgtttcactgaaaggagttgctctgtaagggctctgaggcattgaactagcttggtgtgttcatggaacatttatctttgtatcaccagacttagcagttgtttcactcagagtttgttcaattgaataacctgtacctgactccccgtatgtctaataccatgcctttgtttattagtttgttgtttccaaagtaaagtgaactgggctttatataaattagcccatgacacaggtctcataagtatgatgccctattaacttgtgcaaatcacatttttatgaaagttgtaatccttatttaatgtctcatgttgtttagtcatgccattttggatacatacacgtgtgtgggtgggtgggtgtgtgtgtgtgcgcgcacacacgcagtgggtctgctaccacagtgttggttccaacttgatcagctctcgtctataatgaatgctagacatacagcaaattaaaactaaattaaaaactattgctagtgactaatgaccaaatactgttcagtctgctcccagggcatcattatagctgtgcttgaataattgaagaataaactcactgattgcctaatacatctgtagatttgcccagagaccttaagttgaagtgactctgaagtggcgcttgtagttagccccaggcactgcatgttggcacgcctcattgatttgctaaactgtattgttctaggtaggaattaatgtcaaaattaaataattgaacttgtgtgtatgtgtttgtataacagttccataccagaaaaccaaattttatactctacttggctgagttaagttttagtaatttgtttgaggcattcttagaataagcacaaaacctattaagaaatttctcttagagaggtaggcttgcttggtaaatctcagtgagtttcatatagacttcattattgtttttaaaatcaaccatgcaggcttggcccttactgctcactgaactggatacctactgtttttccactagatctgtatctaatttatggtaaaaggaccacaaaaaattatttctattttggcacctaacactattatagttaagggtcttttggcatttccattaaaacgttttcttagagaagtttataacttggcagttttacttggctttgggctgaaacattgctgtttttgtccaaaagcaaattcttccatcaaatttcatataactgaaattgccttggtttataatgtgtggagggggaagggctatcagaataggtctttttttgatactctcacaagtgcttcgattatacagtagtcttgtatgtgatatttattcttatgttttattcttacctcagtaagaatttatttttgttacacacaatgaataagttctggagagctgttgtataacatagtgcctgtagttaacaatatcgtgttgagtattaaaaatttgttaagaaggtagataccaggataggtgttcttaccacaaagcaaccaccaccaccacatttggggcatgaggaaacttttggaggtgatggaaatgtttattaccttgaatgtggtggtggttttatgggtatttgcatatgtccaaactcaccaaattgtatactttaaatatgtgcagtatatcaattatacctcaataaggctgtttaagaaaatttttaaaaatgatttgaaatattttggtaaaataattcatctccatgggttcctgtctttaaagagttatagtactattatgtattttaaagttacttttggccaggcg

SEQ ID NO: 124787 - DNA, 1852 bp, Homo sapiens
tcttgtctcactggaaaggtcttcaggggcaattaacaggcatggagccataatgtcttaagataacaatgctttcttctggaatacctcctgaaggacctgcctggggtttttttatagcttacttttctttatcaatagaaggattatactctatttactctaaaaatatagtaaatccataaactagtagcggagttgttttattttcattagcaagtattatgtgctgtacataattgttgtgtgctacacttttatttgactagcagtgcagtaggtttgtttataccagcatcaccacaaacatgaataatgcattgtgctgtgacattactaggtgactggaatttttcagttccgtgatgatctcatgggaccagtgttgtatatgcagcctgtcattgactgaaatgtcattatgcagtgcatggcggtagtatgtctagctgttaaacgtctcttgtgctcctagacttcagttttattattagaaaggaccttactaataatttaatttaactctattaacattttatagatggaaaaatcgaggttcaaagaggataagtgacttgcccagggttctctaggttgttagcaactctaggactagaatcagttttccagctaaatctaatgttcttcccacactatgtcacaccttcctcccttcagtctcgttccttggtggcctcctgtcttcttcatagcagtcatagttatcagaagggattctcataactccatttgtatccattttatttaccccggcaactgcttccctatctcctatgttgctagctgataggcactggcatgtagtaaaaacagggaatcgccatatttcctagtcctcagaggctattttataatcttaacatttctgttaagattagaggcttaacatttctgttttagattcacacgagaagaatcattgagaagccactattcttgaatctggagaactcaggagagatcagatcagtcctattaggttaggtccatcctggaatgtttgttaactggctctaaggggcatttgttctgtggatggattgggatggaaccagtttttggggtctttcctgattgagatccacctgactagtgctgtttcatcaaataagcctccagagaaagaaaagtaaagtgataccttgacatatctttaacatgttttagtttaatgggataagatctgtttttagatataaggatttgtgaattgaacagaattatagttgaaagcaaagggatgagaggatttttatatagcaacaatgatagtatgaaatccatgctattgcaaggacaactgtgttatgcttatgtttgtgcctgtctcttctactagactgaagagggcagacaccatgtcttatttaattttatatctccaatgtatatctccttgtagacaataaagtatggttggttgaatcaagaatcttttcttctttaaaattcaagactgatgttaaatattttgagccttcttgcggttattcatctttctgaagctgtcctccaggttatctccagattatttacctctctgtgaagtgtaagctaactgcctctacattttgttatcagtcaggtagcaggcatatactatgtttaaaatgttgtattgtaatattaggtgccattgtggcgagtgtgattatgatcaatttagtggggatgagataagagagaaatactcagaacaacttaaagaggaagttcttacattaaaagtttagaatttagaaaaacatactaatacttgcaaatagttacagaagtatttaacaagcagaaatggaactcctcattaccagtttaatctctaacagcattc

SEQ ID NO: 124788 - DNA, 1023 bp, Homo sapiens
tgtcaaactgtacatcttttttttttttttttttttttctgagacggagtctcactgtgtcacccaggctggagtgcagtggtgcaatcttggctcactgcaacctctgcctcccagggtcaagcagttctccctgcctcagcctcccgagtagctgagattacaggcgcctgccaccacacctggctaatttttgtatttttagtagagacagggtttcaccatgttggccagtttggtcttgaactcctgaccttaggtgttctgccctccttagcctcccaaagtgctgggaatacaggcgtgagccaccatgcctggccttaaagtgtacatctttatcagagcccacatcacgctatatttataggctatgattctcttcctcttgagtttaagcttttttagtgcagggagtaagtttttttccccaatttttaaaattaaatattgaatatatgtgcaacatatttataaaatatatgtgcggtataaagtgtaagtatacattgaactaatacgtaccccctactcagtttaagaactagagccttgctatttattacctttgaagttcttgtttccctgatcctattttcttttctctctgatgagaggtaaccagcatcctgaattttatgtctcattcccatgcttttttttttaagtttaactccatatgtttttatttctaaacagtagtttattttccacctttggaacattatagaaatgttccataatgagcatattctgtgacttgctttttcactttacactgtatttctgagtttcaaccctggtgttactagagccactggcttacttggtacctgtgtgagaattagaaagggcacctctctataccaaaatagcccttcaggtgagcagaacgaacctttgtataaagaaaaaggtatgcctttctgtagacacgtgtagccttatgtcagggtttgcggtttgacacattgaatgtagattaaatgtcagcccctgctcacccatttggctagatgccca

SEQ ID NO: 124789 - DNA, 3635 bp, Homo sapiens
aaaaaagttatgtcctgtgggttagtacgtttgtagtaagaactttgggaagttggaattaaaggttagcagtagctctttaacccatttatgtcagaggttgcaaatttttttgtgaaaaatcagaccttggcaatgaccttgagtagtaggatgtactgcttgagcagtaggatgtaaataactcccacaaacttagcataaatggaacactaggcataaatgggttaagtaaaatacagtttaggtcagtttcctaatcagtgcctgtcttccctggctctgagaaaccttttggttaattgctgcttattgccaaacccttgcggttatgttaggatgatagtgattgaattcccagcttagttttgtcatgtcactgtttctattcctaacttattttgttgttgaatttcagcaaagagctagagcaaactggtagacactgtagtcacaagaagggctaaaagaaagggtgtaatttcaggaaactgtaatatgtgaaatttgaagtttctggtaattgaattgtgttggaaaactaaccaacttggaaggaagcaaaagacacttggatattaggcagaaaactgataagataaatgtttagatttcagggaaggttaaaagacactcattttggatggagctctcagggccacagtgtgtgtggtccagaggcatcctagctgtcctgttacctagcctgttacagttatggtcctgctttacctctgaaagaaaagttactaaaaacttctgaggagacatagccctacatttgttaatatcctttgctaaggaatatggtgactagctatcagaacagtttggtccagggagtgtttttaaaaagtttgactttacattgaactataatttgcttcttatgggtgattctttatttttttctgggtgaggatcatttccatacacccagtgcatgtataatttttgggatgattttccatttgttgaaaggtttaagatcttaaaatattaagatcacagattgataaacttaattcttattcttttaggctaaagagaaacctacatactcttggagtatgctatttctcttctgtgaaatatacccaacaattgcatttgaattgtaacaattcatatgtctaaaattgttgtttaaacaatttttaatatgtatatttttcttttctttttattttagacgaggtcttgctatgttgcctagtctggtctccaacctgtggcctcaagtgatccttctgccttggcctcctagagtgctggggttacagccttaagccaccatgcctggttatgtttaaaccattttgtgtgctatttttttaatagaaagatttttccttttaatagtttttatcaatgatttttctgttttcttcttcagtatttatatttattcagttttaattttcttatcatgattccatgccctctgggttagtatatctatagtaagaactttggaaagtttggccaggcacagtagctcacacctgtaatcccaccactttgggagactgaggcaggatgattggttgagcccaggagttcaagatcagcctggacaacatggtgagatcccatctctgtaaatataaaatttaaaacttagacgggtatggtggcatgcacctgtggtcgcagctacttgggaggctgaggtgggagactctgtcttaaagaactttggaaagtttgaattaaaggttagccataccctttaaataaattataatttaggttagagtttcctagctagtgaagatagacactgccttatagtgtatatatataagttaccctaaaaagccaaaaagactgtgagatttccagattctttcatatattttcctttctacctgcttgatattttattttgtcattaaagttacaattataaaataatatgccatcccaacacaaatggctagattttaattgcttatgtttattcttcattgtggaaataacacggatatatgaaatttgcagtatggcttgttaaagacaaataaattactttttaaagatccagctactttacagacaaaaatttaagtcctatctaatacccttttaaagttaataggtgttttaaattgcttacatcttagcttcatgtttattattatggttagtgtgtagttcatctgaaatcagaatttataccatgtagtatattaggttttattaggttttttttggatcttttgaaagagtttgggtttacttttgaagtacaattggtctcaaaaagaatgagatttttaaacgtgttctaattaataatgtttttaatactaaactaaaatcctccttgatatatggcagcttttcagcagattctaattctgtaggtagttgcatgaaatttttactcagagttgtaaactacaaatatttttatttatttacttagaaaagtgaagaagggctcattattaatagattccagcactattgatcctgcagtttcaaaagaattggccaaagaagttgagaaaatgggagcagttttcatggatgcccctgtttctggtggtaagtggtagctaaaatatatgcaaacctatttatgtttgtcaaaagtagcaattatggttttgttgtaccatatggttttgtagtagttatttttagacttgttacaggattctcattaaaaataaagccaaactgatacgttatttagtactctcaagtctaaataactaacattgttagtcttaaattcagataaaaaagtgtcataactttgaagtgttgtgaatttttggtccatttactgtggataggaatacatcagtttttagaaaattttttttggaactattgaaaaaaaaatcagcttaaataatcctgtaactgttaaagaaattgaacaagtgggaaaaaaagaaaaacaattgtttcacaagggaagcattggctcagatcattttacagatgaatattaccaaaatttcaaggagcagatcatctaaattttatacgaacttttccagagaacaggaaaagaggaaatacttcccaattcattctgtaagacctttataactctgatatttacaccagatagaaatgttataaaagagaaaaaataaatataggtttattttagtcatgaatgtagatgtaaaaactttatattagcaaactgaatccaaccatgtatgaatgagattaaacactataaccaagtttcctttagcccatgtatgctgagatggcttaattttagaaaatctgtgcatataatttaccatgttaacatggttaaaagtcatatgattgtctcaattagaagaaaagacccactaatgaaatgctaaaaatttactattaactcatacattaatagcaggtatctgggtagtttggaatggcaggattatagtatggcttctctgtaatttccaagttttccaaaattactgtgtaatcagaattactgtgtacacatttatattatgtatttgtagcagtatagcagtagacagcagaatatgaattttattccagttacattaaacttgattgtgggctttagaattaaaaagtaacatataataatttaaatcatttcgtatttttttataaagaacttaatgatcttgtagagg

SEQ ID NO: 124790 - DNA, 1032 bp, Homo sapiens
gaagctggagatgttacatagtttacacaaaatcacccatgacttcttggctgagctgcaacttaacccgggtctctggcttcccaaattagtgttcctttcactgatccatgctgtctttgcttatccattcaattagcaaatgtaattgaaggactctaattagtttggcttctaaaggcttttgtagttgatgtcagactggcaacaaggttggtttgtttttcctcccagcttttgagttgtggccagattttgtcagtcaattatttcagggtcttgaagtcatcacatggatggtgagattgtttgaatgtctgtttatctgtctgataaacatgcctttgtagtacaaattagagactgttaggatgtaccaaatacacacacacacacacacacacacatgcacagagagagagagaaagagagagagtgtgtgttattaggtatagagcagttgtggccagtacagtggtgacattccagctatcactactgttgtgtatttcttccgggcctgtgagctttgatactactttcctatacaattgaggggttagcagtattctggcaatgcaaccatctcaagaagcagatgctagggatgcagggggctgattggccaccccatgcacttggcaagtgcccgaattggcactgccagtttatgggattaagaaacttggagctgtgaaacatccttagacctgtgagctaattgttggtgcccttcagggcccctctaaaggagttatgtagatggaatttaatttctttcagtgggagagaactcaattcctaagagagagttgaaattaactcttagacctcaggtcttactgatgtcccttaaaggtctggaaggatggagctgcaatagaaggaaagtatgccattgttttgcattgtgtttattagagtaggatgaacaaatgggactaagtaacatatatttggtatagtataggagtagagaagtatgactactacaactttttttttcttatttcactgagctctatttttctt

SEQ ID NO: 124791 - DNA, 1062 bp, Homo sapiens
gtgtgtgtatgtgacatctgtgttgatgattctgaaatgtagctacctgttaacctatttataaactagattgctggaaaataaggtgcctagatcagtcaagccactgatcattggtctcccttgccttctcttgtgtggttctgtacccacggagttacaatttaataatatttatctattgtatgggttgtttagtgggttgaatagtggcccacctccccaacccccaaagatgtcctataaaattgttaggagaaaacacagaggtaaatctttatgactttggatttggcgaaggattcttagatatgacaccaagagcatgagcaacaaaatgataaataggtaaattggactttatcaaaattaaaaacttgtgctccagagaacaccatcaataaagtgaaaaacaattcacagaatgggataaaatatttgcaaatcatatatctgataaggaatttgtatctagaatatatgaagaagtcttacaacgccagcataagacaagtaactcaattaaatgggcaaaggattttaatagacatttctcccaggaagatatatgaatgacccagtaaacatgtgaaaagatgctcaacatcattaggcatcgtagaaacatagtcagaacagccgggtgaggtggcttatgcctgtaatcccaacagtttgggaggccgaggcaggtggatcacttgaggtcaggagttcaagaccagcctggccaacatggtgaaaccctgtctttactaaaaatgcaaaaaaaattagccaagtgtggtggtgtgcacctgtaataccagctactcaggaggctgaggtgggagaattgcttgaacccaggaggtggaggttgcagtgagccgagattgccaccactgcactccagcctgggcgacagagtaagactctgtctcaaaaaaaaaaaaaaaaaaaaaaaaaaatcaaaaccatgagacacacccactagaatctagattaaaaagttagataacaatgtgtttgtgaggttgtagaaaagttggagccctcatacactgctagtggaaatgtaaa

SEQ ID NO: 124792 - DNA, 1652 bp, Homo sapiens
gagttatagtggatctctagtgtttttaggctatcattcatgtttaaagaattttggtaccagagtttatcatgttggatgataacatctgctggttaagtcttgagttgtttggatttgttaaactttatcaataactcaaattacaggagaccatgtatcagtatccgaatatagtttgttttttctagatatgagggaaattcttcttggtcaagttgtagagtggtaactgaggatagtgtgtgatcccagaacagagaatactaaaaaattcctgagaaaaaggtgagaaaaaaattacacagccagcttctagataatagacttgaaagtaaatactgaaaaatgctatacctagttacagaacagctttaggtaacttagaagccattttcagaactatatatctgaatctttttcctttccatggtttttgtgccatatggaaattgcagcagtatagtgtgaggatggaagtatgactttggaacttttcagggtagtgttgtggctgcttctgcctgttcagtctctgaatacggatattacactcccagtatagcaggcttacaggcttaattaatgtagggacttagtagccttgttggagagatttgatcagtcgtatagtagagaatctgggaaaggcggccttttaccatcttcagagatggtgagcatttcaagttgatattcagtctgagatgaaccaattagtagttattttgaggagacagttattactttttgggataacacatctatttggtattgccattttacagtggtttatctgttagtaagagtaacaagggtacttgatctctaaacagaggaaatatcttcaattaaaaacagaatttaaccaaagagtggggtaggaattgaatggggactattaccctagactggcaaagcagaagcttgtgaccttttacgttgttacagacacaggtactcttccctctatgcctgtagtacttccagcttgtatgtggaacgactgtaatgatcatcactgctttgtgactctctcctgctttttcccagaattctagagctttctgatgctctgcctgaattacctcatactctgaagttaccaggcttacctctgtttcccaacaagtttcttatttctttagtgttgctaattttaggtaggtatgaaggaaggctgccttaagaataaggcttatccctgcatgaaggagatatttatgttttgaaagggagagaaaagaatctaatacagtatttagtgagcacctactatgtgtcaggtcttttgctaaatattttgtatgtattatctcattttatctttgcaacagaagtgctatcaagaagccaatgcttggagaagctaaataatatccctaatgttatatagtggttcttattatctgcagtttcactttctacgatttcagttacctatggtcaaatgtggtctgaaaatgttaagtacaaaattcaagaaataaacaatttataagttttaaattgcatgccgttctgagtagcatgatgaaatcttgtgctgtccagctctgtcccaacctggatgtgaatcatccctttgtccagcgtctccatgctgcagacactccctggcccattagtcacttactagccgcctcagtgat

SEQ ID NO: 124793 - DNA, 1061 bp, Homo sapiens
tattaggtgttttataaatgataacattatttagtttattgttaaaaatggtaaaagaatgttatacaggtacaaaacaggaaaaatgcttaaaattttgtgaatgtgccccagaaaactaaataattagaagttagtctgcctgcacattgttgataactttaaatgtggttaggtccattagtttaaaatttgccttttaaaagttagtgggttttttttttaataaatattattatttatttttgagatgggatctcactgtgttgcctaggctgttctaaaactcctgggctcgagcagtcctcctacctcagcctcccaagtagctgggattataggtgtgcaccactgcacctggttcctgaaagtttcttttattaaaaaaaaaaaatctaacaattgacttgctaatattaaatgaatgtttacaataaaaaatgttatttgcccctattgaaaataatgtattgaaatcagtgtgttctaggtcagtggcttcaaagactccagttggattcattggactgggcaacatggggaatccaatggcaaaaaatctcatgaaacatggctatccacttattatttatgatgtgttccctgatgcctgcaaagagtttcaagatgcaggtgaacaggtaagaccttttctttagatttgttttagattttgagaatgaaaaatgaatatacattcaaataagtgacagcttcttagaagtatacccaatggagttgtaaacctaattcagtgttaattttatatatatgtaatcattcatccaacatccagatttgcagtaaaggagagttctcgttagacattcaggggtatctattctttggcaggtgacttggaacattttgcacatttggtcagagggccttgttttagctctgtatcagttttctgagatagtaactttactgattgtgctgttaaagtagttagtttggtggaaataacctcctgtgttattaaaagcacatatgtctttaaaacaagagtaggcttagagatataaagcttagtttgagttgaagctcagatacatgct

SEQ ID NO: 124794 - DNA, 1001 bp, Homo sapiens
gtgtttgttgaatttgtgaatgaattgtggttctacgtgaccatacttatgaattgtttgacctagagtgaattgcctgttaaattaactgtctttaaattataatcttcctagttgctgaagtttttagattgctaaattacaccttttcaaccttaacacagtaatgccacattttctttctggctattattgctagtttgtttatgagcattagttagagttctctgatgaagtgtactcattctgtttaatatcaaaataaaatttcagtttggtgtcacttttctgtcattgaattccttgcaggccagaaagacaaactataccagtgtactattataccagtgtactattataccagtgtattaaacttagcgcctgttaaatgatgttgcacagaaatgacacccacatttaatggaagtgttagagtcagtcattaagttaaaggaattaaatatgcttccaacccaagaagacctctagttcttaagcattagggcttcaaataatttgcttttaacaaatctcattccattcagattcagttcagggaagagcagattaagttcagttgaggggacctgaaacttaaaagagggactgtgattagttgttgcactacaaattttaaagctggagttcttgaaagaaaaaagaaaaagaatgctgggaaatggaagagcaaggagagttacttctctcttttccctcactagactgtgagcttttaaaggacagggaccatacgttgcttgtgtctgtctctgagctctgtcatagtacttcatgcagtgaatatttattgagtggagttctaaatctagaaagtgaaaaattgcatctaacgctatttccatagtactgtaaagcctccccactctgtaacgcattactttgattcatatgcccacggagtaatttcaaaaagtcttatatgaaaaataaaagaataaataaaacctgtgtagtttttaaggcttttttttttttttttt

SEQ ID NO: 124795 - DNA, 2425 bp, Homo sapiens
atttttgcattttgacacttagtgaaacctgctttttgatagcacttaaggttatcaagatacggataactccccttgttacattggagaaagaggtcataatcggtaaatttgcatctataaatttagaaacaaactttgccaagttttctggctagtttcttttcattcgtcctcagtaatagacactaatgctagtttcttaaccagtgaaccagtatcacctttgtatttggttgattgattttctcccagcttggttttatttatgttttaactctactttttccacgcactactgtcagaagttatttaaagagagatgcattatttaggtttgagagtttttagggcaataatcattccattatactcatggatttctgcccctttgggtgcaaattattttatatttgccaagcgcttattcaggtgtttcaccttaactaaaagctttctttccccagatacagggcttctcctacagtcatctatacttttttctatctctttggctcttgtaacccactaggcaaaaaggggcagttggcataggacttgacctgtactgctacaacttgaccatttttggtaagagtaactaatacttattatcaatcgtgtgccaggcactgtttaacgctttatatgcatcatctcaagtaatctttacaataatcttctgaagtaggtacttttattgatcaaatgttgtctagagaagttaagtaacttgtaacttcaatggtatacatctaagaagtgaacttatcaggataggaacctaggccttcccaactcagagaaaattttaaacattatcaccatcaatagataacttattctcttttgacatcaggtcatctaattatactggcctttctttaactttgccacagagaaagatgaaataaagagagctgagtcctttgaaaactttatcttcattcacattcatgttggcccatccaacatggcctcattgttcttaacttcttcagcttcagtaacatcagcactctacttcagtttttctaggatcttagtagtaggagtgattctcttgctgagatttcaccagcagaactagtctctggttgatttaacctcctctgtgattcttgttctaacaaacatactgttacataatgctcatcacctggtcctttgactccctcccttttcctccaagtacatagacatgctttcttgtttcctcatttcataaggtctctctctaggtttgtctgtacccattctcaaacttatttataattaggaatttcactgatgcctaatactgtttttttcagcctcttgttgtatttctggataaatccattgttgtggtctgtttgtgcctttccccagctgtcacttagcttggtgatatggagagtcacagaagtttgctgattagatacaatgctttcattaatctcttgtttattccccattacattttcagattttccacagcatttccagaactttaacttagggctggcagctcctgaaccagtcatttggcagaaggatgccattaccatgtattagtttagacagtttgaaacttgacctcggatctacgggaaagaatattggagagtcaacctgcaatgtgtaatggttgctgtgacactgtttacctttacacagtccacttttatcagcagcattactttgtaattgctttagaactggcttttattcccatatgcccatttgatgaaacttacctagtttattattcattcacatagcatatattaaatttcactgtgccacttcatttatttcattttattataaaagtagttacaaaagttacatgctcatggtaaaaaatgggaaaggttataaaattaaaagtaaaattttcttcaactccgacccagtagtccaactctccaggtgtaagtactgtttcgtgtgtatccatacagaaaatcagaaaaattaatgcatatgtatcattttttcttctcttatactgtatcctatagataatgctcagcattttttttccacttaataacttatcctggagattttttcctataattttagataaatgtcacctttttttaaacatttgcacatttcattgtgttgatttactgtgaattatcaagtgtcctacaatgtacatttagttatgaattaagtgccctattaatatataattagttatgaatgaagtgccttattaatacatagttatttgcagttttttggctgttacaagtagtgctgtaataaactatatctttgtgttgttcagaatttaatacatagtagggattgctatggcccatagttgggcaccttgtttgtaaataaaattgtattggaacacagccatacccatttgtttgtatgttgtctatggctgctttcaaactagagtagatgaatgaaatgg

SEQ ID NO: 124796 - DNA, 1055 bp, Homo sapiens
tacttgtttcagattcacaatgacatcctttcaagaagtcccattgcagacttccaactttgcccatgtcatctttcaaaatgtggccaagagttaccttcctaatgcacacctggaatgtcattacaccttaactccatatattcatccacatccaaaagattgggttggtatattcaaggtaagaaagctttctgaatatgttctccatgtaaacacttaaaattttcttttaaaacagattgataagtagcttttacttgccttaactctgcattaagactcatttttgtaaacatcaccatgaaatatttaacagtggggagtagataaaatggatgttgggaactccatttcaccagattttcctctccctgatcagaaagtttaccttcacttaaggacttgtgaaaattttttcagaatcttcttttcctattttctccattcattacctgcaataaaaaaagatctttttctttgggttcttatattatttaccattttttccagtcatttgaaattaattttatacagcttgacagccatgttattatcccttctactgtcctgcatggcttaaatattgctcagattgtattacacagttttaagagtattctgtttgtattacacagttttaaagtattctgtttaacatgactgaatagtaaactctttgatggcaggagttctagttcttatattttaccagtgattttgtataatactttcttgaaaatgaaggtgatcattacagtggtacacctcactgtgcaggactttttctggcaattttaactcttcaaaatgtagtggaaaaccaaaacataagaatgtcctctgagcagtcaaaataatgtcacgaatgtccaaacagtaaaacacattcacttttctcctgtgttattctgtagtcttcctcagaatcagtttgttttattttagttaagatttttatgggcttgaaattttgattgtctaatctgtataaagttaaacaacaaggaagaaagaaatgaatagctgctagaaattaggcacattgaaagtgt

SEQ ID NO: 124797 - DNA, 1040 bp, Homo sapiens
tgatacccagcctgcatcattagcaactctgttgctaattttgaataatcagatctttcacttaaccaaacagccggagtaaaagttatgtgaatgtggtttctctcactctcaaaatattaaaatatcttattgtactatactcacttattttggggtcttggttgaccttaggtaactaaaaccacacaaagtgaaaccttagataaaggatgactactgtagtaatgttaaaggtccatgagtttttgttttttaaactttagagtcttagaattctcacatctctgagatactgttctaattggaattctcacatctccgagatacttttctagttgaggaaactggaagtgcaaagtggtcatgtgacatgttcaaagtcacattgctaatgcataacatgtcctatactagacaaacaaaacctccctgtaaggtactgttttcactgcatcctgctgtcaagcacatcaaaaactaagttgcctgattagaaggtggatccaaacagtgattttatgcttgaatatcctgtttcaagcttttgtttctttgttccttgtttttccttttcaaatttttttcctccttcttctcttttcctgccttggtctccccttcagtcctgtctcattccactcattttctgtttttaaaaaaagtcctctggttgtaaaaaaaaattacaattataatatatataatatataaatatttataattatacttatttataattataaaattaaaatgtcctacagtcccactacccaagtatatccctacctaattaatatcaatggttagcactgttaatgttttaagtatttccttccagccttgttttattaatggaaggagactttcagtcttttttgttttttgttttcgtttttgttttttgagacagtctcgctctatcgccgaggctggagtgcagtggtgcgatcttggctcgctgcaacctctgcctcctgggttcacgccattctcctgcctcagcctcctgagtagctgggactacaggcacccgccac

SEQ ID NO: 124798 - DNA, 1050 bp, Homo sapiens
taatctgagttttttgctttatagttgaaaattgagaaaaccatgaaagaaaaagaagaactgttaaagttaattgccgttctggaaaaagaaacagcacaacttcgagaacaagttgggagaatggaaagagaacttaaccatgagaaagaaagatgtgaccaactgcaagcagaacaaaaggttagttgtgtcttatgtaactgattgaagttgatagtatattgcctgaaacccacctttttaaagagctgaaccaattaagtaagtgaaaaccaggtactgagaaaagtagccttttagatagacgtttatacaagaacaggtcagttcctattaaccttctgccacagctgcttttatgtttgtaagatggttaaaatacttttagacttttggtaccaggcttgttgaggtagtccctgacaactatttccagatgttttacatctaattgtagaatacttgattttttttgtttagaaatacaattagaaatgataaacgctgaataaaggaaaaatgggatacataaattaaaattacttttcaaaaaagcataatttggtgaaataagatgtagtattagacaaaattttgaaatttttaatgggtgaaatgctatgttatcctaagaaacaaactagttaaaattggcagaatttcttgagctaagaaaaagagagacaggtacaatgaagcagaaaacattgtggcttcattagtgatagaaatagacttgtaagaagccaaaaacagtgaaaaaacagttatctagtcattgacttgtttatttaatattttcacaagaaaagcagtttgttctgaaacttacacagactgtgatcttatatattacagtctcatgtacagtagagccggttgggcatatttatgcccatttacagtattgagctattgtttcctgagggtggggtctgttctgttatccttttgtccaacaaggcctccagcaattgcttaataattgctaaatgaaccgctagtgcagtgattctcaaacatttgtatactccagtggagtggtta

SEQ ID NO: 124799 - DNA, 1032 bp, Homo sapiens
tcttgtcgtgccagatttgaatatgccaaataacataatttgtttccccaaaagaacaaccaaatctatttgcatttttaaagagaacctgaaaccattaaatcaaaggaaaagactttagagatcaggtgatgttgttagggcttagaataatctctctggaaaataaaaaagcttagaaaagctgtgttctgctcctgcatgcttaactagtcatttggcagaacctgggtctcctaaatcctagtctagtatgtctttccttcctttcgttgtctttgggttagaaatataatggtattttaaactttgactaacttaggtcatggagttagaatattcttgacattttcaaacaccattacaggtacatttgaagaatacagaaatagaaaataccaagcttatgtcagaggtccagactttaaaaaatttagatgggaacaaagaaagcgtgattactcatttcaaagaagagattggcaggctgcagttatgtttggctgaaaaggaaaatctgcaaagaactttcctgcttacaacctcaagtaaagtaagtacttttgctatatatatttgaagattgtaaaacatacctatgaaatgtatgcaatatgattttcatttttaattcccccaagcttttgttctaaaaaagttcaaacttacaaaacagttggaagaacagaacaatgaatactgatgtaccctaaaatattttgccattctttgttttatctccctcatttatatgcctttttttctgagcgatgtgagttgcaagtattacgataatttactctaaatactttagcatgtctcccttatgaacaagtgcattcttcttcatagccatgacaccgttattacacctaagaatttagcactgattgaataacagtcattctcatagttagttcacaatcacattgccccaaatgtattcttatataatctttaaaattttgtgattcacagttagtcaaagactacatattattttgattgttgtattttgagtcggtttcagtc

SEQ ID NO: 124800 - DNA, 1040 bp, Homo sapiens
gttttttaaatgaaccttagtcctaagaatgtaaaactggacttaacaagagaccctatgttgctctgtagccaaaatcccaaaataaaaaagtggccggggacagttgctcacacctataacctcagcactttggggggctgaggtgggaagatcgcttgatcccaggaattcaagaccagcccgggcaacatagtgagacctcatctctacaaaaattttcaaaaattacccaggtgtggtggtgtgcagctgtagtcccagctagtccaaaggctgagacaagaggattgcttgagccaggaggtcaaggctgcagtgagccataattgggccactgtgtttcagcctgggtgacagagcaagactctgtctcaaaaacaaaaaaaagaaaaaaagtaagattgaagttggggttactattaacattaggaggtatcagatttttatttttttcttcaaatgtttgtttctttctaggacaagactgatacactggaacacgaactaagaagagaagttgaagatctgaaactccgtcttcagatggctgcagaccattataaagaaaaatttaaggaatgccaaaggctccaaaaacaaataaacaaactttcagatcaatcagtaagtatcattaaatttacacatagtaaaatgtgttgttagtatttttgttcgaaaatcaaatttgtaatattccaaatatcaaccttttaaatattatttatctctgcttgatttcaagtcattggccaaatattgtaataactcttctttaaaaaagtctggaattttaatttactggacagccaacaaaggaagcaagggcagtagcaaggaaaaaacagaaaaaagtcttcttttctagataatttccctcttaagttcttgataaatatctgtcactcaaaactcaatacttattattgactcttgtgaccatgacatctatcctcattggagttcaccattaatcatccctaggtcttagatggtgtctcagttgtaattggcaagttcttcatactcatattatg

SEQ ID NO: 124801 - DNA, 1045 bp, Homo sapiens
tactattataatagcaaagatttttacatcttaaagtgactagacttgcatagtggaaaagggaatgttaaccaaatgaattgtctcttacggtgtttattttgattattattattttattttatttttttttttgatacggagtctcactctctcgctcaggctggattgcagtggcgtgatctcagctcactgcaatctccgcctcctgggttcatgccattctcctgcctcagcctcccaagtagctgagactacaggcgcctgccaccacacccagctaattttttgtatttttagtagaggcggggtttcacgatgttagctaggatggtctctatctcctgacctcgtgatccactcgcctcggcctgtcaaagtgctgggattacaggcatgagccaccgcgcccggcctattttgattattttaaacagcttcattcagacttttctggtttgcagccttcttggtgtagtattcagtactggaatatttaaaggaaaagggaaaatgcttctcatttatatcaatttggcatagagaggaaaaagtgttgtttgtgcaagtgatttttgtttgtttttttaaatgtgctttgtgtgtttttgtgtgcattggggaggggaggggcattttttagagctatagaataaaatttacacattagcttcatgttactgtaatttaatttacagtaattatttaaaatattttgttgcttataaatagcaaaatcttttaaccaaagttaaaatgaatttttttttttgcttgagagaatcctgtggaagggttgattagaacagttttactcttgaattcagggtagttttttgtaagagtgaactacattttcgttaaagatgaaacaattctggatgaatatttcaagatttttctatagaaatagtattgaaaggaagatagaataatgttcaagcaaaaaccttcctcagggtgcttttttttttttttaaacaaccatattgaggtataattgaaatccaatgaattgcacgtacctagagtatacagttggatc

SEQ ID NO: 124802 - DNA, 1919 bp, Homo sapiens
attgcaccccagcctgggtgaagctctgtctcaaaaaaaaagactttttattcatacctaagttgtaagagattcacagtttaccctacattaactcaatgagaatgatgtactttcttggcacaaataaatttgaaaatacatcggctttatcctgctttctgattttgttatatgtggaggatacatttatgagaagttgagagccagcttttctaactgtgtttccaattgcattccaacttcataataggaaataattttattgttatattttgactaaatgtttaatactgctgtatttatgaaatattttattgctttgcttattcatctttgtttttgttaattttaggaacttaaaaggagtctagaaaatccagcagaaaggaaaatggaaggtcagaattcccagagtcctcaatgtttcaaaacatgctcagagcaaaatggttatgttctcacattgtcaaatgcacaaccagttctgcaatatggtaatccttatgcatctcaggaaacaagaggttattacagtatttttggtttgggattagctgcatctggagatttttttatggtttatattttcatggattagcaaactgctggtataatcaaccctaatacaaacattattttatttgtataattagcagttttaatatttaacactgtaactggcttcatctagaagtgatgcaccatgagatgagtactttatttacttattgcatatagttcacaatttaaaaaatcacctgggttaaaaataaaaacatctatttttttcacatgccaaagtggttctttatatcctgttcatcatatctgtatatacagatgttagttgtagtaaccagtttcactctacctttccaaaaattttattacagatggagcagatggtgctttttacccagatgaaatacaaaggccacctgtcagagtcccctcttggggactggaagacaatgttgtctgcagccagcctgctcgaaactttagtcggcctgatggcttagaggactctgaggatagcaaagtaaattgaattttcattgtgtgagcctgtcccttttttattttttagcttatgtagagagttaagggtatgtgtgcatatgtgtatctttgtgcgtgcatgcgtgtgtgtggaaggagagtgtgtgcttgtgcctgcacacaattgcctacttgattttttgaaaactgtgcttgtatttaaatttgaaaaatctaccagtatgcttcagacttatactttaggatttatatactaaagtaaaagattaagtttagagaataatctcagaatattgtagttatcagatagtttaatcttaaacatcactaagtaacttactatattcttttgattatagatgttaggcttgaagcagcaaagtgttaatggcagtgttatgcttcagtgtacatcttttctttatagcatttatatcccactttagattttagtgtggactcttcattatcttcagccagaaaaagagaaaagtgtatgtatcatatagtggttttcttttttggagaaatactatttgagatgtctttagtatttaggtaggatttcttattctctggcagcaacacaatactgatgataattgaattagtttgtatagcatgtcattatttttgtaaattttatttaagagattccttcaatatttaatgaataggtttgtttccttacagcagctctttttggatagataatatgttcttttcttcatagtagctctttttggatttcctgtgcattaagatgaatttaaaagaaatgctttatcgtgctctttgcaagtacagtggtatcatgacctgtttcttatttaatctagtttgctgcatttaattgctattaacctttgcagaaactgatcagtgttcagaca

SEQ ID NO: 124803 - DNA, 1039 bp, Homo sapiens
agacagattaaatagcatgccccaaatcacttagctgctgtgggtagagacaggattgaatctcatgagattggctatagaagttgtggtcttagccacctgtcaaatggactaaaccagaggttttcatactttcttagttctagtaacccctaggccaaaagaaatacagtaagtcctcacttaatgtcatatataataagttactggaaattgtgactttaaacgaaatgatgtgtaacaaaaccagttttttccctcatcaacgttgtaatgaaccgatgaaagaatgatgttatttctttcaacctgctgtaagtcctttcacttaaagttgcagtttctaagaactgctccatgatgttaagtaaggacttgctgaccgttaagtatttgtcttctaacaaatttagtgaccattaaaaaaaaaagaaaaaactacacataaattgaaagaaaattaatgtgtttatttcattcctaaataagtagttactaatgggatgtgtgtgactattggccactgtacaactcctcaagccttagaatcagattggacaagccaccttcatttcctgtttctcattgattttcacaatgtggcacttgctttatatcacagcaactgccaaaaccagcatctcgaagataagatggcattgaaaggaatgtgtagcacatttaaagttgaatctgtgagcgatctccagtgactgtagttgttcacgtggtatatgacaaatgcagatgctcctcaacttacgatggggttacatcctgataaacccatcataagttaaatatgtgtttttgacttgaaggatattttcagcttacagtgggttcattggaacgtaaccccatcataagttgaggaaggtactgaatgtgtattgcttttgtaccatcttaaagttcaaaaattgtaagtctaaccattgtatgttggagaccaactctaatgaatatttctgtgtacttctgcatatataatatccttagaaaattaaaattatcccacagtaaccctcggaattta

SEQ ID NO: 124804 - DNA, 1001 bp, Homo sapiens
cctcagatctgaagtatggtcttggtcctgaatatacagtgttatcctatgtttaaaagggtgatccagacatgagacgcaactagttggtgcataagaaggccccacttggctatttcatatctacctacaattgaccaaaaaaaattttttaggccagcaattattatttagcttcgctctttctagtgcaagaaactgcaggctggatcagtagttcaacagctaaacagtcataaaatagtcattgtgcatgttaaatttctttcaatgctttcaaagataaattccaatttctatttacttattcattgtgacagtattactaaacaggtaaggatgggaatattttgttatactgtgtatagtgaatgtattgtactgtgtctgtgaaaactgtgctttaaattatattttcatatgttttgttggggacagagcacattaagtctgaaagcaacagaggtttgttttagaactgaaggcaatttaatcaaaattcctgtcaagaaaagctgcttataaatgtaaatgaaatcacatttaaaataaactgcctctgacccaaaaataaatatggctctttattttccttagtgtccattatgaaaaccagtatcaagtttaccatggaaattaatatatccattcagttcctcattctaaggctgttcagttgatgcatgtagactttattcccttacatttttgcttagattagattaggctgtattacttttctgtcaataacaaattaagcttggacttacttacttaaactattttaaaataagttctaggctagtaagatgaacagtgtctactactataataaatattccaaggatacttttggattaacatggtccataattattaactccaacaaaaatgctcccattgttgaacatattttacctaagtatataacctatctggaagctgaaagtctccaaagctattgcttcctaggactgctgtgtcctaacagctggcatatg

SEQ ID NO: 124805 - DNA, 1230 bp, Homo sapiens
cttactagcctagaacttattttaaaatagtttaagtaagtaagtccaagcttaatttgttattgacagaaaagtaatacagcctaatctaatctaagcaaaaatgtaagggaataaagtctacatgcatcaactgaacagccttagaatgaggaactgaatggatatattaatttccatggtaaacttgatactggttttcataatggacactaaggaaaataaagagccatatttatttttgggtcagaggcagtttattttaaatgtgatttcatttacatttataagcagcttttcttgacaggaattttgattaaattgccttcagttctaaaacaaacctctgttgctttcagacttaatgtgctctgtccccaacaaaacatatgaaaatataatttaaagcacagttttcacagacacagtacaatacattcactatacacagtataacaaaatattcccatccttacctgtttagtaatactgtcacaatgaataagtaaatagaaattggaatttatctttgaaagcattgaaagaaatttaacatgcacaatgactattttatgactgtttagctgttgaactactgatccagcctgcagtttcttgcactagaaagagcgaagctaaataataattgctggcctaaaaaattttttttggtcaattgtaggtagatatgaaatagccaagtggggccttcttatgcaccaactagttgcgtctcatgtctggatcacccttttaaacataggataacactgtatattcaggaccaagaccatacttcagatctgaggaaatttttagagggcagtgtttttataaatactttgaatccctcataatgaaggattttagaacttatgaatatagaggtttactcatctaacaaacagaactgtcatcctttcaaaatgtctgaaaattgaggagggacccctgcttcccagttatatgtgatgtaagacttttcatcaaatgggaacatgggaagaaactttataagcaatttgagtttgttttatgggcagttagctatctcaaagcattttttattgcattattaggcaactggtaaactctcgtgtttaaggaatagcacttgggagaaaagaacactcaaggcatgatggtactgtcggtgaggaaaaacttaaggaatggtccagatgtagattactctaataggtcgtattagtcatgcttttctttgaccac

SEQ ID NO: 124806 - DNA, 1075 bp, Homo sapiens
aggtattattttggttttgaacatatgtgagttgatgtgttgaaaacttcaatcacattacaatcttgaaaaaaaaatctcagtgccagcccctcctccccccaggttgataccaccgcaatacaattcaacaatatgcaacatgccctcaattttattttgttttgggggaaatgtgctgaagaacctagagctttttttgtttagcaccttatatcaaagtaatgaaaatgggtatgatgattacatgtgcaaatgtacaaaatcattaactctacaaagatacatcattccaaaattacagaaaaaatttaaagcatgcatttaattctttttctttaaagggttgctgaatgcttcccctgaaaaaaggtggctgttttcaaaatcagcaactgctggtgaggatttcttggcacagttatgaccagcatgttattgctgcatcttcctgataatctcagccgacaccgggggatggaaattgattgtgtggtgccgcaggccctgagctgtcttgtaactcttcccacagcgacacttgaatggtttgcggacacgaatctgtgttctgtgaccattcttagcgtgatactttatgccattcacattctgtggagaagacaaaaatatttattacatggattcacaggatacctgtcaaacttcggaaacctcaatttgggtctggattgcagttcctggatggcagctgtttagagtgtagtcttttgcaaggactccagttgggacccttcaaggacattctggtgtgtcggtcatgggctgtacggatggtcacacacacagctgactcaaaatttcagatgtgcctcaattactctgaaaatgaaagtactgatttcttccaattttatataaaatatatatttaggacttacagactgtataaagaaaatcctctgaatcttttccactctaaagaaagttaacagtgaacaatcctacacaaatatcctcagcatgaccaacaaaatatctttctaaagaaaaacatcagggcatatcccaaaagtttaacatatagaaatttttgatttggaaactcaattta

SEQ ID NO: 124807 - DNA, 1059 bp, Homo sapiens
gcaggagttgtgccttttttgtcattgaaattcaggttgttcgagccatctgttcatttctaacagaagcctattgcactgatttgtaattattttgtgtcctatgtttggccttgaggtagccattagcttatgaatgctgtgaccaactactcgatgtagtcttatgtagtacaatgcaggcaatgtacttggctaaatatcaagctcatggcacatagtggacactctgtaggtcccttggacaatacagaattgaagttttgttaaccaagtttggttcaaagttagaatggtttcataagtaccagacctgtgtttgacatttggttcttcagttattataggttgaagatcattagggttagtgtcataaaaatcctggtttttggtaaagtgtacgcctacctagacctactcaaaggtcccgtgggtgtgggtgtgatagtggcttttcattggtagtcttctgtagatcttttcaactagatagggctactggatgatcccaatccctcttgggagggatggcattccaaggcaatggatccaaacgtgcctatgggcactgggccacctggagcttgaagcagctttgcatatttagtccctcaagtgattcgctgtcaactgctcagggtgtcagctgagactcctgctctgacatcagactgtatagcctcaacaactctgcagagagtcttaatgctctggtatctggctgatctaaccacttctatattacttaacagattacaaaatattttgatatacatagtctcatttgacatgctcatgatgatactacaaagtcttgaaccttgaaaatgttaaccggtgcaaagctcaatgatgccaatgtttcacaaagaggagtggaaggtggaatgagattgtatcaaaagtatcgtgaaaagcaggtaagttatctctctaatttaggtctgaagctgagtgtctagtaaaagtcaggaatcctgggaagttcctaagttggggattgggagacagtggagagataattttgacctgtgtctgaggggtaaacttgagactcct

SEQ ID NO: 124808 - DNA, 1032 bp, Homo sapiens
ataaagcaaggaggagtcttaagaatccattcaggagtttcagcaaatatctccccagagacctggctacatggaagatgccatgttgtgaataatacagagacctattaaatatattatttgccctcaagaagctaaataaagtcaaggaggggggtaggaaaagacatgtaaattcagctcagtataaatcaatcagaggatggtaacatttccatgaagtggttggaggggcagcaaagcagaggggaagggccacggtccagggtgagttctgtcccatctatgagcaatttgtaggatctgccttcaataaatctaccaaatgaaaagagtgttgctaaggtcgcgtttaccccaacattctgagattctaaggtggaatatgagaaggggcataatccaagccggcagaggttgccaccctacgtgcctttgtcccccagacacggtaagattatgcttaatcctctctttaggtggtctggtccaaggaggacaggtggaagcaaggcaggaggtacagtgtggcttgtcagcgccggttccagtgtcctggcccatggcttagatgcagaggagaatggctttgcttctggaaagatttggtagggaaaatagcagagggcttctggagtataactttagaagtactgtgtcagtgtgaagaacttggcaaggataaacagaggagccacaaggatgactgaacatttgaaaaataagacctgagaggagaggttagagaaacagggcttatgtaacctggagctgctcagaggtgactttggcaggcttcttcaagaacaggactctcaggatctctgcacagacagcaatgactggccctttttgtccatatcaagtgaggacagactccaactgaaccacgaaaattttagatttcatctgtggaaaagttttcccctcgcagcagctgtaaaatgtggaatacatcatggagcgaagtttatagaattttctcttcttcctgtctttcaaaaaaaccaccagaacacagtagaacctttt

SEQ ID NO: 124809 - DNA, 1176 bp, Homo sapiens
cccaaataaactctgaacagattgattccctctgcaccccagtaagggtgtgctccactgtgttcccttgtccccaggcccagattcttcctaaagtaaactgggccactgaactgtgcccattagtgagccaaaagattggcatctgctgtacctagagggagtttgttctgtagatgccaatgggctgccgtgagggttgctggttattcactttctctggtcttgctatgtgcattctttgcagatgtttctccccatccctgaccatactttcctaccttctccaggagcacagcctcacccccaacatcccatacccctgagtgcccaggcagggttaggaacctctaggtgtctaataaagggaggtaaaagccactaacccacgttaagaaggtagctttccctcctttcctctgtttggcacaaggcatcatggcatttggggcaggccccagaataatctgtgtgccatgaggaagcccaaatgtcctccagagatgaccctacctcctccagtgcgagcctttttcaagatgctctgtgtccaaagctgcctgcagagtgaggttgcgttactctaccacttctatttgcatcctcattgttccccccaaaaatgagtgaagactatggcaccagatgaagaataaacaaggaaaacaacttcaggttattaatattttcaaataatatgcatgctcccaataactgtacaaaacataagaaaaaaatcactatagaagtcagataggttttagtttgttactatgtcagtagtttgttaatcagtgtttatcagactgactctaacctgaagtttattctaggcagggctgctgtcctggtggacttgaatgtataatggaatcataattattgcagagtgctgcatgttaaaatgactggttgggggaaggtgttatttacttgtattttcccccacagttgttacatattagtgcatcaagacaaagaaatgattataatttactgagtaaagttgcaaaggtccttggcaatcatctcacatacatgtacttatagagaggctagagctactccattggactttatgtatgttacattgttagaaaaaaagataaggtcttcctgctgaattttcacaaatatatcttcttccacttaaagatattatttgacaattgcatt

SEQ ID NO: 124810 - DNA, 1046 bp, Homo sapiens
caacatcatgaatttcttctttaacattttctgccttctgacaagaaaacaaaagttaaaatgagctcttttgtattgttagtagttccattacatatttttggaataagaaatgccgagaacttgttaaacatggaatcgcttgaaacagcaggatctctcctgaacccgagcagtaataatgcaaatcgaaagcagcttcctcctctgcaaatttgcactttttctgatcacagatgtgtccttccatgttgcctgtctttgtaaaccaagcatatttttgtcatcacctccaaaccctttaatcagctgtaagtgccgtcactggatagaaggtccgtccttgggtctgtatgtgggtggcaaatggtaagtgaaaggtttcactgaaatcttggcagattaggagctggttaaaaatacttttatgggacatactaacttttgtgtattaatatatttattgaaaaaccaaaatctttccaaatggttctatgaggaaggaaagaaatgagagttgaattataaaagtttgaaaggaggactaaagatttttcagggcagttgaggcagggttttcagaatttgcatttagccactaaactgtagacgcctgctggtgttggagttgacagaggtgtatctgctgaggttattaggtctttgtcctggtgcataaaagtggaagagtatgctgtgatgagctcttttcataacgttatgaacgcaggtcttgcctgtgacttagaacagtctcttttggtgtcaaacctccctgtgcactggcttccggctacacctagttggatctttgtatcacaccgcattgcttgctgacctgtagtatttcgctacacacagggattctggctctccagagccgattccgttttaggcagctgccttccccatgtaggaatactctgtttatcttaccttcacccggtaaccagttctaggtaagatgcctgctggtcatggccctgttcccatgaaggtattcacagttttcatttcagtcaatcaaatttattgaatgtctgctc

SEQ ID NO: 124811 - DNA, 1001 bp, Homo sapiens
agcagacaacaaacatcctttctgacctagaacataaattgcctcttgtgtgaagagagagggagcctgcccagagctgctccaaggccatctccatgtctccctcctgggcatggcaatggcatgatgctgcttgcccgctgtggggtggggtcacccttagaagctcaggatttgttttgtgcccttactgaccatggcacagaaagactaaaagaacccatacactttttaatagccagtacttctacaagtttgtgagagcaaacttcctgacgggaagccaggattaactctcttggaatttgagggaggttggattggaggccgtggtcagaacccaaattttgaagtgggagttcagctcccacaatgtacttgacttggtgaatagcttaagagttttcatttaaagagtcatctcatagtactttgtaattggttccaaagccactagttggcctgatggaaagggtttttgttgttgctgttagtttgtttttgttttggggatatggggagactagattgtgccataaaatcagtaaagcaaaattgttaaacccacaatgatactgggcaagtgttaggtttttctcttctctttctgagaaactccctctcttccttccaccctcccttgcaagggggcttttccacagtcttcagaaggcagcagaaaatgttgcagtgtgatggttacaagactggcatatatttcagtattgtttgtaatgcctgaaatatttatcaaaatatacccatgacatcttctgccctcattcgataatcctggaaagaaacaagctatttcactatttgctttatattgttagacttgttgtcataaaatgtaacatgtaaaagcaataccaataattcttaggctggcagaaattgttggatgttccagcctgcttgagtaatagcactgggccctggcattgggtaagacaatgttgcaacaatgttacaatgttgtaagcaacatttcttaccca

SEQ ID NO: 124812 - DNA, 1057 bp, Homo sapiens
atacaaacttgaagaatgttaatatggaaaattagaattagtaatgaaatacaaagtcatttgccatagaatactgtagctttcacatttttactttaaaaattccagtttacgagaaattttcaaatagaaataattgggaacgttagatccttgttaaaaaatactcttttttttcttttgagacagagtctcactttgtcaccctggtgcaatcttggcccactgcaacctctgcctctcgggttcaagtgattctcctgcctcagcctcctgagtagctgggactacaggcgcccaccaccacgcccggctaatttttgtatttttagtagaggcggggcttcaccatattggccaggctggtcttgaactcctgaccttgtgatccacccgcctcggcctcccaaagtgctggcattacaggtgtgagccaccacgcctggccagaaacattctttttgtgctcctcttggcagcacatatgcaaaaataggaaagatacagagaagattagcatggcccttatgcaaggatgacacacacatttatgaagcattttatatttttatccttatgaaacactcaaagaaacgtcatttaccacttttccagctgcggtggaccagacattttccgatttgcctgttttccctgtcctatttttgttgtaatttttttttaataccgcacgtactggtgttcatataaaataaacttgagtaaaccagaattctgtgagttttgccagactttaattgtgttgtattgcttgctttttaaacaaattaatagtgaaaaataatttagcgacctcccagttgtaaacttctaaatggcagtttgtgtctgtatatctcttcaagtcaagcatctgctcaaaagatattgttgatgatgtgataaatgcagtttcatgaaacttggcagttcccataaataattgaataacataggttgtatttacctctgtagtgtctagactagaggattagaaccatgagtttataaaaatctaggttgctgtctacacacaaatagaatagtatttaaaatt

SEQ ID NO: 124813 - DNA, 1038 bp, Homo sapiens
tcttgaattgtagttcccataatccccatgtgttgtgggaagggcccagtgggagatgattgaatcatgagggcacttctcatgaatcatgagaacacccgccatactgctgttctcatgatagtgagcaagttctcatgaaatctgatggttttataagaggcttttcccccttttgctcggcacttctccttgctattgccgtgtgaagaaggttgcatttgctttcccttctgccatgattgtaagtttcctgaggcctccccagccatgctgaactgtgaatcaattaaacctctttcctttacaaattacccagtcttggggatgtctttattagcagtgtgagaatggactaatacagccacattttccctttttttgacatttatctctgcttttcatgaaataaaactttttggcactttttttttcttttagacctccctggtgaaatgaggtgccagtggtgtttctctctaagggttaacatgaattaaggcaagcctggtgaaggtttgtgttttccagtcaggcatcacaactccccttgcataccttgacattgtcaccattcccaatgcaggtccatgctaggccacttgatagacgaggttccatcccacttccacagcttcctctggcatctgtatccccaccctgacatgggttatacctaaggttacacatgtttctctaaagggcattcgcatttaatagtaatccttaaatacttcaaagactgaaggcatgacttctaaggctagagtgagatgctctgcaggaagggtctgtccattttcccttgccccagtactcttaaggttagccttaggatccttcgcctagtatgcagctgtcaggagactgtcaattctaatgaaaagcaagcttcagaactttctggaatatatgtcctgttgaccactgcctgggatatcccagagccttgattgagtgtctggaacaaactgttcattgagagacagggggctttggccagaaaagccattcactgttttctaggggagatcagtt

SEQ ID NO: 124814 - DNA, 1066 bp, Homo sapiens
ggcatggtggctcatgcctgtaatcccagcactttgggaggccaaggcaggtggatcacctgagattgggacttcgagaccagcctggccaacatggtaaaaccccatctctactaaaaatacaaaaattagctgggtgtggtagtgggcgcctgtaatcccagctactcaggaggctgaggcaggagaattgctggaaccggggagctgaaggttgtagtgatccaagatcacgccactgcactccagcctgggtgacagagtgaaactccgtctcaaaaaaaaaaaaaaaaagatttgtgactttcaacttttataggagctggagaccttgaagaacttactttgtcagagtaagtacttctttctgcaaccttttctagtctccctccccaacctccgtctctttccagaaagaaccatgccttcttccctgttccccaaatacatatactctaaacatacctccacaccactttatcatgtttgtccatagggctgttacctcctaccctgctctaagttctttaagggcaggatatagatgtcttcttcaaccttgtgtccaaggcctagtcgtttagtggatcctcagtaaatgtgattaaatgaacgaattattgagtgtagggaaacaggaaaagcaaatcctaaatatatggtttcctgggactacaataactgtaccataaactgagtggctgatacagtaggaatttattgtctcccacttctggggactagaattgttggcatcaaggtgttggcagggttgtgctccctctaaaggtgctagggaagggtcgataccaggtccttttcccagcttctggtagtttcttgtcagcataactccagtcttcataggaagttctccttgtatgcatgtctgtctgtgtgtccacacgtttcctttttatagggacaccaatcacactggattagaggtccatcctaatgactcatcttaactaattatatctgcaatgaccctttttccaaatgaaatacattttgatgtaccaggggttagaacttcagtggatcagctctgggggacacagtt

SEQ ID NO: 124815 - DNA, 1119 bp, Homo sapiens
gaaacaaaaaaagcaaaaaaccagaattccaaagtgctcaggtttcaagcattttagacaaaggaaactcaacctatagtagattaaaagcaagaacagcaacagtatgactagtgatagttaacattataggaagaagatcagaacttctatttttaaatggcaatactctgggaccatttggaatagggagacaattgtctgccatccctgaggacaactctatttaagggcttatcatgcagtcagactgttgataatgatcactctgcctcatcaagtaaacacttgattatattcagtagactctgtttaagaaggcatagaattagcaccttttaatacttaattagtacttacagtacttaataagataaatttcagttatctgaagattcactcctgtgttacaccagaacaccctgaatcttcaagtgccatgggatagctcatgtcaccctcacagtgggacaagttacagatcatctggtatatcactgttccctaaatggaaatacttactgatcaatcgatcaatggggaaacggttttccttaatttaatgttgttctaatcttttacagtcaagaggtttcttcaagatggtggcctgtcatctgctggcttctgctccttagtatggctaggcatttccaactctttgtttaaattcttgttggcttgcctagcttgaccctcctgacaggtgctatttttgttcctggccaagtggccacagctgtgttgacatttctgccaaagacaaaatcaaggaaagtcaataaacagtatttagaatagtagcatggggcttatcttaaggcttctaggaagagtagaaaattgacatggagaaatggaatactactcagcaataaaaaggaacaaactcctcatccacatagcaacatgcatgactctcaaacccatcatactgagtgaaagaagtcacacacaaaggctacgtacagtttgattttactttatgaaattctagaaaaggcaagactatagggacagaaaacagcaaagtggttgccagcgtcctggaatgggggaaggagattgtacgaagaagcacaagggaacgttattggggtgctgcaaatgttctgtttt

SEQ ID NO: 124816 - DNA, 1054 bp, Homo sapiens
ttttgtttggttttgttttggtctttgcctttttattatagttgggaaaaacctgcaatctggttattaatgaaaatttccccaatagaagttactcacttttttgaataatcatattctaaatatagactttaggaaaataaatttataaaatacattgttgctaatttttttttttagtggaagtgtgatgctttttatcattcgcaaagagcctgatgcttacatttcattagttttatttcagcaaacattttctgagagcccacttcctggctgacagtgttaagaactgtatgctccaagatgagcaaaccaagtagtgtacccttggagagtactagtggccccacactgctcatagggccatagtggaggtgctgattcgagggagaaattataatgaactggacattggtctctggaagttggaaattacctagactgctcaacaaaccttttacatgatttataaattttaaaaattctccctagaaactaagaaactatataatacggctttgtgaaaatgcaacaccaatttacactgttttcaaaaacatgtaatcataatagttatgaaaaagttgtaaaattcaaatgtatttctgtgtatctgtattgggttatctctgtatctttcttgtactttttccactgccattttttgcagtgtccccttttcaaacctcctaccttcttccttttcctgtcctgtgtcaatagacctagctgaatttcgcctctgcataactcattcttcaatcactactttcttatctgtaattcttcattaactcgctgtatttacttactattcttgtatttcctgagtcgaatttttaatttttatctttttcttttacaaaggaatagtaagtcaggattcatttgttattacttatatggcctttgatttttcttttcccttttctgagtcaatgggagatagaaaaaactaatccaatgcctggcatagatgaagcattgagtattagaagaaatgcagtagagtttgggagaggaaaaggtgtgctcagtagcacagtggggt

SEQ ID NO: 124817 - DNA, 1014 bp, Homo sapiens
ggtgtcggggccactgaggatgggctagagatcactgatccccaacttgaccatatagggcctctcggtttttccttacttttatatttgaaagattttttttctacctgataagtattgattaattcatttttctttttaaattaatggcattcataattgtcaatcagaaattgtgataaacatgagatgtctgatgttaccatactgaatcaaaataattgcagccaacagtaaagaaagttgccattttacttgacatgtgaagctttcttgtgtgtgaataactaaatgtttacatacacgttaaccttttggaaatactgaaaattgaactgatctctgttattacattcacagacttcctaggaatccagagacccccaagtggggagcaactggatttagcaattgccgtaagttcccatctgcttctaacattctgtgatttgtgaacacagcattacaactaataaaatcgaccagttacaaatgttgcttccaacagcaagttttgaaatacaggtccaacatttttgtgggaaaggagcaaacagagatacttctaaaacttggagagcagggtaaagactgggaatagctgcacttcactatgtcccatgattttccttggtgaacaaccaaaattagtgatgtccactctgttgtccttgaccacagacagatctacttgtgatttaagaaaaaccccaaccccaaaccgaaccaaaccaaaacaacagacccttcatgtgatgctttatgtctacatcctgaatagaccttacaccatcctctgtatcgtaagctctatactgcaggcagaatgaaaaaccagacctgactatatcaaccctctgttggttcttcactgcccatagggtaaaatttaacctccttggcttgatgtacaaggtttgcattatataactatcatctgcacctgattcctctccatgtatactttgtgaacctgctagactgaattttccatcatccttgcaaactaccaga

SEQ ID NO: 124818 - DNA, 1040 bp, Homo sapiens
gttgctgtaacagatgtaaatgatgtaacaagtatgccagcactggctgtgatctggaaaactttaaaggggtctgtgctgtgtgtctatggagtgggtgtgaggtgcgcaaagggaagtagaagtaaaattatgattcagagggagggtctctgcttggtaattctcctcctggaagaactcccccttaatttgtgcattcattgcaataacttgactggaaagtaactattctatactagtggctggcatctaagattcctcagatctaaagttatcccagctatgttaggctttctgcaagtctttctgtggtttgggcataaacaagtaaggcccaggttattcaggtattttacaatgaatctggattctagccacttttctggggtgccattctgtccctttgccaaactgtgtgtgtgtgtgtgtgtgtgtgtgtgtgtgtgtgtgtgtgtttgtctatatctatatgtactttttttttcctggaaaattattcttgagtgaagctggtttgtgaggttgtagcttacaaatagcgtgttttgaatctgcctagaggtttcatggtacatagtacatgtatgtgtatgtgtgtgcatgtgcaaatacatatgctgtggaggtgggacaagggaacaaaaggttgcatgtgcacagaagtatggcggtcctacaggagcatccctatgtgggtaccattgtctagagagtgttgctaaattgatctctccatcctgggtcctgggaacttaaatgtaaaggtgggttggctttatatgcaattcacttgccttactttaaaagtgatccctgagctcacattcttgaataagctccatatggtttcccaagcagatactgcattttaaagtatattcacattgaacatatacatattgacaacaatggaagttgcgggaaggtgtcactctgcatggtactaactttagctgccagctccctttaccgagggagaaaggtccctgcctggactctgcttttccttcatcatctattggtctatttcagtgctg

SEQ ID NO: 124819 - DNA, 1086 bp, Homo sapiens
atatgaggaaataagatcaaaggaataagtagtttgctcaaagtccatatatgtctgtaattttcctaccatacacctagatgtgtgagctgtacatactaagaacacattttggtctcagttgtatgtttggatataaatctctgaactactttttcttatattattggtatctctttaatagtcatccaatggagaaaataatcaaaagtttttaggagattcttctaacacataagcattgaaaagaacaaagagttgtggtttaaaatcagattgtctcatccattgtgacaaatagaatgtaagtgttactggcatttataggagttgtccgtttctcgtccgtattcttagctggtcaagcaaaatggaattttgaataattcccctgaatcctttggaggccttgctctgcagtattcttttttatatgaaaagcttgcttgctgtcttcgttctgtctggaaaccagtcccctttgactaagagtataggagaactcaggcaatcagggactcagtggaaagttaagcattagcttctgctattcagggcaatttttgataataaaatcaccttgggtcccctagctcactcggccagcagagacttgatctcttggtgttaataacccttcttactagcttagcctcagtaatgcaaattgaaattgtggcttgattgcagttggaacacttggggtagctcatggttgatcgtgagtaggtgtggaatatataattggttactttaaaactatgtcttttggagctagttgagcatgcgttgtaagagacacctttgtcagagcattgtctaatggactcacaggcacttggaagagcatctagtcccacagttgtctatcttggcaatgaatggatcccagtatatgagtcaagagtgtaagagggtgttccatctccccactgacctggatcaccctggccaggatggtttttaagcattccatgtctgttgcttaaaaaccaggtctgccttggtttgtcccattgtagcactgcctttcaggacagatgcagggaaacagtaacatcagtgttactgagagactcctattat

SEQ ID NO: 124820 - DNA, 1038 bp, Homo sapiens
cattaacctggcccttcgaatgctcggctttgttgaaaggagtcaatgctaggttggtaagtgtctctgctaaagatttcttttcttctcaaatgaccatgagagcaaatgttgctgctatctaaatcaagaacccatagagtgctaagagggtggagtagattcattaaagacagcatctaaatctccagggacttctctcaagtggcttggctttcagcagacaattcacagttatgccagctaattataattattttatttttctttcaaggggaaaaaacataaaatgtgctagagtttactagcagttttacagcattccttcccccctggagttctcctgcctccctctccctgccaccccccaccaactacccttttggaggcccttagtattcagccattgttagcacaaagctggtctttatgaaacagtcttttgagggctagcaataaagtttaagatgagtgctgactctgttgataatttacccagctggcccaggactgtacatttgggtgacatttgtaggctgtgtcaccatgcctggatggaggcgggtgtttctgtggtatggacgccttttggacacactccatcttcccatttattctccagcctggggtgttgtgtgtcgctcctggtgtgttctaggagataattgtcacttttaggactctgtctcattgccaagcccgagggaggctatttcttttattcagattcctccctggtgtgtttgccatgttgattcaaacccacacatcttgtcgtttccatttttctccatccaaaaccttgcccggatgatcctggagactcagcaagaaataacccaacccatctcaccagtggattcagtatgaaactctaggtggtaacatttggggacggttgactcttttatttctctcaggaaagaggaaatgagtacttatttgaaaacacgagttccctctggagactgtgtctttaaatgagcatttgaaattgcagatagctttttttttactttattttttttgaggctgcac

SEQ ID NO: 124821 - DNA, 1064 bp, Homo sapiens
tacagtgtcaaacacttcatcccctcatgtgtaagaaaactatagcatcacagagaagtgatggccctgtctccaacatttggttgctctatatttggcttcttagcttgcaggaagaccactattccctgcccaaatgcaattcaacttccagatttgttccatttcctgaggggacagttggctttgcctgtgagcttttcttggaggaagacttcatttctggaacttctacacagaacctggccctcagagttcctgaagcttccatgtaagtgtctcagtgtgcatttcctccctcctatttttggaaaagataggcacaaatgagggactacttctacagcaaccagcctggaatcattctttctgtgcttacagtaaatctagacatttgttcttttgtgcagcatattgaaaagatatgcctggaatacaagagcttgcttggagcaaaaccatggcaagtcagaggggagtcaaggaaaagcattgtcatgggttcagagttcatggattttagacattcaggctctgccatttaaaacatttgccaccttggctaagcgctcagcttccccaggcctggtttcctttacctacatataaaggggttagccaattaattgagtcagtctcagctccagaattctcattcactgcctcttttctgtctcaaatttattctctcttttggttgttttcttccaggagccaagtttggcagaagctctagattatctgacctcctagatatgttcacatagcccagagagtgagaacagaatagggtttgggaagagaagcccacggcagtaaaagggaggggtcctaacatatgaagtcagagacacttgacttctaggctcaactcctaggtgaataacagcaacctcttctctttgtcaggtgctgtttacaaggcacatctctactagtttggcatgcatgattctgttacccaggaattaatacacccattttgcagttgagtaaagtaaggttcagagattaagtgacttgccccaggtcatagtgataatggccagagccagaactcgaat

SEQ ID NO: 124822 - DNA, 1052 bp, Homo sapiens
tgataggaagcttgttttcaaggtgtttccatgaaaagcatttgatccttcatatttccgtggtggatttctctggaaagttgggagttttccaaagtctaactgttatatcagtttttatggtgatgggtctcatttttcttgtagtatacattatcttctctactaattgacttaattttcagtccttatctccagtcaagaaatgaaaagaacttacaaattttgttaattgtactgaaattagacgtgtggtgagttttagaggagcgtccaaacagaactggattccatcagagccttgaggaaagttagacggcagaccccaagggagaagagggcagaacacaggctgacatatgacaattcttgggaaactgtttaaatttcttgggaaaaacaagataactgatggtttttttaaaattaaataagtaaatagcaggcagatcccagaacattgtaatgtgaaatctaggtgccataatataaagatgaattattaaaatatgggcacctcgaatccactaacttgggcccaacagagcctgcccaggggctgccaagcatgaggggtgtggagattggccaggtgggcagggctccccatttcccaggtatgtcttcaaccacagcagcttcacatatgtgaacttagttgggtttccacataagcatttctttgaacaaagggctcttcagcaagagcatagtttgaaaactacaaaattggaagatgcttttttctctatgtaccacaaacaagaggaaaagtgaattattgggtatgataaagcaagtaccatcttaaagatcaatttccgggagaaccagtgatgccatcatcatcatggaaagtggatgagattggacaggcaagctgtggcttctgaggtgataggtgattgaggggagaataaaacatgaaataacttctagtatttggatgcgagggaagaaaatcatcagaagggaaacatagagacttgatggggatctgtccatttcaatctctcaggaaagggtagaacaacaataacaaaggaagttgt

SEQ ID NO: 124823 - DNA, 1070 bp, Homo sapiens
tgttgtaccctttttggtctgtcatgtcaaagggtatatgatgataaatcttatccctggtgatattaaccctgatcacctgtttaaggtgggatgttccagtgttctcccctctcaagttcctatctttctctttgtaattttttctttttttggaacggagtttcactcttgttgcccaggctggagagcagtggcaagacctcagctcactgcaacctctgcctctcgggttcaagtgattctcctgcctcaacctcccaagtagccaggattacaggtgtccgctaccacacctagctaatttttatagttttagtagagatggggtttcaccatgttggccaggctgttctcaaactcctgacctcaagtggcccacctgcctcagcctcccatattgctgggattacaggcatgagccatcgtgctcagccttctctttgtaattaatatgtatctcagaagaatattttgagacaagcgaacaccctactttaaggaaaatcttcgcatggaaacctgaacttatgaaataagtactgatgtattttcttgcattaacaaaggaattcttcacttttccaaaggattcaccccaggattcaattttaaatagcaatctcagttctagtacatttaacatagggcctgtctaataaatgttaacagttaactttttgagacaatgtttactacaatggcctcttttaggacaatgtttgtcttcgcaaataatccataaatatcttcttatccccttatataatgagaaaaaaacagcagaatttctcttacctggtaggtcactgaaagaagaaatagagcttaaatcttctactctttattcttttctaaagggatttttttttttttttactgccagaattagtgggaaggtcaggaaaatacacatgttttgtggaaataaattctcagagataatattctataacataataccaaagtagatgggctaagaggatatcaattatatgccatacacatgattccacttactggaaaacagtttggcaaaatgtaccaagccttgagttccacctcaaaga

SEQ ID NO: 124824 - DNA, 1083 bp, Homo sapiens
ccttgtgggtaactaagccctaaatagtgaggaggaagactccctcaggtgtccagctcagccacattggtaaactttcctgactttctgatcccatcacccactagtatccacgggaaaaggcagggatgatcgtgtgtcttcatcaaagagaggttctatgtacaagataactcttggggacagggtgatatcacacttcaaacctctctgaagtatggagtaaggacaggtcatctgcactccagttcaaacacagaattggacgctaaacattatttctatactgatgtcaagttctgcttcttttgtttgagtctttgttttaacaaagagtaatacacacttggttttaaactgcatactaggggaaaaatcctagaaggagaattgcccaagatcttgtgttttgtcttcatgtcatgacttaatttttacaaaatcaaaatgacttcattcacaatttatgtacccaagtaacttagcccattttaaaattcttgctgccctgttccatgtatgcatttatttttgttttttattttcattgtaattatgtgtaccagactgggctacaggcagtgtgacactgacaaattggaaagcatatcgaacatagagagaaagagaatggaaattctaagatgggttagccagcctctcttgagttgatatattcatgacattattttctttgagctttgcactatcttttcaggaatcttcctattagaaaataacttaacaaacctgagtttattttgaacttggcagtggttctgattagagatgttgcaaaataaccattcagcccaacatggccctaaagactcagagtttccaagatgaatcagggcagatattggcatacactgaggagcatttttaacctttaacatggagtgggaatggggagagaagcgacacactgcaaatcggcacacaccctttctaccatcctcaattttatttctgtggctttttccacataaaagaaagtcattttcacaattactaagttgcatcgcatctgtatccatccagcccaagcttccaagctcccaactggggaacaaaagcagc

SEQ ID NO: 124825 - DNA, 1034 bp, Homo sapiens
aaatggctccatctttaggggagagatacagggcttgaaattccagggtcacattttcaagacttttcaatgaaaaaaattcagagtcagtttacgttccctcatcaagggagccaccttagaatagggggattttatccaatgtgttttctggttgtcctctggatgctgcctgatgtggacacgggattcacgagaagtctgggggcgtccttcctccattagggcccctcatcctctttaaaagaaagacaacgatgccttcctcagggagtcgttgcatgaacacatgagatggttcttatcaggctcccggtacgtgtgaggagcagggcaacccttctcatgtcatgatctctctgtgtggggcatttcatttacagcgctaccccttccagaaacttctaagtgtatttttaaatggcaagtacctaaaacaaaaaagtatctgtattgaggtccagacctggcacttcataatgtttaaagcatcagctgccaatttgctgtgcctgtaatatctaatttatagttccccgtgggtgggtgggagggtggggccaatctctcaggagaagacatttttcttgtttgtaacttttttctttggtcatttaaaaaaggtttagtaagtgtgctccataaactcagggagcatcccagccttcctctgtgtggctgatgtgttgagtctctattttcccttggcaataaatttcccatgaggaggaaagtcacctttttcttcctggcctggtaaaaactggacagcaaagggcagttgtcattctctaaaacactcccactttctcgggccaccacctaccttggctgcccagcccagacgttaagggacatgggatagtttcacttataaaatccacttcctcagagagagcagatactggtggagtttcctgaatttggcagaatctctctttagagagactctgcttcagacggctagacacttgggacctgttggctcaggtttaaaaaatgttcaggttagtagccgaaaaccgctggaagtt

SEQ ID NO: 124826 - DNA, 1044 bp, Homo sapiens
tcggcatgagccgccatgcccagccagcatgcatttagaaacattattgtgagaaggtagtccacaggctgcaccagacagtcataggagactgtagcacagaaacagattaagaacccatgcattaggctatttgaattgttgaaaataatttatagattctccccagcccaaatcacctatcacctttggtgataccagacagattttatgagctaaactatcaagtaggcttgaattttgtttctagttgattacactggcaattctaactacttttgttaccatattcaagtgacattatagtatagggattaagagaatggatactgtgttagacttggaatagatccctgctctaccatgtaccagctgtatgaccttgggcaagttacttaacctctccaagaaccccctcacctgtgaaatggggataatattatcacccaccactctcacaggagggttcattattaggatgaattgagataatgcttataaattacttgaccctctctctacctggcacctaataagcataaaataaatgttggtttctattgccattagggagctctcttagcattaatctattttcacagggcaagaacctcttgctctgttcatagagtccttaagagacattttgtattaaagtttcagatgatgaaatgagttcaatattgtctgtcagataggcctgaaactaccacagctgtatccagttttaacttgactttaacaaagagactgtcttgtcaaaaggtagtagtagcagagagggatggggcggtgttggacattttgctatatgacagcctaataggaaataaaagtggctgaattgagtaatgagttgtttctaaagcattgagtcccttctagtttaacaataatttgaaacatccctgttgacaacaaatgaggtgcatccagcctttttttttttctttttctcctgtttgtactgagcttctaacatatggaagacaggaaatataggagcttacatttagagagtaaaaaactatcaaaacaaaacaa

SEQ ID NO: 124827 - DNA, 1063 bp, Homo sapiens
ctagagctggaactgtcatctaggacccaagctcctgtgacattaatgctccccccacccacttcctggctcatcctaaagagtagcatcatccttagagaatttcttgtagacttttttttttttctctctggcctcatagaggctgctctatttaattacttaatactttcaaaaaagaagtcataaagcgctttatattttaaatgggcctcagatctccaggctgttgtacccataaaggcacaaagatttaagtggcttaggtctgccctgtgtatagctgtgttgtccagtatggtaaccattagtcacatgtggctatttaaatttaagtgtaaaaatattcagttcctcagttaccctaggcatctttctagtgctcaatagcacacatggccagtggctaccatattggactacacagacacaaaacatttttatcattttttacaggaaattctctaagacagagacaaaactaatgtaaaatcaacaagctaaaaagagaaaatctgatccagagcgctcccattgctgtgtgtgctgcttgtgctgtttaggttatcttttactaattttgcaaattgactttttaaaaaagtaatttctttatgaccccgagggaaactgtggaatgacagctggaggatgatattggggagggtaattgaaaatgtttataaactctgtagtcctgaggtatgattcaagctttatttaaaaagtggtttgttgtttccctaatggcaactcaatttctttttcaaataaacccacagtgagttctgatttcaccctcaaagaggaaaaagtgcccatgttcaaaaagtttggatcttaccattgaatctcctttaaagacatcgtaaggaaaactgtgaatgtgtggactgaggttgctagtggcatatacaagccgtgttatttaaaagagattttctaccaacctggccatcagcagctagctagaaggatttttacttctacaaaaagcccacatcagggcaaagcaaatgcattggtttttagaaaataaagttagcttttggaattttcagca

SEQ ID NO: 124828 - DNA, 1050 bp, Homo sapiens
gctctctagggctggttagttcagcctccactagataaatgcctcccttccccagtatccccaaaaggccatggcaccctccttctcactgaagaatgagggagagcagtaggtcccctctgctaatgctggacaaagcaattagtgcatttcttatgactagttaattagctttttatccagctttttaaactctggccacaactctatggcctcgaagtagagtgtgagtcatccaggaagcaagtttctctactgtgtgcctgatgctcctgagtattattcgcacagtgatgtgtctgtggctgcctccatatgcccccacttagatggatgcttgtacagacgtttccaaggatatcatctgctggctcttttgttgtttctaatcaaagaaccgacaccctttgatcacaacagatcacggtattgtactacaaagactttgttagaaagacttaaattttacacgcttgtagctgtcacagaggttctgacagtatttacttttaccccacacaagtaaagaaaaaatgcatttgatcagatcacatggaaaatatgagtgattataaatagtaaattttctagaaccatgtattgttcactgtaaggaacctagtcaatgaacattttttaatacttgctggttttgagtgccaggttgttgcaaaagtcctcttcttcctcccaagtatagagactcctctaggtagataaactttctgttaattggaggaagattggccctgtcatggaattaatgaagctaaagacagacgtctttggggaactgagtccctgggtagccactttttgggcaggcttcagtatccaatggcctgcgtgaatgtataggatggctggctccccttcaagttgttcatggcctttcctcctttttcccataggacacctgagacaggcacccccacaaaatacaaataaatgccccttcacgggagtgtgaagacaaagcaagtactagaacttcttccttaaggtctcattcagagtgttttcctggcaacccctagaggaagtgggcac

SEQ ID NO: 124829 - DNA, 1013 bp, Homo sapiens
tagaatgtctttaaggccctgaagtcctttggatttactgtttttcattctagttcttcctttaatagctcggagcaaataaaagtgatttcctttagaatgtgcacatgctcctaaggatatctgaataaaagatacgtatctgataatttgccatctcagcatcatcccttgggcagcaggttggaaggcaatagtttaatctgaatgtgaactaatgcttatgcgcaaagacatgtatgtctcttcctggatttgaaggaactgagagtagagcagtttaaccaggattccctagatggcttatcatcctgatgagctagcattgcaatcagaagacattcacttttgcttaaaacatgaaattgactggtagagttcagatattaataaaactagttttagcctgtagttttaacccttttcatcttacatttaagaaaaaaaagacacttaaaaggaaacaatgaattggaactaattacaaagctctaaagggccctgggtgatgttagtctcattagggattgtgatgtcccctcccacccatctcccacccccttccaccccctcactcgccagcatgactctctttccttcttacctgtaaccataaataccagacagccaaagtcatgcctcgtgaaggtaggcatgtggagtggtggaatcatacaatatctgtgttaaaaggttatatcctagtaagataagcgtttggactgtaaactagttcaatcattgtggaagtcagtgtggcgattcctcagggatctagaactggaaataccatttgacccagccatcccattactgggtatatacccaaaagattataaatcatgctgctataaagacacatgcacacgtatgtttatagcggcactattcacaatagcaaagacttggaaccaacgtaaatgtccaacaacgatagactggattaagaaaatgtggcatatatacaccatggaatactatgcagccataaaaaatgatgagctcatgtcctt

SEQ ID NO: 124830 - DNA, 1044 bp, Homo sapiens
cacagcattgtgttatgtggtcctgcaagtctctgtcactccatcatctgaatctgtgtcacacactcatactttaatatgtattctctttttttttttttttttttttagaaggagtgtcactctgtcacccaggctggagtgcagtggtacgatctcggcttgctgcaacctccacctcccgggttcaagcgatttgcctgcctcagcctcccgagtagctgggactacaggcgtgtgccaccacgcccggctaatatttttgtatttttagtaaagatggggtttcactgtgttagccaggaaggtcttgatctcctgacctcaggatccgcctgccttggcctcccaaagtgctgggattacaggcgtgagccaccgcacccgcccatatatattctttatgaaattaaaacttcgggtctgttatgtgtattatcccctaatttcatgtcatcaggcagaccattaaatacttttgcatggggaatgatcatatgtaagtatgatctttaaaaatagcttatagaaataatatgtatttattcatttatttaacatatattgatcatgagctatgtgccatggattcttctaggcaccgagggtatggtagttaacaagacacataaatgtattgaggattgtctttaaggagcttatgttctagctgagagttacaacaacaacaaaaataggtacaatttagggaagaaaaaatggggcaaatatgaggatataaagtattaagaagggctgaatttgagataggatgatcagggagggccttcccaaggtggggacttttagcaaagcctaaattaaatgaggggactggttagtggatatctggggaaagaacatactaggtaggggaagagccaggacaaagaccctgaggtgggaacatgcctggagtgttcaaagaacagcaagagagccagagtggctggagaaaatgagcaaggcggggcagtagtcagaaggaagttggcgtgtgtgaggagagggtggttcatagatcttaggagatcgtgtaggtca

SEQ ID NO: 124831 - DNA, 1145 bp, Homo sapiens
cttacgcccaaccccgtgctctctgaaacatgtgctgtgtccactaagggttgaatggattaagggcggtgcaagttgtgctttgttgaacagatgcttgaaggcagcatactcgttaagggtcatcaccactccctaatctcaactacccagggacacaaacactgcggaaggcggcagggccctctgcctgggaaaaccagagacctttgttcacgtttgtctgctgaccttccctccactattgtcctatgaccctgccaagtccccctctccgagagacacccggggtgatcaataaatactaaaaggggaaaaaaaaaaaaagaatttaaaaattaaaaaagtcaattgactgttaaaagcaaaaaaaaaaaaacaagttaatttaggtagagtaaatcattagactttttaaaggagatctgttatttcttagcaaaaatttaatctattgggaaatgatctcagaactaaccatttctctgaaatcatagtgaaatcaggagtgtagaaagtatccattgtggagcctttgggcaactttatgttgagtaaatgggggacgtgcttttagagtctagagactttgaaggaatagggacggcatcatgggctgcccttctgtggtgtctctggctatttcccagcacagtccacaacgctgcccctattccttcaacttctcctgactctagaagcaacttcaagtttccagaaagctccaagttgcctcctgactgtgcagtctccccatttcctcagcacgctcttggtttcctgcctggcttccttactctctgattactcattggatttgctatctgatctgttgccaaagaacagggcacaacttccactcgctctgctagacttagactggccaaacccactctcttgaaacctctggaaacctcgtgctcttttgagtttgacttctgcctccttaaggcccctgaagctgagcaggctgtgaatgaattaacagagctttgtaaattgcttaagagatgtgggtagacaatagggactcctggagtgaagacagaatgactgaaatagaaactttctgtggttagcatggatgtacctgcctttgtcactccccgaataaagttctttactttcttggaggcaggaggcag

SEQ ID NO: 124832 - DNA, 1126 bp, Homo sapiens
tgacttggggaatctttaatttggatgactctccttagagcagccaaatcagcttcttgctgataacagtaatcaggttttatactaaagtccccagttaggcagagtaaacaggaagcagcctgttattgatctgtgttatggaaggttcttttccactgaggagactgaatattttatactgaaaccttttacttcctgtacccagcatatttttcctatatatgtgttaggacagaagtccttttgagtatctttattttatttgtttagtgaaactcctgaaactaagggtgtgggaacaaattatccatatttagtatatgtggtgggttaaaaaatgtcatccatttttgataacataggaggaagtgtaaattgttagtttatcagccatttctaatggtttttaaaaaatgtccttcatccacggcttcaccagaacacacacacacacacacacacacacacacacacacacaatgtccttcaatttcataccatttgaaaaataatcttgttgagtattaggattggctagagttttttttaaggtaaaaagtactgtgtgcattttcaacttctcttgatctttgcatttggaggataataatctccagggagatttgaagataataaatagaggtggaaatgcacggatgcttctgcaccaattctcagggaaggcttttccagatgtggaatgcacggatgcttctgcaccaattcccagggaaggcttttccagatgtggaatgccatggggagtctgtctggcttggataattgacagctgccagcttgtaatgatctgtgctaaatggagctggagccacagaaggcaacacaacagctgggctgctgggagccaaggccctgcacgaggcacagctctctccccaacacccatcctcagcagcctcaccccctaaagaaggtgcactgttccaggaaaggaagggagtctgttgcttctacctgatgggtaagaggaaacaccttgattcactcaaatgggccacggtcagataattagagattcgctttttattgcattgactttagcattttaatttaaaaaaatgtttatggatacataatagttgcatatattttgtggggaaca

SEQ ID NO: 124833 - DNA, 1038 bp, Homo sapiens
aatgaaaacagagaaaaggaacaatatcagcaggtggtggatggcccgagtggtagaggaagtgaaagccaaatagcaaaagtggcagcaaagaggacagctggccagtaggagagaaaagagaagccacctctcctggaagctgtgttatctgaccccctcgtgctgcttctgcctgagagtgcgtcgatgtctgacctccactggagtcagtcagtcctgggaataccgtgtattcctgcataacagtaccttagagctttccttacgtgcttacctggtggcaggtgactgttctgagtgctttgtgtattaacttgtttagctgccttagcaaccccttgagaaatcattttccccactagacagaggacgtagctgagcagctcacccaaggccagaagcactgagcggaaaagctaggtttgattcgcagaattctaagatggtctgcccccaagtttcccctcggttggtatacacgatctgtagaatcctctccccttccatgtggacaggactagtaaaaatgatgggatttcactctctttattaggttacattatacagcaaggataaagagatatttgcagataataagtaaggtccctaatcagttgattttgggttaatcaaaagggagacgtccgggatgggcctgacctaaatatgcaagctctttatatttatatttttatttttattgtcatttttattgagatggagtcttgctctgttgcccaggctggactgcagtggcacaatcttggctcaccacaacctccacctcccgagttcaagcaattctccagcctcagcctcccgagtagctgagactaaaggcatgcaccaccatgcctgcctaatttttgtatttttagtagagatggggtttccctatgttagccaagctggtcttgaactcctgacctcgtgatccgcctgcctctgcctcccaaaatgttgggattacaggcaggagccaccgttcccagccaagctcttttttttttttttttttttttttttttttgagac

SEQ ID NO: 124834 - DNA, 1034 bp, Homo sapiens
ctcctctccttgaggaatctctggggaacacagtttgagaaccactgatctgatccaacaactcatctttacatttccctctacaacatcctgacaccttgttcctttggaaagtcttctgtggcattgaaatctggctcaccgtaattcccactattggtccaggtccagtcataggtgatacacagagcaaatggaactctttttccataggagaatgcatcactcattaaagacagttctcacgtttcatggaagccttctattttccagacaaaacatctccatgaccacaaaggagctgccagtcccttctctcctagtgtttgcctgtgtttctcttagagtcaggtcaggaactaagcacaaaatttttggtgtggtctgcttcacataaaatacggcaagcctagcataagccacagtctaaatattctgtttccatgaatgcagcgttagaccacatttgctttttcgcaaccacaatgcagtgctgactcataccacacgcagagtcaatcaaaattcccttttcacatatgtggttgctagggtatgtcttcaccaacatgtacttaggtgtgtttattttaacctgaatacaggcttcacattcatcaccattgtgtctcatcagggatctggtgcatatcttggatgatcctgattatgtcatccaacaatattgctcttctccctagcatcacctcaactctcaattggacaaatatgccataaatatcctcatcggagttattgacagaattttggaaccagacagggctgaggtcagagccctctagcaccatattgatgactattcccagtgtttgggtccttcaaaaacttacaaatccaactaattgtatcatctaatggcagtgatccaactcataaaggtaccaccagaaacataatgaactatttcctggccgccaagtacaggcattaagtccatttctctgccttcccaagccaggaggtcactagagctcctcctgcatgcccacaaacatgtaggagcctcttttcga

SEQ ID NO: 124835 - DNA, 1305 bp, Homo sapiens
tgtcttggtttattttttcatatacctttctcctttattcacattcatttatataaacgtgaaagttgccatgggtcttataggatacctatgctacctgaagaccaagagcttctgtttgatcattgaaaaagaagtgttttagttgtggttaaatttgacagtgcagcattcacctagtattcatttaccatctctaataactatctcccttcccctggggatggggacccttttcttctcctgtatttttagtccatttgtttctggtggagtcccctctatgctctactttatacgggtatgcagcttaggtctggccaatcagaaccttatattctcccttgtttgattcaaggcaccaagagggcagagagacttttgctgagtctcctggcaaaaatacgcttggtcttcttcactgaacttttcaggttttgaggctcaagccatctgagccaccttgcccccaggaagtggggatctgaaagaggatggcactaacacagagaaagtggagatgggagatggaggcaaactgaactctgggggcatgagggggaagtgactacattctagactcagccagatttcttgggtttgaattgttctgccacttacaaatgtggtcactctatccagattggtctctgtgcctcagtttactcatttgtgaagtgggaattgttatgatacctactcatggagtcttagtgagggtcaggtgagtcatgtgaaatgctgagaacagcacccagcatttggtatgtactatacaagtgttagtcatcatttgagccctatgccaagacatgactaaaatgagacccaccccttgatttttttcagctcaaagaacaataaattttcttttgctgatagtccgtttgggttgtgtttgttgtcacttaacccaaagagtcctaactagtagactcagtgaaatcaaattcatattcaggtttaaattttgtcttccttaatgaccctaagatagaaataatccaaacttagatattcctttcttgattattgtccagcaatgagcaaggtcttggaactggctaatttccttcttcttcctatcttcttgcttgcatttgtttgcaatttggtcttcagcatgtctttaaaaaatactgcatgtcacaattatttaaggaacctcagaacactgcaattagattttcataacaagcatatactttatgtcctttatttccaattcatgcagtatttaaaatgacaatatgaaaaaataaactatgaaaaattaaaataaatatattagtatattagacataa

SEQ ID NO: 124836 - DNA, 1031 bp, Homo sapiens
cccgtcataagttagggcctatttaggatttgttatggaagctggtatgtgattattcattgatttactcaatagcgcactgtgtaagtcaataaatctttggtccctaaactggtggtgtcttaagaagcagacttgaaagcattctattgccttatcagtttcctgggaggatatctgaagattaaaaactgcagtcaaggtaagcatttgctaggaagttaattattggtatctctgaaaatggaggtactggcatcatgcaaaagaaaggaggaacgcactgattgagttgcttgtttaataaataatagaggattcacaaagcagcaaatgtagaagagatgtgatgggaaggcaaaattcctttgtgaggtgtcacttaagagagtgctgattggtcagaagatgagtataaactgagaggaggggctgtggcaggaaagggggaccctgggtgttaaagcccaaggcgatagagcacatgctgaatgaactgttatatccttgccctgtgacacattcatccccaggaacaaatgtccagggaatcttgtgttcaaggtgatttttcaagtgtattgtttattatttaaatgtagcaaatcacttaatccagtgtaatcagtatgtaagaattgccgtgaactccctcctgtcccagtagctttgttagcatccttgagggctgacagcaaacttaatcaggccagcttgagtggaatggctttgggtgatttgcattctgcagaattgccagattcctgtcctctaacacaataatgagtgtttccatccagtggtgtgaagcatgtggaataattagctctcagcgttaaagatgtgactagtaacgtccaagcctccttcctcttaagagtatgattttcttatggtgacattttcaagaggacatccgtaatctctcattttggggacagcaggaaagagatgtgcctggatatatcctatcagtgttcgctgattcgccttcagctaaatcatttaaccagaccaagggaactgagatt

SEQ ID NO: 124837 - DNA, 1086 bp, Homo sapiens
ccttctttatgcctcactctttgttctgaatcctctcacagaaccttttaatctctactgcgcttcctgacacttactttgtgccaggtactttatatttctcccgtatcctggctgtatccctgtgaggatcatagccccacttcacggatgagaaaactgaggcacaaagaggctaagcaacttgcaaagacatcacagatagggactaataagattcaggttcaaacacaggcagtgtggctccagcatctctatgctgagcatatatatctgctgctgcttctcatatttctaaggtctttcacttgtctctcttcccctaccacattgtagaggggggatcatgtgttaaatttatctgtatttttttggtgccaagcccaggggctggcatgtaggaatctcataataaacactgattgaatggctatttaggcaacgagtatttactcagcatctgccatgtgtcaggcattgttttaagcacccacctgaaataaataagcaagaaaacagatcaagagtcttgccctcaataatggaggaggggggtgacttagattctagaagaacatgtcaagggcaagttaggtaaatgattgaggtaatatttagatgacatttttactcctgtatccatgcttctctagttctcttcttttaaattttgggtatgatttgaggcaactacagtactggaaattaatacaaatccttcatttgtcatatcagagctctgtaactggtcacatataagcgagctgtcagtggtcgaatcatgactgcctgttgcttctcaatggtttgaaaacagttttttgaaatggcattacatttctcatttcttcatgctcttctttcttgcttatcttttccactttttttctgctttgctccacctgttctcttgagaaaccatctcaatccctcctgcttcttcctacctcattctctccctcccttgcttcttaatttccgttcccctgaaccttgccaaatatgtttttttgaacagttgatcaaaactcatcaagcacaatgtgattttctctttcaaactgtaggtaaaatggagaggaatta

SEQ ID NO: 124838 - DNA, 1127 bp, Homo sapiens
aattgcctggcaaatcctgcttattttgatctgctccatctttctcagctttggcaagcaagcacaaagattgcaatttcccttgtatgatcccagaaagcagattgctgaatcatgagtcctaacttcaggttgaaggtgaaaataattccttcagggagtaatacatagctacagtctgcagaattaagctgataagagatgacattgcattaggaggttacaataataggatcaccttaaattaagctccctgaatgaataaaataagcctattactctgtggttcacctcagccttgtaaaatgcctggcacatcagaagttctggaaaagtgtcaaatagatgacataaaaaatggggtattctgataatgcagtgatgggatttgaggattatcataaacgattcatttttttttcattcaacaactatttctcaacctctcactttgtgctgggtaccgttctaggtgattcagcagtgaataaaagaaaaaaagttatttgtccttaggaatcttgcctgctaatggggaatacagatgatttttttaaatcgtgaaaatgctaagagagaagattaagtgggaagggagctctaagatatcatggtgtatgctgaaattttagcaagggtggaccatgcataaattaggaaatttctaagaattagaatacacaaaaggctgtggtatttaataccattcacctagtagagcacaaagaccatttgtggggtatgagggaaactgaaatctaggtctcgctttgtcacaaattcattgggcaagccatgctctcccctgggctcagcacgcagctgtcaaatggacaggttgggccatgtgaactccacacctcttacagctctaaagttgtgtgagcattcatgtttctttgatgatcttaaagacccttcaggatcttgcagttcagcacataaaaacaaattcccatgaaacacattttatttgagcttcctggtcatttagattctggataaataggaattttttgccatctatataatgcataataaaatcaggtcttataagatgcctataaacttccatacctttgtaatcattttcttttataatttcaggtaaggcaatttgcttccct

SEQ ID NO: 124839 - DNA, 1030 bp, Homo sapiens
ttatttcttgtaaatatagggaagtttaatttgatccactgtacatggatagttttgataagaatgctccctgcttttgattaaatattccctgggataagaacaagaaatactttcctatcaactaatgcatgccctttgtaactctataattgtcaatcatcaagttattgagctacctgtctctgtgtctaaaatgctttgctgaagtcccccttgtctgcttcattttctctggtctctcaggtttgtggattgggttggctcctagggcaccaccatttttgactccctttacagtctatccattattatttctgggatcaatttctagctgagccacctgtacctttgagaattctccctttctcccttttaaaaattgtaggcatttgcctaattccttgattctgtcccgctctgatggatcatgtcttcctcaacagactctcccagcgggttggccatgtcatttgattttcctctaagcccatgacacagtttgcccagatgtgagatttgaattcatttggagcagtagatgttttcgtcctacccattcatcacgccttggggtctgctttctttgttttgtccttggcaatccaaaggcactcctccttagtaggaaagccaatggcagctggaaaaggaattgagcgctctttttgacctccatcagcaccatactatgaaaggcagccaattgtctcaggccttctttgatgttctcctggttctgagcctcacaaagttctttcaaatgttactttcagtctttaagtgaatcttattaaaatgggagtacctctgagaagggttatactttgaaacataatacaaccagtgaggtgctaatatctttgcaaagctgctaactcagcctatgcagttgcaggagtgggtgtggcttttaaaggaaaacaccctgaattgctcacttacggctggtctgaaaaatgtttccttcccaggacactgtacctggcaccactgaatggtgaagagccgcccattttctttaggggaa

SEQ ID NO: 124840 - DNA, 1100 bp, Homo sapiens
agtgctttcctactgggctctgggtgtataagatgattacgatattgcaccgttgaccttcatcccagtgcacagggtcagattgggtcatttctgtgtgagtacagttgggaattgttaccactctgagaaccttacacagttggacaacgtaagaaaaagagagtcccccgcttagatggtttttatttatttattgcaattaatgaagaattcatgaaggtggccttgctgaaacttgtcttttgaaagtaaatttggcctctgattgaccttccagagacaaattcatgttcttggatgttgtgtataagtgtgtgttttagaaaaacaaagtaataatttagcatcaagaacatatcattgaaattcttagaaatcccataattgcagctgtgtgcaggcgtattatatgaagaaaaggaaaacaaccccttaactttgaagccttgcttgtgctcagaatacatcacagaaaaggaaaggggagagcgttggtggtgttattgcttttatttttagaaaaagtagaggctcagacgaaagtcccgttgcatacagtgagtccatttaaaggtgtatggtatagcatgggaagtttattacagatgtgaaattaggtagtacgtagcaaggatcaatgtttattcatactctaaatttaacccatttaaacatcgcagtggggagtgaatttgcttgtgggcctgaaattctccctacgctgccatgtggaacagagacagagttatggaaaatgtagaaggatgtccaagttccctctccttttgggcaacgtatatgactccagtttataaaaagcaagtcagatcactacaaaaaataaattatcttagtcatactcaggtcttgtcttagcctttgctatggtctagggggtgacggaggacatctgtcaaggccctgtggggacagaaggcacactcagctgggatgttgaagagcagttaatggagggtctgttgacagaggtgtcggcagattgagagaactaagagagtctgaagcatctgggagtggccaagagtgggaagccattcccaaccccgggtctggagggggcaacaagaggaaattgt

SEQ ID NO: 124841 - DNA, 1081 bp, Homo sapiens
aatatatatgctgtaaagcaagaatagtaaaaatgctgtagaacctagatgatgtgtatatgggtgtttactgtaaaagtctttcaacttttctgtatgtatgaaaattttcattataaaacgtcaagaagaaaaaatgaagactgtgtgagaagagtggcaggatgtgctctggcccatggaacaaagacattctcttgggtgcacagccctgacaggtgggaggatgacttggcatgagagctgtcgaaaacactataagccatgctcaagaatttttaatgtggaatagagaacttttctgaaaaagcatagttgaaagcaaggacaagcattaataaggcacttctactcttttatttattaccatgttgggaattattttgggaggagtgcttgcttcagaaatgctaaagtaggtaatttgtaaaaaaaaaattaatagagaacaggcttctggattttatgtaatcattacaatatagagcaatgagtgctggccctgatatcaggaattgggttttaactctgaatctgctgctatccctgggcaggactgtgggcaaattagttaatcactctgaactgcagcttccttgtctataagaagaaggcaaagatacaattccaccctcctggtgggagaatatatgtaaaagcattctgaaggtcatgacgttatcagtgaacaatgagttctcaaagggggcaatatcacccctaaagtggagaaatttggttcttaccaaaaaaaaaacccttactatttatatgtataaagcacaaatacctatatagaacataaacagatatacagtctatatgtaatattaaaattcctttgtggggaggtgcttgagagaaaacctgtctaaaaaggctccttagggagctataatgcaaaaacagacaagccttgaatttctaccatctcccagattctgttctcctttctttttctttaggtagattaattttatccatcactttgaatacttaatactcttacatttctaggagagagagaaaaaagtaacttctgggagaaaactaagaatgatagacactttgccttttccaa

SEQ ID NO: 124842 - DNA, 1039 bp, Homo sapiens
gaaactgatatttctagattcttgtccttccctgagagggaagtttggtcaacagaaactgatatttctggacaatattcctatcaggaaacttgtacctcaaaatatgcccccttgtgcagatatttttgtatttatttgtcaaaaataaattgtggaggaaattaataatccaattaataatcactttgaatgagccacccaatatacatttacctttttgggaaacggtaaatcaagaaaatattgcaggaagacaccccaactctctgagcagtttgatggacgggtgtcggtggtgtggattttcttggacactaatgatgtgatgtttggttgtcccaagggacactgggcctggtcacttgctggggctactcattttgttagtagtttgttaagttacttggtacgaatccatccgtttctctctgacctatattgacaagtggaattattaaaggtctcagccttgccagagattctgtttcccttaaaggcagtcagtggtccattgcgatggagtcagtgactagaaaagagggactggaaacgtgaatggcttcactgagaagagtgggtggggggagggtacctgtttgctttgctaagggcgtgtcttgaaggttttaatgagtgaaatgagcaggtttcctaatatttctcaattccagacacaccagcatttccgtttccaggtacttaaatttcgttttctcatttgttttattgatcgtttccaaatgaatccagagagacgatgttacctgtgtatccaagaatactaacgcagtaataattggcaaaaagagattacctactccatcagatttgagtggctcccagatttctctccagtcatgattgttagcagtaaacttgattttaataaccgtagatgagatggagaggcagggaggaaggcagaaaaaaaaaaaaagttgtgatggttagccaatagtgatccgtctccccactgattctttatttagttggatttaaaaacattatgatgtatgtgggccaccattcggtgcat

SEQ ID NO: 124843 - DNA, 1030 bp, Homo sapiens
aacgcatttcagaacttattccatagatggattatctactgaccttcacatcactgtaagcaacaaaggaataacaggagatttaacatgagctcagacatttagtgttaaacacatttcacatatgtgaactaatttcccattttatcctcagaaccactttgccaggtccgtagggcaggaatcaccatccccatcttattgaaaggctcacggtggcagggtgaggaatcagacccaggcttcctgattccacgctcaaagcttcttaaatcaactgagcagttgtgcctcattctgtgctcactgcccttagtgctttgagcgaacacccttggttttgggccatcctgaggcaagtgatgctaaaagtactcagtatttacatgatctgtttctgaaaacagatcatgtaagcagaaaactgctattacgagctataataactagtattttcttaaaaagtataccctacgaatccaatgcatatgacaacagtgtttttgacagcacatttttattcaataaatatggtttgtcatattaaattgcatctgtgttttagtggggaaaaaatgatccatgcccttaaataataaaagcacatttaagaatatattataccagtttatccgtttcactgttcattatagcagcaaaaattagaaaatgaccttaatgtccatcaatttgagactgcttaaatggattatggtacatccatgttaaggaatatcacacaaccccaggaaaggaatgaatgagaaccctcatatgggctgatgtggaatgggcacttggaatcgttatatggaaaagtacctagcagtgtggtgtgtggagtatggtattatttgagtaaactagtagaaaaaaatatttttattgatttttattttaaaattgtatgtatttattattttttaaagacaggatctcactttattgcccaggctggtctcaaactcgtgggctcaagcgatcctcccatctcagcctcccaagtagctgggattacaggtacgagcca

SEQ ID NO: 124844 - DNA, 1033 bp, Homo sapiens
acaggtgccaagagaggatggttttaaaaggccagaggtcatgaggcaagtgttggaagaggcaaagatctgaggggctctgatttggcttcaggacctttcattagagcatcagtaattcttagagtccagaatctttccaggtgtggcttctttggacagagccatctcttggtatcggagggaagcaaatggctgctagtggagggaacagagccctgtccttggctgcataggcacagggaagcagaacagcggatcgggcttctggaagccttgttctgaggcaactcctttgctaccaatttgtttggggactttagacaaaccacccgcttctctgggcctcagtttcctcatctgtaagatgagagggttgcttagatagatgcttaaaagaaatagtaattggtcttgtctcacgatgttgttccacatcacaataatgattttctctactttgtgctgtgtagcataaatggttatcatcaattctattctcatgtagggtaactgaagccattctcctccatctgtattcctggccaaagtaataaatggcagggaaaccacatgttttgagcaaccaatcaagtatgtatttctcaaggacatgcccttagtttactcatttctctattcatttagaaacatgtaatgtatgctacacagccaggcagtgtgctaaagacaggaatacagtgattagcaagacagtcaccaccatgtagaacttagggtgaatagagccaaaagaaagagtgggagacccaggggaggatggaggggtgactaggagttaaccagatgaacaaagaaggatgatatcagatgagatggactgtattctaggaaggtccaagttgttagagtaatggtcccaacttactgggattttatacacatacaaactcaaaatttaagctatatactgagcagaagacttgtttattttcaggcaataaatgtttatattctcgggatctggagaatagccaaagactaaaaaataggcctagaggaaggggccttc

SEQ ID NO: 124845 - DNA, 1088 bp, Homo sapiens
ttcagtactctgcagtggctgctcacgtcactcagagtgaaagtgggagtcccattccttcccagaaggccctaggtcccttacctcaccttctagcacctaccactctagctgttcctgatctttgctatttctggagcctaccatgcttgctcctatttcatggccttgcatgtgctgtaccctctgcctggaatgttcttcctccagatgtcagcatggctcacctatcacctccggcccgtatttgcccaaatttccaaatgtcaccttctcatgagaccttttctgaccaccttgatttaagttgtaacctccctctcacttcctatccttgttcttgctttgtttttcttcatggttcccaacactttttaaaagaatatacaatgtacttcttagttttgtttgttgtctactctcttagagtggttgttccctgttctatctcactggcctaatacagtgcctgataaataatagatgctcaataattatttgctgaaataaggaaggaagagagaaaggaaggaagcaaggaaagaagggagggagggtaagagggagagaaggaaggaaggagctatgtttgcaacatatccaagaataattgtattgcattaaaacagagcataggccaaattgcatgtggtcatttcagactgaactgtgttcccctggaatatttacacttgttcattagcatgacagtctcttttccagagcagggagtggcttgagaggtgtctgcatcaatcacacacactctgacattccatttgggaagggacaacacagtcctacgcttggtagagctagtcttcccaaacacaaatacaaggaccaattgtagattttggaaatcccagccaccactcacacaggagaccagaaataaacttagattatctttggaatgtgtcaacatccatgtttcaggactactgcattcttaaatatccccaagaactatattgagcagtatcagctgcacagctgtgagtggcgccaaggactattttgtttgggtgattgttcactgtaaaaagcacagtagggattggagatatttttatttgtgaaatttt

SEQ ID NO: 124846 - DNA, 1040 bp, Homo sapiens
cctgcaggtataaggcaggagaagctggagtctggatctgcttccagatttagttgtagaatagctctttgataagaggtaattgtggaacctctctggcccttggtctcttcccctgtaaaaggtggaggagggattagacaatctcaatggttaagaatttatcatccatgcacactaaatctaataagagttttataatatactttaaaaatcatttttatataatggaataagaacatagtcattgtaggaaactcaaaaaaaaatgcaaagaatatagaagaaaataaatgtcaattaaaatttttccacccagaagtaactgttgcttatcttcagcagtttgagtgaatgtattttgaatatattttggtgtgttttcttctgatattttctgtgcatacctacttacaaatctgggaattatactatacatggctcaggagcctacttctcacctaacattataccagaggcaaatcttctcatcattaaatgttcttttaattgtctttgttaatgtctacataataccctattacattttatgccataatttatttaacttttcccctatattgactgtttaggctttttcacatttcttgatattgttttgatgaatatctgtatctctatatctatccatctatctagatcttagtctgaagaccttttcaagagaatcctagaaatagaataattggatcaatgcacatgaacttttcccggcttttgatccatctccaactttttttttccagacacaggccagttcacacaaacaccagtgggatattaaagaactctcctcaccacaccctcatcatcattcgtaatattgattttcatttcatgcactgccatgaagcagagaaggctgcaacagcaggacagtgtttggaataggagtatagctcgggcagtcaacacctaaggaagattcagactcaataaacagaactgtagagctatcagcagcacagacactgtggttggaatacagggagacatacaggaccaatgatgacattttc

SEQ ID NO: 124847 - DNA, 1049 bp, Homo sapiens
ttattggttgcctccatgtttagccaactcctttactttttaaaatgccttttttggaagtagctcaaagacttggaaccttttaattatcccataatcatgtcttatttatacctgcctggatagtgtagagatgggaaaacttcagtcaaaaggacacagtaattgagttctgccttccagaacttgctgagctaaatgcaggttatagcgaccagcttgggctatcttgggtttgtccacacagtgccttgttgtgggtggtcacagtcttactccttagctgatggcatggcctataatctgtttctccacgttcctttctgactctgtcctggggcatggtggatcgatgaaggattttcaaagatcaaagcacatctctgttttctcaggatctgtttgcaactgctttactggaaggaaaagcccagtgggggatcgctcctgctgatcttcattgacatgtctgaggctacctgcctttaaatgactctgagctttctgacatttttcttctttttggatcacaggtccacacgttccgaggcccacactggtgtgaatattgtgccaatttcatgtgggggctcatcgcccaaggggtccggtgctcaggtagacacagaactttcttcttttccaattatatgaaatgccactgtgctgagctggaggatgtctctccagagctgggaaatgtgctcagattagctcaaaagtctagccttctgcagggttcaaggcctgtctgtgcttaatggggaaactatttcaagtgtttgcaggaatgaaaaagaatatatcatgtttatgcaagaaaagaaaaaaaaaaacaaaaagtacatttccttaaacacctacctgcctcttacaataggcagtagtccgtaaaagaaaaaaaaaatcaattccaatggaactgcatagctagaaaagccatactttgtcctaccccatcttgctacaaaaggtaagacataaaaatagtaatagtgctggtgaatatttaccacataccaggcaccagttaatctctatttatcatg

SEQ ID NO: 124848 - DNA, 1023 bp, Homo sapiens
cacttgaagtgttaacagtacttgaggaatgatggaggttcagacttggattttatcagatatctaattatgccagtgaacacatcccccatccagaatcagcgtggtcctggaaaccaagctgtactgccatccccaacacaagctccagtgcaccaacatctcgtgcattgaaggaaccctagagtttggtgaataatgcgtgactattgtgactgttatgggagttcagaagtgtgaacaaatgctttaggatgggaaatgggaaatgagatcagggaagacttttaggaaaaggtgagattcgaattgtgacaaaaggcttatatttggatatgtggagctgagatcaataagtgtcagaggctgatagaacagcatgatcaaagtcataggaggcagaaaacatgaaagccaagtaggctgaaatgaagggcatgagaaagaagtagcaggaaataagttgagaaggttgattgagaccagccttggagagtctaattcaaggttaggtgtaaggcatttgaactccatctgtaggaaggcgttaattcttttctttaaaaaaaatttttttaatgagatgaaatcacataacataaaattaatcattttaaagtgaacagtttagtggcatatagtacattcccaatactgacaccaaacaatttttaaatagagtgacatgatcagaagtgagcttcagagattaacttggcagcagtgtgtaagagagactgagaaaggaagcagaaagaataattggaaaactagcactagaatccaggcaataatagtcttcacgagggtagccacagaagacatggagaggagaggataggtgagagctgatggagacatttgacaggactggatgggtggcctggtagaagaggagcctgggaagggagaaagttcaggaatgaaggttcaggaatgaaggatatgggagttatctctgtagacgtgagcaccgaaactttaagaatgagtgaaactgccaagagagaaaagtcagcaaag

SEQ ID NO: 124849 - DNA, 1030 bp, Homo sapiens
ttccaagtcagcaggaggacatggcaagtcacagtgtgtttacttacacggtgcagttcaaccttgtgggctaaatttaacattccctctctgacttctcagctgtcttctgctccagtgtcggccctgatgagcgccccgatgatctcccgctagaggtctctctcaccggatcttttttttttttttttttttttttttgagatggagtctcactctgtcgcccaggttggagtgcagtggcggcgcgatctcggctcactgcaagctccgcttcccgggttcacgccattctcctgcctcagcctcccgagttgctgggactacaggcgcccgccaccacgcccggctaattttttgtattttttttagtagagacggggttttacggtgttagccaggatggtctcgatctcctgaccttgtgatccgcccgcctcggcctcccaaagtgctgggattacaggcgtaagccactgtgcccggcctcacctgatcttaatatagtgttcgccaatcctctcctctcctgtgcggcaggaaggaattaacaattttgtggcaaaagcgaccatatacagtatatttagacttaattggttttgcacaaaaggacatatccatttgcacactgaaggccactttacacaaaaccagtcatttctccacttcatctgcaatatttattaacaattcaaccataatttgctgtcttaaaaaacctcctgccacctcaagaattcttgttactgtggttacaggatgcagaaacaggaaagaaaggattttcaaatattcactgaacgtttcatgttgtgcaatcctgatcatgggcaacgtcactaaaaagacagtcaagggagagaaagccattcctggacacttttcccacggcaaaactatgcaccaaaaactaaaaacacacagacaaaacaaaacaaaaaagaagccaacaaaacattacttccaagttcactcttgttttgtctcattaacatggtgcttgagtagtgacaatttgttgggtttc

SEQ ID NO: 124850 - DNA, 1013 bp, Homo sapiens
aatttgaagaacttgcccatgtcacaatgcccaaaccttctgacctcttgttcagtgcttcttccataatgcctcactgcttttcctggcatgttagaatctccagggacaagaatcctcctcactaccaacgtgtcacacactgtgcaggatctggtctccagcctcacggcaggcatgcacccagatcacctgagtctggtggttttgatctccgcctgcaagtctactcaaagtggattgtagtctcctttgggcattccacagtcaagaagatctttgtatctcactggataccatcttaattctcactgcagtgagacacaaaacaattgagaaatcactgggttctagacattgcaaacaataccccagggactgctcttttttatggctagagtggtcagtgcatggggtgggagccctgggctggaagtctgaatgcctaaatcggtttcttgcttttccactgccttaacttggggtctccagcacgttttttttatttctctgagcttcctgtcaagtgaattgctgatgattggttctataaatgtttataagacagtattaggtcctcacataccatcaactacataccccatttcatctggtttccacccacagccccttgggtaaaagtcagctctttgcataggcatctccccaaacttgacagccttgcatgaatgagaagcttcggggcccagcctgtttgggggggtggaggaggaaggctttcatgtgcaagagtcttctaactccacctggtaatgttctgttatgtttccacagttatctctaaagactcttcggtgagaagacagatgaagcgaaggtcctggggttccaggttgcagaacaacatgtcagaccccacccaccccatgctcaagctgtaattcagttggcatacaggcttggaattgagaatttatttattgtaaatatgtgatttgcacgggctttaaagcagtattttaattgacttttatttcggtaatattttttaa

SEQ ID NO: 124851 - DNA, 1810 bp, Homo sapiens
caattgtgatgtcctagtcctaccactagagggcatggtacagcctggcaaaagttaaaaggggtgtggcagctcccatcaggtctggaggtggtctataagcacagttgacagttgtgcattgggatgggtggagaaagacgacaagagagcagagaatctgctgatgtggctgcgcttacttttagtgactttatgtacttatattaacagctggaaataggttgttgggttttgagcaggctgttatagtgaggaatgttcatttttaaatgttcctaacagattttgcttttgaaaaatgcttgttacatgaataatttgtggaccagggattgcttttctgaaggcagtatagggaacatgaatattcaagatgaaatacaaaaattatgtttaagggtcatagtgtataagtagcttcctaggaaaccctttgtgtatcttttcagactggggtgggggctgagcatgcttgtgcagaaagaagccatagccagaaaggacagaatctctcccccactcccttgccccataaccaaacataagctagctagtcttgtctaatagatgggatttactataggtgaagatagccctcatattcaaggacagaagctctggcaggagtaaattagcaaagcagaaatagtaccctttcattcttggaggtgctttgaaattttaggtagaatataatcgaaattatggaggttccttagtgctcaataatataagacctggtgttattagaacgagtctttcttataaactaacagagcaggtatatgcctgttagaccttagctgtggggttcctttactattgggtgaatcattaggtataaaaaataatcatcaaccaggcaaattactttgcttcctagctgatgtcatcccacattggtacaggtgttattcagtactgggtggttcagcagggaagccgggtgggaccagtgtgtctgtcatgaaaccactaactgcattcctgactgaagagccatctgtcatttattggggaaggtcttcagttgagctctcagccttaggaaggaagcacgtggaggagggacggaggaggttcccttgctgggcatgcttcgtagagggccaggagcagcaggtcatgtgcacatgccgttgcagcacaagcttatgcttcccgtagccgtggcttttcattctgcacagtcccaggtcccagctcccctcttatggtttctgtcataatgtgctttatctgattgactccaaacatcccgaaatgtcacctgcagatttctcgtgggaaccaatatgtacatgtttgcaattatgctgtgagaatttaaatgtgttagatggaaaatgctattggcagggaataataataaaaaaaaaagaaaatcattctgtttcctgcagtgggaactggccatgtagtcttaacagtcttttgtacaaatatctacaaagcagataatatccctatccagtgcttgcccttggaattgtctctaaatgcatcaagcatacaataaaaaaaactgaaattaacatccagtggagtggcctcttctgttttgtgtctcgtgaataaacgtgggcctcagtcgcaatatagaaaatgtatgagaatggatatatttttctggctagaatctttagaaaacagtcagttcagcagtttcttgcatcatgtaatgttctgtggataaattcagtctttaaatataaaaccacaacgaaatatcacctcacacccgtcaggatagctactattgaaaacaaaaacaacaacaacaacaaaaaaccacaaccagaaaata

SEQ ID NO: 124852 - DNA, 1053 bp, Homo sapiens
ttggcgagaactcggatttgggaataaaaatgtccatgaaaacatcgaaggaaactgttacctgctttgactcaaagctgaccttgtagggttctgttaaataacgtggcttttctggattttctgtctgattctagcatgcaagtccttgacttacgcttgcgtccggcagccgggtggggtgggtgcgtgcgtgtgtgtgtgcgcgtgtgcgcgtgttgtgttcccagcctggttagaagatgcatcagttgcggaggaaacctatgctaattcaaaatggcagcatgaaaaataggccaggcggaagcagcacagaccacaaccatcagctgccccctgacttaagcctcagggagggaattagtgtgagtcaaggctcatccgggtatggagtagagagtgattcttggagctggctagattttagggtgctgcagggtcctgggagttgttaagtgggaagtttggagagctgtaattatttttcctaacttatcaaaagatgatacaaaacctagttaaaactctacggttttgtatgattttctccaggctcaactaaagttgactctgtggctgctgatgtctttttgatgcacaacctggaggtcgtttgatacctacaagctcttaaaagagatgtgtgcacattgtaaacatcatccaagagcagtgcacataacaaataccaggttcttagatcaagtttcattggaagaactgatttagcgacacgaggaagcacccaggcatgaggaaatgggaaattcttgaaaggtgactcattttagaattttttttttttaaacagcctttctttcccttttcacttccgtgctgccagccatcttgtcttttgggaaggagatacatgaggaggcaaatgcttcagggataatggaatagaggaggatgagctaaggtcggggggcagaggtggaggcagtcttaaggagcctgctgtcaaccccctttttacagcaggaaggctgaggccagcggggcgaatggacgccaagatcatatatctggctgtcaactggcagtgag

SEQ ID NO: 124853 - DNA, 1025 bp, Homo sapiens
ggccaggctgatctccaactcctgacctcaagcaatcttcccacttgggcctcccaaagtgctgggataacaggcatgagccaccacacctggccctgcctttgagcaatattttgtgtctccactttagcagtttagcaacagtttttttaagggaaaaagtttctattattttttaattatcattaaaactatgtcataaaatggctgtttagaaggtattatatttagttaatgaactaaatataataacagtccatgtctgtgatattgattggctcaatgtgggtatcttatgaatccaagttattaatgggatctgttattttgtaggttaaagcatatttaaagaaggagtttgaaaaacatggtgcggtggtgaatgaaagtcatcatgatgctttggtggaggatatttttgataaagaagatgaagacaaagatgggtttatatctgccagagaatttacatataaacacgatgagttatagagatacatctacccttttaatatagcactcatctttcaagagagggcagtcatctttaaagaacattttatttttatacaatgttctttcttgctttgttttttatttttatatattttttctgactcctatttaaagaaccccttaggtttctaagtacccatttctttctgataagttattgggaagaaaaagctaattggtctttgaatagaagacttctggacaatttttcactttcacagatatgaagctttgttttactttctcacttataaatttaaaatgttgcaactgggaatataccacgacatgagaccaggttatagcacaaattagcaccctatatttctgcttccctctattttctccaagttagaggtcaacatttgaaaagccttttgcaatagcccaaggcttgctattttcatgttataatgaaatagtttatgtgtaactggctctgagtctctgcttgaggaccagaggaaaatggttgttggacctgacttgttaatggctactgctttact

SEQ ID NO: 124854 - DNA, 1056 bp, Homo sapiens
gatgcaggggtgtgcgggaggctagatatttcagggcctcataggctggtttaaacactgtgatgtgattgtgtgtgtgcatgtgggtacatgcatgcatgcgtctgtgagagagaaatgatgagattgtttaaaagcttactctggctttagcgtagcgtagaacattttctggttacatctttatatctctcctgctgcatttattgtacttcactaaatactatgtattattattttgtgagcttcttttgcctcttgaattttaaatcgataggtattaattactgaaagttagaattcatcaagccctgataatagcgtctgaggtttatgtgagtgtatttctagaagagaaaagaagtctcttcccttaaatgctaagcgtattcaggtactctatcctccttcaatgaaaaatacaaaaaaaaaaaagtttacatgtattttcgtttacagtctggtttcatcctgccttttggacattccgggatttagtgccagtacctttctttagatgttagaagattaaacttgggatgaagagagtaaattaaaaacatgttacagattcccacattgtgtgagacatacttctaaagaagcactgtgtttgttatttgtgtctttcaagacctaaaatttagtcaaggagtattatacatgtagggctacacattaatactctagaacgctggttcaggagtcagagagacctgaagcctggcaaacagccctattactgccaactgcagggtcactttagcatcctgagccttagtatcttcctccatttaaaataatgggatttactagtttataattgtaagaactgttaaaaatttattagtacttacaatgtgccaagcacttttctaaacattttacatggattaactcagtctttgcagcaatttcaaaaaacagttgcctttattatgcccattttccagatgaagacactgagatatagagacgtgggtttgctgaaggtcacacagccacttattaagtggcttcagagtcagtgctccattagacaatacttttaaaggt

SEQ ID NO: 124855 - DNA, 1026 bp, Homo sapiens
ttcttagtggtaattggacactgcagaatgtttttcccaggtaagagtagagcactgcattagtaagtaaacagctatgaccccattttatagataggaaaaactctctggcagaactgaggccaaaactctgaaccccttagctctgctcccagttctgacaggagtgggtcagactatattgtctccttctttgtatactggtgattattcggtatattgccttaataaataatgtatactactttgaaagactggagatctactttttctggtttttcttgttattatgtcttcacctgtcacatttgcaacccatactttaaagatttgactttgggcatatgttctgtgtggtatcctaactagtaaggattcctcttctgcatagtatcctaactagtaaatcagttgtttgttctggttactgcattatcatcattttgtcatttagagtttgctgaaaacactgaaaacttgaaaaccaaaatgtcagaactaagactctactgtgacctccttgttcagcaagtagataaaacaaaagaagtgaccacaactggtgtgtccaattctgaggtaaaatattatttattaatattattaatatacatgaataatataaaagaagtgactaccagtatatccaattctgaggtaaaatattattttattaatattactaatatacctaaaaagcaccagacgttgcttacaggtggtgtttactctcatctaattttttgactatcttggaatttactattttatagaggaaaaaagtaacaaaattaaacaaagagaagcaatagtacatttcatcatatgcgtgtgtatagctttccttcctggaataaattagggattaattaattgataatatttggaacctttaactttagtactgtcatactaaaatatgtttctctccagtttatattgttttgttaattacagtcttgcagagccatttctatagctatggctattaagatgccaacttattgtctttcattgatgtgcatc

SEQ ID NO: 124856 - DNA, 1049 bp, Homo sapiens
tttctcttaagacttagattgacatttctctcgtcttctctataagccaaaataactttaccaattataggtttacagtagaaaaacactttcctgtatacaaagttcctggacagaatggttgttcaccaacagtaatggaagggttgttctctcagttactataaaagctttaggcataatctctaaatacctgatagcaagtttctgagttactaatagtaaatgaatgagagctgtgctgtttccataaccaggtgccaattctttcagaaaaggattggaaaaggcatatttttcatttttattacattgtttacagagtaaacaccagtttttttgacagaatggtgtgatgcaacaagagtgtccccaggtctcattgcttttaactttgtgaccttgggaaagtcactacctttctgggtcttccatgtcttcatttctaaaaggaaaagaattaggcaaggtgattgtcaaggcttcctacttagaaattttgactcagtttctggggaactgacacatctcaaagaactgggagaagggtatcatttatgtctttcagaggccaaaaatactcccagattatagaacatgcatgatgataatgaatgggtattacagtgaagattaatgtatttcattatctaatcttctctaggtaaccaaaataggtcaggcttagacttcatcttattttaatgccatcagtctcacatggcagggatatttgcagcgtagaagtcagctaaggactttgggaagtgtttttttttttttatgacttttatttcatttgttggttttaaattgcagcaatgatctcagtcaagacccagcccaaattcttttgacacaccttctcccattaggtcatctggcccacattttgccaggtggaactctcctttggcaaggtataagcataacaaggaacagcttctttgtctactagggccaagtgggaagacagatgtgctgctgtacaaacactctcccatccttaagccagactccccatgctgtttggactcacagcacctttg

SEQ ID NO: 124857 - DNA, 1033 bp, Homo sapiens
tgtttatatgcatttttgaataaaattcttatttcttcaaaataaattcctagtagaactgctatgtcgaatactaagaactacaaccacagtttacagttttgagcacttaacatgcactagatgttgttttaagtgcttgacatacataaatttctaagtctcataatcctgagatagattccattattttccctgcttatagacagagaaacctgagacacaaagtgatgaggtaatatacccaaggttgtagagtaaaaacatcttgaaggctttaaatattattgccaataaaggtgctggtttttaagaaaatagattatgtaatgcatttggcaacagccttatcaatagaggagttaattctgtagctagattggccttttcaccctattactctccaagtcatgcctactttggaaggtttataagttttctaacatgctaacttgcagagccaaattcatgttaactaatctcggttgctgagggaaacattgtttacatccaaggaatttgacttatttatcagccaaatagtgaccttttaatctttcagcagttatactctactgagctgatagccatttcaggcaaggtggctgcctccatcttggtcactaactagccttcatttgacctttttggtttcctcttcaatcagactagacagttgaactctattactggttctccccttttttttctagagtgctgatggctgagtgtagaattctaggttaataaacattttccctccaaattttgaaggcattcctctattgtcctccagcttctactgttactattgtgaaatcctattctattatatataatctgttccttgtccctttcgaaatgttttagattgtttttccccacattctgaaatttcatgatgtgcccttttggtctttatcattcattatgctgagcacttgattaggtctttaaatctggagactcctatcctccagttctgggagattttcttttgttatgtttttggataactgccttctcttaattt

SEQ ID NO: 124858 - DNA, 1167 bp, Homo sapiens
tgtactttactacagaaacaggaggaagtgtgcgttgtcctggggaaaatgaatcctacttcttcagttatgttttatgctgatctactttattgcaaaacgctaatagtaaatgaatcaagaccacctcccctctcccctttatgaaaataaatagaagtatagaagataagcattcccatttcatcgcattatgtatctggtattagaaaaattagcaactgagcacagatgagcagcgaaaacacgatcccctacatttttgtgccgcttttacttatatatttgtaaacgtaggaactttggagacttagtaaagtggaatacgtagtaatttatccgttctcatgttctgtactatcagcacacacgccagcataaattaaaaacaggaatgtcatgtttcatttttcccatttttttagtaacgctttgcaaattcaattggaacgacgcttgacttttaattagctaccttgttttaaagtaatttttgcttcttaaaaatattcatccctcttaaaattgggctatttttaaaagtcatttgcttttgattttgagtaaaagaactctactggtgtccttaaagtgatttgatcacaactaacctaacagttgaagttgctgtagtccgcactgaagaatataaaaggcagtttctgagaattggtgattagtgcgagaatgaagggcaaactggtttttaatgtttatcattatctttttaaagtgaaaatttgcatttagcaattattagaagatgaatatttaagtttgctaaagaagggtgaataggaaaagccttgtcaagttaatagttaatatttatttaatatgctgatttctaaaaattcattttctaagagctgataattccctttgagaaacattatagttctgtgggtttattttgttaagtaaatgcattctattcagagcaagagacagttgagccccatgctattcctagtaagtaaaaatacctagttgcttaaagttggagataaagcatttatcttttttcttatctaagttctagatttgtgcactcattatagttcttttagtgctgttggggttgggtgactggggcctagtagtacagtgacactttctgaggaacttacagcagcctttctcacccggctttctggagacaattgt

SEQ ID NO: 124859 - DNA, 1635 bp, Homo sapiens
taaaaatccctgcttttaggggccttattattctatttgggagagatagtaaacagacaagtaaaatacatagtgtgttagggcattgagtgtaatggaaaaaaaatggagtgcaaaggctgatagagattctggggtggaggcctatctatagttgctattttaaatcgggttttaaggatgacctcactgacaaggtgacaattcaagcagaaagtgaaggagcaagtcatgaggatctctggggtaaaaacatattcaggcacagggagcagtaactataaaggccctgaggcatgagtgtacctgatatgtaggtttacttacagctggagtgcagagggctgtagaagatgagagcatagtggggtggcatgaggttgggacagaatcataaactgcctcataaccactgacctgtggtttgcggcttttgttttaaagagggatggggagtatttttgtgcagaggattgacataatctgacttgggttttaaaggattactctggctattgtgtgaggtggcaagagtcagcaaggaggcaaaaatccagatgaaagataacagtggcttggactgggtggcagtgctggaggtgctaagcagtggccagattctgcatatcccgtgttttgaagatagagccacctggattagatgtggaggtatgagagaaaatgaagagtcaaggatttatttcgttgttccttatggttgagcattttgtttgtttggtacagatgtaataaaatactgttgccatgaacaccctggtaagcaaatttttacattttttttttttttttttgggatggagtcttgctctgtcacccaggctacagtgcagtagtgcgatcttggctcactgcaacctctgcctcccaggttcaagtgattcttgtgccccagcctcccaagtagctgggattacaggtgtgcaccaccatgcctcactaatttttgtatttttagtagagactgggttttgccatgttggccaggctagtcttgagctcttggcctcaagtgattcgcccacctcagcctcccaaagtgctgggattacaggcctgagtgcccggccagttcttagaaatttatcagcgacatgggattgccagaaacaaagatacacttttgttcaaggcattggatctttattgccaaattgctcattagagatggaaacagcttctagcaaggtataatctttgggactacgtaaaattttttaacccataaaaacttgtgaggtttttgatatttataagtgcagattggtggatatatttcgagtaatgtcacctatcagagtcattatttcattcagggctctttttttagcgacgaaaatattagtgtgtcagaaaattatagatgtattcagtcatttgaatttcataagttccgaccatgtggaatatcctaatttttgcttgaattgtgattagtctgtaatagttctttaatttacctatttatatgtgagctgaggaaaaaaagaagaatgaagccatgcatacataatgggttatttatttttatttttattgtcttttttttctttcctttttgtggagaacagggtctcgctatattgcccaggcaggattatgtgtaatatgtttcag

SEQ ID NO: 124860 - DNA, 1027 bp, Homo sapiens
gaatgagactctgtctcaaaacaaaacaaaaacctgcttttgtagtattgtgagggttaaagtagtccacatacttcatatctccgtacttttaactattgaatgaacctcttcaatgaatgaaaaaattgaaacatccaagatttatgccgcacttccagtctcaccctcctcagaaagaccatgtgctttactctgataccgtattcctttctcttcccaactgctcagattttgcaaaaacaatccagttttcattatttttataatgtgtcttccttatatttacaaaattctcccctgaacatttgaattgagtttttcagcacatttactatgccaaacacatggtaaaaactttgtaaatattgaatgtttcccaaaatgtatttgataactacattattatgttttaaggtaagattattatcaaaattattgtcatgtttaaattatatatagaaatgtattgctctagaaagaagtggtaggttatgtttttatttgtataatgtaaatataggtaaattaatttttgaaccaaataggtataatatagattgtacaaatggaggcagttataaaattgccttagaagtaaaattatactgtgcttatagctcttttataatcatttgaatgtgttacaaagtgttatcaatgtgagcgtgttttgtgggcggttggagatggttggaaggatggttgataaggtaggtcagtgttttcattaagtgtgtgctgctgcttcagggcagaggctgaaaaacttagattattttagttacatgatttactacatctcaggcaacctggatgacttggcatttactaaagcaattcactgctttgctggtgcttcaacacccttcagtctgagagccctgaagtcttgatttgtaattctccagatttcctgtctatcatagcacttcttcaaaaacagcatatctggtcaccttgaaatctcagttccttaataactccttttgtccactcttcctaccaccttaccgtacgcagagtt

SEQ ID NO: 124861 - DNA, 1005 bp, Homo sapiens
aattgctgtgaaatagaatttaggtaataaagggattcttggttcctttagtagtttaagttgcacattgacttgcctgtcgaccgtacttaaaattacagactttctttgccttcccaagtccactttttgaaatagctgttaagtagctcagtgtccaaataataagtaaaacaggaatacgaggcagaagggagcattgatcacccacctctcaatactactagaaagttggctgcctaatctctcattattttgtatttatttgctattttattctgggtgcatagatttaatattatgttgacactttttatccttagtattgattgggttttccctcttttttctactctgctacctctatcccttctggaaccagtagtttaatggtaagtatttaaataagatttacaaagtttttgacctagtgaggatttttttaccctcacctatcttggtgaaaactttgtagacttcagacggtctctgtggtttcccaggttttcattgttgccttgtttgtgtgtagactgataaaactttagttctgaggttctcctgtccttgcatgctgtgtcaaatggcatccattgtttgtgtgtttcatagtgatgtttttcttggagcttgcattctcttttttgtcttctttctgctgtttttttttgttttttttttttttttttttttttggctgggggtggaggggtattggagtgggaaggagaaaagtctttctcacatctgtactacttttattttctatatggcatttggaatcctcccaaattttgccaggtagatctctgtaagatgtttgttctgtgtacattaaaagcataataactagtatctttgggaagaattatagactgagtccaagtccattgaatgatactgtttttattgacccttaattctgctaaatttgctatcaaattctgtgttgttatttcttgtttcacatttcaagatatttgagcctttcaagtgttttttaaa

SEQ ID NO: 124862 - DNA, 1982 bp, Homo sapiens
ctgggattacaggtgtgagccaccacgcctggcctatgggaagtgtatttgttaagatatccaagacttggtcccagtatggattttgatttgctcatggtacctaagtgtctgttcttatcttagccattcattccattggtgttttgttttggtattttggtatttgtttgttttttgccactattcacacgaaataatcccttggaaatctcaaaatagaccccctatgattgttgcatggttgtaacatttttatgtacaagatattgtaaatcgtttaattggttataaatgctatgagagagatctggtagagagatgagtggactgcagagtgtagtgaaaagagtcctagttctggccctagtcctgactagttttatgagttttgtcaagaatttttacctcactgagttttcttacctgtaaaaggagattagagtggatgttcccttagagtgcatttgcattctcacaaagttgagtctacctggcttgggagtaattacagtgaacatggagaagtgtaactctttttggacaacacggagggcatttgttaggtacacagtgtgaaacttaaaaatgtctgatcccataattaagtttgttttttgtccctaactaaagaaaaaggtggggcgggggggggggggttgggtataaagacgcctacagggcatacttaaagaatccttgtaagacatttaatgagtcattacagcatactgatatctaacataaaaaactgctttggatagcttttcattcattcaaatatttgagtgatagtgtgtgtcatgagaggcacactaatgactttggggctacaaaaaatagatcataattttcacttaaaattgcttcattcatgttctttccaaagagaatatatgaaaaaaataaagtaaaagaattgtcagactaggcgctgtggctcacacctgtaatcccagcactttgggaggccaaggcgggcagatcacctgaggttgggagttggagaccagcctgaccaacatggagaaactccatctctactaaaaatacaaaattagctgggcttggtggtgcatccctgtaatcccagctacttgggatgctgaggcaggagaactgcttgaacctgggaagcggaggttgtggtgagtcaagattgcaccactgtactccagcctgggcaacaagagcgaaactccatctcaaaaaaaaaaaaaaaaaaaaaaaaaaaaaaaagaattgtcataaaccagtagatagtaggaagtaatgattttccctagtggactgaatatatggtcctgatgtgaactaagctattcaagaatgtctgttatacaaattgttgtatactgatgttttataggttcatcaaggattgctttggaggatttatcagaggattaattagacatttagctatttagcctggtaaaacgcttgttgaacaaggttaaaacgtttcctgctaacttgtttcagaatgtattctgctatattgtgttattggaacatttgctgtcctgctattttaattttatttcagatatttttgtcctttattaagtcgctgtcatttttaagtgtatagattttacttaggtgtttcctctttggcctcttgagcaacttttcctttatagcagaaagtttacctattagaaaaccgtgataatttagagagaagttaggtcatctgcaactgatcctgcctgtggttatagaagttagttagcttgcattttctgggaaatttttcataacagataattctgtatttgccagactcagaacagatcctaccagtaaatgagataagttcatcttttcagtttagactccaggccttttgctgcgcttatgttttatatagtctaaagttctttgcttatggaagttgatttatttgcccccccttttttttactggcatgtttaaaacaattttacctttgaacggaatttgaaaaaaaatgcagt

SEQ ID NO: 124863 - DNA, 2832 bp, Homo sapiens
cccatggttgatcagtttcacagtattcgatgtagcctgtgtttggccattatagtttttttgtagtttcatttttaggggtgtctaatcttttggcttccttgggccacattttttatagtttcatttttaggggtgtctaatcttttggcttctgtgggccacacataaaatacactaacaatagctgatcagctaaaaaaaaaaactgcaaaaaatctcataatgttttaaggaagtttatgaatttgtgttgggccacattaggccatgcgttggacaaacttgttttaatcgaatcctccttcctgttttttttctttctctttttggtggttttcaagaagttgaagtaaacatacctttattcctttcttttaaaatgcatgtactacagtttgaaaaacattgtacaaaatcatatatttcatttaggaaattgaatacctggaggattagctgtgccaaaatctttttcccaatccttataaagttcggcatgaggtataattctagcctcactcatttggttgcagtgagtttcacatcacagtgaagggaggacagttcctgtgagaacacatgtgttggaactagagagctgccaaaacgtctctttcaccacccatcttattagttgtctctcacagtgcttctgttcctgtctacactctagcttcatgtggccttctttcttgtgcttgcctatagtttctgttctctcgtaagttcagcttacacctgagccgtcatggacaccactgtctctcttttacttacttttgacctttctgcttaagctctttactgctggccaatatagtctctcactgtttcttaatcatatttccaaaaaaaaaaaaaattgattggcctatgccatctttttgttccacttctgatttgtgcctagccaaactataagttggctatctgggttcaggtttccaaacagcttagtggtgtcaggggagggagcagtaggacagcaggggaacatggtatatctgaggactgtcttagcagcaagaaggcagggatgggacacttcaccttggtaagtgagggggcagaacagagctgaatacatcaaatagtccctattttattatgctagtttatttttaatggagtacttcaggcaaatacttagtagtgcagattgaataatgtaggaaactagctaatttttaagtgtcaaaaattgactgcaaaaacctgtaccccgatctgatgctagtttctgttttcattatgacttcagtgccatggtgtggcagaaagaccattaaagtagaagtcaggagtcttagattctagacctgtttttgctgttctgaaaggcttcacgttctgcatcagataaaattttaaggttattgaggtagaatagtgtctaaggtgctgtttagctataaaacttgtgactcacagtgtactataccaagttggtaaaggtaatttccacaagagtagtcagattacaaagcttgtaataacatgaaatcatgagtacaggttaatgtaaaaaattaaaaacgagaatacctggaccagtacatcagagagagatacaggagtttgtagtggactgcatccctctcattttaacttgttttgtttgatgaggagatcatcttcataaactgatacaaaagtcagatattataatcacaaaattttcctgacttgagttgcacataaacagtgtaatgcagtaagtgtaatattgaagtttcaaacgctttttgattttccatgctttttaaaagccatagctggatattcagaatagttaagtaacttgagtttcttttgttttttaggatttaagtgccctgtatgctcaaaatttgtatcctcagatgaaatggatttgcatcttgtaatgtgtttaacaaagccacgaataacctataatggtaagtccaatggtttaaaataatattttaagttagaattaacttacattttatgaatttcatgtttcaagtataatttaaaaggagggaaggacattgttttctctatttttactagtgcattaatgcagtggttctcaaattctgtgatctcaagacttctttacacttcaaaaaattactgaggacttcaaagagtttttctttacttgggttatatctatccatatttgtcataaattaaaacagaatttataatttttaatttattttgttaaacataaatataattatgttgacaacttttaaatgaaaagtaaattttctaagacaaaatatttagtgacaagagtggcattttcaggatttttacaaactctttaatatcaggcttcatgacaaggaattctcacatctgcttcttcattcagtttattgtgatatggcacgtcttgtgtcctctggaaaactctgctgctatactggagagaatgggaatgaaaaaggcagatatggccaggcacagtggctcacacctgtaatcccagcactttgggaggccgaggtaggcagatcacctgagatcccaagtttgagaccagcctggccaacatggtgaaaccccatctctactaaaagaaaaaaaaaaagaaaaaaaaaaattagctgggtgtggtggtgcacacctgaaatcctagctactcgggaggctgaggcaggagaatcgcttgaacccaggaggcgaaagttgtagtgagccgagattgtgccactgcactccagccttggagacagagtgagactctgtctcaaaaaaaaaaagaaaaaaaaacaaaaacaaacaaacaaaaaaacagatacttagtgttaccatgaaaatagtttttactttgttaatctaaaaggattt

SEQ ID NO: 124864 - DNA, 1675 bp, Homo sapiens
cttgtttttggtcaggtttggatatttgacagttcttaatttcctgatttaactatgcctaagtcattaaactgttctgctagatcacttgtttggtgtcttaagaactaatatataaccttctgcttggggatactataacaaccaaatatttcgaattttaaatatttaacagtatttcaatctagaaattaataaatttcatgcaataagtaaataaacttgtaggcattcttaaagttgctgactgaaagctttaaaaaataaaaatatatatatttttgtttttagagtcaggatcttgctgtgttgcccgggctggagctcagtggctatctataggcacagtcatggcacacgacagcctcaaactcctgggcacaagtgatcctcctacctcagcctcctaagtagctaggactacaggtgcatgccaccatgcctggcttttattttttattttgtagagataaaaaattcaaagtatgtattaattgtataaacattcacagcaagaagcaaatacagcttcttaataaaaaccgtgtatagtttttgaggttttaaaactagctcttggacagtggccagttatgagtaagtgaaggagaaaggagctttgcctggactgatttggagggttacagagaggtggcaggttaataatgtactttcctatcataggcaaggggaattctaatgccacctggttttaaagtcagaccccccccaaaatgtctgtcacaggtgatgagtccaaatggaaattggctcctttaatacctcataagcaaaccatctaggattattataaagtagaacaaggtaaagccagagaatctctaaaactgaatctttttagtcaactggattcctcacaattttatatttgaattcctacatgttgattccatagagagatacatcagatacattgggcctctgaattgtgttagtgctcaaacaagaacatttttttcagcatactgttcatttaacttacacttttgcagccttttccaaagtagctagatctgaaattttgaaatttatttgttaagtgaatgttaactgtctataaacattcatagttataacacaagaatagtggggcttgttttcttcagactggatatatttatatagataagctcctgaattggatgagttccagaaattcaaatataagttgatgatttagagtttcagactctttgtcacagagatgatatttgaaatattggtttttcagactagctcaccaaaaccttcttatttttttaaatgcacaatatatctgaacacccacatcctggtacctgaagaagaaattggctgactaggtagaaactctcagggattgggcagctggctcggcagagatcccaatgggacgcccaaggctgtcagggcagggaaggattttgaatgatgtgggtggtattatctattgcagatggtattttggcagcttgaaaaaattaagaatgccacagtgagtattcaacaacatagattaccttcatgtgaaggactgcctgtttcatatacttttccctctttcatgtgcttcattgttgagtttatggacctaataattccttgtatagtctatgaatctaatacaaattttatgagtatagaggctctcttcatttccttgctccttctagga

SEQ ID NO: 124865 - DNA, 2170 bp, Homo sapiens
atcagctaacatttagtgccttttacacattttcacattcattagatttatttttaatcatccgtattaaagaccatgtgagatgtaggtattatcacttgcaatttattttatgaaaatgaggctcaaagaggtttgtgacttgtccaaagctcaagcctgttctttttccatgagactgccttcatttgcattatctcctaagatcttcacaaggatcctaagagacaggtcaagcaggttttatcattattaccacttaagattgcagaaaacaaactcagactcccttcttgcgaataatcacgtagctagtgttcagaacatacctgctctgttccaggtatctcactaggcatttgagaggtattatttatttctaccactaccctgtgaggtaggtactgttatcctgttatattccataataaattggaagagttggagtttgaaactaaactgtaaattaaaaaaaaaaaaattgctacgtattacccagattgctggactcttttattgccactatgagcctacatacattaaaatttaaacatttgtctaattttaaaagtatacagtaataagcttgaaaatcagataaagatattagctttgttgtgttttcaggactggtgcttttctctcctagtgattgaatagaaatgaacctgaaattttacttcaaagtatactttattctattttggtctgtattcaatagttccattttttttcttgttcatgtagacaactcatttaggaaaatatttgtttaggttttaacaaatcagtgtaattgattttaagttttagtttattgttgatttgtgacaatgagagggcataggaaaattatcttagtttgatttcatggttgggaaataacttggtaatctaataatttcctagacaacttgtgtgactacttgtggcttgttaggtaaatactcaatacttataaaatacttaatcctgagttagctttttaaggtaagttaggagcaaaaaggcccaagaaagctatgtctaggtgtggaattagtgctccttttgtatattgtagcttttagagtttgtgatttgtgttccattttattttagttacattttcttggcgaattcaccgaatttcgatttccagaatattcccaagagtataaactttttttaaaaagtcatcatcaaaagagtaacaaattttatttcctcctaaagaatagtcttaattttgcattaagtttctaacagtgcagatgaagagtagctacatgtttaacgatcaattcttagttacatttaaactagagaggcattgaaaaagtaattttcagtggcatctaggcagagaagcccagattaataaacgttattcccatatttttactgatatatttatcttacagtgaaaatggcaacttccctttgttaaatatcatttctaagcctatttatatttgagtacagtaatagctcatggatctgtaattgaaagaattagttaatgttacgttcttttatacgtataagagataacttaatatctgaaagtatttattattaaaacttgtgagccccaactttttgttctttgagtaattgcttttcactaatgttgtaaatttttttaattcttgatttttctagggattatttcacatttcagctgcttttgttttctactgctatcattgagggttcaagaacaaaaaataagtcttcaggtaaaatgcctgatccataatagcgcttggcgttgtattttgctgaaaagatcatatacctgtttggatgcttgatctgaaaataaagttgtgatgattatgaaattttcgcatgaagtttccttggctgcctaacaaattcagtcttatttgttggtttggttttttgtttttttttttaaagaattttggctgtttgcttttttttttttccatgtcgtcttgatctgcaataactatatggatatgtgcttggacctgctaagtattttaattttgcatatttggctgcttgaattttaagtaatttctttggacaatgcaaattttaagagcttgagaagctgtaagtgaaatatcaagtaacagaagtttgtaactagtttataaatgtatattcattacctattatatattttaaggtttcatattttaccaaaattaaatta

SEQ ID NO: 124866 - DNA, 1066 bp, Homo sapiens
tagcttgtggaggaggaatccagactagccaactatggtagttaaatctgtgagtgttcccttctctgcttctttaatgagttttggctagttagtagtctaccccaagatattccagttctgaagtgttgactccttaatccctgtgggtgttatcttcataaatgttttcaactgatctttagatttttaatcttttcccaactgtcttgaagatgctttagtatcctgggtttagtggtatttccaggtcctgtttttaagtatgaatgtatcacattactaacaagtctttcacaattgtgaaatgtagttacctatgtgaaggcaaaagctcaaaactttcctctgaatgaaagtgtcattataggggtgagagaggggactactctagcaaacccccaggtaggcaaaaattaatcacattccacagtgaattttcaaaactgaaaatatttttaaacatacaaagacacattctagtggaaacaagactttaaaatgtgaaaattaagcatttgctatgtgaagctgtaatcatgaggttttgaagtcagagtgaactatcttctaactcagagttgcttatcaaaatgcaactgatcagtggctacaatatgttaacattagcttttaattttctgagcagagattatgtcactagaagctatttttagtggatattaggctgtttctgcactgaaatcagtgtgttcgggatgtttttgtatacaggtatacttttcttgaacagaaaatacaattctgaagtacagttctgattattttttattgctagggtttaagggagcttattttttaaatgactttaacccagcattctgaattacactaaaaagattgtttaaacttagtacctgcaaagcatctgagggataagtctcgcccctgtcaattttaaaatagcattgtgttcttaaaatatgtatcattctgttaattataggcaggttggatttgtctttgttgtactataaattttcttataaataggataaaatgtagaccttttaaaatattctcatctcaaagactttgaagagct

SEQ ID NO: 124867 - DNA, 1012 bp, Homo sapiens
catttggggtgatttcttgaacttacccaattttattattttataatttttaaaattataattttattttcatgtctttttagccacattacactgtaaaattctttgaactatcttggtcacactaaaggaaaataaattcatggtacaaataactagcttattgataaagttatagagcaaaatctgcccaatttgggtgattctgtactgtttttgcttactgtaatgcttcaataaaatagaaatgaaaacgtgagacaatggaagtaaaggtaaacattattcagtcatttatgaatagtatttcaaatacacgtgctgagttttatgtatttctggcgaaaagatatgccaagtaaggtggaatcacaactttttatcagttagcattcacgtaattcttttttcaatttgatggataattttattgtcctgaattcattttctctttcttcagaggatgtactgagtaaagatgctggggaatgtgcaatatgccttgaagaattgcagcagggagatactatagcacgactgccttgtctatgcatatatcataaagggtaagttcaccaagttggtattagagtaaaagattgttctcacagtttcagacattgtaattagggctgaaaaggaatcttcgttgaaaccaccccctccctgtctcacacacacttcttaaaacttaatgatcttttttctctatttgaactaagacttgaacccacatctgtttgtatccaaaaggctactatttttaaagcatttgctatgacccagctgttgtccatagcttcttgaataaattatctcatgtaagccttgtaaccattgcattttacaattgagaaaataagctaagggacagtatggaattgccccaaggttacaaggctagtaaatggcagagttgagattccagtagatttggaatctgcttgactccaaaacctgtctgctttctcatatggtcttcttgcttttagagtgatacaggaaaaatttg

SEQ ID NO: 124868 - DNA, 1063 bp, Homo sapiens
ataacttgctagctgttaggcaagtaatagctagttagtagaccttgattttttcacctatcatggtactgtgaaatagaactttctaccataatggaaatgttctatatctatgctgtcccctagagtagtcgtgagccatgttgctgttgagtgcttgaaatgtggctagtgtgactgaggaactggatttttttattttatttcaataaatcttaaataaccagtgtgtggctcttgtctactctgttggacagtgcagatccacaatgacgatgatcatatgcaccctaatatttagcttctaataaaataagatcataaaatacttcctaaatacaaatgattaatgtatatttatttgtgtatgtatatgtattacatggtgggataggatttaaatattcaataatcacatataaatatagctttaaaaatgaaatattggcaaggattaaaatttaaaagccgttttttaatacatttataggtgacatgaacaggttgataatgtgcataaatgaataactgttttgaaaagaaaaattatgcaaatttgttattcagttttgaatattggtaaagtggtagttcagattatcttttggaagtagttctgtttgaactttaaagtactttatagcataattttgcaaaggtttttttcttaatcgcttagaatcaaaatataataaacattcttatctgttgcttatgtatgccaaatataatttaaaatgctcatttttttctgtaaaaaatatattaaagtcaagtatttttactgtggctctcattatataaataattagtataagtatctcaatttttctggttttgttcctttctagctgcatagatgaatggtttgaagtaaatagatcttgccctgagcacccttcagattaagcgtcagcttcctgttttataggtaattttttttgtaattactttttaaagcgttagcccaaattatacattctaaactataatttttatttattcatttactcattgaggtgcatgagtgtgtatgtgtatgtttcagacacttaggctactg

SEQ ID NO: 124869 - DNA, 3283 bp, Homo sapiens
taactaaagcaatgttcatggggaaatctatttttacacaggttttcttgtcttgacaagatgcttgaaaaaccaagaggatatgaaaatctgtctctggagaaacaaagacgcaggcatactcagccagaaatctgagttttgtgagacttggtaatacagagatggacaatcgtactggggtaaaaaaaccctgctgaagagaggacagtgaccacagaactcagtgtaccaaacatgcatacaaaggacacacagggattttgaaaatgctgcacatcccttaatagtcatctacataggtaatactgataaacattttgtattcagacgccaaagttaactgatttaaaagttgatttactttttattaagttctccagagctgcacaactagttatgttttgatttgttttgttttttaatttggggtctctttgttttccccaacataatgttcataatgtttctgcattcatctgttcttaaattgaaaaacatataatttacttcttataaattgaagtcttaaatgtgaaaccaagaaatgtaatcaagcagtaaaaacatctgaatgtagaccatgatctcaagttcttccattttctcccccacgagtggaaaatagacttctacataggaaagctaaaatatgttaatatttttaaattaaaggtttaatatcagaatgcagtccaaagagcaaatcatattacataattacattttaattaaatatagaatattctactgaattgcaatttattaaatattcttatcctcttaaataaaactgctcaacagttaatcagcagtgaatcatcttgcagctatgcaatttaaaaaaaatacagattaccaatttcaagtgctgccagctaaaataactgttttaacgggtatcttttgtttgttcttttcacttaattattttattgtgctttgcatctccaggcagttctctcacatttgggtaaaatgtttagcaggctgtaaacttaagaaaagggtaaaataaaattttctggagaggaacttggaatttgagggagattttatatacctttaaaaactgtaatttaattgggatgccaggtttatagcaatttgcaactttaattttccagataatctggaggttagcatttgataaatgattttttaaagtagatatgaagattttgttaatttataatttattcatgtgttattactgtaattgaaaatgttatagacacttttaaattcagtttgtgtagaaagaaatgtgttaaacaaaattatgttaataaatattcccacataatacatctgaatggttaaaaatactggaagagttgtcagggctacaatagtgaatgtccttttttttaatatcaaaaatatcgataagtaggttttgtgttttcaacgtagggaaaatgttatcagtgaataggtggtgtactttacttggtataatttaaagttgcacagtaagtactgtttccttattttaatctttctttactcataatgtatttaagaatttgctgttttatttaacgctgctactcttaatcttctctaaatttttccccctactttcttgcttctgtttcacattttttaaaagggcaagtacaggagcaactgctgctacccagaaaaatgtgtgtattataaataattaaagagtttttaattgctttctgtatgattccagctcagataacattttccctgaagttatgctgtgaaatgccttttgttatgctgcaattgctaaaggaatccaaaacctccattgtgacagctgaaggcacagtttaataggtgcttttttactagttatgaaaaatattcgtcccttaaggaaacgattctttttctgtttttttctgttaccatgaagtcttaatttgatttcattttatttcacatttttgattttgtaagctttcataccctcctgctcaaccccctcaagtaaaacctcttagaatgtgaataattggttcattttctattgctggtatactcttgtgatgagaattattttgttgtcttccattcttaaaggaagagatttattacagctgtggggattaactgtattctcctggaagttgattttctgataggttaatgcaaaagtcattgcaaaaactgctattacttttgcgccaatttaatagttcacttgtttactttttaacctatattggcttaaattcactttttagcccctctttgtcataaggttctgtgctgcatttgctacaatagaagctcctatggttttaaagaaagttcagtgttttgtcagtgtcaagtgctacttgatgattatatttgtctggaacagtattcacttaagtctgtttatagcaatcccttttttgacaaaatttacaaagttggcatttttactttaaattccatctctatcagtgacttcctaaaaagagcaacttagaaattgggggaaaaatgtttttaaagcccaaatgctccagtttttattcaaagtcaaagtcgttattctggaaaatacaagtaatgttctatataatgtcacttaaaatattcgtaaatctattttgcaaacactgaatagtataagtaagatataaaatcacaatagatatttaaatactaagctgaaacttctgacaactaattattatgggggacacaataaagattgaaagcctaggttaccaagttggttttagctttctagaatctttgtaaatactcacgttcaaataagatcacacgtgcatatatagaaagcaatatgttctgaaatttcactttagtgccactgtttgtccataatggatttattgccaattttgaatcctcatcttactttgatctggcttttttttcccccccttgccagaatgtttaggagaaagtaaaattattccgttttactttggctttttgccagagatacaaactaagaatagtctgaatatgtgtttttcagatctggttacaagacggattatagattgtgttttagagcaatgttgtgattgaaatataaataatggtataactttttttgtgttagcaaaaacaacattaaaaaggttatgttacataatatgtaggttttggtttcttagtgcaagacttatatttctcttaaatgttgtataattatttcagttttcactcactagctactttactaaaatgtagccccaaaatgacgggccagcctcagcgtatctgccatatgtatttcaaagattacagtcagaatgagttaatgaaaatggcaggt

SEQ ID NO: 124870 - DNA, 2423 bp, Homo sapiens
aaagcatgaaacttgttgttttaaaatttaagaataattgaatttaccatctaattggcatccgtactgtgcattgatagtaatatccaaatcatcttattcttccatagaggaagcgctcatataaatcacattgctgagaactatataaaactacatagaggtaaatggtgcttattaaatatgagtatagtttgttacttgctggaagtcttctagttcatttggaccattttcttaccctgaggtgaactcaatatctgttggcaatgggtggttaaatgtgaagtgcccttgttcagtgtcccttgttcttgtacaggtattttcttagtttaaaaaaaaaattctagcatgccaacatttgtctttggcctattcctttttttctgaagtgtgtaacttctgattttttctttgctatgttgtaaataacagtagctaaattctctgttttactatctacttttcttttcttcccagatcatttcattctaaaattaaattgcttggttttctttagaggaaattgctacatggtatacttgtagtagtgattcatattaaaaaaatagctggtaaatctttctaggtagtaacttatccaaacaatactttgagtatcatattttgtgaatgacttgcttaaactgggaaactgaatattctttttaaatcatataattcctgtattaaatgtgaaacacacagtctccaaagtcacctgattctctgtggaaaatgaaaggcattgaaggaaaccagatacattaatacttagttttggttgaaagtgcaacattactgtacttagaaggggcttggtttatttttagatatttaagctatcattaattttagaccaatggctaataataagagagatttttggttgctcatttatggagagacaaagaacagcatggcataaacaaacatcccagaaataaatgaaaagttttaagtgataaaattgtgttttctatgaaccagtgttgtacatgaaccaacattgtgtttcttagctctgacctgtacagtgaggtacctgtcaggacccctagtcttggcactggaaatgacaaagttctcctattactaaattctcatgccttccttttctgacttagtagattgaaattggtaggtactaatgatttatgtttgataaacttaagttctgctgatatcctgttactggtaattctggtaccaaaatttcaaacggtttgattattagtagcattttgagtacctaggtgcatataatacagttagcagacccttacagagtcaaaagagattttggaatctggtgatactgttgtttattacactagcctattacattttctttctttataataactgtttatgtgagtttcattgaaaatcgtggctctattgctttattcatggtttccacaactctttttgtaacaccttaattttctctcttaggtattttcctgttaaataagatatcaaaagcatcaatcacaagacagagaaaacgtattaggaaaaacttgtattagtatattctaaactgaaatggaaaaactcattattcatattttaataaataaaactcccaaatgatcttgctaaattatcccactatttagaagtagaaaataagagaagagtgctttcaaggaaatttgtcatattctcccttctatctagaagttgacaatgaattgcaataaaactaagaaataactgaatgctgaaaaataccatgaattaatgttatggcttctttatttttgtatatccattcccacaaaattgaatttaagattattaatgaaaattctatattaagtaataatgcttgtattagtaatgggtaaagaagtctttctttgttacattaaccgttagtaaaagatgtactttgacatttctgatgtaaaacctatatgtaaatattgtaatttaaatatgattggacagctgttaagttttggggagggaagcagatgccagcgttctctgctgaaaagacaagatggcgcttgacggaccacagcagatggagctggaggaggaaaaggcaggcagtggactctgccagtattatctgtccaagattgaagaactccagggtcaactgcaatataaattggatgggggaaagccacaaggaacagttctgaactccaggtgcatttgcagctgattttgaatgataagacccaaaacctctggaggcggcaggtgcacgggaatgaactaaatgttaaagtgtgcctattacaggaggagctacagctgctgcaggaataggactcctgtgtcagggaagtagtccaggccatgggtaagaagaaagtgttggtcaaggtgcatctcaaggacaagtttgtcatagatgtggacaaaaatatcagcatcagtgatgtgacacccagttc

SEQ ID NO: 124871 - DNA, 1081 bp, Homo sapiens
atggaatattttgacatttgattttcccgaaggtgagggaaggtttcatgggctgaaggacttggtgatttaatatagacctccttttcctagggcactgccatagagtttagaatttagagatatcaaggaaaagattatttcagatgattcccatatgcaattagggagagccagagcttgcagtaggaccccggagatcatgacttagtagtaaacaccaaacgggtttctcctgcatgggcgcctgatgcaataatttgccttagctacagagggtggaaccctatctcggaaataattcattggggcatagctgccgcaaattcagccactttgccatctgtcctcttcgctggtttgagcctgaccgattttaataaatagcctttcattttgaaatatcaccacgggcttaacttttttcttcatgattggtgtcagaacaccgattgcatattctgtctccctccacccaccttccactccacaaataaaattaggtgtggttcctttgtcttttcttaacttgccattttaaaaaatatccttccctttagaaggaagcatacaactaatttggagaaaaaaaaaaaccaccacacccaaacccctccctctgccacgttagcctggaactgcagtgaaaatcatccatcggtagttaagacaggatctagttaactaaagtaaactttgatcgcggcagctttccgatgctactaactactgtcttgtgtattgtttatgttgtcttgattattgttttgtactttaagatattttccgaatatacgagttagttgatttaagttagtttggatatttttttctaattttccaagaacacacatatatcagttagttaattgtgtgaattactgagtcctatgtcagctgaaaaataatttaaagatgatctaattttacccattttttgtatatggggaaatgagacacactgtcacccctatccattttggataactccattgtgaagtgcaattgaaaacctttccggagtgggatttttacttaatgactggtcttgttagtagcacatgtttcatagaaatttgtt

SEQ ID NO: 124872 - DNA, 1110 bp, Homo sapiens
atgtgagcagttatttgttaacttgcccgtgtgttcttctagattattaaatgaagagggcagagaccttgattcataatgatcactcacataataaacatttgaattgcatcattctttttttttttttttttttttttcattttgagacggagtctcactttgtcacccaggctggagtgtagtagcatgatcttagctcagtgcaacctccgccttccgggttcaagtgattctcctgcctcagcctcccaagtggctgggattacaggtgcccaccaccacggccggctaatttttgtattttcagtagcgatggtgtatcaccatgttggccaggatggtctgaaactcctgatctcagatggtgaggagggcctttcaaagtgctggtattacaggcgtgagccaccacgcttggcctgaattgcatcattcttacatagactttttaaaaggcacgcttaaaaacacattcctaacatttcttaacttctgaaaccaatcctgaatataaattctctttcttggctagggagatcttgtgcgaaaactcaaagaagataaagcaccccaagtagacgtagacaaagcagtggctgagctcaaagcccgcaagagggttctggaagcaaaggtgagtcctgggatgctaaaataggaacataagtaggtataggattgttcatctttaatttctttggatgggagagacctagaaaagtttctgaacaagtatcatttggtttatctgtttatccataatgccgccttctcctttccctctacctggtagactcctcatcctttcaaaatgcaactcaaaatgtcaactttttaataaagccttcctgaccctgcaaatgctggactcaatacgctatatgaatttccatggaaaggattgtgctcttctttacgacttctcttatgcctgaaaataatgatttttgtttgtttgtttgttttaaggaaaaggtctgtttatttgatacctgctcccagacctttcaaacaatagatctcccatcaccaaacttaagttgttttggggttttaaagtaaccattttgctatagcaatccactgacaattcaaatattgctttat

SEQ ID NO: 124873 - DNA, 2137 bp, Homo sapiens
tgggattacaggtgcccaccaccaagcccagctaatttttgtatttttagtagagacagtgttttgccatgttggccaggctgggcttgaactcctgacctcaggtgatccacccacttcggcctcccaaagtactgggattacaggtgtgagccaccgcacctggtcaagcttagtcttgtaatcttggaaatgatcatatattttcctaaatgattaagtaaagatatcttttatattactcaaagggaaaaaaagacctatggcttctattgtttttaacctatcaaaatcttgtctgtttgataaattttatatttaattctggtgaggaataaactaaattcagatatataagttcagattcccacccacccctccactcactcactttttatttaatctctaacaggagctggcgttacagcccaaagatgatattgtagaccgagcaaaaatggaagataccctgaagaggaggtttttctatgatcaagcttttgctatttatggaggtaagggattaatgacaaaaagaactattgtgttgttagtggctctaatattatacttaaatcaagaacatggcttgcctgttggtatccacttgtatcaggccacaaagcagaggatggatgttttgcttttgtttgcttggagtcaccatttggtgtgatacctgttatttttctccactgcatttattcctggacagcactttttttgattaggatgtagggaattgttggaggcccatgtatgtatttgatgtgtctgtgtactcatgtactctttttaaaatgcaatggagactgaagagtaacagagggccattgtagtactggctaactatactatgccccttcacacaggggcagtgataaaacagtccttagattattctttatggtcatctgccaggagaaaacattcttcccagggatgtagataaatcactgtgaatgccatatgaaggtatataggcaaatacaattcactgatgaaatgtaaaactatatttttcatagtcaacggattattacaacaacattagacatatagtactttgccactgaaagttgacttgagtttggctaagtggatctgtaaatgtttacccttttgaggttaaatagtgcctcaaatacccaggaaaaaattagagaattggatgctaaaattatagatcattgttatcagatgtggtgagaaattattttgtaatttttacggcagaaaactgtaatctgctttttcattctgttctctaagggggaacttttgttgtagattttgggctagtcctacttgaaattacaaatatagaattagtaaatggcgtaagagcttttttattttacttccatcagctagctgaaagtaaggttcttcagtattgagggatttgcattgttgacttgaatacacttttagggagtataggtatcagtttctcatgtctccttgccttcatttgttcagagtaacaaggtaaagtatgtgttttcctctcatattctataggtgttagtggtctgtatgactttgggccagttggctgtgctttgaagaacaatattattcagacctggaggcagcactttatccaagaggaacagatcctggagatcgattgcaccatgctcacccctgagccagttttaaagtgagatcttactttggagtgggggtatcctactttaaataaaataacttattaaattatttaatatacttatctaaataacttcctgattataaagaactactcatttcatgtagaaaatctgaaaaatatggaaaagcaaagaaatgtataccttctgctcacagatagctatgttaagatgattgtgtttgtccttcctgttttttctgtacgtccctatgtatttcagtgttagcagtacactgcttattttcatgtaatattgatgaacatatactcatatcattaactattcatctaaagcatttttaatgatagcatagtattctgttttatggaagtgccataatatgttagtttgtgccatattgaaagcattaaagtgtttctcatttttgactgcaccgaatatcttgatagatggatttttgggtatatccttgattatttccttaatacaagttctga

SEQ ID NO: 124874 - DNA, 1552 bp, Homo sapiens
gcctcggcctcccaaagtagggcagaatttcagaatgtgaaactgaaaggaattcttttatttatttatttattttttgagatggagtctcgctctgtcccccaggctggagtgcagtggggcgatctctgctcactgcaagctccgcctctcgggttcacgccattctcttgcctcagcctccagagcagctgggactacaggcacctgccaccgtgcctggctaatttttttgtatttttagtagagacggggtttcaccatggtctcgatctcctgacctcgtgatccgcctgcctcggcctcccaaagtgctgggattacaggcgtgagccactgcgcccggcctgaaagaggaattcttgccattttgtaactcgtcattattcatttaaggttgactggtggagagctaatttttactattggcatccgttaggttctcttaataatttcagccaatgaagaggaggaattctgaatgatggctctataagatcaggactacctatcattttagctacttgttccaccaataggaactttgtagagataataccaatgtcagtacaggtttcagtggcagaaaacacttcccttaaggttcaatgtctatactgagctgccatgaattcttaactagtcaaattcccagtgattttggcctttgcttagatcactaataataatggcataggcatggattaattgatcctgaagaatagtacagactttatgacaacttgtagaaaagaattgtctttttattgtctagttaatgtcttctttcttatgggaaggaagaatgtgggagagggtgagaaatagatttgaggaagaattttctctggcatccattactgtcatggatacatcattactatagatatgggagcttccatctttgagatggatataaatattgatggggaattatcttataaggtaatatctatgtgtaatttgtatgagaatgacaaattgggttggcatttgttaatttaggacctctggccatgtagacaaatttgctgacttcatggtgaaagacgtaaaaaatggagaatgttttcgtgctgaccatctattaaaaggtgaggttcttcatctccttcaggtaggattgatcaaaataaaaggtttaaactttctctcagatgtctttcattaaattttttattgaggcataacattcaaagagcaaagtgcacagatcttaagtatatagatcaagtcctttattttttaaaaaagttatatgtagataattagttatatacagataatttttctaattagcaaatgaatcaagacaataccatgactgctgttgtaaaatcaactgtgggattcatgtaaattaagaactttatgcttggatttactttttaattgtctagcattgaaactgaaaagtgcattgtcctttttcccattgattgatatatgtcaacactgttcttacagctcatttacagaaattgatgtctgataagaagtgttctgtcgaaaagaaatcagaaatggaaagtgttttggcccaggtgagtac

SEQ ID NO: 124875 - DNA, 1043 bp, Homo sapiens
ctgttttgaagcaattctgcttcataatcctgattatgaatttatttttgttttctccaaaaatcatgttttacatttggaatctctaaatgtaatctccaggatgacaggcagttttgagtgacaaaagtgaacttgaagggaaaggaaggagggtggagactgtcttaagagtctcacctgctccaaaattacctttttccttgttcatcgtatattttgaggatggtaatatcttgattgtctaaaccaaggcaatactggcaatggtgatgtgtataaaagggtggggtcgggtgggggtagggtgaaagttgtggcaggaggattgttctagatatctagggcagacaacattgctgaagttggggtgaggatgtatcagtaaccaactggagttctggaaacaacctccgtccaggtatttggggggcctatatgacagaaaggccagcaagcaagcttaccctcatcactcacttggcctctattcaaatagcctacttttgtctgatctatccagggatgtgtgggaaggcatattggggctggtgagttctatatttctttagaaatttattatgactcagctgtttatgacttaagttttttgtgatttctatacgttattcctggtatcatctcttagagtaatacattccatataaaatacgaggtgtagctaaacataactttctaaggccccaaagtgttttcccagccccagcgcccacccatttcctgtcttctcttcttactcactgtaattacagacttgggtcataacatagcccagtcactgactctggatcaaagcatccacagcacctgcctcatcttgttagttcccatgatgccatctgggagaagatgcctatgttctgcgcaaactgtatctctaggccctacaggtttacggtttaggaaggagggacttacagaggaaagaatgtgcccaacttagagaaagttgggggaatgacccctctgagctttcatgtaaaaagaggaggtcatcagaaactttagccaggtatgatggc

SEQ ID NO: 124876 - DNA, 2680 bp, Homo sapiens
agtgttctgattcttcttgatggcagagttctctggtgattaatctttgcatagctgtatttccttttgtccttttgttagtttagaggtattagattgttcatatgaagatttttctaaaattttattttattttgattgacttatctgtcttcctagcctgtgtgtattttagttctctacagtttcaggtacagttgctgaactgagatacagttactcagaattctgatgattcctgcctcctatctatgagctgagattattgatgagtaaattttgtatgatttgtatgatttcaagtcacacagtgtggtgctttgatatgcttatacattgtgaaatgattaccacagtcaagctaattaacataattatcacctcacatagttactttttttttttttagtggtgagatctacttaacatctactctttgagcggatttcaggtatacagtgaatcattaactatagacacagtgctgagatttgtgacagaacagatggaaagactttggcagcagcattttggagattctaggcagggcccgtaatttatcctgtcccacattgtagatgttcagttgctgtcagcccaattataagctatgtgaggacaaacaccatgtttgtttctctcacatttatatgggcacagaagatgtttcctagttgttgaaagacaactaaaacataggtgcagcaggaccaaataagagacactattaaaaaataaaatttaaaaattaaacctcttggccgggcgcagtggctcacgcctgtaatcccagcactttgggaggcagaggcgggcggatcatgaggttcaggagattgaggccatcctggctaacacagtgaaaccctgcctctactaaaaatacaaaaaattagccgggcgtggtggcgggcgcctgtagtcccagctactcgggaggctgaggcaggagaatggcgtgaacccgggaggcggagcttgcagtgagccgagatcgcgccactgcactccagcctgggcgagcgagactccgtctcaaaaaaaaaaaaaaaaaaattaaacctcttttgcagtgtatttcatgtatttttaggatccatttaagcaattttacattactcgtaaaacatctgagataatcatggaagcacaccagaaaatgtgatttttcttgaaagaagagagattgattttgactcataaaattaacttgaaacacttctcccgcaaatagctactaaattgcattcagagaaatctctttgggaaaccattactatgtgcacttcatcgttaggtaattagcttgatgttagcttgttcaattcatgccttatatcctttgccttgaataacactttatttaagaagctcttgctccaaagaaaccaactgtatgatgccattatcagtcatttacttttttgtagcagtaaaaaagaagaaatcaaactgctatgaaagctaaagaaccatttcatttcgcttttaatttcccattctttgaaatgggatgaagaaacttcatttagtgtatacttataaagacttgctaatgctttaaggaaaaccattttatctgcatgtcactattcaatatcttatttcttatttttcatgtgatttttgcgtatgttttcctaatttaaaaaactatattaatctgcctttaacaagttattttcagttaaaagtaataatctttttggatgtagctggagggaaggaattaatacttcagagaagttagatcatgtttattttaaatagtgagtaataaaattttcattaatgtgtttaaaaataaccttcacatgtaccccataaatttgtacaaatataatacatcaaaaaaataaaaataacaactacccagacaaatttaattcaaaatttttttggccattcccttaggaaaccaactttctgtttagtgaaaaagaccactatagtatggagcctttatcactagaatgcagttgaaaatagaggccttgttttttgtttgtttgttttttgtagttaaatatgcaggtttatcgcttacgtttttgctttcagagaattcacaatggcagaaattgagcactttgtagatcccagtgagaaagaccaccccaagttccagaatgtggcagaccttcacctttatttgtattcagcaaaagcccaggtcagcggacagtccgctcggaaaatgcgcctgggagatgctgttgaacaggtaggattctggaggtaacttaacttagattgtgcctgttcagggtttgcagcaattagcaaattctatgtgttctgggtgacaagatattttattttggcagtcatttgcttttttacagtacttggttttgtacagaatttgttatacagtattattatagtaagagaaaaatcacctgaacatctcaatttgtgggccttggggctagcatgaaaaaaaatgtttagcagagcacttggaaaatagatcttggtttgcattgtgcctcaccaatctgactcaacagtatgtactactttgggggagacagcattggacccacagaaagcaagccatctgggtttcagactcttctgtattacccatagcagtggaataaggccttgcatataagcactttgtaaatatttgcctggagaagtgagtgcgtgaaaacttgccaacagtagctgc

SEQ ID NO: 124877 - DNA, 1041 bp, Homo sapiens
aaaagaaaagagatcttttcctgagcaaaacagaaaaagcagttgcctcctgcctttttataagtgtcctaaggagctcgttgtagtcttagatagctgagagacagagttagtgtatgatgggacagtgcggatgtgtacactgctgtacagtgtattggcagcattactggcaatatcctggagtggatctaagacacattggcctctccttcctggcaagagtcccagcaaacattggaaatggtggagaggttgaataaagaaagtcatagtgctcttagctcaatgagctatgtagtagctttggggaatatactagttgattctgatctctggcttaagaactaccttcctcaaatgttatgtatttaactcaaaattcacagacgatctccaggtaccctcctgcccctgtgccctgtcacccctccagcctccaccaccaaacatgaacatcagtattgaagcggagggacgaaaggcatttgcatataggagatgctgtctatattggtggcaggaggaaatgtggcatctaaaacaaggctgagagtcttttggcatttctcttattgggtgttagagaggcttcctcgcctacatagaaagagactttagtccaggggtcactggttccagtatacccttggttcagtttttacttttcagaatggctttctttttatggatttttaaaaattaaaaatcaaaattagtcatattttaaaaagtaatgactactttttttaaaacaaaaaggaaaaaataattctgaagactattatgtagaaaattaaacttccagttatatgcctctccccaggtgttttatgtctcttctctgtattgagcaaacattttctataaaggaccagatggtaaatatttttagctttatgagtctctgtcacataactttgttgttttttacagcttgtaaaaaacagcttttaaaaaatgtccaaactggctgggtgtggtggctcatgcttgtaatcctagcactttgggaggccgaggtgggaagattgcttgagc

SEQ ID NO: 124878 - DNA, 2802 bp, Homo sapiens
caatataaatccatccagaaaggaagactactttgtgtacagtgtgaattatatatttttttctttctttttttttttttttttaagatagggtctcactgtgttgcccagattggtctcaaactcctggcctcaagtgatccttccacctcagcgtcccaagtacctgggattacaggcatgagccatcacacccagatcagtgtgaattatattttataggcttattagctgcctgatatatgaggctattcccatttcaaatatttatgaaatttgaatgaagattatatcatcgaattatcattgaatatatgaaaggtttataatctgcatgcatttgtgaatgaacccaatataagtaataataagtaagtaatgtttttattgattatatctttttagggttggattgagattgttggatgtgctgatcgttcctgttatgacctctcctgtcatgcacgagccaccaaagtcccacttgtagctgagaaacctctgaaagaacccatatcctttctggtcactccaaaaactcaggattcacatgtgaacatcttgctaatgaataagtccaagtctttaccttgttctatggataaatggagatgttttagacactgtagtaacgcttgtttaaacctattattttacctatccctttgttcctttcctattctctgtacttgtagtctgacgtgtgcccactcaatgtttggcctttaaaagaagcatatttagaaaaatgctctgaatatctttcagaacgttaatagtttttctcagctgtttccaaaacgcacttcacacctgcacctacctacgtgctctttaaataaagggtacctggtgaaagctttttccattaaaagatgagtgccatttgatagtagctgaaataataatttagctcacttggtctgaaaatcagcaaaatagaaattttctttctttagtaggcagtgaagttatgagctgatttcttaggggtaggtcagtgacaggaaatagatcttgttttgagcattttagaaatacttatcagaagttcttatgctatgggttgggtcattgctgattagataatatctcttttttctcactgtaactggaaaagtttctattgatggtgttaattttggatgagagttgtctgaatgattttgtggacaggtgtttcatcttgccttaaaatcagcataaacaggatctggagtactgatagagagctggcatggttttaagttgatgattgattgttctcaggctcattttctgaaatactgaggcagtgctgtagttttggattccttgactacttcatacaaaacagtcaatgttgttcagtttgaacccagtaagggagcaattggtaaggcatataagaaggatgcaaaactggtgatggagtatcttgccatttgtgatgagtgctacattacagaaatggagatgctgctgaatgagaaagggtaagatatcagatgtttactcttccatgggctccagtcagttgtgtcatctgccaggttctgaaaggatgagattaatttcttaagattttttgcaggtaagtactgtatcttggctgcatttaaaagactgtctttgccgagattttggcattatagcctgaaaaaagatttgaaatagaatatactttttttttttcctagtaactgtcttaaacaaagagacttgtccagccaggctgaggaaggaagggttagaaactacatctactatctctcaggtcacttctctctcctttttggaggtttagaatactctctgtaattgtttaagcatgaatataaacaatagagaaggccgggcacagtggctcatggctgtaatcccagcactttgggaggctgaggtgggcagatcacgaggtcaggagatcgagaccatcctggctaacacagtgaaaccccgtctctactaaaaatacaaaaaaattgtccgggcatggtggcgggcgcctgtagtcccagctactcaggaggctgaggcaggagaatggcgtgaacctgggaggcggagcttgcagtgagccaccatcgtgccactgcactccagcctgggcaacagagtgagactccgtctcaaaaaaaaaaaaacaaaaaaaaaaaatagagaaaagcctttaaagaaatacaacaaaatccagcactgaacagtgtaaaacttacaatatccagcaaacaataaaaattattatatatatgaaaaagcaggaaaatgagaagtaaagtcagtcaaaagaaacacccagaaaaaacaaacatgatgcagtaagtacataaggatgttaaagcacttattataaatatgcttcatgtactcaagggtgtaaaggaaaacattaacatgtgaggtgagaaatggaaaaatatatgtgtaatatggatataaacacatgttttttatatatataaacaacatgaaacatttagaggcaatatctcaaatgaaaatgtcactggatgggattaacagtagattaaacattacagaagaaaggtcattgaacttaaagacatagcaactatccaaaatgaagcatagaaaaaaatgagactgggaaaaagatgtccagtgggacaatatcaggcagtctaatgcatgtgtaattgagagtcctagagagggtgtatagaaaaaatattatacagtagctagaaaatttacaaatttgatgaaaacgctaaaactacagattcaagaagcttagccccaagcaggataaacacgaagatgaccacatgaagacccgtgagaatcaaatagctaaaa

SEQ ID NO: 124879 - DNA, 3576 bp, Homo sapiens
taaacttttctgtttcacttggtcactgaggttcataggtttttctcttaaaagacagaatgggctttggtttgggtcactgccacttgtttgaatatttaggtagtctccacagaaagtcttttatgtggaaccaaaaaattaccgtcttttatatacagtagctttcagaatgctttcacatcatttgacttttttagtaacgggcttgtgaagcaagcagagcaggtggtagagacctgctttttaggtggagaaactaaggttcagaaagagttcatgacttggcctaaattcggagctgaaaccaggtgtttctgatgctggttctgcttctcttttgccatactgcttttcatgtcatgttttctggcattttggtaatgacgttatgcttgaacacttgctgaatattaacctcttttggtttgggatattagcatttagatatttacaaattaacatatttggatttttttctttttaaatcatccagttcttcagtttccctgctgtagttgctccattcaaatgttccgtcctcccactgagccaaaaccaggagttcatgccatttgtcaaggaattatgtaagcaaattcaattgggtaaactccatgggaacaccatcaaggagactgaattttaggaaatgtatcatttatttcaataaaaatatagactgaataaagaatataaatgattttataaagagtacatgattttagcctgtactcttatttctaagcgagaggatatgcttgctcagatgttttattctggcatttgagtgaggcaaggtaggacccaagagtcagatttaaaaattatttacttctcatactgaccttggtgccaagttcatcgagggaacctgagtggagtgtagcaaccataatggatctacagccacagaatccacagccctgaaaggaatcctggtggtcatctggcacatccacttatttcagagctgggaaatggggagagtccattgacctgcttagagccataaaaatagaggtggtggagtcaggactcaccttctggccttggctcttggtcccatatttgttccccctatagctgtatcagatggaggtatgagtgaagatttggattcccgcaagggatttattaaactttagggatatttctttctcttgcaactcaacttgttgctttcttgtcttggtcccatttataagtctcctgagcttgtaagacagtagttagataacactgggcttaactccattgttttatttttaatttactttgtttattttggatagcggaagccctgaccaggcatggagtatctcacaaagtagacgattcctctgggtcaatcggaaggcgctatgccaggactgatgagattggcgtggcttttggtgtcaccattgactttgacacagtgaacaagaccccccacactgcaactctgagggaccgtgactcaatgcggcagataagagcagaggtatctggccttctctttggcatttttagccttagaaatgtgtactgcttcttactgatttgtgttggattttgatgtgtttatgctccctttcctttttttttctttttaattttaatgaacggcttgtatcagacagagcccagattctcaagtcccccggtttaattatgaaaatatccattagcacttctctaatattttataaacatttgtgttgctccaggcttattctccagcagtttgcttttatacttgtttgtttattgggcaagagaaatatgatcctaagaatttgttgccatagttttattggtaggctttggagggttagacattttaatgttttatttttacagacgcgtatacatgtgtatgtataagcttttccgtgttcatatattcaaaacagtgaatcatgtttcagtagttttggtcaataggaaggcagtaatggagatggtagaagcacagaaggagaaggatgagtggtaagggaaaggaaagagtagctgctttaattgacatctgcctgcctaatttatcacctttgagcacatacatcaagtgcctgttctgtgcttagcttgatacagaagtaatagggaaaacagaagcaaaagactgcttttttttctgaaggagtttatagtctaatccagaagtcgtgaatttctagcttgactttttagagaccatctggctactctggagctgtgtccccatctgggtgtggttctcaaaagtgtggtccctagaccagcagcatcagtatcccctggaaatgtatgagataagcaaaacctccaccccagacctactgcatcataaactgggggtggagaggcagagggggcaggcagaactttcttagttttagcaagacctccagatgattctgacgtgcactcaagtttgagaaccattgctgtgtggcagccagtgtttggttttggctgaggaacagtagccttggtcagagctctccagtttgccagtcttatgtaattccctcacacgagttacttgactgagtcctgtttgttctaatagttaaatttaatacacatgaagtaacttcaagggacatggagatttagaaaagttaggaaaggctttgtggcagaattgagttgtctgggggaactggtgggcgttttgggctagaagagcatgaacccatgcctggcatgacattgtttggctctgtgtaaggtttcctgagttcaggatgaatcttcttcttaaaaatctgaacaagttggttgatacttggcttctctttccttgtctctagatctctgagctgcccagcatagtccaagacctagccaatggcaacatcacatgggctgatgtggaggccaggtatcctctgtttgaagggcaagagactggtaaaaaagagacaatcgaggaatgaggacaattttgacaacttttgaccacttgcgctaataaaaaaaaaaaaaaactactcttatgtccactttacaaaagaaaacagcattgtgattactcccagggaccgtattttatcttcagtggctgcctgattttacccccacaattaaagttgaaggaatcctgaacaaacttgtgatctatttgcttgtgtttttacattttcagcaaggctgtttctcccacgtttgggtagacatgctcatggcttaatgttaaacacagttaacactttttaaaaaattaacagctttattggggtataatttacataccataaaaatagcctgtcttaagtgtacagttcaatgatgtttagtatatttacagagttgtgcaaccaccaccacaaaccaattttagaacattttcatcactccaaaataagtctcatgctcatttacctcactcccattctaacctcagcccaggcaaccactcctctactttctgtctattgatttaccttttctattctttatcttattctgagaaaatgacgcagtgtgcaggtactgtgacagcagtctccaagcaggtgaaatgacttctggaaaagcctgaggtgaggatggggtggcaggagtggtgctttagggctgctaaccccactgtttgcagattct

SEQ ID NO: 124880 - DNA, 1050 bp, Homo sapiens
gctcatgcctgtaatcccagcactttgggaggccaaggcgggcggatcatttgaggtcaggagttcgagaccagcctggccaacacagtgaaaccccgtctactaaaaatacaaaaatcggccgggtgtggtggcacgttcctgtactcccagctacatgggaggctgaggcaggagaatcacttgaacccgggaggcggaggtttcagttagctgagattgtgccactgcactccagtctgggcacagagcgagactccatctcaaaaaaataaataaataaagtaatgacaaaaaccataattacttttgcaccagcctaatactttggatcagaaagggattggaaccaagcctcacttcccttttcattggcaaatacatttgtcatgaggtagaggctggatattgaatctgcaagccctcttttgttccttcccctgggtagcaatgcgtgatttctcctggatcacctgctctaaagcaggtctctaaagtgatacctgagtgagggagacgggccggcagcagagctctctggttctgtctgtaccatgtttgcttgattttaagaacaagcagttgaagtgctgttttctaaatgaagagactctttacccacgagtttgcgtatgcatacgcacacacctcttctgttcaagcccaatgtgtatttaaagcatgggtctttctggcttaatgctctttgaggccttttaaattatttatatacctgtacgtaccggactgtgggcttaacaagagtgagataaatagcattgtatcttggagaagttactcctgtttattacttctcccaaaaatgatgggggaaggtcagattcttttttttttttttcttgtgcttagtgccaaattttatttttctttggaagactgacattaaacgtgagaaaaacaaaggataacaaaaattatctttattttcaaaataactttactaaactatactgattacaaataatacagtctaatgaaaacaaagccacttaaaaaagtttaaagaagacatgtatgtgtaattttctc

SEQ ID NO: 124881 - DNA, 1064 bp, Homo sapiens
gcaaaatggtggatatagatggtgttccagaaaaggaattcatcaccaagtctaaagaacatggaaataatcttactgttttcatgagctggtactaaagatgtcagacgtctcaagttctttgtgataagaacttgcaaaatcgtttttttcattagaagtcacatgaagtagattcattctagacctttatttactactcccttaaccagtgtaattgcagggtaatggcagcaactgtcttagtcagtggagtctattccttgagagggctggatgccctagagataaatccaaattatctctggttatagttgccctgaaatgaaccttctttcccaaaggaaaactattatctgtatctcttgggctgggctaggatggagaggctttgagagcattgcttgcaccggcatctttgctgatagtctgacaatgtttaaggcaggtgtttgtggcatttggccaacaccaaagtgaaatttagttgaagattcagtaagtaagtggatgactaattttgctgtgcctcaatgttcgcctgttgttgcctgttcaataattcttggttattgagctgcctctaagcagtaatttagttaaggctgtgtggatatctggaggactgtctcctctagaaattgggatgtgatttgggagtatcaccaggggttgcctgagaggcgcagcctgcagcttcgccctcttggctaagagccccttcacttttgctggcaacatgcccccctcttgctggatgggctatcttcctttcgtgttgaaggacacacctttgaaaatttgttgcctcagtaaaagatgttggggcagtggttctcaaccctggctgcacattaaagtaacttgagctttaaaaaaaaactcatgtctgggctcctccttaaaccaatttaatgagttgagggtggagcctgggcatcagtatattaagtctcttaggagaagcaccactaccactgttgcaccttgtgaactttctagctgtgtgaaaggctggacccattgctctctcaaaaggggtttcctctgagaatatgaatgtg

SEQ ID NO: 124882 - DNA, 1033 bp, Homo sapiens
atgaacaaatgaatctttccctgcagggcagctctacattctgtattttggtataaaaattggcttagttagaaatggctactcacacacaactcaccccttggctcaagccccacgtctgtactctgcaaaaggcctgcagccactgaatggttgggcacgaaggcaggtttccaaacttaatagagtggtgccctttttgaaggaaacaagacatcaaaagcctctgtagtacactcggagtcctcatgttgagaaactttagctaatgttgtatatttaccctaagaccatcttccatttgacaccaaaaaaagaggtaactggtaagcatttttaaagattatcactaaaataaaagtaaatttaaaaatctttataacactggtggactctgagaagaggttccatgcagagaaactataagacttcaaggtcttttagggacaagagttcctgggctggtcaaggcaccctgaaaggaacagtatcactgggtaactggtattggcatttcggggttggaccagatgtggccctgccttcgagccctttacgacctgacggtgaggcctaacctcacatacagtgagggtggccatggaggaggcttggccctgggcctagaaaggtgacgtcgccccgtgcagtggtgaggtgggtcctgtgggacacacggcgagcgcagggcctcgtgagcactcctgcagcctgttcacatgtgggtccgtgcctcccaagatgtgtttcagggcctggggtggggcatctaaaacacagccaggcctaagcaccaccaacttagggaattcttgctagctaaattagagtgttttagttttatcttgatgttaggggtttataaacttgggtctgtagttccttcaaggatttctgtggaggtgtcattgctctatttatacccaactgtgtttttctaggggaatggatctatcccatctccaaggggtcagctgcccaaatgaagtccaggtctgattgcaggtcatgggggcctctttccagattgagc

SEQ ID NO: 124883 - DNA, 1066 bp, Homo sapiens
agtgatgggggttatacagagtcactgatggaagcgaggaaggagtacagcaccgctgtccctggtgggcacctccagtgtttgctgtgtgcatacctggccaagaagtgcttgcaggtggggaggggctgggtctgaaaagcggaagcccgggttcccgaagttttgtggttcttatagcccctcaaagacaactccggcaaaagggaggctgagactaggggcaatgcgtctgttgccaggtgatgccagtcttacctagcatgtgcgtgtccatccacttcctatatgtctgtccatgtctgaacaactctctcattcattataatctaaccctcttgttcattgcaaaatgatgttctgtttcacgtgggagagtggtaggagtgccgaatttgtattcaggaaacctggactctggtcctggggttttcagtttcactcgccttgttgcttgccctctagtatgtatatcaccagcatattgggtatgtgtgggatgctggacatcctcatcttgttactgactctagcagggatgcttccaatgcctcagcgttaggtaggatgttctttagggttcaaataaaaccctttccttcccttgagcatgctaagaattatttttaaagaaacatatatggatatttatttttatcaagtgctttttctgcatctatttagattattttgtattttttaaatctcttgatatgaattacattattagattttctactgttaaaatagtcttgcatttctatttggtcataatttctctcaaactcatggctgatacagttgtctattttattttatatttttgtattttatgtttacaggtattagatttttagaatcaaggttgtggtaacctcattaatcatcattatctcaactaacacgtagcaatttctgtatgtagggtgctattcctagtacttgatgtattaactcatttaattctcacaacagtcttttgagggaagactattattagccccattagatgaagaataaagaatagatgaagaatctgaagcccagagaagctggacacttgcct

SEQ ID NO: 124884 - DNA, 1066 bp, Homo sapiens; identical to SEQ ID NO: 124883

SEQ ID NO: 124885 - DNA, 1066 bp, Homo sapiens
catcatgaggggagtgggcggggacctgctgcctttctcatctgagggcctgtccatggggaagggattgaccattctgggggctctggagggtgatgcgtgggttgatgggaaatgaacagtgaactcattatcagccagaagtctggagaagacagccgtgagaaagtagaggggctgccttgagaggtggtgggaaccccttcactggggggttgggatggttcaagcagagttcacgggggaccactcatgggcggcatcacagaggaggttcttacgcatggtagagagttgtactagaccaggagttggcaggtgttttctgtaaagggctcaatagtgtatttttggctttgctggcagtgtgatctctgctgcacctattcaactttgccatcatggtatgaacacagccatgggtggtatggaaacaaatgggctttgctgtgtgccagtagaacattatttacaaacaggtggtgggggcagatttggcctgtgggtcacagtttagtaaccctgcactagagcactggctctcaaacccggcacactgtggaatcacctgggggaatcttaaaactactgatactggagtctcaccctcagcaactggggtttaattggctggtgtgttttctgaacatcaagattgtttttaggaacttcgtatcctagatggttctaatgtgaggtcgagtttgaaaacccctagtcttgcctgtggaagatcagaggacctccaagatcccttgcaaatctaaaattttgtttctcaaggcccctgtaaggagcttacaaagattttggcccatgtcagcacaggctagcttggtttaaagatgttccagaggtaagaccctcattattgagtttctctttcatcaaatataagaagaatgagcctgaaaaataaaaagagaagagatgaaccatgctagaaaatgggcttccctgctagaattcaagaacaacttctgcaggaatatgcacactgaacatcgtattgttgcttgcttttaaaacaaccagtaaaactctctcttctttttataggaaataa

SEQ ID NO: 124886 - DNA, 1034 bp, Homo sapiens
aggacaaagatacacctaatgtggtgctgaagcaggccacaagtggggcagaagagagcgcagagctcatgtaaccacaggctgttgaaggggctcactgccagccgagatggtcaggaaaggcttcttggaggaggagaactttaggatgggccttgaaggctgggtagacaattaacaccctcaacctgtagacacagaaacatttccctagatgatagaaaacctatggtgatgtccttggcttcacagctgactggttatgaggagtcactttcctcccatgacacactgacaactggccccttcccctaggagtggacaaagggtcttgtcactccctctctgtggcccaaggttagtgtgttgtagaagcagttgccacatcagaggcccttctgttgcagaaggcagggcccctttactctatcaggtgggttctggggtgggtttgggtgaaaccaaaaactctgccccaggccagttctcactggcagcaatggtctcattctttgcagggtggtccttgcggagtcctggcagctgtccaaggctgtgtcctacagaaactcctgtttgaaggagatagcaaagccgactgtgctcagtaagtcagtgctctttctggcaatatcttattttcccaagtcttccccagagtgtccagaaaaaacaagcaaggaagcatgtgtgttccctgatatttcctgtcttctgcaggtcaagaaaggagaggttaatggcagctagctgacaaggcctgcgcagaccagtgttaaggggacttgtgcgcgtttgtttctgaaagcggggagggttctcagtggtgctccacctgggaaggggctgcaggaacgacatcaaaaccaatttccctcctcagacggcaagctgcccgaatcccttccacccaccaggtcgacctgccgacctttcgactgcgtccgggcctcccttccctccccacgctatctcccctctgccaacattcataaccacacattccaggccgccccacagatcatcacttccac

SEQ ID NO: 124887 - DNA, 1076 bp, Homo sapiens
agaaccagatgtgggtggaagctcagctctggccctaatgggctgtgtggcttgagtaacccacctgtgagccccagtttctccattcctaagaggaggttggatccttggttatcctgcataaggaagggaccttccagccttgttggtacaccaaaatgtgggaggcatgggttgcaggtgactgctggaggaatgttgctccacacgtcactttctccaagttccagggttggcatgcttgttggcttgccaggtgtgtagcttgagtcacaggaccacccaatgcctcatgccacgtagcaagacaacagcagaagcagagctagaactcatacttgggcttcctactcccacctctctgcttctgttcttgctgcctactgaagtaccttcctcggctttccctgccctgttaaaaccccaccgtcactaatgaagttcaaacaaggcctggagtttagttattggtactgcaccatggtcagtttcctggttgagataatgggctctggttatgtaagatgttatcgttgggggaagctgggtgaagggtacacaggaactctctgtactatttttacaacttcttttgaatctaaaattatttcaaaataaaaaggtttctttaaaaaataacatcgtttaagactcacccaaatgtcacttctccttaaagctgccctgactcagtcatgtggcctcgtgttcatctggctccagaatactccatgcacacatttttacagccccagccacatcctgcattgagtcaatgtgcagacatgcacctgactccacagtctagacccaaagcacatgtcaagagccatgtctcaccctctcaccagtgcccccagtagcctgcagcataggacagggtcctgtgaatggttggtactcaaggagtgcttgtggaataaaggtggatgggtgcctggagttaccttgatgagaaaagttggtgcctttcccacaggacttgtgggagaattgaagtcacagcctcctctgctctcaggctctctccctccttgctttccttccttctccaccctttttgtctttccccagtc

SEQ ID NO: 124888 - DNA, 1076 bp, Homo sapiens; identical to SEQ ID NO: 124887

SEQ ID NO: 124889 - DNA, 1052 bp, Homo sapiens
aagatgaacgctctgatatggataaattccatcaaagtggctcaaccccaaaacccaatagactcctctggatctgcttgacacacagaagcccagtaaatagtctgaagcacttggatagcatagaagcacttaattcttccacatccaatggagtaagtgatgatgctggcattttcacttcaaaacgattgatgaaggggaggtggggttgtggatgaacatgaaagtgttatcatatacctcttgtcacaggttagactgggaatggatctcaccaaggtagttctttcagtatttattcttgaaatatcttttaaaaatgtatgcagatatttttgcacatccagatctgtttctaagcatttatgaccagaaggatcccaggaaccaaatggttcaggtgataaaagggtacctctcagcctttcatgcaggcagaaaaggattgattgccaaaaggccatacaacctgattttgggtgagatctttcagcatcactgaacatcaccaaatgacacggaggaggacgcagagaaagttttggacacagttgccccaaacagtgtaacattcctggctgagcgtgttttccagcatccacctgtttcaaccttttatgccgagtgttttaacaagaaggtacaattcagcgttcctatttggacaaatcaaaatttcttgggttgttgactagggagcacaacgtagggcaggactgcgtcttgtgtctagactaggatgaacgtgacatccttacattccccgatggtatgcacgatctatcctcacagtgccctgggcagagctaggaggagaatgcaatattaattgttcccaaatgggctgcatgcaaataacttccacaccaaacctttctataggagcaagaagcacaaaattgccattaagatttttttctccaaatgacaagaaatctttctgctcattcaaagggaaatggaatggtgtaaagtattcaaaatatgcaaggggaaaatttagtctttacagataccaagagggaagtgagttggaagaacggagtgaa

SEQ ID NO: 124890 - DNA, 1052 bp, Homo sapiens; identical to SEQ ID NO: 124889

SEQ ID NO: 124891 - DNA, 1106 bp, Homo sapiens
ctgagctgtgactgctgagtactggaaggaggttgccagggtctctgctacctttgtctgcatccctcccttgctccctgctgggtggtccctcacccaggcctccaatgtggttggccctggggactcattacttctggtagctggctttctataaaaatgggtcaaacccatgtcaagggcccaggctcatttgttctacagctgcaaagagcgtgatgtgcactgtctgtgctgatcatggctggtatggagaatgtggtagggtgattcgccccagagcccttgtgaggccccaggagaatggaggtggacctggagggtaagctggacctggccaagtagatgtgggaaaagagccttccaaggaggagggacctcttggccatggggggacaataggacagggataaacagagggactggggactaggtgaggtccttggtacctgtaggggagcatgtggggagagggctgtctgaaaatctggatgggcagagcctgtggagccctcacattccagaacaaagatggcaaagttgaaataggaaaagtgcaataatcactcatgaaggggatatagtagtctgagccttgtttgttccattcattgatatcccaccagtttcaaaaagaagatgagaacatgcagaagtgcggtggcctgctgatgaagaagggggtgaggagagaggttgtgtgaaaagcacagtgaaggactcctctgcagtggtttacaagaacaggatggatacaggagcccaggggcagagcactagcctctcagggtttctgtcacatggctgcccatatgaaggctgccggccctgtaccccaccctgtctgtgcccagtgagtgctgcagttgggactgtgagggggctgtgtagaggtgggtgtgtacgcacaggaaccaggggatgcacccctgctgtgtctgctctggcccagggagaagcctaggagagccaccagcaccggacagtagcttgtccccagcttccatgtgcgcctggggctcaggacacaagcagctcaggagctgtgtctctctgcagtactggctacaggagaccccttttattttagacgccaggcatgtcag

SEQ ID NO: 124892 - DNA, 1054 bp, Homo sapiens
atgcacacacacccctgtacacctctagtgctgtttccttacccctgggcccggggctccttcctccctgcctctttccctcccccaggtacctgtcccaccctgggggacaagcccaaagctccttctgcccactttgaggcccctcccctgctcacacccactccaggcagaaagcctcggcagctgggtgtcagggcgggaaggtgctgcctgaggctccaaaccgttggttccaggtgtggctttgagattaaacctggcgcctttcctgtggcccttgataagggtgatcctgagtgtttctctggcattttctgtttaaggcctgtctgaggttcagcaaagtcccacctccccacggagccctccatgataagcacagcactcgcgggtccacctccctgtggcctgctctgtggggagcccagggttggcaccattcctgggccctgcccctcccctcccctccccagcacaaggactgaccctgaggagtgctattaataattatatcaggacagttttgtaatcaggaactgccgtgcacgggaactgtagtctgcgggaggattgttctgttactgattgatctcccaccaccgtgcccttcaaactccgggttcagatccttggattgtatttgggggttggagctcagatgaggggaatcctcttggtgggctggagcagtcgaaagcttcttgaagggggaggattgaaactggaccctgaaggaaagtgggtgggaggaggggcagagagcattccagataagcagagggtctgggttgtcaggggcaaggggcctggggagtctgggggtggtgggaaggttaaggatgtcagggctggatcctgaagggctttgaatgtcaggttaaggagcttgagctgtgagcactagggagccatggagggtttcagagcaggacagtgatgggtccaagctgtttgggaagactgatgtggcaacaatgtggaggacagatcagaaggaagacgctaacttcttagctggggccatggagaggaggatccggtgtgagagagc

SEQ ID NO: 124893 - DNA, 1054 bp, Homo sapiens; identical to SEQ ID NO: 124892

SEQ ID NO: 124894 - DNA, 1032 bp, Homo sapiens
gattctatctacataagtcctttcaattccaccagggccagagcagctccaccactgtgcacttagccatgatggcaacagaaaccaagagacacaattacgcaggtatttagaagcagagggacaaccagaaggcccttaactatcaccagtgcatcacatctgcacactctcttctccattccctagcaggaacttctagctcatttaacagataaagaaactgaggcccacggtttcagctagacaatgatttggccaggcctagtaaccaaggccctgtctctggctactccctggaccacgaggctgattcctctcatttccagcttctcagtttctgcctgggcaatggccaggggccaggagtggggagagttgtgatggaggggagaggggtcacacccaccccctgcctggttctaggctgctgcacaccaaggccctgcatctgtctgctctgcatatatgtctctttggagttggaatttcattatatgttaagaaaataaaggaaaatgacttgtaaggtccttcaggcttcctgtagtttttcttcttttgatgctgtgtccccacaaatgtttctggattactccacaaggaaatcaggccactgctagagacccagtctgaggaggagccactgcctccccttctgccttcaagacccctgatctcaggcaatggatacagccacaccacagaaccccatctgagggacacagggtcctgcccctagtaggagacttccagagcccagtgggatgactttggagacctgggggcagggaaaaggggcaggcttctgatcagtttaaatggaccgatgggagccatttctgattccggagtatggaagggatgggggaaagcagggctgaagtctaacagccccctcatcccctctaccctccacagagcagggcccagggaacactagggattgctccaccttcctccctccctccactcacatttgcaacccatctgacctgggctgggcgtctcatgggagacagactcactcat

SEQ ID NO: 124895 - DNA, 1036 bp, Homo sapiens
ggatccctcatctatccctactcgtcccctcccttgaatcatagggtggggctttataaaatagagctgagctaattaagcagaagcaaagggcagccattaggtgggaaagaggaaaagagtaaaggcccagttggaccaccaactccatgaccctttcctgctctgggcctcaggagcttctcttttaaaatgagtggagtggggtggatcatgttaatagccagaccctctatagacttcctgtgtgccaggctctgtgccagcacttcattctatcaccacagcagctggagggtgggggtgggtctattatgacccctattttatagataagtgaactgaggcacaaggaggtactttgcttaaggacatagtccattaagaggcagaggcagcctgtaccctcaactgctgggatgcaccacctctaaagagtgacatgctgtgggtcccagcacccccccgggcgcagcaccagccatgggatctttgaagggcccttaacaccttaattttcatgtctgaaaaatggaggaaaaatgatacctaccacataggattattgcattaagtgataaaagcctgtgagaagtgctaaggacagcgtatgggatttactaagcacttaactaagacactgtagttattaggagctgtcatcttggagtgttgggggtttccagggctcccaccttctgctacatcccagttcttctggggagtagagagacatctctaggaagcaggtcagcgccacttggaacaatcctggaagcccctctggaagagcaggggagaagttagggagcagatctgggcttcagagggcagatggagagtacaggaaggtggagagaagcgttccgctggggaagggtggaaagggagcagtgagtaaggtgggtgggcaccgtaacagccagcacttcaaggcgggcactgggttctctgtctctgtctctctcagacacgcacgcatgtgcgcgcgcacacacacacacacacacacacgtacaagaacgcatttaaccct

SEQ ID NO: 124896 - DNA, 1032 bp, Homo sapiens
acccacccatcaatctacttgttcatccagacgctgaagccagaaacctgggagacatccttggtacctctctcccctgcactgtgttggcctcgactctgcagcagtaacaaatcaatcttaaaatctcagaaacttagcacagtaacatttcttgcgtgcatgtatcataggccagtgtgatcagcagaggtaggaggtggagctcaacttcacacagtcattcagggatccaggtttctaccatcttggaacactgctacccttaacatgtggccttcaagggtggtccagagaaggaagaaaggcaggctgtggaagcttatgagggacattttagaggtggattctgcacttccaccctctcaccattggcgtgccctcagtcatgtgatgtgggtgaacactaaccgtcttttgcagacttgccagccaggtccagccagtgtgttgccaagccctgtcagctctgctcccgactctgtctgacacaggactcctctccaaccctgctgccattgctccaaatcaagctttttcatctcacccctagactatagccatgtcctaacaggcttccccatgtctgcatgtctgctattggactatatgatcttccccacacaaccaaatccaagtgtgactccttgtcttaaagcctctctgtggtaggtcgaataatgcccccaccccggcctgagaggcccacgtcatcctaatccctgaaacctgtaatatgttactttacataacaaaaagaactttgcagagggaattaaggatcttgaactgagaattttatcctgggttatttgggtggacacagaataatcacatgggtccttataagtgaaagatggaagcaggagaatcagagaagagagacttgaggatgcaaagctgctggtttcaaagagggaggaaggggccatgggcccaggaatgtgggtggcctcttaactctggaaaaggcaaggaaatggattctcccctagaacctccagatgaaatgcaaccctgctgacaccttaa

SEQ ID NO: 124897 - DNA, 1045 bp, Homo sapiens
aaaaaaaaaagtcccagaacatcaaagttgagcccccgaatggttgctggaggttgtttggcttagacccctatcttcacatgggataccaagacttcaggagtttaatgatgggcctcagatccccatctaggatgaaccaattttccctcttgcctgggactgaggggttgctgaaatgcaggactttcaatgctgaaatcaggaatgacttgggcggacaaggaagaactggtcaccctatccccacccagtgagttgtagagtaagaatttaaaatctgcccccgagtgctggccccacacagaggatctctcagccacttccctctgtaggggccttgtgggtttgtagatgttgatctgagaagctgacacccataagtgctgttattgttcaccagggcctctaccttttagcatcgttttcaatgctgtagcacaaatgttcagtatatgaagtgtctaggcaccttggcaaatacatagaggtctgagggagcatgggagattttcttcaaagactagctgcttgttggacatctgtgtgttgagcagggtcaaccaaatttattatatctgaaaatttttaatcagaaatgtttgcttcagggaaaaggaataaagcattctactaggtacttgagtgaaatttttatcatttaatgctcacaataaccaatgaaacacatattattatttaaattcttgtagaaaaggaaactgaagcttagcatgatttaacaacatgccagaggtcacatagctagcaagtagcttaatctggttttaaatgcagctctttctcattctaaagtccaaaaatatagaaggtttgggggaaactggggaagatatttagtccactgctttgaaaaatgattgtcctgggcaaaagccccaatccctgtgaggtattcatggttcaataaattaggaagcattgttcattccaccctggttgggagcatctcaaggcatattagcatagtcctgctaccaggactgttcctgcttaatcaccatttcctaaatgtattttgcca

SEQ ID NO: 124898 - DNA, 1073 bp, Homo sapiens
gggttttaaaaacatgagtgctgggcctccacccctgtactgtgggggtgacgcccaggcaacttcctatttagaaaacttcccctgtgatcctaaaatgtagcattgctcagtggcacatcggtcccaacatatcaaccttccagccagaggaactgcgtactgtcacacacacaaaggcaaaggcgatgctcccagcttttctggaccacagaatatgcaccaccctgcaacctcacctaacctgcttctaaacattgttttcagaccccaacttgataacatttcagatgaacatttacttgtccaacaggtttttccacaatcctacttttccttatcctctttttcctcttcacaggcacaaaacagcgttctcacggctcaccagccccaagcaccagctccacgtgtcgccttacgttgccaggtgggtaaacagcattgcaccattatcttagtgaccacagacaatggaaaggcctggtttctcgggaattgggttgataaactgagaacatggccccatagttatccagtctactcacgttatcagagagctttgtctctgtcaccctcatttgtgaggcccctctaggaatggacataaatatttctataattggttcacaatcgtccccctcacctatggaaagaatagaattttggtcctctttgatgttcatctgtacatgctatggaaggatctgccttgtagaggcagatcgtgcaagggaagtagtgtgagtctgtggtgagatcgagactcaggtttaaatcccagcttttctgtgttcaaattgtgtgccctcacatgtgcttcttcagcttcttggaatgtctgttttctcatctgtttgggagaagataagaattagaaataatgcttgtaaatttagcccagtattgacatagtgctcataataatctctactatcgagaaatatggaaggcatgtatgacctctgttcgacccaatctcacatgtactggcaaatcataagtattcatgaggatcaagtataattattgtttaatataaggggcacttattgatcattctgtctccatgc

SEQ ID NO: 124899 - DNA, 1071 bp, Homo sapiens
gaaaagcgcagtattagggtgggagtgaccccattttccaggtgccatctgtcatccctttctttgactaggaaagggaattccttgaccacttgcacttcccgggtgaggtgatgctttgccgtgctttggctcacgcacggtgcgctgcacccactgtcttgccccactttctggcactccccagtgagatgaacccgctacctcagttggaaatgcagaaatcacccgtcttctttatcgctcacactgggagctgtagatagctcccagctgttcctatttggccaccttgcctccaccccacttttttcttaacacctaacacagataaagtcatgcttcatgatttagtatttactaactccataagtgctaacagattttcatacattgactcccagcctcccaaccattttgtaaaactctttcaggtcaaggtcagtggttataaaattctttcataaccctctctagcctaattcaatgccagactgagttaataagtaggtgctgattgatgtttactgcactctgtgtttatttctgtctcttgcaaggaaaccaattcaaattcacttctagttgttcctccctctaccctcaacttttaatccttataagaaaatcttttttggttttcttctaaaatgtaacagattactctcaaaaattacaggaaattcagaataaatatacaagcaataatatgattgggagaaaaagaataccagtcataattgcatcacaaatatagttctaagagtaactcagcaagatatggacagaagttatatgaagaacattgtagtcctttactgtgggacataaagactgaataaactgggaaatagtccatgcttctgagtgggaagacttcattttttaagatgaaaatcatttcatccctaaataaatgtttaagtatataaacaaacaagcagatatttgctgagcaaaataatctagtgtttcagcataacgtttggtgttaaacatcgtacaatgaatttcccaccttttttttaaataagacttactgtgaggattgaataagataatatatgtaaa

SEQ ID NO: 124900 - DNA, 1043 bp, Homo sapiens
tctttcattactctggtttcttcatcttctccatgctgcatacctatgtctgattactttctccacagctcctctgattgtgccttctatgtttgaaaaatagcaacaaatctccattggcttcctgttggccattaaatgcctatcttcttgtcttggattttaaggctgcctacacttgcttccacctaaactttgctgctttgtctgttaccttgttccattcaccctaagttccagtcaagctgaactccttactgactgtcatatttgcctgatttttttatgatcctttcttctttcatattctttccagtactctaaatgttctcatttttatctgttgaaatcccatcttttcttcaagatccaattcaaagaccatccctttcaatggaaacttcttaggtatttccacctaaaagagttcctgcttctctaattctgtataagagttagtggggtgcatgtcattccttgtggcatcactgatttttttaagtggggaatatgctccccaaaagcattgggcatgacagatctttattaaatgtgcattgattttatgaataaatcagattgggatccttcatatatttctatcatgggtcagaactaacgtcatagttactaggtggaactctgggtaaataagtttggattgtgactcatactttcaaatggctttgcagttcactgcatactcccacacgtagactctcatttgaccctcacactggccggtgtagaggcctgtgaggtcagcaagacagatggcatgcatggcaagaatcagtaagtacataattgcttaaatcattgactctgcctttcttttctttttttagtccctgcaacatggaactcaagctttgggtggaaacactgagagtattttagctttaatcagtgcttcaatctctgtgtttcctctactcaagccattaatcctggaggtgcttagtacagtatcagatgtatttgctcagggtggatcattctgaatatttgatattcaggtatctgtgtggttgtgcatcatt

SEQ ID NO: 124901 - DNA, 1105 bp, Homo sapiens
ttcctgcattttggtggacagaatgcagtatgttttattgttattaattttattttggttttatctagtgtctaagtttcttggtggaatcttttgccttctttgtatacattccttaattttctttgaaggcttcagaatttgccttctgtctcagccactttaaggttctgtatccttaggcaagttacttaacctctctgagactcacttctgtcaagtcgaaagtaggtagaacctctcagggtttgcaggagttgtaagtgagttaacttgtgtaagaggaatggaacagaggaggtgctcaacaaatgtgagctccccagccttctcattgctttccctctgtgtgtaggaaaccacagctgtggtggatgtcctcactgctcattataaatcattgcttagtagaaggaaaaagaataaaaagaaagcatttttgatcaatttttgggtaaatgcattcatgaattcaataacaacatattgagcagttgccatgacaaggaagaaacactagcagatgtcaggtaagccatcattctttccataagaataacagatcatgaccatgagcagtcataagtgcaatgtggtgggtaagctctggccactatgggacacacagaaggagtgttacccagtttggggggccctagaaggtctttggaagtgatgtttcagttgagaactgaaggatgagtagggctcagtcaggcctcaccaatcttgcccattcaaaataatctgagagttggatcttgagtaatttttatgagttgcattttctcttgtgctttaagagctgacctccaaactccattgtaagatgataccatttgggttgattttagggctgtgtctaaatgggagaagattgaagggggaaactttacaatatctgaagctaagaatatatctatgaacgaggggcgtgtcaggaaggtgagttggactgaaaatcagacttctggtctgtctttctttgggtctaccagatgcacaacccatcttttgatgtgtatgggtgacagttgcaaatagttcatttatttagccaaccatgtgccagttaacgtgcatgcccttgggatagatatagaga

SEQ ID NO: 124902 - DNA, 1079 bp, Homo sapiens
tgctagaatgcatggggccagccaagcatcctcatcactctcacctctaagttctggaaaatgaatgccaattatgaagtgggtgagcatttatgatttagagaccattttattcctttgttaaggtcaggtgaatggaactttacttgagcagtgaagagaaactagtcctcacttctaagtttatcatgcttttgggaagcaggtaatcatctaatagataggaaaataattctgagagtgtgatggaaagaagtattacctgtcattgaggaaaaatactgtatagggcatgccccaccctgaatctcaggaaccctgagagccaggtttgaaatagcccctggtggtggcttcacctagaaggaagtttgacggacccttctgtgatgtcgcttgcaatcatcttgggcatggattcccccagtctttggttcctctcttcatctgtcctccctccctgactcccaacttcatacctggtcccgttcttccagagcattctaccttattgacattgttcatgaactaggggaaccctgacagtgagttgcagctttgtggagctgaaactttgtcaccatccacagccgcccagccagcacccaggagggaccctcttgagtagcgtgtgatattgatctgaagaaacttacctcctcactattggtatattttctccttttcttccgcacaagagagagagatgggggtgggggggtgaaagggagggagggagggaatgagggaggagagagagcgcgagcgagagagcccctttagcaagaaaacatcaagagtttttgagtgtggtgtgtggttcccttcgtccccatcagtcgcttcaatatttcaaaatggatccggttctgtggcgggtgcgagagtgaggctgtgggggacctccaggcccaacctccgcgaagcctcgcggcttctgcgtgccctggccccgggaggataaggatttcccttccctcctacttgcgcgcggagccgagctcttgttgaggtgagggttccggaagcccacgcagctccgcaggtcggtggtggccgcggctgccctgcgggggtga

SEQ ID NO: 124903 - DNA, 1121 bp, Homo sapiens
tccttgggtaaatgagtcagcagtataaattacaatgaccaaagcaggagatgcagttgacattttgcagcaaacagatgcaaaagggaatgggattttggaaacacaagtgacaagcttgctttgagagtcagctggaagaggtgatcctggtgtggggttgaatgtttgggaaaatggggattaatgctctgcagtaaattctcaccaaggactccactcttgtgactgcagaagactggccattaactaggtgggaaagagcttgctcttctgaaaggtaaaccctctaggcagtcattctacctacccttctatgtattcttgaaatgactgcactttctatgtgcatactttagtttaatgagacagatagggtgatcgtcttgttctggtttgccagagactttcttgcatttaaacctgaaaatcccatgaaccctcttagtccccagcagacaggatagcctgtcaccttagagacagctgtggtgaaagctgtagtttgaagttagacatctgtactgactagtggatcactttgggccaattgcttgcctttctaaactttccttaggaaaaaaaaagtaataatgctgaattcacaactacaagttgtgtagattcagcaagacagtgctggtaagaatactcaacatagtgccttgcacacagtggatgtgcaatacatttttttccttacaaaactatagtttttgtgccatcttggcttttccattttagtattttaaaaggcaagccctgaaagcaagtaagtgggagacttatcctctgtaaaaacctttggtaatttctgctttaacctcccatagactatcttcctggctgagcagtgggatctggaagggacctccagattcactcttgattgtgttcagagctgatggctcaacatgttcctggcagcctaggctagccagaaatgcctgtgttttttatgtagaggtcgggggacaggagagaggagccctggcctctcaatcttggtgtcagatttgggtcactgggaagtcagcatctgcccagagctcctagctttagaaagctgtttgaggccccagggtttagtgaccagcagggctaggtccaggtaacccagc

SEQ ID NO: 124904 - DNA, 1024 bp, Homo sapiens
cttccgtacttctatgctgctccctagccacagcaggtatagggacatttgtttcctactcagcatgcatctttcctttccatggtgacagcagcctggtttccctttggggaagtttggctcccctacttccagctcataggttgatcccacctcttagcccctcaggatgggtcctgaatcccgtgactggccagaagaaatacaggattcctccagccatgatgattgcctggagatgggcaggtgtttctggctgggtcaatcaaaacctatctgtggtttttcaggaattactgggaaagtggtgctgcctttccacaaaggctgccaagctggtagtattcatgtctggagctgccaggggtcctgttgcaccctggggaaaatgcctacctgtatacaaagctggcacagaagagagacagagagacacaaagtcttggtggcttcatttgagcccctggatccatttgaaggtagataaagcttggttttgtgagctgatatagtgtctctctgtctctctgttgcttaagtcaccatgagttccttttctgtcacctcaaatcaagagtctgaaacactagactctttatcactgcccaccatggcaagccctttatgcttgtgtgtttctgctcattgcctgggatgcccatctccatctctcaattcagcagcattctatttatctgtccaggtctgggtcagatatccccagtgccttcccaccctacctgggcagaatgcgtgctcttgtagcgtggggtcacacacatcattgcactttgtcttacagttagctacatgtgcgttagaatttctggctctttacgtaagggacaccaaatttcagacactttaatttatgtctgtaatacttcgcacaacttctgtgaatagacatgtaatatttgttgaactaaatttggcagaaaaagaggacaaataaaaggaggaaagatagaaaataaaagagaaaaagtacattttgccctttaaaatgtgagtcttgagcttt

SEQ ID NO: 124905 - DNA, 1110 bp, Homo sapiens
gagatttgtttctggccaatttttgggagggaaaacctacagcaaacacaccaggggaacatgtcctttatattgctgcttctcagacattagtgtacccaagtggcttctggagcaattgtttaaaacagtggttctcaacctttatggcaccagggaccggtttcatggaagacattttttctacaaaacgggtgttggggggaatggtttcaggatgaaactgttctacctcagatgatcataaggcacatgcagcctagatccctcacatgcacagttcaaaatagggttcatgctcctatgagaatctaatgccgccattgatctgatagggagtagagctcaggtggtgatgctcggtccccgctgcacacctcctgctgtgctgcttggttcctaacaggccatgggctgctcggttctgtggcccaggggttggggacccctggtttacaacctagggtcctgtcctcacttgcagggattctgacccagtggatctgccacaggaccaaggaacctgcatcatcatcatcatcatcatcatcaagtcacttccctagctgatcacacttggataaacccagattgacaggcacagtttgcctcccttacttgcttgtatgtccaggttgggtggaatccattgttgcaaccctccttgagtctagttcactgcccagcgcccaggtggtgctcaatccacatatgctgaaggatagaggcaatgtgaggtgaatccttttataaagaaccgtttacaatgcaaagagttgcccactaataggtctccatagttaggtttgcatcttaatggttgaagttttcttaaagcagagatatacctcgctcgattcaggattttgacaaagcaacagcatcctgaaaagaagaagtgaataggggtaattatttttgaaggaatcaaagccatgtcctcctgcctttggtaaagatgtacggagttgcaccatttattagtgcttctcaacttcggctgctcactgggatcaggggcttaaaaaacactgatgcttgagtcctacccctagaggccctgtgtaattggtctggggtgtggtctgggcatcaatattttgtaacatt

SEQ ID NO: 124906 - DNA, 1010 bp, Homo sapiens
atttagtaacaaatatcttgaaatctttttgcatgatttttaacataggacggtataacaaatgctatgtagtaccttgctgttctcctaatagtgcttcggtggttatgtgcagatgcatgtattttaaatttttaacagccttctactaaacaacgtacttactaacaggcttaatgcttcatttcctaagtgaaaaggttcaattcattagttactgtggagacttttaaattgaatgagaacaaagtgatcaagaaagacaaccttcatattaaaccaccttgccaagatttgaccattcatggagacaattagctaatcattaactggacttactgtagtcaagacttgaagttcccctggaatattattttattgagtcaaagattagctgacttacagacagggcaaggaagaatggaagtttcttttcctactgttagctcactaagtttaaagagaaaggtaaccttttacttttctgatattttctattactcttctaattcatagggatatctgtgtttgccttacatggcattgcagcagcatcatcttctctccgatgtcaccgttcgggggtttgttgctggagctactaacatcctttttcgacaacagaaacacctcagtgatgccattgtggaagtacgtttatgtgtgagtgtgtgtatttggccctgctcatcccagttttcctttcttaactacaattatgaatacatagtaacaacattagtaatgataataactgcatactgtatgccatgtattctaagtattttatgtgtattaactggtctaattctcataaaaacacagtcaatagcactgtcctatccacattttatacctgcagaggctaagtaacagagagatgaagtgatttgtacaatatcaaacagccagtaaacaggtaaaccaggattccaacctgggcaactgggcctaccactacctcatgatttttaacatgtgtttgttgtttaagtaatttcaatccttct

SEQ ID NO: 124907 - DNA, 1074 bp, Homo sapiens
aaagtaggtttcgggagagtttttcatttgtaaaagacagctgaggaacaagccctcgtttgttaatgagatatttttaaatgtttgccaccactaacaatgtagcagctgagacaccaaaattaaatcctttaaccccaaatcatttggtaatctagaaagaaaacttcagtctccactgccatgtagcttaattaatttgcttttaagcaaattaattaatttgcttttttaaaaatatttgcccaggaggctgtaagcactgaataatagtagctcacttttttttttgaacattaaatatatgcagggaccagtgttctgagcactttacatctagtaattcatttcatccttacagcaatcctgaaggtagggaccttgtcattgccttttacagaagagaaaatgaagctcacagaggttcataagaggcttaggtgggatctgatcccaaacagtttggcttaggcccatactcttacaagtaacaaggtcaaaagaggaaattcagcccaatgaactgcttgaggaagtgttcttagaacaacttctttatgctgtgtatggaactgtgtatctcattcatttcctttcctagcaacaaaaggtactttgtatttcaccttcaaagtaaacaacatgcaattaatatatgaagtaatagccatttgtatcagttctccaaaccatttctaatcttccaagcggaggaaacacatatggatgctttcccatggtattgataaagctgaaaactttatcagttttcagtatattcttttaagactttttttgttttgttttgttttgttttttgagacagagtctcgctcttgttgcccagtctggagtgctgtggcatgatgttggctcactgcaacctccatctcctggtttcaagtgattctcttacctcagcctcccgagtagctgggactacaggtacccgccaccacgcctggctaatttttgtatttctggcagagacagggttttgccatgtcggccaggctggtctcgaactcctgacctccagtgatccgccctcctcgacctcccaaagtgctggga

SEQ ID NO: 124908 - DNA, 1047 bp, Homo sapiens
caagtgtttaagaccagaccctgtctctacaaaaaatcaaaaaattacccaggtgtggtcacacaggcctgtggtcctagctacttgggaagctgaggtgggaggatcacttgagcctaggatgtcaaggctgcagggagccgtgaccactgcactgcactccagcctgggcgacagagtaagacgctgtctcaaaaaacatttttttaaatttttaattaaaaatgtattaattatgttggtctttcactgtctcgtaacaaaagttaagacatttttccttttgtttttctcctctccatccaggccagtcagttggaggagctttttccagtgcaaagacagctatgtcttcatggctttccactttcaccacttccacctcccaaagtctcactgagccaccagatgagaagccttgagcaaggcgtcagaggctgctattgctttctgaggtttaagtgtcccctgtctgtctgctgctcccaggctgttactagccacagatccacagcaggggaccatatgtcgaactgtttacatggatgttgctctaagtgaatgtttcgggatgccgaaatgatgaaatcacagccatagcagggatggctttccaggttggggtttcaattgactacttttatttcagtctgagcctgattaaaacatacagtgaaccttctaatgaattttgagttctgatattgtacattggtttactttagaagagtttttacttatgtaaattttgttctgttttggtgtttgaatatctagatggtcactgtaatttatacttgctaaaattaatttatattaccattttctctaaagttggccttaaaacgtgcttataaagtgaaggggtcatacagttgggccttcattattttgctgaattatgtgatgatttttttgctttctacccacaaaacatttattaattcacttcctcccagaaacatgaaagttagaggtggtagttctgaggattgggtgttttgttttacgtttttagtttgttctttccacatccttaaaaacttg

SEQ ID NO: 124909 - DNA, 1694 bp, Homo sapiens
acatgaactaacctgcgtcagcagttgcagaaagtagcctgttaggacagcagctgctaagcgttgcctggtattttagtggggagaaggctgggactcttcatggcatcaacacttgcatgctctgaatctttgatcagagatgaggtgccatttttggcatttccaccccgtctcgtggtagcctttaaaagtggtagaagatgctgccctaattccccgaggatgattgtcattccatgcagcataatgtgccgtgaggagttttctcattccagttctttggacttcgtaacattggaattgtttttccataatttccggcattccataaatatttgtcaaggacaaagaaaaggaatgtggatgtttattcttttcatatgaatgactttgtacacatgacttcctgctttcattatgaaggaggggaaactagttcccttgtatggtaactccaaagttaaaaaattgtgcatgtctgaggggttgaatatattttgtaaaactctaaatacatttgtatttctgtgctgttctaaagtttacctttttacttatatgaaagataactatatatttaaatcatgtaagtggaacacagtgtagggggtttttccaatcttatttttcatcaggttctcacacccacgtagtatgctgctcaaattttttcgtgtgtgcaaatgtgaacatttgaacatttcagttaggtactgagccagaaaaggtaattgaagttttcagaaagcttctgtgcttagaaaatattttgttgttttcttaaaatattagtattttgtagctggaagaataagatcaaggcttacatgtttcaggccacttggtcactggttcctgaatttagaaaacattggattaatgagttggtgaaggcatttagtggttacaaaaacagtttaaatatttatgattaaaggcttttcacaaacctttttaaagaaaatttagctgagaaaacttaaaaagttttctaaggaagtttaactgtggcacatgttttgatcagaaaggtagttctctttgctctggtagttttaaagtttgtactagttctttatttctgttgtttttttaaattgttaaaattataaatcacgtctaatcatactgaattgtaaaacttgaattgtatctttattttaagcataaatgagaataaaatgatcctgttcaccctgcctacagttggacttgacctgtcctagaagtaccctgtgtgttgtccatgtggtttctggcctccttcacagttaaacggcagcttcatttattaagaaaccacacagaatgaactaaagactcatgactcatttactctcattttgacatcgctttgacagtggtgcccagctttcaaggcagtgacctctgcaggaagaggcccttagcttctgtggaatgctaagtgcagagagctgcaaaaagtatcaagcagagcctggtcacaagataatgtctcattaggatattgtcccaagcaacccattttgcacctggactgataagtgtcaaaatagcccttgatattgccactgaagactcctgccacattttcatgtatatgttcatgtactgggttcccttacaactgttctacaaaacaggctttaggatgtgcttcacagaagaagtgacaaacttccttgccccctgggaatgtgtgcttcctt

SEQ ID NO: 124910 - DNA, 1067 bp, Homo sapiens
gaaacttgaaatctagctctgtagacttgtagagaaagatcaagagagcaaagtgttgttatggtgtgtggactatttggatgtggaaaaaattagccagcctggaggttcccaatcagaatgttgtattatgttagaaaggcactactttccacctttctgaccccttcaggctggcacaagaaaggaggctggttggaagcctttaatcttgagtcttatcccacagcatgactgatgatataggttgatgcaaaagtaattgcgggttttggcattaaaatagcaaaacctgcaattgctttttcaccaacctaatagaaagtgtcacccagggcaggttttgcaagtgtggggttcctgctggtcacacaggacctcgcattcagaaggaccctgaacttggttgaatgtttgctgctgctgttttgaacgtcttaatacttttttaacaagagaccccacatttttgttttgcattgggccttgtaaattgcataggtggttgtggctttacttgaatctgggagtagagaaagcaggttgagaaaagagcttcctacattgtgttccacttatatgaggctgatggtagaattcttttgatctcaaagattattattttggggctttttctttaggataattaatcctttatttgggactctagcagaggccacattcttctctgggaagaagttttgcatgacagatgcatactactttatactaacaattaccgatgtattcttaatttggtttcagctatttggatggctcttttgcaaagtacatcctggtgctgttgtttttgctatattagcagcaatgtcaataccaggttcagcaaatctgcaaacccagtggaatactgtaggggagttcagcaacttgccacaagaatttatagaatggatcaaatatagtactaaaccaggtaaaaaaaaaaaagtcatattatttaactgtttttcccacaattttatataccactgcaaactccaaactcttaaaccctagttacttccactgatcttactctttctaagcaatgttgcttttagaat

SEQ ID NO: 124911 - DNA, 1200 bp, Homo sapiens
aatacagttttcagtgtaattaattcaactgcacttaacactaatgtccgtgttggtatagaaatgtctaaatcctatactctagttgaggaagatcttccataattttatggtattacacagggaaagctatgactgcaggatcagtctaactatactattaggtgcatgtattctcttttcactaacttatacttgtctatctagaatacaggtcttccagtcagctggtcatttaccaggtgtggacttaagttgctaggcttgcagtaagaattgccagccactcattgtgcgggtctgcgtggagctttaatcagaaaaagcctccactttctgtattatgttaacattggctcatgcatataactatctgctgctgatgtagttctccatcttcaagatttagagtgggttaaccaggtcattacatcttaatttaataacaagcattactgtagagtgattgtgtatagatctgttagctgtcagggtgtgttttttttaacctgttgtgtgcgtgtgggggttaggattagtaaggtgaactgttcaggaattctctgcactagctgtgcagaagagcagataactagcgctgctctggcattaatcccaggaaccactagcagtagtggggcgccgccaatctaacatgagcacaggtgcttcatgacaaacattactagcatgttcaactgcaccatgttctggcactgtattttgaatgacattaatttattaaataaattgtatatattcaatatctatttttcttttgttatgggaatggtctgctttttaaattttgattttgctaggtcaaacttagctagtaataggtggtttcttccaaattttgtttgatgaagattgagagatatgcataggctttccttaggctagtgtctttctaccctgctggcatgttagaatcatctgattctgatcatcatctttagaagcttgagatgatgcctgaacctcaccccaaacaaaatggtttctttttagagcacatcattgatcatgtttatagacttgaactgcccctccactgcctactgaatgaagtccagattccttaccacatttaaggctctctctaatttggctttaaattacctttacagccctaccttgcattgtttttccataagccttatcttctgattaggctttcgctatgctttatgcttt

SEQ ID NO: 124912 - DNA, 2348 bp, Homo sapiens
tctggttttatgtgactgtgttcaaattgaggaaaccagaatccagttattcaacaacaataattttctctatactatgatttatttacattttttcatatagttctctcaattatatataaagtctaggaaagtatgacttatgtgtgaatttccttacctattctttaaggctgttttgttttttaagagcctatttattgttgtactgctggttcctaaatagaacagttaagtaggccactgagcaggaaaaaatactgcaaaattttatagtcttctgagtttattactaccagaagaccttatctcagcccagatgtgtgtatctgaaaataaaaattacactatgggcatctgattaatatacttacgtcttacataaaagtaaaatgtgtctgtcctggccctatcagcctgttttttttttccttctcattctaggtagaagatgtgttacaacgttgtcgagaatatttaattaaaaaaataaatgcagagaattgtgtacgattgttgagttttgctgatctcttcagttgtgaggaattaaaacagagtgctaaaagaatggtggagcacaagttcactgctgtgtatcatcaggacgcgttcatgcagctgtcacatgacctactgatagatattctcagtagtgacaatttaaatgtagaaaaggaagaaaccgttcgagaagctgctatgctgtggctagagtataacacagaatcacgatcccagtatttgtcttctgttcttagccaaatcagaattgatgcactttcagaagtaacacagagagcttggtttcaaggtctgccacccaatgataagtcagtggtggttcaaggtctgtataagtccatgcccaagtttttcaaaccaagacttgggatgactaaagaggaaatgatgattttcattgaagcatcttcagaaaatccttgtagtctttactcttctgtctgttacagcccccaagcagaaaaagtttacaagttatgtagcccaccagctgatttgcataaggttgggaccgttgtaactcctgataatgatatctacatagcagggggtcaagttcctctgaaaaacacaaaaacaaatcacagtaaaacaagcaaacttcagactgccttcagaactgtgaattgcttttattggtttgatgcacagcaaaatacctggtttccaaagaccccaatgctttttgtccgcataaagccatctttggtttgctgtgaaggctatatctatgcaattggaggagatagcgtaggtggagaacttaatcggaggaccgtagaaagatacgacactgagaaagatgagtggacgatggtaagccctttaccttgtgcttggcaatggagtgcagcagttgtggttcatgactgcatttatgtgatgacactgaacctcatgtactgttattttccaaggtctgactcatgggtagaaatggccatgagacagactagtaggtcctttgcttcagctgcagcttttggtgataaaattttctatattggagggttgcatattgctaccaattccggcataagactcccctctggcactgtagatgggtcttcagtaactgtggaaatttatgatgtgaataaaaatgagtggaaaatggcagccaacatccctgctaagaggtactctgacccctgtgttagagctgttgtgatctcaaattctctatgtgtgtttatgcgagaaacccacttaaatgagcgagctaaatacgtcacctaccaatatgacctggaacttgaccggtggtctctgcggcagcatatatctgaacgtgtactgtgggacttggggagagattttcgatgcactgtggggaaactctatccatcctgccttgaagagtctccatggaaaccaccaacttatcttttttcaacggatgggacagaagagtttgaactggatggagaaatggttgcactaccacctgtatagtggggaagttcagggagtgcacgcctgagttatgtgctttgtcattttctttgctaaacaaaagaggctatgaaagaactaaatatgagtacataaaattctatctttgataaattttatttttatgccctacttaatatttgcatcagtataatatatatcagtgagtcttacagaaagatatgcttccataatatgaaatagattattcaataattgagaaactttatgtgtaatcatgagagtataagaatctggattatctaacattgttagccctgtgtatgtacagttcaaaaagttcatttataaaagtagtttcctgttcctagtgtgatgtatcacaaattgtgctgaggttattttag

SEQ ID NO: 124913 - DNA, 1675 bp, Homo sapiens
cctctcttacctatatatgggcattctacttagtattctccatgatgccagttgcctttccatcatgatttcctgtatataatagatttttaggaaagtgtcctgcatatttttagagaattgtttgagtaaatgaatttttaacagctttattgagatgtaatttacataccacaaaatctacccattttaagtatataattaaatgaattttagtatatttacagttacacaaccatttccacaatctaaatttagagcacttttatcactttgtgtctatttatagtcacagaccccattcttacagttctaaggaactactaatctaccttctgtctctatattttccttttttagacgttttatataaacggactcatatactatgtggttttttgtgtgtggcttctttcactgagcataatgttttcaggttcatttatgttaaagtatatattaatacttagttcctttttattgctgagtattatttcatggtatgaatataagaagtgaatagaattttgagattttcactcaaaatggcatggtggaatagtctggtatatatttgggactggattttattcttatctgtctccctcaaaaatttcattggctaggcacagtggctcatgcctgtaatccgagcactttcagaggctgaggcaggaaagattgcttgagctcaggagttggagaccagcctgggcaacatagggaggccttgtctctactaaaaataaaagaaaaaatagctgggtgtggtggtgcatgcctgtagtcccagctacttgggagactgaggagaatcgtttgagcacagaaggtcaaggctgtggtgagccatgatggtaccactgcactccagcctgggggacagagcaagaccctgtctcaaaaaaagaaaaagtttctcttataagtaaataccctaaataaacacctcttattgtctaattgttcttttcagctctacatttgttttacacaaaacccttacaactttgttttcttcatctcccctgtagggccatgtttatgagtggactaagtgaaagcaaacaaacccatgtacacctgaggaatgtcgatgctgccaccttacagataataataacttatgcatacacgggtaacttggcaatgaatgacagcactgtagaacagctttatgaaacagcttgcttcctacaggtaagcatatatatatttttttagacggagtctctctctgttgcccaggctggagtgcagtggcacgatctccgctcactgcaacctccgcctcccaggttcaagtgattctcctgcctcagcctcctgagtagctgggattacaggtgctaatttttgtatttttagtacggggtttcaccatgttggtcaggctggtcttgatctcctgacctcgtgatccacctgccttggcctcccaaagtgctgggattacacgcgtgagccactgtgtccagcctacaggtaagcatttttttactcagttacatacatgagttgtagcttattggtttattatgtggtttattttgtgaggaaacattgttaaacattttttatttatgtttttgagatggggtctcgttcggtcacccaggctggagtgcattggtgcagtcatggttcactgaagccttgaactcatgggctcagg

SEQ ID NO: 124914 - DNA, 1254 bp, Homo sapiens
atttgttgctaccagacaaataactaagagatctggctttggtaatttaagttgtctattttgaaagagctttaaaaatgtgtacttattcatgtgttcgttattttctgtgacagttatattttgtatagaaggcaaaagttaacttgaaattacaactggtaattttcttgttttttaattttaaatgtagactaagaatcttcatttttgtcatgtttcacttttatggtaatgtctaaagttgaacttgaaataaatatgatttctatttaaggctgccattttaaacgttatattctaaaaccgtactggcctagatactacaactgaactttttttctttttagttactccacaggatccgctgaacataggatgttgccacaaaatctacctcgtgtatttttctctttcactcatgagctgcacaattgcagatttgagcacaatgtctgcagactgtgttgaaaaactctgaagaacctaattaacacaggatgacctaggagtgattctaagtctgtgtaacaagatattactcattagtgaatgtgtcagtcttggtactgaatgctgcagataacagcaagtaggttctcctttatttctgaagtattcacttgaccttccatcagtaagacggacttttctaatctgttcctggagatattaatggaatacagtcatgtccactcaagacgagaggcagatcaatactgaatatgctgtgtcattgttggaacagttgaaactgttttatgaacagcagttgtttactgacatagtgttaattgttgagggcactgaattcccttgtcataagatggttcttgcaacatgtagctcttatttcaggtaagtacttttaatgttttaaatagaaattctttgaaatgttatttaattttttaaaaagccacatctcaatttttgtttttaagttttgcttaaggtttctattcagatgatgtagtacttggcaaatctcattcttgcatgtgtaagagacacatgaaagaagttttataaaggttgaaatacaagaaatgtgttgcaattaactaaggtaaagttttaatgttgggaaggcagaaaggtttagaatattctttttccattaaaagagaaagaaaaatgggataatttacactttgagattttaaaatgctgcctttagaaaacagtgatctctgtttttaaactgacaagttataggctcaaatagtaatttttagagggtaaaaattggtg

SEQ ID NO: 124915 - DNA, 1063 bp, Homo sapiens
cggcggccgcggcatctttcaaacccgagacgcttccgccgcgggcgggggaggggcgcgggcggccggcgccgccctccgcaccccgcggcggccccagggcggcggagctccgggcaggtccgcggggaaggggcggcccggtacgccgctagctgggcgtttccggccccggcaccgggcgcctcggcgcccgcggggctcccgggcggcgccttggcctcggctcgcgcccgcccttaccgaagtaaagctgtttcccttaaagactcgcgacgtgttcgcgacatggtgggccgaaggaggacacccccttccttctgtattccccccgcgtacatctgaactaaccaagagaggtctagacgaacagagctcctgttatggtctatatcgacttaaaaaagaaagcagaaactgccctttgaaacggaaaattgtgtacgtgtttactttgtgaaatctttaacttccttgaattcgaccacctccttctccctacggattgaacaaccggggaatagaaaaatcgcttagtttggtgtggggcggttattttgagttaacatctttttttcccttgggcttagctatctaagaactctacctgcctcaaaaggtagaggagcgtccatcccacgggctaccacggtgaccccttccagtgaaaataggaaaagaattcaaaatacaaaatgaactttaaaagggtgtgtgtgtgaactatcttctgtgtcaattagccttatgaagacgtaggcaacaggactggtcacgtgttgtttatacttgaatctgtacgtcgggctcacagcatttaggcattgagaaacgaaaccctatcaacgctgtgcactgaccaaaatgatattttcttttatcgaggcaactaattaacagggatcttccccctcttccctctgagttgtacatttttgccgaatttgagtagtatgggtcttagatctcttgtaattgtgaatgacttagtttggttaacctttgataaggacttttttccccgacttttttttctgatctaaagtaaattgaaaagccagtc

SEQ ID NO: 124916 - DNA, 1044 bp, Homo sapiens
gcttttctcttccgactttgggccaaagccttgtccggagatcacagtgtctcgctcggggacacgccctctctaggcccagacttggtccccactggagttcccagcccccctccccgctgcggcacgcacattcccaatgccgggcggggcagggcgcagcaggcccgccctcggcgcgcggccaggctgggctcctcccctggagctgcggccgggagggcgggcggccggggagacggggtggcggctgcagcccgggtagggccaggagacccggtccacgtttgcaaacgcagccgaacgcccaggccgacccgtgccgcccgagcgccgcgctgcgtccgcgccactcttctcgccgccccgatggcgttccggggctggaggcccccgccgccaccgctgctcctgctgctgctctgggtgaccgggcaggcagcgcccgtggcgggcctgggctccgacgcggagctgcagatcgagcggcgcttcgtgcccgacgagtgcccgcgcaccgtgcgcagcggcgacttcgtgcgctaccactacgtggggacgttccccgacggccagaagttcgactccaggtaccgcgcccttggcgcccggcgcggcctcagcggatgcgcgtccctctctccggacaggcctttccctcctgccggacctcccctagctccgccccgtgcagccgcgctcctcccttcttccgctgcccagatcctcccggaccccagaccctccgccgcgggtgagcctcccggccctcacgtgccctaggctgccagccggggactggacccttggaggaccttgagcagcggggttggggcagaccacgtcctccctttcctcccagcgcatggacacacgcaaaatcagtgtaaaataatcagtgtaagtggaggccacgttgcacaactggacccccaagagtggatgttcgtgcctgcctctcttcgccctttcctgttccttccctccgctcccttgggaatctagtcagatggtgcttctcacacagaacaatgatgaagaggc

SEQ ID NO: 124917 - DNA, 1033 bp, Homo sapiens
atttcttgcttgagttgatggtaattaattccagtagaacaagttgtcctactatctagaacatctctagggctggcagccactgtgaggtagtgtagggcagttgaaagagcatggaggatctaccatccattcatcaaacgtttttcagcgtctatccctcaagagagagactagtcctagtctagtatgcttcttccccatccctaccacttacagcctaggctattacaacatggtgtgataagtacagtaagacagtagcacacactctgtctctcatagagttcacacatagttcttaccatgtgccttcacatatgttaactcatttaatcttagaataatttgtttaacttctcaagacagtgaggtaggtacctcattacaaatgaataaactgaggctcagaaagttcaaatgatttgcccaaggaacataagtactaagtggttgagtggagatttgaacccaggtagttcatggccataatctatggtctgtagtccacccatgtatatgacagaagaaaggtaagtagctatgaaagcacagagaaggtttaactatatatttttgtgtctgtgtgtgggggaggttaggatggaatcctggtatggcagggataagacccaaggatgatgaaaattcacctgggaggagctcaggggtgtgtctgcagaccccaaggtccaggcttgtcttttgataaatattattatgtgcctaccacatacctttttgggtatacagagttctagatgctctagcacagtagtgtttaaactacatatacttctgaatcacgtagagagcttgttatacagtttccgattcagtagctctgggatagggcctaggaatttgcttttctgacaagttcccagctgatgctactggtctgaggaccacactttgagaaccactgctctaaaacaggggtactgaaatgggatatcaatttacaaaaataaataaatagtaaataaataaatagaacaggggtccctaacccctgagccatggacctgtt

SEQ ID NO: 124918 - DNA, 1149 bp, Homo sapiens
gagacagcgtctcactttgttgcccaggctggtgtgcagtgatgcagtctcacatcactgcagcctctgcttcctgggttcaagcaattcttgtgcctcagccccctgagtagctgggattacaggtgtgcaacaccacacctggctaatttttgtatgtttagtagagatggggtttcgccaccttggccaggctggaattcatttattcatccaacagatatttactgagtaccaactcttgcaggtgccaaggatgtaacagtgaataaaacagaaatctctgccctcatggagcttacatactagtgagaggacaggcatactcttaagttatatggtaaagtagaagttggtgaggactatggagaaaaagcagtaggagtgaggggtgggagggtggggcgacaggctcagaaaggtgagaggacagtggccacccagctaatataactgaccttcagattctggactggggagctctcatgcctcacacaaagcagccagcatgcagtgagtgccttgtgagtattatgcatagatacctctacccgttccagggaaggaaggatttcttcttgctgaagccatatgaaaggctttgaggaggagctgatgcttgagttgggccttgagcatggatgggatttcattccttgaagcggggagtgtgtttaagagagtggatggggtggaccagagtctgggcctgagtagtgcatgctcaaggaacagtgagaggctccaatatttgggtcaggaggcaggggacctggcactggaagggtgtgggagaacccagtccttgggaggcctgggtggctgagctaggtgttgtggactttggtatttttttttttcatcccatggattcaagttgccctgaatatatgcttctgttcagaatcttgtgaagggaaggtttttgttcagaggagtaaggggattgaggtgctcagtggatggactgatagtgtaagtagaaattctagagatcagcctcattggggcttcattttacacagggattcatccagcttctaacattccaggtactgggatacagcggaggataaagctgacaaaagtccctgccctcaagtcagggttggggtgaacacaagcccgtcctgcagacttaagcagaaa

SEQ ID NO: 124919 - DNA, 1296 bp, Homo sapiens
aggtcatgtgtgcagcatggggagcttattggagcactctttttctagtgggagagaatgaagccccgtttgcaaccccttggagagaggcagaaagtcacctcagtccatgattctggaccctcacaaggaattggagatccttccaataaattcccactcctttctgcttaagtctgcaggacgggcttgtgttcaccccaaccctgacttgagggcagggacttttgtcagctttatcctccgctgtatcccagtacctggaatgttagaagctggatgaatccctgtgtaaaatgaagccccaatgaggctgatctctagaatttctacttacactatcagtccatccactgagcacctcaatccccttactcctctgaacaaaaaccttcccttcacaagattctgaacagaagcatatattcagggcaacttgaatccatgggatgaaaaaaaaaaataccaaagtccacaacacctagctcagccacccaggcctcccaaggactgggttctcccacacccttccagtgccaggtcccctgcctcctgacccaaatattggagcctctcactgttccttgagcatgcactactcaggcccagactctggtccaccccatccactctcttaaacacactccccgcttcaaggaatgaaatcccatccatgctcaaggcccaactcaagcatcagctcctcctcaaagcctttcatatggcttcagcaagaagaaatccttccttccctggaacgggtagaggtatctatgcataatactcacaaggcactcactgcatgctggctgctttgtgtgaggcatgagagctccccagtccagaatctgaaggtcagttatattagctgggtggccactgtcctctcacctttctgagcctgtcgccccaccctcccacccctcactcctactgctttttctccatagtcctcaccaacttctactttaccatataacttaagagtatgcctgtcctctcactagtatgtaagctccatgagggcagagatttctgttttattcactgttacatccttggcacctgcaagagttggtactcagtaaatatctgttggatgaataaatgaattccagcctggccaaggtggcgaaaccccatctctactaaacatacaaaaattagccaggtgtggtgttgcacacctgtaatcccagctactcagggggctgaggcacaagaattgcttgaacccaggaagcagaggctgcagtgatgtgagactgcatcactgcacaccagcctgggcaacaa

SEQ ID NO: 124920 - DNA, 1050 bp, Homo sapiens
tgtatttatttatttagtagaggcgggggggcctcactttgttgccccggctggtctcgaactcctaacttcaacttaactcctcttgccttggccttccaaagccctggcctgaccacagccaactctttcttttttgtgtgtgtgaaagaataggtaactattttgcaaaatcagtttaacacattttttttttttttggagagagttatgctgattcttattgaactagatttgctggcaatattcaaggtagtctaaaatttccaaccctacaagtactgtccagtggagatgttcctgtatcagtaactcctaggcagggtttttgctttgctatggccccattacatctgtgggcacatttttacaggttggtttttactgaggaagggactatttatacttttctttctctttccctaccctttgggccttcagctatgacagagactccactttcaatgtgtttgtgggaaaaggacagctgatcacagggatggaccaggctcttgttgggatgtgcgtaaacgagagacgtttcgtgaagattcccccaaagcttgcctacggaaatgaaggagtttgtaagcttttcttcctcgtttataaacacgtcagcagaaacaatgagaacacttttaggatgttaagtcaaacagactggagaatcttggaagctttagattgggggaaaatgaaaagcagtgaactcatacacagctaaaatttccatcttaggtttatttcttctagatgtgaaagaaagtgtcattaacacagatgtactgaatgataccctcaatgagaagaagactgttttttctcttttctttcaatttcatttggaggaaagagggaggaagaatgggtcattttgggattgtatagcggtgactgcttgaacccttttggcccacattcaccttgggagcatcctaggtgtttatttatctggcctgaaaggcagcaactgtgaactcagtgtgtaatctttaatttctagctggtgtgatcccccccaattcagtgcttcattttgatgtactt

SEQ ID NO: 124921 - DNA, 1040 bp, Homo sapiens
tcccaaagtgctgggattacaggcgtgagccactgcacccggccgtgtaagtctctatttctaaggaggcttatgcacgttttggttcctttttatagttttcccatggaagcaagagggaaaagatgaatgtatgtgaagctatggagaggcatggggctacacgggagatcagggaacccttcgcaatttcttctcattagagcgtgtttgattagtggaatagctggcctgtttttgtctatcactagtataaatgcatgctttttatttctttctaaacttgaggacatctgccctgtgtttgggggaaaagatccataaatgtctatctctaggatgggtatgggatcatcgtttagctgatatttgggtaagaaaaaccgtacggagagatgagttggaaatatcctcatggtgtggaactttttccctttctcattacctttcagtcacaatcgcatgaaaacatatgacacgtatgtgggaattggctggctgattcctggaatggataaagggctgctggggatgtgtgtgggtgagaagcgcatcatcaccattcctccttttctggcctatggagaggatggagatggtaagtccgtctccttcttggagccactctttcctacccttatttttattgcagtggttaattcagttgtcaccacatgaaacccactagacctttcggtctagacctacactggccaatatggtaaccactagctacatgtggctattaattagctaaaatttaaaattcagttccttggtcacactgctacattttaggtacccaatagcctcacgttgctgaggaccaccatagtggacagtgcagatacagacccagatcatttccatcactcagaaagttctatttgacagtgctagtctggattgtctgctgtctgatgattgagttgcagaaatttccacttacttatagtcattggcattcataagtaaccccctctgcccctgttgtacctgccatggccttggccaccaacctctctggctttaacatttgt

SEQ ID NO: 124922 - DNA, 1144 bp, Homo sapiens
tatcttgctttggatatacttaaagcattgagttttactttttgcctctaaaaaattggccgttcgtttcaaagaacaagtctgtgtacagttctccagaaccagaccagagatttggaattttctcctttaaatgtctgtggtttgcatttattcacaaacagaaacccacagaggtatgtatttgggtttgcctgtgggtgcctgcccacctacataaagccttgattttccagcatgagtccagaaaatatggtcatggtagtctcttatgtcattaataccaattttctccttttgctgagtcaggttttagattataccatcagcccatggttggacaccatgggggcccattcaagacctggaagaacatttgtttccttggcttcaaaacctcaagaaatgaataacaccaaccccaagcctgttgagttgtaaagtacttcctaaatcctgtgtcccgtttaatcatcttctcccattccattctagggaaagacattcccggtcaggcatctctggtgtttgatgttgcattattggacctccataaccccaaggacagcatttccattgagaacaaggtagtacctgaaaactgtgagcggataagtcaaagtggggactttctcaggtatcattacaatggcacgcttctggatggcaccctctttgattccaggtaaggaaatgattaaagtcttcaattgccagaacattgtattaaataaagtctgccattggctggaccatgatttaaatactctgtccatgctgatttgtagttggcattttcatctctaatacaagtttctgttttctgatacttagttctttcctcccttccttccttcctttctttctttctttttttttgagacggggtctcgttctgtcatccagtgtggagtgcagtgcagctgcatgatcgtggctttctgcagccttgaactcctgggctcaagcaattctctcatctcagcctccttagtagctaggacgataggcgtgtgccaccatgcttggctaatgttttattttttgtagagatgggcttaagtttcttcataggctcttgtaaccatttctttcttgggggctgttttagatggttctgcaggaagacaggagagactcaccc

SEQ ID NO: 124923 - DNA, 1079 bp, Homo sapiens
gctaggtgtggtagcatgtgcttgtagtctcagctacttgggaggctgaggtgggaggattgcttgagcctgggaggttgaggctgcagtgagctgtctatgatggtgccactgcacaccagcctgggtgacagagtgagaccttgcctcagaaaaagaaagtatagtgttcaatttacattagctccatttctgtgtggtgcttctcataacccacactgcattcataacctgatgaaactggagggccacatggcgtgtccctacaggtggctgttcacatgctgtgtgggggttcttatttacccttccaggggagcatgtttcctggctgtgtcgtcagatactgtggtttacgctgttccggagtctggaggcctctgtgtgcctttgcatctctttcccaactaatttgcacagctgctgtggaggccctcatgaatgacctctttctttcctttcttcttttctagctactctcggaaccgcacgtttgacacgtacattgggcagggctacgtgattcctgggatggatgaaggtctacttggtgtttgcattggagaaaagcgaaggattgtggtcccgcctcacctggggtatggagaggaaggaagaggtgagcatcagcatcacctgccttcctcactagctgtggctgcttccacattgcttgaaacagggcttctttttctttttcttctttctttttgagatagggtctccctctgttgaacaggctggaaagtgtagtgtgtgatcatcgtgtactatggcctggaactcttggcctcaagtgatcctcttgcctcagccttcagagtagctggcactacaggcacgcaccaccacaccctgcacagaacttcttgagagccaaaatattgaagctaaagtccagcttaagactggaattcccaaatagatttagtttctagagttgtcctgttatttctccttgtttctctgcccattttcctttaccttttgaaaatgttaaatcctacaccaaagtcaaaagcacgttatggtgaattccactttgttttgccagttgttaacattttgctatatttgat

SEQ ID NO: 124924 - DNA, 1071 bp, Homo sapiens
ttggctgggtttgagtttcctcatctgtgatcaacttagccactcatctttcaggctcaacgattccatggggcaatagtccatagtcttgaattttagtccaaactgtgctcattacaggctgtgagacccacggcaaatctgtgcctccgtttatccacctgtaaaatgaggatgaggttacatctaacagccctttcagcgtcagtcttggagtcctcctagggttctgtatctgggtgcccgttttcctcacttggagggccttgaggacatacctggtgacactggggaggcccatgtgctgcagcctgcaggggtcattcattaattccccgtgtctgtcctttagggaatatccccggctcggctgtgctggtgtttgacatccatgtgatcgacttccacaacccttcggactccatcagcatcacctcccactacaaaccccctgactgctcagtgctgagtaagaagggagattacctcaaatatcactacaatgcctcacttctggatgggaccctgctggactccacgtaagggcaaccagaatggtgtgggagtgagcctggagggtgacagttgcatgctcccaccatcctcctctcttgggtagatgctggttgagagcttttatctccatgctgccccactgcatagctcgtggctgcatcactgctcaggtgcattgtgttaagagtttcctattaatggtcttgccctgctgcaggtcatttttcaccccatgaaattgtctttctgaaaagcagatctcatcgtataactgctatctttccttccttccttccttccttccttccttccttccttccttccttccttccttgctccctccctccctcccttcctcttctttcctttctttctctttctctctttctctctttttttccttccttccttcctttctttcttttttttttttttttgataaagtctcactctttttttttttttttttttttttttttgagacggagtctcgctctgtcgcccaggccggactgcggactgcagtggcgcaatcttggctcactgcaagctccg

SEQ ID NO: 124925 - DNA, 1547 bp, Homo sapiens
ccatctcaggtcttgctgaatccaaaagccagggttttttgtcttgtttttgtttttgagacagagtctcactctgtctcacaggctggagtgcaggggcacgatcctggctcactgcagcctccacctcctgggctcaagcaaaaaggaccccattccactatgcttctccactctggaacttccacagtcttgcctggattttcatggccttgacagttttgaagatgacagccagacatttttcagcatgtgccccaatttgtttttgtctgatgtttcctcatgattagatagggatttgcatttctttggtagaaatatcctagaagtgatgtgttcttctcatgggaacactctcagtgccaatgggttggtgacctaacatgaggctcttctgtttcattttaggtggaatttaggcaaaacttacaatattgttctgggatctgggcaagttgtgttggggatggacatgggtctcagagagatgtgcgttggcgagaaacggacagtgatcattccgcctcacctgggctatggggaagctggcgtgggtgagtaagcaacgctattcaagggtgttgggggcccgcttactatctgaattttgtgctttttggggtgccatagttagaatcacagcatgcttcttacatgtaatacccaaagagtgtgtggtttctatttttaaaaaattatttagtatttttgtttggagacccctgtgaattcagtgagccacgtcaatgctccattaccctcttgagaaagaaccagtttgagtgaaataaatcttggatcttcagacccatgtgtgggaggtgtccccaggggagctgtccgggaggtttctctggggtcagactgagcacgtccttctggaactgtttcctgggacaggtggaatgctgtaggccgttgcttttcacttctgagcctgtaggctgtccaagacagtttcctttgggagagattagttgcaagttcttgaaatactggctttacctcatcctcacagtggttatgttttactccatcatttcagccacaatgtgtcctccacgtggggattcaataactttttttttttcagcgacagggtctcactctgtcacccaggctggagtgcagtggcaccatcatggctaactgcagccttgaactcctgggctcaagcaatctgcccacctcagtctcccgagtagctgggactacaggcatgcaccacctcgcctggctaattttttattttttagagacagagtctcgctatctttcccatgctggtcttaactcctgggctcaagcgatgctcctgcttaggcctcccaaagcactgggattatcagtgtgagccactgtgcctggccccaggaaccccttcttttcagtgttttcacactgctgatatctggacatggaggagataggaagagctaactggtaacaatgataggcactgtggattgatattttttccccgtaaaagaattgtaaagtacattgttcttcctaccaatcccagaagaaacgctttaaaaatt

SEQ ID NO: 124926 - DNA, 1699 bp, Homo sapiens
atgtttgcctccctggttcaagcaattctcatgcctcagcttcccgagtagctgggactacaggtgcccaccaccacaccagctaatttttgtattttttgtagagatggagtttcaccatgttggccaggctggtcttgaactcctaatctcaagtgatccgcccgagtcggcctcccaaagtgctggaattataggcgtgagccaccatgcctggcctctattctattccttaatttaaaaaataactaaacgctggtcaccaccctctaaactgatttcgtgagtcattaacgggccactgcctacagtgagaaagtgactagcctctgctccgctttcttgctttggtcagaagtcccactctgagtgaggctgctggaggttggggtgggtgctggttgttgggcttgactgctgcctgccggctgacaccgcctcccgctcctgtcacctggacagatggagaagtgcccggcagtgccgtattagtgtttgacattgagctgctggagctggtggctggccttcctgaggggtacatgttcatatggaatggtgaggtgtcacccaacctctttgaagaaattgacaaggatggcaacggagaagtcctcctggaagaggtaactaactggcctctgtaggaaggtgggaccgaagagctcagggagcctggtaaggccgtggggccggttctgaaggtaaggacttctaagggtgaggccagctggctggagggcttgtgagatgaccagcacacttgtgtgccaagcgcttttacacacaccctctcgatggaagctcaccattcctctctgaagaaaccgattccctaagaggtgtagggcatgattccagggcatacagtctgcatttagttctcgttactgggtgctcaatgcctgcctgtatgtgctgagtgtattctctgatttggccctcacagcagctgttttttagaagaaactgcacagagaaggtaaatgacttgtccaaggtcacacatctactcagttgtttgagccaggaccacactcctctttgtgaagctgggcaatagaaccatctgttctgtcccacccctggggaattccagctccctgcctcttccacatctgctattgaagcacatcctccagccttttcctctctctctccacatcatcagcccttctggatctttctcatttgcatacaaatgtgctattattttcccttccctggatgtgtctgtttctttcattgctttccttcctttacagcaaaaacttcaaaagaattgtgtgtcctttctgcctccaattcctctcctcccattctctcctaaacccactcctttctggcatttgtccctctatgcctctgagcctgaccttgccagggtggccaatgtcttccgtatcgcggaatccagtggtcagctcttacgctcctcttaacttcaacacagctgattcccctacaggacgcatctttctctggcttccaggacaccacacttcatggtgttccttctacctccctggtacgtccctctcaggcctcttgtccctgatcgcttcatgttggagtaccccgggctaagtcttgacctttgttcttttctctgtctttaagtcactcgctcagtggtcttatcgggtccatatcctgatggcgtctggatttgtagctccagtccagtcttctctctcca

SEQ ID NO: 124927 - DNA, 2065 bp, Homo sapiens
atccacccgcacaccccgcttggggcctgctttacccaaagcctttcccgtcgcagtcagtggcatcactggcctccagtggctcaggcgagagcactcggtgatctctgactcctctctttctctcgtaggccgtaatggtcctcaggaaatcattccagctctaccttgagagcacacacagaacctgacgcttcttaccacccccaccctgtagcatcttagcccggggcctgtcatctctttcccgggtcacacacagcagtggtgttcatgaagctcctcctgccctcacagtggctgttctcacacagaagctgggtcagacccgcagaggcccctgtctacagggcctcacagtggcctgtgaagaccctgcactttctgctcgctgtaacctctttgccggctgtctccctctgcccactttacccggccacacctgcccccagtgctgtctgtgaccacccaggcatgcgtccaccttgagccctggcaccggctgccctctctgctcaggagacatctaccccagataacttgttcggtcctttccttctcatctttcaagactttgcacaaatcttcccttctccttaaagttttatcctgaccactgaattcaacacttcatccctttctcccttccttactgagctccgctttttgatttttttctggagcatttcactttgtaacttaatgtgtaatttacctatttttatgttcatgtctaattgtctgtttccactagaatgcaagcatcacaggggcagggtgtttgtgtattgatgtatttcaagatctagaacagtgtgctcagcacatagtagaccatatgttttgatcatatgaatgaatgcctgcatccaagaatgttcttacagtcttgggtggtcttgggggtcagcctttggtggggaaccaacttgggagaaggaatagctctgacggctgctgggtattggctacctgaataataagggctcttggagtcatttagcacaagggtttttcacctgcatttagagaaaaaaaacaaaacacagatcataggtcatatagctgccaaaaagatcttgtctgtgttggtagcccagactcaagttccagccctgtcacccccagactgctctgtttctggccccaggcctggcgttcatggcggctgaactcatggtctttcctgtccccttcttttccagttctcagagtacattcacgcccaggtggcatctggcaaagggaaactcgctcctggctttgatgctgagctgattgtgaagaatatgttcaccaaccaggaccggaatggagatgggaaggtcacagccgaggaatttaaactcaaagaccaggaagccaaacacgatgaactctaaacctggcatgaaccagatggtgccagggagtacgtgacaccaagccacctgtgtggcaagacgtgcagtgagggtgcaagggtctctcagaagttgcatcattagccagtagtaggtgggtcacatagtacctggtgtacacatcggggtgggttgatatatggggtgagaagtttgggctgatcgccagtgatagtaaacaaaatctgtgcagagggccttagcatgggatgtgtccagtattgaaaaggctgcactgccaaccatgatttgtgagccttctgggaaattttgttattaaaggaatatatagtgtcagacggaagttataatcatcttggaggaaccataagaaaaggtgtccagggtatctatataaagagggttaaatttttttttaacttgctggttaaaacattttagaaatattctagagatgggcaggagagtcaaagggcttgcttgccccagcagagttcccagcagacagccatggctcttcccagcagcctgtgcaaattctgatgatggccccacccccgcacacgcacacgcacatcatgcttttccagctcatcacaccccgccccactatgggcctaccattaatagtgtataacttggaggttaaaagagccttttggacagaaaactgggccaggaaaaggcatctcagaccacaa

SEQ ID NO: 124928 - DNA, 1323 bp, Homo sapiens
cacataagtcatctgcttagcttttcctttcctttttttttttttttttttttctggaggcagagtctccctttgtcgccaggctggagtgcagtggtgccatctcggctcactgcagcactgtctcggctcactgcagcctccgcctcccgtattcaagcgattctcctgtctcagcctcctgagtagctgggactacaggtgtgcaccaccacgcccggctaatttttgtatttttagtagagacggggtttcactgtgttggccaggatggtctcaatctcgacctcgtgatccgcccaccttggcctcccaaagtgttgggattacaggcgtgactcaccatgcccagccacttagttttttcttattcccacctttctatcccatagaacactcttttttatcttccctgaaccatattgatgagataaatagggctgggggctgggccccgctggtcactcaacagagtatttcccttggccgagatggaagttttgtcccaatagatgagctgctgagcatcaacaaggtgacatttttctgctgcccatttgtgtcctggagacggtggtaccctgaaggcagaggccagctgccgcaagacagcaatgacagtccacctgccgacctgattcctgcatcatggaataaccacatggctaccttctatcctctgttcccaaatggtggtggcacttatcctgaagtcgtcaatgatttccctttgaaactactttattttactaatttaaactattttgtactgatgtagccctgaggtagttcatgaaaatgctgtgcactcattccatggaataaatgttggaaagctgatcttttctgatataaaatgttgaatgatattatctggttttctgatattttattggaaggctgaagacctatgagaatgcaccatgcagtcagaatccccttgatgaaaacagcaggacttcactgcatttactgagggagcgcactctacttatagggagtgtcagtcagggtcctggccctcctctgggactcctgaagagaagctaaggaaaggactgtttagaggggtgtgggcgaggctgggggaactgaggctgttgagtgccagtgacagcagtgttggccaccgcaggaggctgctaccaccagggcctgagagctcaagaggaggcagtgggagcagcacaggaagggctacctggaggcgtaacagagggatgcagccagctgcatctgacagtgcggctgacactgcagcagagcgagggacaaacgccccatcccctctgtgcccccattctctgatgcctgccactggct

SEQ ID NO: 124929 - DNA, 1993 bp, Homo sapiens
atagctcaggtgcttatataagcaaaccaattaggtgttcataggatctggaattaagggtaagaatcacggtcaaattgatcacaatggcaggtctaaatcctgaagatgaatgatgaggcagagccagagatgtggagtgggtagctggactgtacagagagatgctggctcctaatgtcgcagtgctgctcagattcagtcaccacgagacccagctccactgcttcctgtctcggcttctgaaacttgcagacttgtaccttttactgatgttttaaatgggagaaaataattttcagaggtctcagtattttctgaagggcagacaaaattttccctgaaatatctttagacttaaataatttctgaaaatattcaatctaaatagccactatgacaaggactttagaatttatatatcacaaaagacaggcagacggagagaaagaaacaagaagaaaacaaaaaaccatggtaggtgctcaataaatatttgttgactcagtaaagatagttttgaccatagaattaaaaaggttttgcatttcatatttattatcagtgcttcaatatagaatgttttgtaatgattagcaacattgtaaacaccaccaggtttttccaacactaactgctagtcttttccagtaaatattttttccccagacaaaataaccaaacctaacacaatttcaagagatggtgataccatcagcataataacccaaattacaaaaatggcaatacttaaaatcatgcatattatttcaccatttcataaaacttattttaaaatttctacaaactttcccagtgtaaaagactcctcaaaagctgcatgataacattaaactacaaaattcactttggaaaagtagggagttatttttctaattttagcttttttttttttttaaatgggttaaaagatacggtgaggagtgtgttgagagaggtggagaaaaggagcttccagtcaatgcattcaccatatctgaaaatacttcagttatacaaagggaacacttcgagagtaaggatatattataaataagtctctcagcaagatgaacggatgaacagttcaattgcacccacaggagagaggtcttcttggagaatgcttgtttatagaatcttctgtaaaatagagttggctacttctaatgattcatcttgtactaaaacaatatcataagagtccatgtacttttctaaaagctcatccacctaatcaagagatgaacaaaagaaaattaacatgcagggcaaagaaacaaataatttcagtatgaatctcgttgttagatctcttgggcaaaatgcaataaattaaattcactttcaaaaaatctttgaaatgaagaaatattttcaaatccttaagacccactgacagacatttttccacatggtagcttttctccccaaaatgctctctctccagtccagtggctttcaaatggggtgatttttgtccacggaacatttagtaacgtctagggacatttttgagtctcatggcaggagactgctatccagcatctagtgggcagaagacacagaggcctcctacagaatacacatcctcccttttcccagtacctatagcatgcatctcagctcctttttaaacatcaccagtataaagaacaatcaaaatgcatgatcacaatatgttttggctgggcatagtggctcacgcctgttatcccaagcactttgagaggcctggagaatcacttgagcccaggagtttgagaccagcttgggcaacacagggagaattcatctctaaaaaaaatttaaaaatcagccaggtgtagtggtgtgcgcctgtagttccagctacctgaggggctgaggtgggagcattgcttgagccgggaaggtcgaggctgcagtgagatgtgattgcatcactacactctagcctcggtaacagaggcttgtctcaaaaaaaaaagtctctaaaataactactttctca

SEQ ID NO: 124930 - DNA, 1202 bp, Homo sapiens
tcaaaaatgtccctagacgttactaaatgttccgtggacaaaaatcaccccatttgaaagccactggactggagagagagcattttggggagaaaagctaccatgtggaaaaatgtctgtcagtgggtcttaaggatttgaaaatatttcttcatttcaaagattttttgaaagtgaatttaatttattgcattttgcccaagagatctaacaacgagattcatactgaaattatttgtttctttgccctgcatgttaattttcttttgttcatctcttgattaggtggatgagcttttagaaaagtacatggactcttatgatattgttttagtacaagatgaatcattagaagtagccaactctattttacagaagattctataaacaagcattctccaagaagacctctctcctgtgggtgcaattgaactgttcatccgttcatcttgctgagagacttatttataatatatccttactctcgaagtgttccctttgtataactgaagtattttcagatatggtgaatgcattgactggaagctccttttctccacctctctcaacacactcctcaccgtatcttttaacccatttaaaaaaaaaaaaaagctaaaattagaaaaataactccctacttttccaaagtgaattttgtagtttaatgttatcatgcagcttttgaggagtcttttacactgggaaagtttgtagaaattttaaaataagttttatgaaatggtgaaataatatgcatgattttaagtattgccatttttgtaatttgggttattatgctgatggtatcaccatctcttgaaattgtgttaggtttggttattttgtctggggaaaaaatatttactggaaaagactagcagttagtgttggaaaaacctggtggtgtttacaatgttgctaatcattacaaaacattctatattgaagcactgataataaatatgaaatgcaaaacctttttaattctatggtcaaaactatctttactgagtcaacaaatatttattgagcacctaccatggttttttgttttcttcttgtttctttctctccgtctgcctgtcttttgtgatatataaattctaaagtccttgtcatagtggctatttagattgaatattttcagaaattatttaagtctaaagatatttcagggaaaattttgtctgcccttcaga

SEQ ID NO: 124931 - DNA, 1035 bp, Homo sapiens
tgtatatgacacttgccataacaaagattttctctcttgttcactaagtagcatcttcagtatgtagaaaattcaaactacaaacaaattttaaaaatggggttgctctaattcattttactgcaatcagagaaaggattatgcttccataggttgggttgagtttttatgtgtagaattaggaaaggtttatagctagtttcctttcattaccttactaacatatttaagctaagtctgggtttgggaggactgggaaactcagtaagaacatgcatatcacattttgagacatgaggtatacattcattagtgatgaacttcaatctctaaaatttaaatccaaatatgaggaacagattttctcacatggaagaatgttttgtaataaagataataattttagtttgtcttaattgatagtcttttttcctttggtcataaactccaggtatactaaatcacatggtttgcttgttcagcaagctttaccaaaagctaaacttaaagaaattgtggcagaatctgacgttatgctcaagtaagtttcttggatgttttttgctgttattgttcacagacttgaattattgctatttatgtagtcagttgtactttttaaaaataagattgaatattccttatataaccatatccaaaatatgccacctatcacaaaatacatagtggtaagataaggaatttagaatgacgtattagatcttggtgtaggtagtaagagccttatgagatttaaattctaatttgtattttgtttctccagattaaaaatgtcaagacttaaaatttttgaaccaaggccatttaaaaattttttagcaaaatacttaggaaagacatatgaaaggaatgtataaatcaagttaaaagggatttaagtatacttttttttttttttaaagacagggtctctctctgttgcccaggttagagtgtagtgacataatctcttcctcagttcaacctctgcctcctgggctcaagcgatccccttgcctcagcctctcaagtagc

SEQ ID NO: 124932 - DNA, 1028 bp, Homo sapiens
actgataagttttaagtatttttgtgtgtataaatggtaatgtgggagctgggcttggtgtcccacacttttaatcccaggactttggaaggccaagatgggaggattgcttgaggccaggagttcaagatcagcctgagcaacaaagcaagacctcactcacttctacagaaaattttaaaaattagctgggtatgatggcgcatgccttctacctactcaggaggctgagatgggaggatcatttgagcccaggagtttgaggctacggtgagctaggattgtgccactgcactccagccggggtgacaaaacaagacctcatctctaaaaaagtaataacaaaataaataaacggtaatttgatgtggtggcttgctttttaaaaataatgccttaatatttttatgtctttaaataagacaggtttctgcttggtatcaaaggaacctggggaaagaagaatgaaaactaattaattaattttcttttacttttagatgccagaattccagaaaagttcagttcgaatcaagaaccctacaagagtagaagaaattatctgtggtcttatcaaaggaggagctgccaaacttcaggtgaataattatcaagaagccttggctgtgtgtgttggctcatgcctgtaattccagcactttgggagactgaagcaggaggatcacttgagcccaggagttcgagaccagcctgggcaacatagtgagaccccatctctatttaaaaaaaaaaaaaaatggccgggcatagtggctcacacctgtaatcctagcactttgggaggccgaggcgggtggacaaggctgaggtcaggagttcgagaccagcctggccaacatggtgaaactctgtctctactaaaaaatacaaaaattagccgggcctggtggcgcatgcctgtaatcccagctacttgggaggctgaggcaggctaatcacttaaccccgggaggcggagtttgcaatgagttgagatcatgccactgcactccaaaaataaaagctta

SEQ ID NO: 124933 - DNA, 1051 bp, Homo sapiens
ttcttatgtgagtaatacacagtttagcattcacaattttattaccttatcaatgtagtttacatgtttctgcgagtatcacaattaaagcagtcacagtttttaaagctatattcatgaatttaatctttttcactttcctgtaagacagagtcaagtagacctttaaaagtaatcagtttgcattcaggtactttaagacttgctttaaatcaggtaattttttttcatgtagacataccaatcaattttcattaattgacttgtaaactatcatcagaatgaaatactgtgataactaaagttttcagttatcaagtttgtgttaagtgaagttcttacctcttgcttcagtctttagacttgtcctacatattccttgtaaagaactctgctatagtagagaccttaatctcatacaaaaagcacacaaagtaattattttccagtttccacattttccagttcacatttaaagactctgaagacttaaaatgttaaaacttcctttgaagagagttcgtagatcaagggcagtattttctatttttgaacacgtcttctacacttgatgtgttttttccagcaactcttctcttgaagcatctgcaacagatgaccattggcaaagtaagccagaactttatataccaggtataggtttacaagcctattggtttaaaaatactctgccctaattttcagtgtcttccttagaatagtgccagaatgctgacattttacacctgagtctttacactttttaaatgataagaccttagagtaatttttgtataaggactgcagtatcactttatgtgagattatctttgaacaaagataaattctggtcagattgctagtgaggactggcaagaatgaaagatctttagttgaaatttgcatagtattcatgaattgttggtatacttaccaaaaaaaaaaaaaaggtcctaaagttggccatcaaatttcttatcactctttgtttttatttgatgagaccatgagaaagatgatcattcttttaccaacttatactgactttttt

SEQ ID NO: 124934 - DNA, 1010 bp, Homo sapiens
cagttattatgggtagtaataaagattatcaatttttattttgtgcatgtgagctttacccaggattttatagaatgggattatcactggtatgttttatgaattgataaaagctagattactgatttataacaaattatatattgaaaattaagattcaaaaatttatattacagtaaaagcctagaatattatggctaagttatatttaaataattgaattatctatattttataggtttttttttcctttaaatcagagaagttagatcatgctgcagatcatttcttaaagcagtttgcttagtttttattggcagcctgcatccaagcccggcatctctgggtagtgcttgtcacctatgctgttgtcctaggacaaattcaaggacagaagaactcagggtgtcttaagggttgtcagtataaattacttagtttccatgtgctgtatgtggtttacttatcttgaaaaaatgctattagatattagaggtagtgaatgtgggaaggatagaggaataaattctaaacattgaaattgtttatttgcataaatatccacaaaattctgactcagtagctgctttaccatttgggaaaattggttaaaattgcccatttttaaataactagcttttgaaatctgttttttcctctttcctcctatatctcttctacccctcccactctttgctatttagtttcatttttgttttatgcctgtattgagaaagtttcactttgcagcgtgtgtgtttctttttccccaccgctgagttgaaaatctaattaggaagaattatttaaatgccccaccaaattattacagccatacagaaaagatgaagttacagtttgattttgcatgtgctaatcacccgaagacagtaacattaaaaaaaaaaaaaaacaaaaaacccaagcttaagaaagtcaaatagtacaggttactgaaaaagtataggaaaaattgatgtttggtactgttgcggatactgtgtccatat

SEQ ID NO: 124935 - DNA, 1021 bp, Homo sapiens
ccgcagttggaattagatttctactggggcggggctcgagcgaaccacggcctaatcctcattagcagagaaggataattaccgcaatactctgccctgccctgacagcagctcgtgagaccctgagtctgctgaaggccgcctccagcctgggctccgggcacaggccacacccctcccgccgcgtcctggcctctcccatcgatggcgtgtgggtggggcttcgtgggggcggagctgcgcggggcggggcgtcgctgcgcggggcggggcgtcgcgggctcgtccgtgatgctctgggatcccgcgcttccgagactcgcagtctacgcgagctgcctgtttttttcctgcttggacgcgcatgagggccccgtccatggaccgcgcggccgtggcgagggtgggcgcggtagcgagcgccagcgtgtgcgccctggtggcgggggtggtgctggctcagtacatattcaccttgaagaggaagacggggcggaagaccaagatcatcgagatggtgagtgtggaggctcggcgcgcccagagcacgcgaggggccggctgggccgtccgctggcctcggcagcctgtgctgggccgctgttcggtcgcgacggggagctgccggcgtcgcctgtcaggctgggatctcgctagctcgggacgcgcagcttgggggacccggccgccccgcgtgcggccactccgcgggcttggtgaccagggttgggtccccggctgcggcccttggctgcccgtggtctttgttaggtttccgtttgaaggaacaaggcagaaaatagatgaatcggacacaggctactttgtgctgcaaaacccgtttctctagagataagctgcatgtcctgggcaggtggctccttctctccctgccttgctcccgccctccccccggatccgcgtcaaaccgttgccgctaatctagttgcaattcccgcagaggactagttttatgttggggctgccgtgagttagattatgaaaatgtgcaatatctaaa

SEQ ID NO: 124936 - DNA, 1039 bp, Homo sapiens
ttgtaaatgcagttattgagtggtaaaaatgtacatcagagatatagcatgtgtgtgactgtaaaacatgacagggccttcagggtataataaactattctagcataacaggccatttctattattccaggaagcctggtttactttaattctatattttgaggtagtgaaactttttttttttaatctcagaatcttatttggagctccccagtcattgctatataaggacagatttttctgcttcaccagtaacttttctctaagaacagctacattgtttttggtatagttcttctggtacatttgtttcctgttttttcaatcaggtgtaacttgtctttttttctagttttgaggggtaactaagatgatgttggcaccggaagcccaggaaaaagccaggcaagggtggctccaaggggagcaggagagaatcccagcgctcttgccatgctgtttatacctgttcccttttttaggaagatgagactaagccagaagattgcataccagatgtaccaggcaatgaacacgccagggaatttctggctcatgcaccaactaaaggactttggatgccactggggaaagaagtcaaagttatgcagtgtgagtgtgggagagtttccctaatccatgcaacttacatgcctcaatttacaaagagtgtttacttcttttatttaacttgttctcatcacagccctcttacagccaaggcacgttctccatcttctagataaggaagcatccaccccaccccccaccaccgtgccatgtgaagaagaaagagggctgtcatcttaagccaggaagaaagctctcaccacaaacccaccttgctgggaccctgatctcagatttccaacctacagaatgaatgagaaaaccagtttctgttgtttaggccacccagaatacggcattttgttatgtcagcccgagctgactaagacaccatctttctgcaggtccccttagcctctctcccgtgttggatcacccattttcctgtgtcttgagtcttctttattat

SEQ ID NO: 124937 - DNA, 1223 bp, Homo sapiens
ccaaatgaaaattttttcacttttccctttgtctattcttgactcccttttccaatattcattgtcttctaaagggtcccttaaactatgcataagacgagagtccgaatgaagaaaacattaaatcattaagtgtttctctatgttgcagccattctgaagtattaaaataagagagccaggtgtcatggtgccatggtacacaactgtagtcccagctactcaggaggctgaggtgggaggattgcttgaggccaggggtttgagaccagcctaggcaacacgacaagaccctgtctcaaaaaaaaaaaaaatacttccctaaaggtttaaagggtcaagggacagacctgagctaaaaatatttgcatattactcttttgggaggaggtacaaattgctttaggagcctgagagttgctctttgagtgcacaaacacctcgccttcagaatttccttcccatcttgctgcctgtcccatctggagacttgcgtgctcagcattctgggtctcctctgggttcagtccctggatggaaataaggaaggcctggccagtcttagatggcaggtgccgctcagcacagggaggagaagcattctgctcttctcaggtgattgcttgtctgcaaaccagtgataaaagcttattgttgctaaaatctctgattaaaaatcctatagccccttttttgcagtaacttgatgtgttatgtttacattaacatggttgataaggttttgttttttgttttccagttacgaaaaacctcctcctgggcttatcaaggttagtgtgaagtttgtactcttggttattccacaagacatacttgtagactcagtaacttgttatgaaaaataattgcatgatgttaaatctccttttaccaaaagcctgtttcttttcctgcagatgaatgaggggtcataatttttagttttgtcacaagcctctgcctttgcagaaatttcatcagccatgtttcccttccctgaagaaccagtgcaggcccacgtggattccttggccatgcccctcttctctcttgctggggatggcatctctaagctccttttccttgtcggcctcacccggctcagcccctcggtccatcctctgctggtttcttgagctcagcagctcagagagcagtaaactctgaggagatctgacagctatccagtcccgctccctggtacaggcatccctcctgcagct

SEQ ID NO: 124938 - DNA, 1067 bp, Homo sapiens
cttgaacccaggagttcaaggctgcagtgagctgtgatcacgccactgcactccagcttgggtgacagtgactgcaaagataaatgcatacctcttaactgtcacactgtagaacctaaactgtgcgtgaacatacttcagttttctaatctgtatttagtagttaaatactactttcagaaatatatttttgagtatactacattaatgaattgttcagccccgggaaacaacatgaaccacccttctttaaacttgtgaaaccacttgtaaaatggactttgggaatgccattgctgataatattatatttccaaatgtgcaattgcatcacactcattttcatcttggcaagaacagttacttttttttgagaatttggatctcaattcgattggccatatattttttgtataatgcttgtggctcaaaaggattcatttattggatttttggatttatagactttactgtcaagctccttctagtctctatgcataaggtatagcattaatgtttctaatgaatggctacagataaactatcatcttcacaagttgtgcagatttccattgtttttgctccattaggcctatgtcatgccacagctttttgttagaaatattttaagcacctactttgggaaaacactgtaccacacttacaaagctaatcctgttaatacacagttgtttactatttaatcttgagggaacagatctgggattagtagtatttctcatccattgtccatcaagttgctttctcccacatcttatagaaggggagaatgaatttttttttttttttttaagacagagtctcactctgtctcccaggctggagtgcaatggtgcgatctcagctcactgcaacttctgcctcccaggttcaagcaattcttctgcctcagcctcctgagtagctgggattacaggcacccgccaccacgcccagctaatttttgtatttttagtagagacggggtttcaccatgttggccaagctagtctcgaattcctgacctcaagtgatctgcccgcctcagcctcccaaagtgctgggat

SEQ ID NO: 124939 - DNA, 1049 bp, Homo sapiens
ggatgaaagttttaaagagatcaaataagactgggcacggtggccgactgctgtaatctcagttcttttgggaggccgacgtgggcagatcacgaggtcaggagtacgagaccagcctggccaacatggtgaaacactgtctctactaaaaatacaaaattagctgggcttggtggtgggcatctgtaatcccagctacctgggaggctgaggcaggagaatcgcttgaacccagaaggcagaggttgcggtgagctgagatagtgccactacactccaacctgggcaacagagcaaggctccatctcaaaaaaaaaaaaaaaaaaaagagataaaaatgacttgcttttgaaaatgtgtactttttagaacttaattgaactatcataattgtacctaattttgaaggtagttttttttaataatatttaggtatcagactgataactatagtctttctgttttgtttatgttctggtttgtactgattctgtcatattgtttgctggaatttagtaaaaattatatgacatcacttcatttgtatcaaaatttggtcttgtaggggacagttagtaaaatattttgtattttgaaaaatttccttttgtagaaattctttacaagaaaaataaatttattggacctggaaaccattcataccataatgaaattacactagctctatttggtggtagaaaacaattgttaaatccttgctttcattatcatattataatactaaaacctacattctagcttattcttatgcatcttcatgttttttaagtgacctttcaaacagtttaattctgtattattgtatcattgctatttgaaatttgtatttggtttatagtcatgggctttttttttgtgatctagtcattaccctcttaaaaagaaaacttattataactattcttttgtttactgcatataaatattatccccttacattttttaaaaattgtttttcttgcctataattaaaacagtgggatctgcaggaaaatgtgaaaggagaaaattgtattggtaaagcagaa

SEQ ID NO: 124940 - DNA, 1018 bp, Homo sapiens
tataacttatactcctcttttcttctcttgttacaactgttagatctgaattagaatttaatatatgtcccttttgaacaaaccatgagaagtcataaattaatggattagttctttggtactattatacattttattttgaggaagtgactattatagcaataccaatctttctgatttagttatcatagtcagatgttttaattcttgctctaaagttatatcattttaaaaattatacaggtaatctattaataattttaagaaaatttggaaaaatgcagaaacttattaagaagaaaattaaaatcacctttaatactaaagtttagatataaatagaaatacatgtacttttaagtcaagtactgttgaaaaatgtagtgtggttttggtgaacacttagagactttgtagattgtaattaaatcctcccttcctgggttaaaatggtaaactgtgattttaaacagttcttcattttttttaagaaaataaagatgctagagctcatcattatttttacttccttaggtttgtctgaattgtataaataattgtgataacatgtacaaggatatctctgagataaaaagggttgtttatgaatgaattatccatttgtgagattaatactaacttcctcatatgtgtgtaaagtaacttcttacataacacattaaacctttcaactgttcatgtataatatatggcctaggtgtatgtgcttgtatatgtgtgtgtatatatctatatgtatgtgtatctgtttctaattttataaacaataaaatctaggtttgaacagaagccatagtctttgctatataattgaaacaacatgtgttttggtgtaggcaaatttaaggaaagtcgtaactctcaaacaattcatctgtttagaaaatggtttcaggactttatatgttaaacccataattctattacaattgttgagttttgtaacaagaagcatttgttctttgacttaagcctttagcagagtttaacaattaga

SEQ ID NO: 124941 - DNA, 2063 bp, Homo sapiens
gcacaatagtaatgtctaatagaatgaattatctgtagtgaatgcgtagtaaatcattagcttaaatgtgttacatattaatgaaattcatgctttctagatgaaatgcaaaaatgttggtgattatctagttatagcttccaagactgtaaaatgattcctttcttttttatactggtaaagttacaaaataatgttttattatgtaaaatctttatgtattaaaatccaggtgttagaattagtttgtgctatcaatttcctaaaagagatatacttttccaaatgactgttttcttagtgtctcttttctgtattttcaacttacagtttctgaaggaacaataaatactttgattggaaatcataataacatgctgcatatttatcaagatgtgacactgaagtgggccacccaacttccccacattcctgtagcagtaagagtgggctgtttgcagtaagtgatttaatttaacacagtttttaaagaggatgttagtcaagaaattttctagaagttctatgaaataatgacaagtgattttattaaaaaattacaggtgacattgtagtatgaatgtcaataataaaagtaatttaaaatataacttttattggaaaggaaggataattagtgctattaatcattttcatttaatatttctagcaagatatccttagtaaattaaaggtaaaaactggtgaagacatcaagaaaatggtttacttgatagattattcttcagaatacaaaaatatttcttttagcatttgatgagtcccttttagagaacatttattgatagactgtgacgatattacactgttcattataataagttctcaccttgtttcagacgtttcattaagtcaagtgatgcagaattgttaatgatcatgtgtttacacagtttagattttaagtggggctactttgtatttaaattgaaaaacagaattcatactttaacattaagtttacaaaatttatcaaaaatgacagaaatgagccatctaagtgagtaatttttctaggtcatcagtataaaaactgagatgccgatgaactttttagcatcttagattatgtttaggaattgaaaatatcagcaaacgtatagaaatacaactttccataaagcttcatagattctcagatgtattcagttctacttatttataatattttattgagcatttaaaggccatacggggcggggcacagtggctcacgcctgtaatcccagctctttgggaggccgaggtggttggatcatctgaggtcaggagttcaagaccagcctggccaacatggtgaaaccctgtctctactaaaatacaaaaaattagccaggtgtggcggcgtgtgcatgtagtcccagctgcttgggaggctgaggcaggagaattgcttgaacccaggaggtggaggttgcagtgagccgagatcacaccactgcactccagcctgggtgacagagtgagactgtgtctcaaaaaaaaaaaaaaaaaaaaaagccatctgtagaattcttcagtgacacctatagtttctcatcaggatggagttgttttctcctattaagggcttgagtgtaatattattgttgaagctcaacgaagggtattcatatttgcatcagtgttttatctaaagcctgaattttagaaaaatggaaacggtgttttgaaaacattgaatattttaaaaagaagttgctttcttatgttttatgagaaaaaacatataattctaattgctatgcacttaacacaagttatagttattttgtgtctgaaaaataatttaaaagttttgagattggcttttgcaatgtccatcacatggtctttttaaatttaacagaatattcatactcaccagacattttgtatcagatttacttagaaggatttagaacaggaaaaacatcttgccagcagggcaacatcaagtatttcacttctggaagagtaattcttgcaggagtctatatatccatccaaagctgttctctttggtctcttaagtgacagttcatttgcaaaaagacagatcc

SEQ ID NO: 124942 - DNA, 1695 bp, Homo sapiens
ttcagacacatacatgtaataatttaggagtgcactgttaattgcaataagagatcttgtgccttaactagataacattgctcatgctaattgtacccccagccaaccaggaattagcaccgtaagtaaacatacctttccctcccatgcagttcttaagctttcatgtgtagtagccaccttaaaatgatggcatgacactactggaaaattctccttctgttcgtggaacttactatatttgagaatacctaagtcacaactgtctttctcattgccattataaaagcatgagaaagaatgcaacaggcaaggggtgcagaaaattggtgggactcacacagcagacacaatgtcttcctgatcctgtctgacagtttctatacaaatttctactataaatctctccttatgaccttttataacaacagcagccaagatatacaaccatgcaagtttccatcataataaatcctgttaattgagaaaatttttccatccgttccaagtgaatgaagatgtggctaccttgagtatgtgtgcatgatgcgtgaccatctattccaggcaactaggcgagtggttgttcatacctggcctctggtgttgtatttatatatctaggataaaaatttggtattatatttcctaagggttatatttcataagaggcagaaaatagcatggaaaattcttgtatcaatgttttatattttctccttaatattctataattattttcctgttaaaatataagacttgtgatctagccaagtctttaactcttttttggctcaaacacaactattctttgttactgttgttattttcattacctatctccttgatttgtattttgaaagggcctagcccattgttggggttcaataaatatgtgcatgagagctatcatgattgtgcaactaaaccaaatgcaaacccttcttgttacaatgtaaaattctgtgattattgtctaagtagacatcgttgtgccaggaaaagccagactgctctttttcaaatggcttattactacttaaaggaattttcatttttacttaaaactgagttctcataagactttcctggtcactattttcaactctctacttggattgatggctttgcacaggttatttaccttctctgaacctctattttttaaactgtaaaatagggatactttttcatctgcaaagttattttgagtcttaaccacagttggttaaaggcatgggctcaggattctggcagatagcagttaaattgtggttctgccacttgcaatcaaagtggccttgggcaaattacttagcatctctgagccacagtcttttgtaaaatggtttatgatggtacctgtcaaacatttttgtaaagagtaaattaaataatggcacgtaaataatttgttagcatggttccatgaatatagaaaattgctaatattttttatcattaatattattcattttatttaaaaatatatgtacagactagtattatattattataatagtagaatatttaaattgtgtcttgtttgtttaatggactagctagttgaaagaaagttgtttgtagcacttgcatggtgtcttcctgccataataaccatcagggttttactaaaaaggtattatgtttacaatggccagacatcattgaggaagtttagtttgtggcatgatg

SEQ ID NO: 124943 - DNA, 1044 bp, Homo sapiens
ccattttggtgcatttctcttagtttaacagttatccttggttaaactaaaaaagttatgccaacatttctttgggaaattgtacacatttgtttgactgcagttgatggtgccatataatgaatctgcaaatgagaccattaaaaaaggcaaaaatttttgcaaatgaatatatttatatcctaatgtattttatttataacttttaatataaagtaacaagtagaaccctgatgttgcccacgattaccttactgctatctaaattttaccaaaaatcaattatatatctgatttattctctttgtctgaatgtatggcaattccctgacttagcatagtgtaggtacacaaaatcaaataatggaataggacaggaccttttaaacaaggagccaaataaactgtgtaaattgaaacctgaataatagtcattacaattctatgatggtttttggctacagtgacacacagaatcctacctaggagatgcctatggtgatggagagagataggtataaggagagtgtacttttctgagattgaggcagatgttggtgctcctactgctttatcagagtattcattcctaagaaaggaatgaagtaatttgtacccaatctgtgtttgacatttttcattttttgaaaggtacctagtattaattgtagtccagcaatctgctttacagaaaaatcctacaaatgaaagaacctagtatttcttccatagtaaacagtcaaatgattcataagtcacatagaattgtccttgactcttggatagtattttctgtgggttccgtgtattcatctctttttaaaacctgcttggtaatcaaccaagccttcatgtatgctgtatggcgattttagttcctttttctgattcagtatagaccagtcaaagcaaacaagagaaaagtaaggtgtagctcattgtctcagacaccaaaccaaattccctggggaactgagtaggattatatttttagaaagcagaatagtagctgggtgtagcagcttacccctttaatcccaacac

SEQ ID NO: 124944 - DNA, 1050 bp, Homo sapiens
tatttattacttcatttaatacttagaatcatcatgtgagggtggcattattgtttatagaggaagaacctgagactctgagtagagttaagaaacttgctcagtgttacacagatattaagcattgtattccaaagtccaggctttagaatatcaagtggcaattttactttaatcattgtcaggtgggacatagacagcctagattttctttagcaaaattatggtcagggtaaagaaaaaggaaatgtgtgcgaactgtttgtacatgttcatgctacgtatatgtatattcatgatcatctaatagtcattgtatacacacctattagacaggtaacaaaatcttttggagagttccctcaattctgaaattatatctgaaacaagtatcagaggactttttttgggtgtgtgactttgttgatttcacttatacctaagtttagcttctttgccttcaaatgctaatgctgattggcagaaaagctttgccaaataaattctctattttattataacattttcacataaatttgttagtcaaagcaagactgattggttgagtaaattgaaatggaagaaattagacttaccctatgacttggcttatgttttgatgctattacatgtgctgaggtttttctcctcacttcaacactaaccctctgttgtagcagagggaaaatgtttactgatctaaaagttggtgtcagatgacatatgtgtgatgtaatgactagtagtcattaatgttctagagaggcagatggctgacttttctcttctacaaaagaggctgtattaggcataattttaaatagagatcctgtggtttggagtttgctatttgttactttttctgtactttaaacttccttccactctgtttatttgtatggtattgatatataaaaatcattttaagtcacgcagaagcctaagagctttttggtccatgggtttttaaatgagcatgattttggctgataacacagaggaatatataatgaaaccattcagaggcccactttcctcattgtcatggac

SEQ ID NO: 124945 - DNA, 1046 bp, Homo sapiens
ccaccagtgcacagaacagtaacataattgaaataattcatgactgtttgacaaagacctcagagaaaaatgtgtgttaaagaagagatggcttattcttcaatttattttcatgttccctgttctctttagggcgtggaatccagtactgatcatctcaaatgttttcttctctgcacccatgagtcccttgctttatatcttacttttctttaggaagcttagcctcatcagaacactgtctcttttcctgttgttgcttgaaattcatacctccctactcatttgcctaaaatcttagtttcatcttggtcagtcacctctcccatttctcccaggtagtcagcaggctaagtagtgactcagccccctctctgtcactctcccaggagacaaccttatattctgtcttgtcagaaagattgagactctcagctatgtctccctcattgtctcaccaacccttctagaaacttgtctacatctattcccaactttcctgctgtccttcttgtctcaaaggatcaggtacgttatttctctttaagatcaacccttcccttgatccctttgaccttctgctagcttctggaatactgatttatataaaagccagtttgtctggctgttatatttttgatctgtcccttgctcttttgctttcttatagcctaaaaacatgttgaggtttatcccaacatagacctgcctcctacaacttttctttgtgtttctcttctagatgcaacctttttctccttttcacacacgtctcgtaagatccatagtacttttatttttttgctttctcacctcttatttcatgtatccgtctaatatatatatatatataatcttggccacagaccacagaagaacttaaaatgttggtgttttttttttttttttttttgctttatatatctccaatatagtgcagaccctgtatatgcatacgggaataattatatgcagaaatgcagccttcttttagccggaaaggatgcctggaacatgtggataagcttggatatttgtctaatgtt

SEQ ID NO: 124946 - DNA, 1019 bp, Homo sapiens
aagagcatttggtgctttgtttggcctgtttttatttgataatctgtatacttcattaaaaatcatcaggttcagagagattactgataattgcaaacttaattcttagcagtagagactgtctggcatacaaagcccttaaaattaccttgaattttttttagcctagagagtttacatctttatgtcacatcaaagagaaaaaagaaaacaaaaaattggtggtggtgggggcagatggtggaagaaagatatgaacagatcctgagaataatggagtttttaatttgaagaagttttggaaattaggttcagttacctcatttcacaggagaataaaaagaagcctcaaatattcaatgacctgcccaaagttctgcgttattaataactgagatgggacaagaaccagggtttctgagacaatttgttggttttgaaagagattttggggtcagacaaatctggttttcaaccctgactacctttgtaagctctggcagattattgaagtgctctgaacctcatttttatcttctgtaaaatggggatgatattccattgtgtgatttcatgagataatggatttgaagactgagcttcggttctgacccttccaaatggcttatcagtgctggctcccttccctttgctaggtcagtgtcttctctacaacacagtgttgtgtattgtagcaagtcacttatgccaaacaagaccctgactattttggcaatgaggtctgggtttgctgcctgaccagcaccagacacggggacactagtatgcacctggcttatgatgatactgttacgaggtttgggcaggaatccatgctgaagccatgcagcaggtgctttggttctgtggcctcgggactcctgcatttccctactcttgtttgatagcatagccgagaaatccacagagacagagatgatgctgaggagcccactgcttttttttcttggaaaagaaatgttccatggaaacttttcctgtgaaccctctttgagaga

SEQ ID NO: 124947 - DNA, 1038 bp, Homo sapiens
gcaggatgtgcacgtttgttacataggtaaacgtgtgccacggtggtttgctgcacttatcagcccatcacctaggtattaagcccagcatgcattagctgtatttcctaatgctctccctcccccacagccccctccagaggccccagtgtgtgttgttcccctccctgtgtccatgtgttctcataaacaggcacatttttgagagacagtctagtcaggtgatggatgctgtgtcgaaatggacagcagcttgcgtgtctggtctttcctccttaaaaggctcagaaactaaaggcgctgttatgagaggagttggaagaagtggggaattaagagacttcttttgggacctagttaagcagagatgctattgtcttacttttgaaataccaagtgggccttgctgtattttattttagtgttgagcttcagatacctaagccagtgtcttttgctgctcacttatgagatccagcttgaccttacagtggcaatcatgttaaaagagaacaaactaaagtaagcacaaacagaaacttagaattagttctaaacaaatgtggatctaattttttacattaaaataaaaccaaaaggaaggctgactttaggtaacatttatcaaatttagactaaaataaaccaagaagtttataaggtccagtttgtggagtaaaatattggcatgaagagaacggaaacattgcatgtaggaaaatgtacgggagtagaattagagaaggaaaaatcactagtcatgacccgatgttactacagccacaccagcttacttataataggaattcagtgtgttacaacaaagagggttctgtaaatgcaccatgataaaaatggcaaatacttataatagctgctattttttgagcacttactgagtgccagctattgctaagcactttacctacattatctcaattattttaaagggttctgttgtacagagggactctgtaatgttttgccttcaataacttaatgcttttaaagagcatttctttatgtaaacacttcccc

SEQ ID NO: 124948 - DNA, 1093 bp, Homo sapiens
ctcattgttaatagatgccagataaatgttttccagattatcttgaatttacttaagcatggaatactgtataaaacacataagttataaagcattagccatctgagataatttctgtgtaacttgacttgtaactgtgacatagtttatttaacatgaactttggtggtgagatttgtacatgagtgaggaaatttaatatatgatttaaaatatcagggattgaataaaggaaaaagaaaccatctacagcttttaagtgtcaattggaccagtcttttggaatctatctgtccatcacaagcttgtctctgctttagccccatctcagacatttaatccttgtctagaagggtaattagaaaccatctaatttaggttatttctattgaggtaaattgagttaagataactgaaacttgccttggcatttaacctctttggagtcagagcatggctcaccctttgtgaaaggccacgcagctgacctctctgctcccacaccagtcttctttccaaacagcgacctgagagtgatcatcaaatagagccaagtgctatatcaggttaactccagggtatttttaatggatatatagagaagcatcagagtgttatctgtcagacacatttccaattctgaggggaaaattcttttgaatttcacataaattctttacctggaaatacagattgatttatattgaagattactactacacaagaagtcatagcttcttagataactgtgtatatgtccagcatatctttaagaacagtttttgggcagtgcctcatgcctgtaatcccagcactttgggatgccgaggtgggcggatcacctgaggtcaggagtttgagaccagcctggccaacatggtgaaactccgtctctactaaaaataaaaaaaaattagccggacactgtgttgcatacctgtaatcccagctactcaagaggccgaggcaggagaattgcttgaacccgggaggcagaggttgcactgagccaagatcctgccactgcactccagcctgggcaacagagtgagactccgttgcaaaaacaaaacaaataaaaaccccacagctt

SEQ ID NO: 124949 - DNA, 1279 bp, Homo sapiens
tagagacagggtttcaccatgttgggcaggctggtctcaaactcctgaccttaggtgatccgctcacgttggcctcccaaagtgctgggattataggtgtgagccaccgtgcctgactgctggcgtatgcttctaagaaatttccactttcagtcagtttgacagttgaatccatgaacacttggtctaaacgcccttgatactaattatcatattatgtttgccaaagaccaggaaagagatttagataacaatattttgcataattcaggctgtaaaataaatcatagagaatgagcagtgtggtttgtggtgtgtaagttgtttgtagaatacagatatgaacttttaaaaataaatgttctcaagaaagtatcagtggcatgtatttgaagtactttggaaacatttcatcaaattattacgtttgtagtggaattgaggggtgaacattaataatgttagaaagtgttttttaaaatagtaagctaaagttttacaattgattaaaatggaagcaagtgcattctgatctgacaaattattactttcttctgattgagaaagaaaagctaattagcacctcacaaatcaacagtgatgatgggaagctccactataaatgtgccaagtataaggattattgttcctcaaagaaggtgtatgcattaagcataatgtgatcaccttttttttggtctcattagcttggtgtttatcagatttctttagttaacccaggtctgcttatagttataagcagccattacctgcattggtccttgtccaattttcacactgtgtaaatatagacagaaagaaaaaaacactccttagaaatagctttgaaaactgaggaagtctattggaaacataaagcatatttggcatcttatatgtcatgtatgaaaagttaatggacttggtttttatgactggcttatggaatcggtctcattattgtactgtcacaccttgtatatggctaaatgggtagatcatgtactcatttctgtgaaaaattatgactactttgtagtagaactggcaccattaccaagaatttatgaattggagattgattttggtaaaaatggaacttgttttaagccaaatatcttaaaacccaaacccttcaatcctaactgttcatgagaatgacttgatttttgtttgatagaaagatggaaatggaaaaggagacttgcttgtcattatgtctgcttgttcataaagagaaatctggaaaagttaattccttcatattctgagacgtagc

SEQ ID NO: 124950 - DNA, 1071 bp, Homo sapiens
taagtaagagcccagaacatcgcatgatgggaggtcaactaactgctttttattctaggagctctagctcatgctttggagtctgtcgctggtggagaggacatgcccagtataatctattctccctgctcacaactgaagacaaagccttatcaatatatgcagaccttaaaatacagttgaaaattttgcgaaagctcttattttagggcaagtagtggctggtttagttgcttccaaaatggctggattgtccataattttcagctgtctagggaagttgggagggcagagtgcatctttccccgcatttagaaaaatagtacatgtatgttgaggggaagtgagtggagaaaggagaggaagaagaagaggaacaaggctgtacaataagttacatccctaggtcacattttaaattttgatggaaccggtctctcttggagaatctgtgtaaggacctacatcctgtaggaggaagcagagcctgggttttcaggcctttaagcattgactaactgctgaatgcaaatgctagcggagattgaactgtgctaatattcctattagaactgttattattttagctaatgctctgattacagaattgcataagttttgagtgctctgctcataatcccttttccctcataagccctgttattttcatagcaattttgcaaaacatgaagttttgcaggaacacatgtattgcatttatgtcagaaatgccagtacatcatggtaaatatctacttagtaaactacttgtatgttgatgcataaagttaaattttataataagacctcagtgaccagattgagaaattgaggtataaaaagtttgtgttgtcctccattagttggaatgttctctgtttattaaactgcttatcacattgttgaaactattttaatccatctaaatgatattgatatggtttggctgtgtctccgcccaaatctcatcttgaattgtaatccccataatccccatgtgttgagggagggacctggtgggaggtgattggatcatgggggcagttcccccatgctgttctcgtgatagta

SEQ ID NO: 124951 - DNA, 1049 bp, Homo sapiens
agttccttttacaccctgtgccaaattcactgtaactcatttggcttctgccagaattggattctaatcctttgttctagaccattagctataatctttagcttcttgtttgttacttattttagcaaaaagcagagaaagattttccgcaaagaaaaactggcacagaatagttaatataaacactccccaaagtggtaaggtaatccacaaatggactagaaatttaaatgaaagtctaattatatatactgataccatatactctcaaagaagaaatctatggaacaaatgaacaaacaggtacattgggatgctgttctgaaaactttattctcaaaaatactaaaagaagcctgtttttatcttttacattttttctctcattcaaaaaatcaactttttacatttttcagatgtgttccattcagcctttcctcggatgactttcacatttcttcttaaagagtgatataaacagttttgctaaatcagacattttctataataagcattattcaaaaaacaaaaaagtgcacagagtcatccaggccagacaactgtctctttttgtctcttttaaaagcacacctgaggactccatttaaattggatagtgctgatctcagagcagaaccagctaattgtctcagagctaaaagactagaaattaaaagcctcaaaccttttcctgatcctgccacttgctgtgttacttgaacgtcacttaacctcttcggacttttattgatctataaatggcaactatttggcaaacgatagggtgatttatggaatgggcactttaagagcattgactaaaagtggttaaattaaaagttaagttgtatttttaaactctaaatagagatattgaggtctttaacactcttttcagacacaatttcctgaaagtttcttttttacagataaatatatcatgcttccagacaaactaaccttgagttcaaaatcatcagctagctaaggaaaattcaaaagacttttcatcctaagataccatacatgttttccatatattctgtgaa

SEQ ID NO: 124952 - DNA, 1053 bp, Homo sapiens
ttcacaatgttgtatgatctctacacctatctagttctaaaccatttccatcactccaaagtaaaacgccttacccaataagcagtttctttcattaacccatttccctagaccctggcaactaccagtctgagttctctctctatggatttatcttttctggatatttcatataattggaattatacaatatgtgatctttgcatctgacttcttttacttagcataatgtgctgaaggtttatccactttgtagcatgtagcagtactttattcctttttatggctgtataatagtccattatgtggctgtaccatgctttgtttttccactcatttattgatggatatttgggctatttccaccttttggttattgtgaatagagctgctatgaacatgtgtgtatgtgtttgagtacctgtattcagttcttttgggtatatacctagaagtagggttgtgggatcatatggtaattctatgtttaactttttgaggaacagccaagtggtcttccacagcagtggaatgatttttaaaagctattcctaactttatgttcattatcaaaatcaaaatgctcaatttggaaacatactttcctcaatgctttgatttttgttattaaaaatagattattctttaacatatccaccactttttccaaagttacttaaaaaaaaaaaactttggataatttccatattcatctcaggagagtttgtaagactctcagaaaaagattccaggcttttaatttctagtcttccgctctaagacaactagctcttccctaagatagcagaagtcaatttaaatgttcgggcacagtatctattttccatatgacttcatgaaaatgaaacaaaaattaaaaaattaggctgagtgttcaataacactttatttatggagttaataaatatttactctgaatgggaagaaaagagatctgcatttgacagttacctatgaaatagaattaatttttttcttctttgtcatgttgctggggtttttgaagatttgcctaaaaagatagtcttttag

SEQ ID NO: 124953 - DNA, 1022 bp, Homo sapiens
ctgtcctatgaatataagtatgttagttatgtctattttaagagtggattagtaaactagattctggatagaaatttttaaaaggggcaattttacattttaatctcatagcttgaataactcatgaattctaaatgaagaataaacaccttttctttggggggcggggggaatagctttaaaacagactgaaatgtttcataagtgtatcctgtcttgctataatttggtcctagaccttgagcagaaaatccttgtactctgtaaagaaaatagtgaccctgtatattgacctggcccaagatggaaaaacaaggaacccttcttggactttgtactcattacactcaaatctttgttctagtcactaagtcctttcataagtaaattttccggaactttctatgctgtaacttttgcttttttcacgtggctctgttcaatgataatggtgtctattttaccttagtgccttcactggcatatataccttgcctagaatcacctttttccttcaacagatctaatttaggttcttcaacctccaattagtcttttctaacaacttcagccttcattttttaatcccatcaaggtcatatctaggaaacattttgatgtttaccactgaattcagtatcacgtgatattttatatttgctttggtttaatagattcgagtttgatctcaacagattttttttttttgagccagaatctcactctattgcctgcttcagtgcagtggcgtgatcatgcctcactgcagctttgaattcctggactcaagcaatcctcccacctcagcctcctgagtagttgagactacatctacacgccatgcccagctaatttttatttatttatttattttctgtagagatagggtcttgctttgttacccaggctggtctcaaactccttgcctcaagtgattctcctacctttgactcccaaaatgttgggatttacagatgtgagccactgcgctgacctcaacagacctttactgagttttatct

SEQ ID NO: 124954 - DNA, 1130 bp, Homo sapiens
agacccattcctaattagaatgaataaacaagcttcttgttttaggtccaggcttttcagaatctggcttaattgtgttgtcttctcccactcttctttatcttgaacacttaactacatttaggtcaatttctttacttattccttccttacattcaggtgctgtcacaggcaatggaaaaataatggtgagcaaagcaggcttggtctctgccatcatggagcctgttttttcagataatgaagtaattaagcagatactcaattacaaaatgagagaaatagtatgaaggcaagagatgatggaggctcagactttggaagcagcaagcgtgatgaagaggagcaaatgggtatgagaactttttcaggagataaaattgagaggatttggtagttaaaattgagaggatttggtagttgattggagataaggattgaggggaaaggagaggtatcagaaggaacccccagattgctggttctagttggccaatgtgtcattcatcaagaagacatctttggaaaagcatacagtttgagggagacagatcatcagtttagttttgtacatgttgaatttgagagctttctcatgtttgcttttcttacaggaagccttccctgaatattctaccctttgataattattctaatgcttatcgattaattattagctgtttcatatgcttcaacttaataattactgccagtatatctcattgtcatttcatgtcacactgtgtttctctaattgctatgtacgtgtgttttaagtgagagtagaaaatccatgtgggtacaaaatacatgattactatttttgtttatctaactgatcacacttggtagtgcacaatgttatgaagtagtacgtatttggattaccagtgtcactaagtgatttccttgagacacagcctcatttcttatggttaattcatcatctacaaaaatttattagacagcaagtctctctcacggcaataggagtgagtttattaacaggaagtgaattatatcctccgatgtactagaggaatttgttctctatctggaactactttctaattaaagtcatgacatccctaccccgacttactgtgttgaatattatttaaccacgcctc

SEQ ID NO: 124955 - DNA, 1028 bp, Homo sapiens
gtaattagatgaaggcagtaagcagggtagtgtgataagagtaaatggcaggggagaagatacttgaggaagccttactgaggtgggggcacgtgaggtgaggatggatgggaaggagccagcagtgtgaagatgcacttgatgggcttgggcatggcagggaaggctagacattccagagagagggaacagggcaggcaaaggattcaaaggaggtacgaaaggaggccagggtgactggggagaatgatgtgagatggcgtttgtaaggtggactggggccagattatagaggaggccttgtttcaaaatttaggttttattagaaatgaaaattcttgaaacaggcctttttttttatgaacctattatctcttagaccaaatgaaaggtgacagttttaaccttgaatggccaacctgcattcataatctggaataattgtgagcagaagcccgcagcatgttgaaatagcattatattatattcaaaggctaaagactgctcagttctcaggcatttatcacttgaaagtggagagagtagaaaagtttaaaaggctacagcaataacatttgagaaaatgaataatttagagaatgaaatcatgactaatgaattttttaaaaagactcctcacttgtgattagagattcataattttcattttatagcaaaatatagttggctgtcatgcattcctgaccttcttcccctaagtacaattgggcccaacacattaatgccttgatgtgcagacttacgactagcttcttgtgttgaaaccattaaattttaatgtattcagcttaagcgtaagtggtcatagatgattcataatggtgctccctgcttttggtgaaaatgatcatcagcaagagaattgtccccagtggccacacttatcttcgtagatgatttcctaaacattttttgtgcccgtagaagactaggaataaacactgcacagctgttgggtaaagcactatgataattgctcagaaaccgcagggtatttgatgaagata

SEQ ID NO: 124956 - DNA, 1043 bp, Homo sapiens
ttcattgtcttctgtccttcctacagtgtttcacatatttccatgtactactatctcttttttactgacttgtcttacttttagactttctgaccttgagccttcacttctgagccattcctatgtttgcttacttggtatgaggaagcctgattctgtcacataagttgcctattagagtttcaggaaaatgcaacttaaagggaaattaggtggtaactgtgtactggctgaaacatttgtgagctcccaaaaaatgcatcactgccaggtaatgacttctgttcaataagtctatgtagtcaacagaatgatgttattcagtagtttattttcttttgttgtttatcttggttccctgtctttttgttttccagggtgcatgatgatagcagagattgttttaaattctatattcagttcagagcttctgggttgtgggtattgtcttgccagtgaatgtgaaagacaggcatgtcatcacttaagttttaacagtctatcttcaggtctgacttggaaacttgcataatagccagcatccaaatagggttgaaggcagagcccagatcaatacaaaacattaaggctatcagtagtatatatatatatatatatatatatatatatatatatatatatataccgctatatatactgcttatatatatatatatatatatatatagctataaataaattaggatacctcttagactgcagttgtagagtatttatacaggtacaaggtgagaagtggaagagatggtgtcccagtatcttatttgaatcacttatttactattggggaaaaaaaatgtaaggagtgtggtctgcggataacatctggaccagttttatctacaaatgtctatttaagtttccttccattagacagattctgttgacttctgccttatgggtaacagactccattctatactcacaccttcacatatttatagacacaatattgatatactgatggaaaagattggttctcattattgttaagatattggcataatgttaggtcagtgatc

SEQ ID NO: 124957 - DNA, 1017 bp, Homo sapiens
ggtaatgagaccaataaaaggaaagggagataggaatgatgatggggttctgttcgccttcagaatggaagcctgatgtcatgtggaagtagatttaattagatgtgcatttcttaaggaatccgtaaatcaagtccagactgttctctattaaatttttagggtgagcctacctgaagttctatctttgtgcgttttcattctatctgatgatacagtgctctttatgtgacctgaaaaatatataaactcatttcttctcccagcagcattcaaactcagcagtctctctcttctttaaatgtgcatattccatatatctccctggataccaggactctcagtagctgttgctattttgttctcctactttgaaacatacttttctgaaatcacctaccttgttatttctcttaacttttgagcagtatttggtgctgctgacgattttctccttgagcactcttccccaggctccagggcatcactttccactgattgtctcatctccttggctgctccttctcagcctctttcatgggcctctcttctctgcttagcctgagaagttggtattccttcagattctgtccttggctcttctcatttactgggtggttttaatttctgttattagttactttctgcatgctgatgacttctcaatttgaattctcaccaggtcttctctcccaagctctagatccatacatccagttgtttattgaccttttccacttaaatgtgacagaagtaccttaatctcaatattttcagaaactgaagtcattatcttccataccccgtcttaccccaaaacctacttctctttgtatttaatatctcaggattagtactggcacctataggtgctcaagctagatttaaatagatgcataaaatctcttgccctgaaccatatctctctgtccccacccattagcctagcttaggccaccactattgctacatttgctttgttgcagcagcctgttctcccttcctgtagtctttctt

SEQ ID NO: 124958 - DNA, 1069 bp, Homo sapiens
tggatttatcctaatgtattagaactgtctttttactctcacatttcccttctagactgtaagttccttaaggttagcaatgggcttatctgtgttgtaacttgttagtagttcctggaacatagtggatactacaaagctatttcttgagttgagtgtatgcatgaattactgtgacaattccttactgtttccatagtggttttgccaatgtcatcatgtatcatatcttctcttattttcagaatttctcttctaacttctataagagcttaacttcaaaacatgttgaacagtatatactgctaaatgaaaaagggaaatacagaatggtgttatggtatgcttcccttcgggtaagaaggaaggaatataagaaaatatatgtgtatgtatttatttgtgtaaaagaaattaaagcaggataaatcagaaactaaagagattggttacctataggaagtgaatggcaaaggggtagaaagaaggggagagagatggaaacaagataaaaaggataaggagggtgcaattcttttctgagaagctctttgtgttttgcttgattcctagaaacatagtagtgttttgcatactccctctctataaataaatagatcaataaaaccaggatgtaggggaacctaaaattggatacaaaaatataacagatgagcctgactttattgtgaattgatattgataacatatttacactgaagggggtgggaaagaaaagcactaatctgggtattttgactggtattgtgaggctaagggtaaaaagtattatacacaaacgcttcgctcaagttagtgaatttgtgtatcctagcagtgtggattatcaattctgaaactgctttatgtgtatgctaggattaaacaaagaagttagaagtacagaagtgggaaccctgtagtatcaaactcaatcagaggttgtagtatgaactcatggtttttagtatatacagatgtgtatatatatatagtagcatacagacatatatatatatgcagatatataaatgcaaaaataaaaataggccgggcgcagtggcccacg

SEQ ID NO: 124959 - DNA, 1039 bp, Homo sapiens
tccaacctcccagcggaaaaggcagataatactatgtaaaaattagaattgattttggtttccgttgcttcctcctaatctctcagcctaaattcattcatttaagttgacaactaaatatcgtgtgcctgttgtgtgccaagcgctgttccaagacttaggatactgtagccaccaaattagatagagatccctgccattttggaactcttattctcacaagtgaagacaataagcaataagcatgataaataagtgaactatgtatgtgagaaagtagtaagtgctaatgttaagtgttacagaaaaagaaaatgtgtgtcagaaaaggggtgggggccacatggtcataatttcaaattgggtggtcaggataggctttgttcacaagacaatttttgaagaaagacttgaagaaggtgagggaattattcatgcagaaatcagagggacaagtgtttcaggtaaagggaatggtcagcaccatccctaaagtgggaatgggcctggtgtgttccagggacagcaaagaggacagtgaggtggtgtggtaggagaggaggctggagggaccagatcatgtgcagcctttgtgcagacatttgctcatttgcttttcctctgggtgaaatggggaaagccattttgaatgaaggaatgacatgactttaccttttaaaacgatcacgggttactcttttgagaatagactatagtgggggtcagaggtaaaaatgggcagtccagtttaagggttactcagagaagcaatttagcaatacagtaattccctccttatccatggaggatgtgttctgagactcccagtggttgcctgaaactgcagatagtactgaaccctgtactatgaaaaaatgttgtgttttcctatacaataacaggcaggcagcatatgcagcatggatgtgctgaacaaagggatgagttacgtcccatgcaggatggagaaggatgacccaggatttcatcacactacccaaaacagagtgcaatttaaaacttgtgaattatttctgga

SEQ ID NO: 124960 - DNA, 1049 bp, Homo sapiens
tacttccaccatctttgcacatttcagctagtgtcctggaggcctcagatgacaaagcagtatggaagtctccactgaagtggcaagggccaatatcactttcctttttctgtgttctactcaattataggacacctaaatcagtagggcctatacttgaatctcacaaagattttagttaaacaattcttttgtgcttttactttcagtattctttctcctctaggagaatacaggcatctgtggtactgaacttgggatgatgtgagtgacagatgccaagttatgttggtgatagcatgttccttctgtcaggctcagtcagtaggtgattctcttgttgttcatctcttcctccctcagggtggattttctctcaggagaagccgatgagtgaacctctccctttcactggacctgcccagacatgtcagaacactagctttggctcatgctgggaccccccaccacagctggtgccaacagactgtacacttgtttttctttgatcatatatggcctagattaggatagtcccaagagcttgccaagattgggttgcagcctgtctcaaaacacaaacttaaaattgtttgacaagaccaatacccaggagcatcatgagtttgaatgaatagtgccggaaacctctagtctctctgcgcagtgttccttgatggaggccacggagtgtttactatagaacttcatgacattgtacttacaacattttagattttgttaaaattttaggaaattgccacctgatacaaattagagaactgcacataacaatggataccaaatagatattttggatttatttcatttaaagaccatagtgtctgacatacagaaactcaaatgtatattgaaagggtgaacaaaaaggatgccgtgacttcaattgctatttagaaatgaaaatgaagtttaaatgtaatcttatttttccgtagtgtgctcaggcatactaaggaaaacctcaaagacttctaagtataattttgtcaatacagtgagagagattcaggtatatcttaattaag

SEQ ID NO: 124961 - DNA, 2621 bp, Homo sapiens
tatagtgtaagaactattaatgccccttgcttcttttttctgcctcttgctcttgtcttttggacatttcagtgattgtaagttcttcggtcatgtcagcccctgtcatcaacttgagttacagtagatggggcagacatggagtgtttgctatatagaactatctgtttgttttacttccttgtgcgctttttgttctctgttctcttgttaatgaagcttttcctgcccattattaatccaaactcttggaccttgtggttaggaaattcccttaacttccagccatatggcattatcgtgtctctttctctctctctcttgctctctctcttctcctcttccccatattttctgtcaaataagtactgtttactcatttagttgcttatcaagtacttattcttggttttaaaaaaaattaatggtaactgtatttttctcatttttagcattattcaaatgtttatattttaatacctttaaaccactttaaagttttttcatgtttaattatagttttaagaaaaactattttgaacaaccccaaatatagtgcatctagaaactaatgtatatttgattagacatcatttatagtggaacagtagactgtagtacatggtaatttttcttttactattaagatacaataaaacatgactaattttgctgtcaaaaatgtaaagaataatgataaatggagtttttatattttacttttaagattgcctgtctttaataagacaaagccttaagccttatgttataattttggttctaaaaaccatcatttcagtataaggaataagtatatttcgtcctcctctttagtttttttcttcctatttatttttattttgaaaaatttctacaccttctttgaattccttgtatgaatttttgtttcttagaagttaatttgtgtgaaatgagattcttcaaaacgatgaaacctcatagctctgagaaaaggttttagggttttaaattctaagcaaagcgtgactatggctgacagactacacatttaattatacagcttctctttcttaaccacaggcagattaacctcattgtggattgtccttcagaccttagtcctcaggcatggtttctggtgcccactcctggaagccgctgttccctttctaccttcttaccagagcccaagggcaggcctggtcccggggaagcagcagcttgctgacataagtcagctgcaaaggctgaggagtgtgccctcagagaagcaccgccccccagtcttgtgccagcgcctagagccgcagctcccagggatgctccttccctggaggcagcccaggagagggactctggcagcgttcttcagatttgtggccactgtttctcatttgctggttgactgtttttatttcttaggcttttgctagttttagaaaatagggaagcagcccttgatttgtggattaaaagcaacatttgagcgatgatgcacaacagtccaggaaaatgggcggtggacacttgaggctgaggatgggagttgacatgagcagggagagggaggtgcgcgctgcttatctgtgattgttgctcacctgagtgtggctgattgtgtacatccagcagttacaatttttaaaaattatacttttacatttattttatatttttctcacccccagtaatttccttccaaagaagttcacatgtaataagtagaaattctgtataggaaaaaagcattaaaaatactattataactgcttcatttgctgggaaccattaaaagtaatataaattagctttttccagaaggatccttttgtagcagtgtttatgaatgtaacccccagcaaaatatggctatatattaggggagccagtttggagcagaggcctgaaggtccctgctatgcagccgtggccacagctcgcagcccaagcactgtggagcatccacacctttgatggcaatgcagattggtagcaggttccataggcgtacaaaacagtattaaagctcagtgttttgcatattgttagcatttacaaatatttttgctttagtatgaggaaagtaaggatgggcaaagaagcgatcaaaatagctattgctacaacattttcgaaaacaaagttggggctgtatttctttaaaaagataagcctctaaaaatgcttggcaaaaaaaatatagtgttaaaataggccagtgatattaatgagaaaatgaaagtatgtatcaggaataaagtgatattgcataggagtattgtatttttatgaattttatgccagttgtttacatgtactatatatgttaaattaaaaaaaatcatgagtaatgagggaagtgtttttcttgattgttattttcattttcaccttgattgtgatcaagttcagcctcgttttgtagtcagatagccatgaactggtttgagtcagatggcagtcctgagaagagagggagggatcataaacagtgggggtagactctttggtcttgttgttggtagtggtaggtactgaggttatccaaacttttcctgtatttgtggtagagtcacttacattccttttttatccttttcatcaagggacacagtaattcattcaaactatatattggg

SEQ ID NO: 124962 - DNA, 1016 bp, Homo sapiens
agtttagtttttcttaaatctagaaataaaatgaagaaccatttaatgtgaattattgttgatgtctaagttgggactgttgcagcttcacagtagtcctatagttgtgtttgttgtagttcatccctgttcacacacagggtaccttactcttacatgtgatagcgaagtgaagaatttaagacaaataaataagtgaacaaacacaaagagaccaagtttgggaatgtaggggtgtgttaaaggtcaccctcttctccacaacttgtcctcctcctgccttctgcttttgacctcactgatgccccttagcgggaacttccatggggaatttcctcctgactggattcttcttcatcgtcttctagtctaattcagtgctttcttccaaatgtgttattgtatcgttttagtcttgaaaattttatgcccaattatttttctttaaagagccagaacaaaaatagtatactcaatgtatagtcggaaagcagccgaagaagtgaagcgagaactgataaagttaaaagtgaactattacattctagaagagtcatggtgtgtaagaagatccaagtgagtatcaacacagttaacattttataatcataagacatgaaggttaattcaagcacatggcacatgctttgctggtggcgggggtgtgtatataacataaagtatacatggaaaaacttcttcttttttttttaaacaggctctcactctgttgcccaggctggagtgcactggcatgatctgggctcactgcaagctccacttaatttttgtatttttagtggagatggggttttgctgtgttgaccaggctggtctcaaactcctggcctcaagtgctactcctgccttggcctcccaaagtgctgggagtacaggcgtgagtcaccacgcctggcctgaaaaaactttttagataatgatttggagactttcttttatagtctttataaatatcttttttttttaaataatgatttgtatgtgtatactacctt

SEQ ID NO: 124963 - DNA, 1033 bp, Homo sapiens
cacacaggacctcacattcaggaccctgaacttgattgaatgtttgctgctgctgttttgaacgtcttaattttttaacaagagaccccacatttttgttttgtactgggccttgtaaattggttgtggctttacttgaatctgggagtagtgaaagcaggttgagaaaagagcttcctacattgtgttccacttatatgaggctgatggtagaatccttttgatcccaaagattattattttggggctttttctttaggataattaatcctttatttgggactctagcagaggccttattcttctctgggaagaagttttgcataacagatgcatactacttatactaacaattaccaatgtattcttaatttggtttcagctatttggatggctcttttgcaaagtacatcctggtgctattgtgtttgctatattagcagcaatgtcaatacaaggttcagcaaatctgcaaacccagtggaatattgtaggggagttcagcaatttgccccaagaagaacttatagaatggatcaaatatagtactaaaccaggtaaaaaaaaaaaaaagaaaaaaaaagtcatattatttagctgtttttcccacaattttatataccactgcaaactcttaaaccctagttacttccactgatctcactctttctatgcaatgttgcttttagaatatctaaaacaaaggagatatcaatcctgtttaaatggtttgcaggggaaatgttatacatatgttcttagtaatttattctgccattttttatagattttaattttttcaaaatttattcacagtcataaatgccacatttaaaataatttttcctgtgcttattttcttaatgaatttttaatattagtccttcacattccttcttgaaataaactcatggaatgtgacattttattcatgtgtggaaagggagactttgttgtcatctgagtatcaaatgattgaatactaaatcatcttccagaactccttgttactgtaaagctttcctagtccatt

SEQ ID NO: 124964 - DNA, 1790 bp, Homo sapiens
acaatctggctccttagaatcatggccaattccaggaggtatgacttttgaccagaactgatctcgactgataaggaaagtgttatagattcaagcagcagctggtggattctaagggctggattacagcctgtcatcagtgttgtagagaatatttgtactggagatacgattttagattagatgacctcctcattattgctgaatatgaaagcacagtgactgtgttttgaatgcttccagctgtgattatcaacctctgagccagctctccagttttctgagtgcactgttaagaagaggtgttgccaacaacgttggcatggtggaagcagcgctgaatgtgaatttgaagccagaagatctggtttcaagactgcagtgcttcttagtagttgtctacctacagggcaatcatttaatccatatgaacctgttgctcatttacaaaacgaggatgatataatctacccaacagggttgttgaatattagctttgatcagatactatacaaatataagattatgttgttgtgattattattttctgagttatctctatacttatattttcattaaaagttattttacagtttagaagatactttatttaaaatatcatttttcccaacacagcttttctaaagtgtttcaaaatctatttacagattattagtgatatgtggggtgtcttagctaaacaacagacacatgtaaggtaaatatgctattaagaattttattacctcctctgttcatttattaaatagatatttacagtgtattaattgtatacttacatgttgtgtacctaatatttgataattgatgtttttattgtggtcatttcccttcctggcatttcttcttatttcctatctgtgcagaacacagcacatcacttattcatccttcagatgttatccagtacagtctgacagtagccctgcacataatctacactcaaaggacacagttttgtacttcatttcagcagggaaagtaaattattacgtgagtggttttaggaccagtggactgcctttttggaaatgagcagggaaatataaaactggattcatacctcactttttacagaaaataaatttcagatgaaccagagaattatgtataggaaaaaaaaaacccaaaattaaccaagagggtttgtttataacctgagagttagagaggcctatagcatgcttggtattttccaccatcacaccctttgtcttactctcttaccatttgtcaccctttgtacttaaatgttgatgtgtgacccgtatctcctgaagggagcgatcatttttgttcaacagtttatatacagtgcctgcaagatagtaaaggatagtagttgaatgagtatttacatatgactaatgaacatgaaaaggtagtcttgatcctatggtaaagccattcaggttaaagtgaagaccttttcacttcttatatttctaaaaattaatagtatatccaatgcttgcaagagtgggaggtagtagatgggagggaagtttggcaatacacagtaaaacatatagtgggcctgtcctttagccctgcaggttccaccagtgcaagtgtaccctctagagatgctcacagaaatacagagatgatggggagagatgccttttgtagtattgtgtgttatgtgagaaatggaaacatccaaaatatctactatgatacatagagtggaatgttaggctatctttctggaaataggtccagtatacattattgaatttttaaaattgccagtgtgtgtgtgtata

SEQ ID NO: 124965 - DNA, 1372 bp, Homo sapiens
gttataaggattttgatactttattgtatacctgtgcagcggagtttgactttatggaaaaagaggtaagatgtgatttctagttctgtttcctaaggttttggcccatacatttttcataaggagtgctcctcttatatcagactctttatgtgctgttatctcagtttgaaggaaaaggaaaatctggcagcttagaggaagatttttctgtttactttagtgcagctccctgaaatatatggcctttactcattttgataatttagaaatacacattcagactagcagtggttttctaggtgagtaaacacagaggcatttcaagttgccatttttcagtgatagcattaatttagtcaagctctcaaactcttacatttccactcattttgtggttatttaaatagatatttgctttgaaacatcaagtccaagcttttcattccaacagcatttttctttctaaaactgtattcagagatttagaaggaaagcagagagtagtttagtggattgtgagacagaagcctgtaattttgcttgatgttcttgaacaagcaactctcattcgtcgtgttatagtttactagtttctagtagcatgccataaacagatattgtgaagacaaaatgagataatacaaaggaaagtactttgatattttaaataagtaaatatttaaataaataaaatattaatttgcaatactttatgagctggtttagttcgacaagcatgtatatatgtgcatttttaacaccatccatgtggtactgattaattatattatctgtgtcactccttcagagtggtatgtgtatgtatatgaaactggccaacaatactctattgacatgttagtttccctcatgatcccactgtgttagcccagtgtccagagttccagaccagtggatgagagggcaccacacaggaaacttttatctaccggccatttggagttgagtgtgttctgcagaggtactgtttactccagtggcctgtcagtcttcatttattgtgttccggcaaatggttttgacacacagtggctgacaaaggtatatgagttttagtgttaaacctgctgaaacaaacaaaggaagcatatcttgcaagacattgaaatgcatgttcataggggttcaagactccttcaaatattagagaattaggatgtggtgaagttgtttaatgttattgagaacatcatacatactgctacagtctgagagtattaaacataagctatgtgatgaaagaaataatttattgagacatagcatgacttcagctaatttgaagaaaatagcaaaactgtttccagcataccattcctcatcactgtaagtatcttaattcataggg

SEQ ID NO: 124966 - DNA, 2117 bp, Homo sapiens
aatcatatttttgccatgtttgaagtagttttagctccccaagggtaatacagtttggaagcattaccacctgaaaatacttcagagaagtatttagttgatccattaacatttcatttgctgtttaccctaagagtcagtaatttttagctaaaggaaaatcttatgcctgtatgactactgtccaaaattctgaaaatgttatatacctcatggctcagagataaatcagatatgtcaaatcagtcatagacatttacatatggtgattcctttttcaactttaaaaagtcacgcattcacctaattgactttggataatagggctataccttgaagtcactgactctagaaatgagcatgtggatggtatgtggaaagtcaaccatgtgctaaattttagatacttgagaatcttattatttagaagaattttttggtacttgaatttatgtctataagtattaactgtgtatactatgttatttttctctactcagggtattctggcaatgaaaccacatttcctgaaaataaatgtatctgaacttagtttatgggtgagaatcaatctattttaatgcttatgttttttcttctctaaaatatatcattggttttatgttttacttttaagaaaatgatctatgcaactcaggggatccaacagttttatagtattttagggctcagttttaatgtaccaaattgccctttttatgaaacaagttaaagttaatcctgggtatgtagtttaaaaattccagttttatttattactcatgtttcatctgagaaacagtgcatgtataagaaactgttaaagggaatttaactgcagtggttgtgtaaatcttctataaaatatattaattttgataagattgtatgattatatttttatttttagttactgtcccttgattttgagcaacatgcttgattttaaattgagatgcattttctagcattttctcttgtagatagtaatatgtatttcatgtatgattaaagcatttatttttttcttcctagcctatgtctgtggaatatgaagcatcaaagttatttttgttttcttttgtttaggttattcaaggatgtttttggttatttggaactgtcatacttaaatacttgacatctaaaatttttggtattgcagatgacgtaagtgcattttttacttaaatttgaaagacttgaaaagaatcgaataggctaagaataaattgagttattcaagtatcactattaaatgaaattctaggatgaagtctgttcacctattattttatttaatataatagaaagtaaatgtaattgtatatagattttcgttctccaaaattagtttcttaatctctttttttattggtccttctatgtcactaaaattttaacgcaggaaaactgtagataatagattaaagatcgaattttaagctctatacagtcatttttctctagcttctttgtaactggtaaagacaccatctttagagccttaattggagatcgtattatagtctcattcttttttctctccagttttcaagtcattacttgtaaaaggcttttataagcctttatagataatgtaatccaagtgagtcttatttagagaagatttttgtttatttttggtattagggtagaagggaagataaaatggagaagtctgtcttataattttaaagattctctctgtccataattgctttgcctattttattttggtgttttaatcagcacatcctaagtcaggaggctatcaaagatttaatttaaaaaagcagcacaagaaccaacatggaaaaaataaactatttttttcctatagtgtatttttattggtgattttcttctttctgtactagattaatgctatggttttgaaactgggttatgtgaagtcctaggacttcccaggaatcttccctgagggctgtctactcccctgtctcctagcctctcttttacccagggcagtttaacctcaatctctttcatacaggttttcataagaacaagggttatttttgcttaaaagattgaaaacacatggaccattaaatggttggtctacaatctgtggaaagatttttaaaactata

SEQ ID NO: 124967 - DNA, 1022 bp, Homo sapiens
ttgcatgtgtatggaaagctctctgaaacatattacgaataaaagcaagaaatagtacagcttgtggggtaagtgtccatttgtggttttacaaaatatataaactagaatttatacatgttgtctggaaggataaacaggaaactgttgatgatggttatctctgggagtttgaagtgtgagatggagaatgggctgttttatagtcccttttcaacagtttgaattttgtttattatgggcatgtgcagttttcacaataaaaaacaaaggttttttgttttatgtgcattacttatatttttttcttggatttttccagatttctcttgcactttgttttgttttgatgtttgggaactcaatgttattaacttcttattatgcttcttctttggtaattatttgggtaagtattccttaacacttatatggctgtttttgaaactaatggtttaacaattttttcttcactggcttaggattcatcagggttttctgtaggaaccatcttaagtgtcttactgaatattctagatgtatggtgttcaagtactcaattctaaaacagggaaaaaaaaaacaaggaaaaattagtatcatttcagaaaagtttctatgctttcttctcccttcctcctttgcatttttaatcctactcctgctccactttttgaacccctttcctctcattgcaatcttgtaacagccacccctcttcattccactgtgctcagaagatcaaggccttggttactttttcttctgttttttgttttgttttgtttttcttgttttgttttttgccccttgtctacttgtatggactattcagatggtttaagtaaggtgatgattcagttttattttgctaaatcactaccaagaacaactttagattatggagagattattttacagaattagaacaaattgatggaaggtcatctaattctttctgctacatatggcaggatgactttgtttttttgtttgtttgttttgttttgtttttttaaggt

SEQ ID NO: 124968 - DNA, 1049 bp, Homo sapiens
tcttctctcattagtttttataattttgatgttttcttttcctgttaattttacagttgtcataatatcccattattttcattttcttaataatttatacatataaaagaacatttataatgtgtaaggaagttataaacacggtcataaaataaacaaccaggagcctactctccaaatggataatagaactttattgttacttttaagtcctgtatgccctgagctcatcccctcactgttcctagaggtaaccactattctgactttttgaattgtaatcaatttgcttttctttataactttacaatatgtggattactaaatagtacatatttttattattaaatgttcacattctttgtaaggtttatgcaaatggcattattttataaataccattttttcactcagatttctgctacttacatgtaactagaattcaaatattttcactgctttatattttccatcatataaataaagcataattcatttattcattttcttgttgaaggacatttaggttctctcctctccccccagcttcttattttagttataaataatgctgtacattcttcacatatctcctagggcacatatgttgagagtttctctagggtatttacctggtagtaaacttgttgggtggtaaattatgtacatgttcaactttataaatactaaattgtttttctaaaatgattggactacttccaacagcaatatatagcagcttatgttattctacatccttttttattttatcaatctggttcgtgtaaaatggtatcttgtaaccttaatttgcattttctctgattcataatgaagctgagcatcttttggtttgtttatatgcccttcatgtttccattgttgtaaattcctattcagatcttttaccagtttgtcttgtgtccaaaagaaaatgacatctattttagtcaatgcagtgtaatccattatttttgttatttatgttgatgctccaattgttccacacttgtccaactatttaagctgacttctctttccttttaaca

SEQ ID NO: 124969 - DNA, 1060 bp, Homo sapiens
acagtcagaggtttgataaccttaatttttaagtagggaacagtcaaatagaaaaatagacaagaatatgaataagcagttcacggaagagaaaatgcatgttgtcaaaacaaaacactaaaatgctactgcatacaagtaggcagtgagaaaagggttttcacctatctaaggagaaaatttgaaaagcacatgagtctgcacgaggggtggagaaacgacctcctgcatactctgtgacaagagtgtggactgctgcagtgcttccgggcacagctcacatcctttgactcacgtgtctcacagttaggtccctcctgccgaaacaaacgtgccagcatttacatgtacgaggatgtttaaccattttttattatagcaagaaactgaaaaatatttatatgcccggtaatatggaatggactaaataaatatatttgtactatacagtatttgccatctataaaaataatccctttaagtttacatacattgattaggaataatctttatgctagaataattagaaaaggaacaaatttcagagagatgttatattgatcacatagaaaatatatgtttgtgtggttagagagagagatttggaagaacagacacatactaaaatgttcttaggtgaataggattgggagagggtagtgagaaaatcactttttttcccctataaacttctatattttttgtcttgttagagtaagttcaaaacactaaaatgtatttatttgttttttaaaccgttaactctatcttaacctttctaatgtctaatcacttgtgatgaagcctgggcctagcctgtgtgcttctcttctgaagaagatgtggtacacctttcaggagagaaccctggcgtccacttcctggcctgtactgctttctaagctcctctgtctgatgctctcatttcagtgatccatcacttcagacactttctggcttcagtttctttgcccctttatatttcatttgtgctgtctaggctgataatcggtaggcaaaaatcacacagtcttatgattactgaccctgtagatttgtg

SEQ ID NO: 124970 - DNA, 1048 bp, Homo sapiens
tcggatatgttttggtgtttggatttgaccttgtgggcagggatgccattgaagggctgtgtgcatggagtgggattgggtccattcattgttaaagacaacacactctgcagtgtagagggagcaggctttgggtagggggtgtcggaggctgtagcagcccaggggaagacgatgggagcctgagctggtatgatggtggtgggatggagggaagtggacagactctggaatactaggagggaggctccaggggaagcatttgttcagaggagagtgatatttctaggcaggagaaggaggaagcatctgggaagaggctgcagttgttggataggtagttgttcaccatggaatgaagggcctggagcacacagtggagaggtctgcgtaggagttgaggagtgtggtgtttgggtcagagcagaggctcacctgaacacatggtcctgcctggtttttgggccagtaccaagagcaacaatgacatgaggtgtggtgtgtttggctgcaagctttcaaaaaaggaatgccagcagtcttttgattgaatagttctattttcagataccctttcattttctttcatggacaagacttggtgctaggcaccatgggtgaattgaggagttcacaatctaataagtaaataacttcagttagaatcggcagatagagagttaaattaacggcgttaatcacttgcttgaaacagactggaaaggaccaagctgagaacttttctcacccttcccgattcttatcctcattcctcatctttctttcctatctctttacttagtaaccagtgaatcccccccaccgccccccccaccgccgccatgagtataggggaaggttctcagctctgaaccaggcctgcttggcatttcttcattgggctaggaaggtgcccaagccttcagtctccaatttaagattggaaattatcttaatttgattatttccaaatttttctccattttctctttcttaagcatttatacaataagaaaatcgtaagagttatttaatatagttttgaatt

SEQ ID NO: 124971 - DNA, 1109 bp, Homo sapiens
tttttaaactgaattttcactgctttgtatatacatgcatatcttttggcattattcaactttttataatcaagtacgtcagtggtcccttgccccatctgtcttccccaccctgtgtatccctttgtctagggaaagccactttcagatctttggaaactcagcaattctgatacgtaaaaccatagtccgcagttacattattatgactgtaaaaatattgcttactgctgaattaagtggtataaataattgtttatttggtaacttaaaatttttcctgtggttaattattgctaatattttgttttccttggtgttctgtatgctgattaattcctctccagatctacagctgaactgtaaacacttattttgtactttgtcaaatgtataaaatccattatttcaattctcccactcctatcccctggggcctccctcctggagcctctgtctctggttccatcctagacccgtccttccctgggcttccgtttagcgattcccttggagttttgtttaccaccatcctgagaattcccctttcctctcttgcattggattcattgtgttttggaccccaggttggtctctttctggtctgtttcatccttttgaggatcatatcctcaggtaatttccaagagagtcacagagataattttaaaatacatttgtctgacatgtttgaacatttccttttttatttttgtactcaattactggtttgcctggttgttgatttttatttttcctcagacttttaaaggctttgttcgactgtattctaagatggagtgtagcttttcaaaagtctggtgctattctaccattagttccttttgtgtgtggctagttgttttcctctggcaccttttgggttcatctttctctctttagtcccgtaaaaggtcatgatgtggtagatattatttcatccttctcatcgcatactttgtgcgctctatctgggcacttactttcttcactttggaggaaaactttttttagtattatttccctaatgacattctcttctccatttcttttttcctgttttcttgaaagttagtgattggatattggacttcttgaagtcgaatttt

SEQ ID NO: 124972 - DNA, 1114 bp, Homo sapiens
gccagtatcacactattttaattattaaaagtggtaagacttaatatctgttaaaacattccctttaattttcttgttagttttctagatacattttagacacttggaattttgactggaattattttatgtttatgaattaatttgagggagaattcatatcttaaataattcggtctattccagtagacccagtatcttttacttgtgcaaatcttcttttgtgtctcttagtagagttgtagagcttttgaaaaacataaatttagcacttttttttggcccatattttgtccttacccatggatgaacaattgaaaactgaccagtgaagaatctgcctaggagattctgagccttgttttactacatttaaagggagccaagtggatggtatggaaagggaaaatatggtaattgtcaaagtatctcaaaagtattctagtaatgaaaattgtttagtatattttcttaagatgcctctgtattttttaaaataggtaattttggccagttggtaccggatttataccaaaataatggacttgattggtattcaaaccaagatatgttggacggttaccagaggagaaggactcagtcctattgaaagctgtgaaggtaagtttctttctgtaatattgtccagttatctgttgtaacataataaacttatctagcataataaacttacactgtaaacttagtggtataaacaacacccattttattatgcatatatagattctgcaagtccagaatttgggcaggctttagcggggctggtttatgtccatgatttcagggacctctgctactaagactcaaatgtctgggaaggctggaattaactgagaggctacattgctcacattttggctcctgggcatggaggactgtgaggctgagctcagctggaactctcagctgggacacctacatgtggcctttcggggtgacttgggctttttgaaagcaaagtacctcagagtagtagtaaggcttttcctatggcagctgaaggctccaagctggacactgtatgacctcttatgacctagcctcagaagtcacatagtgttgcttctgccatactctgttgaaagagtcacaa

SEQ ID NO: 124973 - DNA, 1602 bp, Homo sapiens
attttaaaaatagtggtatcagagtcgatacatcagagtatcaagaccatttttttctttttcaataagtttctggataggcatatctcttttgtatttgtgagtcttaaacccagtttaaactttggcagctactggtactggctaccagggcagctccagggaaaactgaagatgcaaatacaagacgtagatttatcttgtgtttctgtcttccctcatactgccacttagactctccgttaggcttctagtattttcttgttttttttttgtctcacatattatttcacccttgctatctttccaaagtagtgtgccaagctaaaaactgtctcttttcttcaaaagaggaccactccccacccttatccccagtcgcacagggttcttaccttatgctgacttgataggagggaaaataatctgtaaaattaggtggcacccgagtgaaattcatatgtaataatacatcagtgtgtagccttctcaacacatttgcatttttgcatgtaaatccggaggaaaaatgactgatagtgtcattttggggattaaaataagcagttagaggagtatttttggcttgagatttcttggttcatgataaattttagttccataataaaccactcactctattcataagatagcattttctaagagtgatattagtataagtaataggattttctaagttgaagtatgctgagtcgtattattttttaaatgctgaaactttttgaagctattttgcattcagttatttcaattaagatgcatttatgtgaaaatacatagttttttcacaactttaggatttatcagtgatcagaaacctgtgaaattcattgtattaatagctattacttaattgctttgtttttcaaaaacagtgtatttacttagaagtggcatcataattatgtaccttttgttattttaattgagcatatctttatttcagggactatattattcctatttcaagactattgtggaagcaccctcatttttgaatggagtatggatgattatgaatgataaactgactgaatacccccttgtcattaatacattaaaaagattcaatctttaccctgaggtaaggtactttttccaattgtgatttttcacttttgtaaaaacttttttgtattaaacgctgattctaaatctaagatataattcaatatattaaattgtatttaattttttaaaagaaaatatgtatcttgtggaggaatatgtaaaaaagatcattactgattttgaggagagggctttaattctgtggggaactgttgatttgattgcattgtttagaaaatataaaaactagatttggtgtgcttacagggattataccaagggagcgctgttacttttacatgtcatttgttaaatgttttcttccctttcctcatttaattgagtgcactttcttgagtgggagtggagggaaggtgagcccaatccagcaagtggagatgacatttggcctctcctttatcctccttgcaaaactataaatttgttgatgtggaactctagttcaatagaatatatattttaatgattttgtcagaaggctttccagat

SEQ ID NO: 124974 - DNA, 1061 bp, Homo sapiens
tgaaaaactagtttaattgataaatcagggtcagaataatataattgtttaataaaaaagagattcattattaaagaggctatatttgagactccactcaacattaatatgttcatggtgagagagagattaatttatttaatcttctagatagaaatatgaatttcattagatgtttctaaaatggtaacccaatgacatttacagtttaatctatacttttattgtacttcacttaaaatattctggttcattttaattttaaaatctaatttgattttttagagagggaaattttagtataaatgcaatacatactgagtgaaaaaaatatagatactattgtatttgagtgttattacaaaattatctgcaagttaactgatacttttatttttgcttttagcttactttaaaaaataatacttagagtgtaagttttaacactattgctttgttttgtttttccaggagccatataacacacctctttgaaaatgaccgtcatttttctcacctctcaacattggaaagggagatggcttttcgcactgaaatggttagtttttatttgggatttcatcatagtactttaggaatttaaaaacatttaatattttttattatggaaaatttcaagatgttccaaagtagaaagagtagatgctccaccttctacagctgacagccacagccagttttccttcatctacacccccactcactatgtcttttttattttttatttttatttattaatttttttttcgagacggagtctcgctctgtcgcccaggctggagtgcagtggctccatctcggctcactgcaagctgcacctcccaggttcacgccattctcctgcctcagcctcctgagtagctgggactacaggtgcctgccaccatgcccggctaatttttttttttttttttttttgagacggagtctcgctctgtcgcccaggccggactgcggactgcagtggcacaatctcggctcactgcaagctccgcttcccgggttcacgccattctcctgcctcagcctccccagtagct

SEQ ID NO: 124975 - DNA, 1024 bp, Homo sapiens
gcaatggcgcaattttggctcactgcaacctctgcctcccaagttcaagcgattctcctgcctcagcctcccaagtgtctgggattacagacatgtgccaccatgcccaactaattttttttttttttttttttagtagagacggggttttgccatgttggccggggatggtttcgaacccctgacctcaggtgatccacccgcctcggcctcccaaagtgctgggattacaggcgtgagccatggagcccggccttcatgactgaattttaaaagcaatcttgcttctcactttgaaactcaatatctctattaatagagtacattccttcttttccaattcaaaatagatttctttccctattcaaaatagaaaacaaattaaaactgccaaacctaccaaggctttgtagttcggggagcaggaaaatcaaaatgaaaacaaaattctcagaaaatagctgtgcagtccacctgggagagtacaaagcccagcgtgttagtgataacagctgtaggtagctactcaaggtcgttaagtgctagggatggagacaaccaaagagaaaaccctcttttttttttcttttttttctttgagacggagttttgctcttgttgcccaggctggagtgcaatggcgcaatctcggctcactgtaacctccacctcctggattcaagcgtttcttctgcctcagcttcctgaggattgagcagctcggattacaggtgcttgccaccacacccagctaaattttttgtatttttagtagagatggggtttcatcatgttggccaggctgtcttgaactcctgacctcaggtatccacctgcctcggcctcccaaagtgctgggattacaggcatgagccaccatgcctggccaacccctcacttttatacttggtgaaaatgagactctgagaggctgaataacttgaaagtcatctaaaacctaaggaatagttcttcttaagaatgactttcttacgagggaagtaaaagaatttgagttctttcc

SEQ ID NO: 124976 - DNA, 1039 bp, Homo sapiens
caggaagttaggctatatggtctaaaaaggggaggaaccctcagttccaggaattgtcccccccttttccagaaaactcatgaataatccaccccttgtttagcatataatcaaaaaataaccataagtatgagaatactataagtatccttagtccagcagcccaaactgttctacctatggagtagccattctttattcctttactgaatgaacttgctttggactcgcccggaattctttcttttgcaagatctaagaactctgtcttgtagtctggatcaggaccgttttctggtaacatttgtattcatattatgtgaggataagacttttaagggaaattagaatttattgtcttcaaaacacttacgttgagtagttgtattaagtattgcctaatttaatatctgtacatatatacatatttaaaatatgtgaacatttacttagtgtatttctctgtttagaagcctaattatattccgctttgggatggtgatatatactttccatgctctcctgttttcatatactgtattcactttaaaataaatcgttttgtccttgatgctcttgtgatttctaaggcatttcctcctgtgtgctagtgcatcctcttcgttgaatgtgcttaacatcttcgagcctgagcttggagtcagagaaacccagctctcctccaggccttgctgtatcccagtcatgtgcccctgagcctcatgggaaaataagacccatatctgcctcaaaggcacccctagatcatttttgcttaatatgtgaaagggctctctaaactgcaactgacaaacagatgttagacattttcattgtaattaagttttctaattttttcttaactgttggaaagcacagttttgcttaatgcaaaatatatggaggagattctgattaactaaagttgtgcttaaaaccatcatcatgtagaccactgatttctagatcttactaggggcagtagtttcttcagatcatgactgaattttatttttatttatttattttttgagacgga

SEQ ID NO: 124977 - DNA, 1073 bp, Homo sapiens
agttttatttagttactgttagaactgtttagttataatggttactagtcatcaaagctagtaaaaattacgtctatatctgggtctagatgttgtttaatctcataaagggcagtttcatttcatagggaagatcagttctccatggaggacctttcataattcagtcaagaatcactgaatataaatacatttaaaaagcagaataatttattttcagaatacataaatctacaactattgtagcttgattttgtgctttaatactgctttctattttctcagcattctcactattatttttttcctgagagctcttaatagctgtttgtgtttttctggcatctttctccatatttgtggctgattgtcaggtgtgtttttcagcacgatcactatcacataaagaatgtttggatggcattttgtaattttaactttattaaagcagcaattgttaacataatagcgtagctgtcaccaagaccacttacagaagttctagtatggtttattgtactgatcatgaaaacgtgtgattttatctactagtttacagtagcactaattgtaaacacagtttataagtcacttgaccagttacttttgaaaacttgttacctagacaaattattagtttagggagattgttgtaattgagaagagcgaggctttattaatatttttaatactaaaatttgtccaaagtgctactactctgccctttgggcaaatacttttcctatttcctaacagtaattactactttttataatatagcttttcagtgttggagttgtcaacagcagaatctttttctgcgggttttcatattaatcataaagttcttatgtaattgttttccgctaagtttaaaaagttgttgttgttttttgaaaatgagaccttatttctcactcttttctcatctttcatatccatgggaatgttataaaaatgtagaacttaaaggttaccctcttagaattttcttggtgagaaaactaaaatagggccaggtgaatggcccaatgtaattattgagttcagcaggtgaagtttgggattgaagt

SEQ ID NO: 124978 - DNA, 1052 bp, Homo sapiens
gcaaataggtggttttcacattaatggtaattgaatttgtattcccattgaacttctatttccatacttaggggaacaatagcatcttatactgatagggggcttactctttgccaggctttgttggaagtgctttagatgaactcatttaactgtttactcagtcctcaccatgacactatgattactgtgcttgttttaccacgtggggggaatctgaggcacaaagatattaagtaacttgtccaaggtcacccctagaatgtagaagggccaggatttgacccaggcaatgtgtttcctaagttcatgctcttaactagtatgctatatttcatctcctctaaggggacagtacagcaaaagaaatgaaaccctagagtccaattctgagaaaccctaacattttgtgctcaataaatgttagttttcttgtttcttccttccccaggaaaaagaaggaaaagagggtcatacttagagatacaggaacaacaagtagaaagagcatattaggggtggcataagggccaagaaaagctaaggaagcatgaggcacagggacacaggccatcttggtgtgcttgctttcaaacagacacatagacccaactgagcaccagctgtgagagtgtgtttatgttaattcatagaggttatgccaatgggaatttgggattttaaagaatttctttaatgtttacagccatttttttttctttctaagatagacttctggctaactctaaagaatgtttataatcacctaaacatattttattattaacagatacagttagaagttttctgaatatgtgatgctcattagcatccaaataacaaatttgataagtttagtttatgtaaatataagcatatgttatctatttgtgattgatttttggccaataatatggcatcaatactgaaagcacatacagttttatttatgtacatatgggtatttggatgttgctaatatttgaaccgtggctgttatgcattgtaaatacttatcctattaggctgtattaatttctcttaatgagtgt

SEQ ID NO: 124979 - DNA, 1072 bp, Homo sapiens
ttcgccactgcattccagcctgggcaacagagcaagaccccgtctcaaaaaaaagattatgttcacaccttatgtattttatttagaaagtattttagctataataaattatacaattgagattaatttatacatacactttttagaattgtacattcagaatttaaacttcaaccacatgggtatggtttagtactattatgttttaaatatagaaaactgtgattttaaattctgagttaattttgtgaaaaattcactgtattttacatgaattttgattgtatactctatttttttttttttaacagtgggactcaactgggaggtcttattacagtactgtgcttctttttcaaccatggagaggtttgttttctagaaagcaatttttaagaaatagaagaggctgtagaggaacaaggaaatatactcatcaaaacaatatttaattgtatactacttatgacttcacaatattttaaagaccctcgtgttgtaagttgatattttaatcatgttgattgaaatgtttaaatagctagaatttcaaacatgaaatctcttgccttaattttagtaaatatgtacatatacatatattctgtagagaaaaggaaatattgtacttgttgagttgaatcatattatgcacattatctgatttattcccactaaactttttttgtgggtggtggtagcctcaccatacaagttatgaaatttgaatttagagaaagttaagttacttatccacattccacatttactacatgatgaaactggatttcccattctatgtctgtctgcctctaaaacctcacatatatattaatttatattttataaattataaaattatagttatattttataaaaacttatatattatatatataacatatatattcaacttttttattgtggtcagaataagtaacatatgatctgccctcttaacagatttttaagtgtacaatatagtattaacacaaagttgtatagcagatctccagaacttattcatcttgcctaactgaaactttgtatacattgcactccccttaacaac

SEQ ID NO: 124980 - DNA, 1818 bp, Homo sapiens
tgcaaacaacttggaacttgaagaaatggtatgtgattgaagcttttgtatacttaagatactgagattttcccagcacggtatgggaccaacatgatgaaagaatgttggatgttccataagtatttgtgaaatggcacatgaaagaaaactaacatataaattgtggtggtttcatttgggagaacttagaatattatactgaatcagtcatatattataactaaatgggaagaagtaactttttttttcttgaaaatagcctagaaataaaattatacacatggtaagaatttattgtattgcattggcagttgtcccctttacggaacagtgaggaatttatcaattttggccttaaagatttctaatgaccacatacataccacttcatagtcctttgttctacaaagaatttaactgtattctattatgagctaatgctcgttcatatcactcaggagtatctttcttgttttgcttgaaaggagcgtcttatggatgatgggcttgaagatgagagtggagaagatggaggtgaagatgccagtgcaattcaaaggcctggattaatggcttcagcttggtctttcatcaccaccttctttacttcactaataccagaggggcctccccaggttgccaattgacctgaaaaactgtgccagctacaaggagggtctgacttcaggaaagtggtttaaataacagtgcaatttcaaaaaaatttataactttcttttgatcatcatgtacagaggtgttttttttctttaggcttctcatgcatatgaatattttaagcacgaatggactactaaatatctgagttttttttttttttttttaaagatcctaacagaacatagcgtaacaatattggtcttccaggtgttactcatttcaattatgtgtagtataccaggacagacctattttcatgtcttatttctttaaagagctgcttcattggccgggcgccatggctcacgtctgtaatcccagcactttgggaggccgaggcgggtgggttacttgaggtcaggagttcgagaccagcctggcaaacatggcgaaaccccatcttaactaaaaatacaaaaaaattagccgggtgtggtgtcacgcgcctgtaatcccagctacttggggggctcaggcaggagaattgcctgaacccaggaggcggaggttgcagtgagctgagattgggccactgcactccaccctgggcgacagagtgagactcggtctcagaaaaaaaaaaaaaagagctgcttcacatataaatgtctatagctagtagcctggccctttaatgtttaatttgaatagatatatctgttttccgtgaattatcttgaaagttttaaacagaatgacctcatagtttttaataaagaatattatttacctaaaatgtgctagtagcatcttgcccagccataaagcaataaacttctcaataatcttaattttgatatttgaataaataatggaaactttctgtattaagggcatgtatcccatcaattggaatcagtaccttaacagaaaaaggcagctcttcaatggaattaacgtgatataaaatgtttgatataggcagtacttttataaaaaaagataagctggaaattgctccgtgtaattttttaaataaaaagtcaattatggtaaacagttttatgggatatttgttcaaactcttcacccattacatgcaaacatttatgtaaattttagtagttgtttggaagggttgctgaagtcttaaaggtcatttacacctctttccattccagatggatatctcct

SEQ ID NO: 124981 - DNA, 1001 bp, Homo sapiens
tgggcaagctgctccacctggattcccagtgtatcccgcgtttagcccactgcagatgctatggtggcaacagatgtatgctcatcagtattatatgcagtagtaagttaatctgagttcattttttaagttactcagtgtgttatttgctttattttctttttatcctaagtaagttgatttggcatttcatttgtttatgtatttaatgttgttttgactaaaggaaaaagggttcacctccagttcacatgaactaaccctgcccttggctcctccctgtcttccctaattacatttagcagtattcagatttttaatataacattttataaatttaagaggagaaaacttaggaatgtttcactggaaggcagcaaatatacatgaagagttagtcaaatgagtaaaggaatagaatcatgtcagggaggccatagcttatgtagggctcaagtgcagctaatatgcttacttgactctcagtatttagtccgttttgattctggtcagcatggaacagtcctagcattgaggacactttctcagccttcattctcctcaactcattctgcattcatttaacatggattagcttctctttaccattctcctctccttgtttctgtgattcttttgtcttccgtaccttttttatctttctggtcactctttctgtgtcctttaatagctcattttattaacatttctttctcagttcatcacgtatttgttactacgtgcttctcagcactcatagtcggtagagaggatgggatttagttgttggggtagttctcttggatttcttttttgcgtggtcttagttgttagctctctgtggatgaatcctggttcttcatctcctgtgcttcatcctgtgtctctgctttattgttggaagatttccataggggaatgagcctttacctcaaattcagtacatctaaaattcaattcctctgttctttaagtgccttctcctttctcacttcttcgtc

SEQ ID NO: 124982 - DNA, 1015 bp, Homo sapiens
tttcatataatggaggattgtgcatttgttaaaaagaatggggaaaatatttttatgctgctaagcagtaatctccctggtttattaagtgagaaaacaagatgcaatagagtaagtatactgtactactttttatgtaagaaaaggaggaaaataggagtatgtgtgtattcagctttgttatgttgttaagcattgtaagggcaatccaaaatcatagaggggacaaggacagaactaaagcctctttgaatgcaccttgtttatagtttttaccttattgccattttttgttagatataattataaaaaaatagagaaatctctaaatgaaaacaagaatttaaaaatgtcaggatgatgacacagttacaagaattattatttcaagtaactttgaaacactgtattttgactagtgacctatatcctaaggacagagaagatcaatgagaaatcttaaactttgttcaatattgttagtaacaatcttgttattgttaatttgagattacatgtagtaggataaaacaaattagtacatttgctaatggcaggtatttattagtgtcattagcaagaaagattttcagggtgagagaagatacaaataaaatgagtgaatactatttaattggaaatgtcacagtgaactcaggatttaagtttctctttataaaaatacatattttctagctctgcttactgaagaagtaatgacaagtaaaaatcagtactcctagctcccagattttggtctttagataccatttcccattaaaatgaatcatggatcctggagcaatggctgattctaggtctggggcatgaaatgtgtaagatgaacttctggggcattttgtgcctgagagcaaggaagctactattagagacagaggtcatgttaaagtgatgcaggagccaccttgtagggactcctactggtcaaaaatgtgcaatttgaggttccccttgtcaaaagtcctcttgtcatacaaaaaggaattggaatttg

SEQ ID NO: 124983 - DNA, 1833 bp, Homo sapiens
gcctgggcgcggagggcggcggtggcgggccccgcggccttctctcaggtaccccagtgcccgctgaccgccctgagcggcccagctgcttccccgatccgcaccgcggggccgtggcgtaggggccttgttgcgttccagcttgggggtcgcggtggggcggggcagtgaccccgggccggccgttgtgccctcatccctcccacccttccttcgtatagcttcctttctcctcacgacggcctccacagtccggagcccggcggagcccggacctggcggggagagctgcctccacggccgggcacccagaccccaccgtcgcagtcgccaccacctcagtccatccttggtaccggcaatgggcttcgtatcctccagtgcacttgtaactgacttggacacggaatactaagaactcacttctgtcctcatcccagtcgcgccggcggtgaccatctcggctcttttgggcttaactgccgctcctctggactctgtctgactttgggggcaccatggaccaaagtgggatggagattcctgtgaccctcatcattaaagcaccgaatcagaaatacagtgaccagactattagctgcttcttgaactggaccgtggggaaactaaaaacgcatctatctaacgtttaccctagcaaaccagtaagtgtgtaaaagctgggggcagctgctctgaccagcagcttttcgtgccgtgtaccctcctttttcctgcttctcccctccagtcttgaatcaaataggtctcttttggtagaccgcgaggtattttgagttctgaggttgtgtctcctgagtgttcgaaccatcattaatattttcctgatgaggttcagttaattagtaagaggaagcagaaatatcaagggacttaagaattggcaggcaaagaccgggcgcggtggctcacacctgtaatcccagcactttgggaggccaaggcgggcggatcacgaggtcaggagttcgagaccagccttaccaacatggtgaaaccctatgtctactgaaaatacaaaaattagctgggcgtggtggcgcatgcttgtaatcccagctactcaggaggctgaggcaggagaatcgcttgaacccgggaggcggaggttgcagtgagccaagatcgcaccactgccctccagcctgagtggcacagtgagactctgtctcaaagaattggcaggcatggaaaagggactactttctttggacttaaagtcatcaacctaatatgcgagtgagagatatatcctttcttaaaaaaaaaaaagataaagcactacaacccgtatcagagcttttattgcttattacactaaaattccattttactttcaacacttggcccagaaacttaaacagaaattgaagatttttttttcttagaaataagtatgtgtcccctataaaaattatactttcaaggttactatatatgtttcaaggaccaaagaattataagttgtagattcgttttcaccacaacccctttcaacatttttctcctgtagaggatacatggacattagtttaaaagagaactgccctccaccccaccaccatttggtgcatccctctcatatggcttttccattctgtgttccattctgaatcataactggatattgcagagataataaataaaatatagacagtacagctccatctgtccccaaagtcagatttgaaaggccgtggttggtaatcaaggagtcttggaatagtttagaaaagaagtataccgtcatgtagagtactgtatatgaaagtgaggctttcgcattctccactgtatacattttttattctt

SEQ ID NO: 124984 - DNA, 1044 bp, Homo sapiens
tgacagtttgaattgaacgtgaggagagccgaggcggcggcatttcctgtgccgcggcgggctggcccccggcgcagagccgcggcctccgcggccggagcagcctgagcgtggtggtctcagccctgcccttgcttctctccgtcccttcgcctttcctcagtctcctcccgggcccgccggcttccgcggccccgcttcctcctgtccccggccgcatccccgtcggcagaagtcccctcgtggggcagtgggcctggctaggagggtggggacgagtgtgaacgctcgggcgagggtgctgtgtgggccaacccgggcgggcggcggcggggagggaggaagaaggatgcaccaggctgaggctgtggtggaggcggcggcggcggctgcagccgcagctccagtcaccgcgtcgcctccccgctcctcctcccgcctctcggggttgcctctctccaggcgcagcccggaaggccggtggatggcgggcgagtcttgagaacggagggagaatcggtagtttggtttggaatttgggcttaatttttaggagtaagggaaagagaacgcctgggaagggcgccccccggaggagatagaaagggtgggaagggtccttggaaaagggagggagcggagatgtggagtggcgaagtttagggaaattaatttttgaaaatatttcaatattctcagttattctcttaacgagccctttcatttcctttcctcccccacatgttggaaaaagaacaggccatttcatttacattttccactcctgagttccatttcagctgtgtgtatagtaagaaataagcaaccgagatttttctaggacatttccatttgctgagttacttttgaagagtacactgtttcaaatttgggtttttacagtcctaggaaagaatttgtgacgtccaggtgttttcttagttactgaaataataacttactacatttcttgagtttattgctaaatagttcagctttaagaattctttcttctggcttttttattttgatgaaaggaaaaaa

SEQ ID NO: 124985 - DNA, 1666 bp, Homo sapiens
taggcttacagaattcaaattcacaacaaataacagaaatgttaagttgattttaattagttcttatcctttaaaaagaaaggatattgtctttttctaatgtagcttaacaatttttgttgcaggctttggtttggagatatttgatgcatacataatacatgaaaggtagtgttaaaagattgtatttcagaagtttgtgataaaattggttgttcagatttgcacattgtcccgtagaagtcattttaagtaaatccatgccagaacttctgaacaagtctgaggcaagttaggaatccttacagaacctaggagaatttagaggaatatgctaggacaacaacaacaacaaagcttgggggagaagagggaggaagaagagttacatctatggcttctaaggtctcagtaatggagagtgatcagatgagggaccagtcagaataaggatagtggtagagcagattagtttcagactttgtataatttgatgatatacatattcattgtagactgtattctgggaattgccgatagagaattcctacctgactaaattgcctgctgagaaatgtgtttcacattttgaattaataagctatcttcaatttttgattataagttgaacattttaaactaatgatttatgtcttttactaagttttgagacaaaactttttgtatacttctttttttgtactaagtttggactgtaaagataaactttattatacaatagaaactgaagaaaaattatgtttttaaggagcagaattgtaaggtagtttgattatgggtttagttcgctatatgagagcatactgttaaatgtagaccattgaactctacagcagtgttttgaagactgcaggttgtgacccattagtggacattgcacttaatattttgagggagattaaattttctttcaggtattgtgtactaggtggggaagtaattttttttaaggattgtggtcaaaatgtacagtatggatgagtcaaatctaaggtcttcgaaccttatgttaggggttggaggtcttggtgtgaggaaggaagactttaaaattaaagactgttaagtccgtgtggctttttcttactttggattcatttatcctgtactccatgtagctcgcatggttagagagatctgaggcctactcctatttgagaggatgttatcccccatagccagaaaccagggtggcttccaaaagaaaagggtagcattcggtgactctgctttaggccttgaggatgaatcttttctttgtttttgtcttcctgtgtccttttgcatcatcagagatctggagactaagctttgagcatgggcttggggaagaggggccaaagaggcagcttggctggcattaagtgttgaaggccgtagaccagacacacactaaatccttgtgacttacacttggtgcagtccagctatccagatgtagggattacacattggggtttgagttcaaaatcttaataatgatttagaacatgggctttgatgttagatatggatgcaaatcttggctttgctactcaatagatacaccagtcagagtaggttagattgtaattttaaaaactacagttaggcgttgttaacaatacggtacattgagaaatcatagagtattttacctacacaa

SEQ ID NO: 124986 - DNA, 1793 bp, Homo sapiens
ggagggaacaaatgctgtgccctaacatagtagaaggagcaaaagggtcaagcacctcccttgcacctcttttataaggtcattaatcctattaataccattactagtgattaagtatcaacatacaaattttgggagaacacattaagaccatagcatatggatagatcatgatatgggatatattttgatttgtttaacatgtctgcctctgatagacattaatttccagtgttttgctattaccaactttgacatggtgagtcacttgggatattgatctcttcacatttgttagtgtatctaacaaatacactaactgttagtttttgaactctttgaagcaggagactaccacttaaaagttgtagtattgacattgtcattatatcaataatgtattgatgttatagtatcataacattgatgttaagtattggtaatattgctgttaagtcattagtttagaacttcaacaatcaagttcattcacttaacaaatacacgttttgtacttgctgtgtgctggccactggggaaactgaattaaatgctgtggcagttgaaatagaggcatggtgattaagagttttcggatctagagtcagacttggattcatatctcagttctaaagcttaactgaacctttggcaaataacagaacttctatttttccttctctgtaatgtgggaatcataaggttattggagaagtaaatgagatagtacatgacaaatccttagcatgatgcctggcatataataaacactgagatgttagcttaaaaaaagttatcagactatattgcagttgactttatgttctgcctccactgtgcttaaagtctaggcctgtgttttgttcacctttgtgtccccaacccataactggcttgcatttagtaaaaaatttgtgatacgatataaaggtatgcagagcatacagtgaaagttcaaagcaggataccttttccatgctggagaaggtgaatctttgaaagtcggtaggagtgattaggtaaaggaggtgaaggagtaaagataattattctagactgagaaattatgttagtatcaggttatgaggttagaagaggtaagtaggcaactggtattgctgtgctgagaatttaaaaatctttattgaaggctttaaaagaaaagtggtaatcgtaagaatcgtgatgataattctctctgttgagagttgacagggcaccaggttggagccattaaattgaaggagtttaatgtagcagtttaggactaaaaattggtcagaagcagggcaatgggaaaggacatgagggggatggttgtaaggtgttagggaagatgtgggtggtgagtaatgagtccagaatatttgagctttctgacttgagtgaatgggtagatgaatagatgctatttcttgaaataggtaatttgaaacatgaaattgagaggcctgggggacatccaagtggacatgtcttgtagggtctcaatactaggaagacatctaggatagaaaataaacattttctgataattgtaaatgtattcatttgtgctttgaatttttatgtttagtaagtgagtttgtgaacagagttgaaggaaattacaataaagtgatttgtgtgaaacttcgttgtccttcaaatatagactgaggtctccagtttctggggtagtactaaaatgtttcctttttttttttttttgagatggagtcttgctctgtcacccaggctatagtgcagtggcgcgatctcagctcattgccagctccgcctcccacgttaac

SEQ ID NO: 124987 - DNA, 1031 bp, Homo sapiens
tccaaaacaaaaaaaaaaaaaacaaaaaaaaaacagtttttagagagatggctaactcaacttcagctgtgggcgaaaaagataactagaatgacttagctggcaagtagacccaccaaaaatacttgtttgtgttagtgcatggtgctgtgctgttagagaggtaattacatagacataggccccacgtcccttccccacccccccattttttttttttaattttggaatagttttggatttgctgaaaagttgaagcccctttctttttgaaagctaaacatgtggtcaacacagaggaaatgcagaaataatgctacagacatgcaaatatagcacgatatatgatataaatgcaccatcaacgttagtactggccagggttaagggaaatgtcaagggaatgggggttttatgcttaatggaaacatcttttatttgaatctgtgttgaaagttttgggaggctccattgctttttaattgaaggatgtgtattctagttctggttggtgggtagtggatttcatttaacaattagaatctagctaagataaacaaaggacctttttcccccgtagggtagtttcctcattgttcttatggcttccagtctcttcccacttcatttaataaataaatcttttaagattactatacctaaaacattacttttacaaaataacttacctattatagtaacataaatatgtctattatttatagtattggcttctagagctcttgttaaaaatattatttcttgggctctatcggcaagattctaattccctacttctagactggggcacagatttctatttttaatcaaaagctccccatattcttctgattatagccaggtttgggaataacttttctgcaagatataagtccggaggccttaataataactatcatctgtagggcaaccactgtaacaactgtcatttattgtacttactgtatgtgaagtgccaaaccctttatgttaattgttttgtatataccttacaaatatcctcatcaaga

SEQ ID NO: 124988 - DNA, 2098 bp, Homo sapiens
atttcatttcatgaataagaagacaaatttcaagaatctcatgcctgtggtataattagtcagtgtgatcaaaggagataattaaaaaggattcttaatatgatatgaaggggatttgaatttttttattgtgaagaatcctttgttattttgcttttttagttggttggtcaatcatcttgttactaactactgtcaattgaaatctttgctctgaggcaggttttctaaatttttatttcattcccttggatttttataattaaccattatattgtcagtcaactcatgctcaaataattttgtccatttaagaattgatagttttattgataatgccatgaaagtagtttgatttgctgtgaataatagtataattttctaaaataggttaatgaagggaatttgaaagtgtgattgaatagtactgttgatacatgaataacttggccctttttgcttttgtcagcaacagaagaaccttgaaggctatgtgggatttgccaatctcccaaatcaagtatacagaaaatcggtgaagagaggttttgaattcacgcttatggtagtgggtaagatatgatttcttactaaaatggaactttggtttaagttttaaacgttagtcaactctgaatagatttaagaaaacactggcacagatatctacagtgatcatatctttgttgtattttctcttatgtgcatacattttaaaatttaactcagtggcataatgggatttatgtcttgcctcttattttaaggtagaaactacaagttgagaaatggtgggtgatagtgttggagtggaactctagagaagttatcttcaattcatagtgctacaaaagaaaatagcatctggtggttacttactactccaggatagttttgttttctggcttatatgctatagtggagtatcatataagcatttaacttaatgtgctctgaattttgaaaagaaaggtaggatagaggatcataataatgtagttgattacccttggaattcattaattgaatgtaagcactggaatgagtaaaatatgactctcctggttctctaattcagtctgagttttcttttgtgtgttattccatgaacacattaccctgcctatagtccatttgaaaatactgttaaggataattttgactgtaggttggtagcatcattattaaatatgaagaaacacactgtgtctttcccatctataagattagttatcttcaataacagtcttactcttaaatgactatacagtattttcacctcatataggctgactttagaacctaagttacgaatattgtatagtgtaactttgttgtatttctgttatttaagaaggtgaattgcagggtagtggattagctatccttaacaaagaaagttgagttgatgcttgactttttaggtagtatacatttttgttaactatgtttcaacatctagtatttttattttggtgctgaattaggttaattgaactagctgtgaaatactcctttattgggaggtagaatattttatctactgactgcaatattttacctgttggtcagtttttggctctttggaagttgtatacatcgtcagagttcacagttaaaacaggtacagaatatgcaaatttgatactttatagcattggttaccttgtctatgtatctcttgttgagtagaagtatggtatatctagcttgcaaactgctgctgtggagtagagatgggtctagatagagggataaaataatgcagagcataccttttcttcggtaggttggtaacatcatcattatatgaagaaacactgtatcttacctttacatatgtaatattaataatctcaagtgacaaactgtagacaaatacaattttttcacttacgggaaaacctcctaggtccattaggagaactgtaacaattaaaaaaatttcctttgactttagaatttttgtttaaagaattactttttaaactatacttagtaggataatgtctggtgatcaaggccagagagttgatttaaaatctctgtggcatttttccaaatgaaaaaaatcaaataatcatctgattttgatttt

SEQ ID NO: 124989 - DNA, 2095 bp, Homo sapiens
gctgatgggtggctgaattagaaagtatgttttgtgatttagaattttatacggagatgttcattgtgattaattctttgtattagcagatttttgctttttatagttgcatgatttcttgttttgatcattcattattgtctattagtaaagaaaaactttatttcactcaagcagcgacatataatccaacttggattttttaataatgacatttttctttgggaataacattactgttaaaaatgtagattattagatacattacttttaatgaatataagtggtataattagaagactgaaaagaatccctggaaacatgagtctgatttgatagctaagcaactgaggacaagatacttattctctgtagcatattttctaatgtcatttcattgtctcaccaagaagtacttgcataaggcaagtttgattatagcatctgttgaatatttaagattgcgtaaagtgggtgagtttaacagatattttcccttatttcttttaggtgaatctggattgggaaagtcgacattaatcaactcattattcctcacagatttgtattctccagagtatccaggtccttctcatagaattaaaaagactgtacaggtatggatattagtattgttaattgataagctggaataatattaatacacacaaagcacatgttgtaacttttattaggcttccttagaggtaagatgcaaatttgtccttagccagtgtatgatggtaaatatgacttcataaaatttaaaaaaaaaagtacagttcatcagaagaattatcttggctagaacttcccaaatttgtctagaggactctcctagagatgacactgtgacatagtaaccaattcccctggagttgtgctatctagtatggtagtcatttgccacatgtttaaataaattaaaattagttaaattaaaaatgcaatttctcatttgctccagatacatttcaagtgctcaacagcccatgtggcaagtggctgccattttttgcagcacgtatatgaagattttcatcattgcagaaaattgcattagatggtgtagagaaaacgtgatttatagaaaagctattgtgatttaaatatagtgttctatattagtcagtgggataataccatatcatagttgaatggcaatagcgattctgtaagactcccaaggtatatgtgatctgatttactagttctcagtctttgctatgcattccaatcctcggtatcctgttaaatttagttcttctagtaggtctgagatgggctgcaatttctacatttctaacaagatcacaggtgatgctgatgctgctggatggtagatcacactttatagagcaaggggctagattctagatatgtactttttattaaatagtacagcagcctgtagccacatgtggctattaatctttgaaatgtaggtggtctgaattgtgatgttctgcaaatataaaatataccacagatgtctaagactgagcatggaaaaaaaaatctcaataattttttatattgattgtatactgcagtgataatattttggatgtatcaggttaaataaaattgattgatttcacctttttcctattttaaaagtggctaagaaaattataaattatatgattgatatggtatttttgtttgtcagcactgctctaaactgttgattaaaaatattgttggtgagctctgcttatgtgatatataggacatgagcagagaggaggcaagtgaacagttctggctggagttggcttcattcaggcagtgatgcttttagctggatttgaagaagtggtagtgatcatcccagtgcacaggatggagggacagtctgtatattctgggcagtaactcatatatcaaactataagatgcagtttagtaactagatcccaaaggagtaattttgtgaagtgaatttcttatttctccttctcaatgtttctattttaggattttttttttttttggtaacctttatagggcttgagatttaaaattacctgcaaaattatgctctaaaaacttgttcctacatgcttatttattttgtgataaatattggaaa

SEQ ID NO: 124990 - DNA, 2583 bp, Homo sapiens
attaataaagaccatgatctcatattctcatccctgggcattatctatttataagagacttgtatcttaaaggagatattcattcacattcacagtcttggaaggaatgggaagctgtgtacactgaacagagagctgatttttagcctcctgtgtgtaaaatagcagttctgattcaagtgaagttttcagtattgatagaagctcattaagattaattcttaacctcttatcttggacctcaggaccctgagttatatctgtgcatttccagatgcgagctgacaccagtcctggaattctttataccagtgcttctcaaacttgagcgcacatcacaatcacctggaaggcttgtcgaaacacagattgctgagtccctttcttcatggtttgctatatagcaggtttgaggcagggcccaactaatttgtatttctatttagttctcagaatgtattactgccagtctgggtactacattttgagaacaactgctctgctgcaaactggttttatcctgtgtctgtcagggtgaaaggaggagagggaagtgttttaccttagttctttcagaatgtttcaagtggaatgaaatggtaccatgttacctccattttttacttatatatatatttttccaaaagattgatgaaaatgaagtgaaaaaaattgaacatttgagctctacttcatgtttcagtatcaaatatagatacccagattaacaaaattttttggaaaaatattgcttacaatgttgtatgtatgttaacagttaaccgttattttataattttgtaccatttgaaaatttttatatttatttatttatttttgagatggagccctgctctttcacccagctggagtatagtggcgcgatctcggttcactacaacctccacctccaaagttcaagtgtttctcctgcctcagcctcctgagtacctgggattataggcgtgtgccaccacgcctggctaatttttgtatttttagtagagatggggttttgccttgttggccaggctggtctcgaactcctgacctcacgtgatccgcccgcctcggcctcccaaagtgccgggattacaggcgtgagccaccacgcctggcctgcatttgaaaatttttaaatcatacttcatgtcactgaaagggtatcatctgtcttttcttgggaagaaattatcctttcttctgagattgaagtccattttaattttctcttaatgtattaagataattcttttgtgcaatgacactgttagattttttaaagttcttagttggaaactacgctgctcccctttgaaacattttattggtccatgaagtgttttttttttttctttccgagatggagtcttgctctgttgcccaggctggagtgcagtggtgtgatctcaagcttactgcaacctctgcttcctgggctcaagcaattctcctgccttagcctcccgggtagctgggattacaggcgcgtactacacctggctaatttttgtatttttagtagagatggggtttcaccatgttggccaggctggtctcgaactcccgacctcaactgatccttccacctcagcctccgaaagcgctgggattacaggtgtgagccaccgcacccagctggtccctgaagttttgtaaatcaaactctgtagatgaagtgggtgcaaaattttgaaagtgagaaaaggtgaaagcagtatgtacttctctggggtaacatacttgatagactccttgaaaaattttcacagagccctatcaggagagtctcctgttgacagctggtccagttttgatagtttttgagccattcacataacatatttgaatgcttgtcttaaactaagttttggggctacaatgatgatagacaaaaagttctcaaagatctcacaattgtgggaaaaatatggacaaacaattatgacttagtgagaaagatgcttttgtaaggtgctgtagaggtgaccttggcaaggtaaattttaatgaagtggtagcaagatggcagtgggttgagaagtgagtggtgagtcagtgaagatgggtgatggctattaaggaagggatgaaaagggatacctaggagtgagtatagaggactcagagagtggtttgatgatttccaaaagagacctgagaatggttatatcctgtggcaagtcattctctaagaaatgagagattgacgatagaggggaaatagtgtaaacggttgtcaagatgaatctaaaatggaaattaatcagttccctagaacatattgagaaattagctttaggaaaaagatatatttcacacacactgtaccatggaaggtacagtgctgattcagacagactgggaatggtctcatttttaagtggagatatgaggtacttcactgagcattgtgacagacatgggcttgggaagagcctactgggaaatgggagaggcatgagactaaggagcacataagaggaatattagcagggaaattcttgttgaggttgaaagtcatgaattttatggtataggaatagaaagatgggttaatccagagtgggatttgagttggaa

SEQ ID NO: 124991 - DNA, 1100 bp, Homo sapiens
ttttagtctgaagtaattatcttagtattttataaataatacttttatttttgtttgaattcacattgtttttgaggtaattttctgtcaactcttaaaactcccaagttcaccatgaagtttttttattatttaaagtaatctctcatttgaaattttaaactgcatataattgttttcatattatgaagtgtgttattaatacacttattagtgcaaataatatgctaatatttagctgtgtttcgacagtaaatagtttattttctttcatttggaaagttttgaataatgaatatttattcaacataatttatatttttgaatatatagaataacttgacatatcttctactggtaaattcattttgcccatttgaaaatactgattattgtcctttaacagtcatcagttaattcatatgtagaattgcagcttgttttgtttatttgcgttctatagctggcagcctgttatcgactacattgatagtaaatttgaggactacctaaatgcagaatcacgagtgaacagacgtcagatgcctgataacagggtgcagtgttgtttatacttcattgctccttcaggacatgggtcagtaccttgatacttctgattccttttttgttgttgttgcttactgttacctttatgtgcatactttagtaatctttaagtttgtgaagtacacacaactatagccattatgaagtactaaatttcatgtagaaatgtcttagttgaaaagccattttaagtcctatataagctaacagtgattttactccttagttcttcattcataaggattttccctgcttcatgaaataaacagtgttgccaccatggtttgaggtctcaatgtggcaaatttagctttcatgttgaccactctgctactaatagaaataccaaataaagagaagcagccataccagttagacatattcaaaataaatccaaagatgctatttattataagtttcatagaaatgattatcaaaaacacttgcatgccaatgttttcttgtgccatttctttctacaataaatctatttggcttctgtttcaccttagctgtcatagacgtgttgt

SEQ ID NO: 124992 - DNA, 2576 bp, Homo sapiens
aaggccctcgctgtagagggtatttcagtgagaagatgggagaaacaaatacagatgctcctcaacttgggacagggttacctgttgaagttgaagatacgtttaatagcgtagcctacatttgggcaaaatcatctaacataaaacctattttgtaataatgtgttgaatatctcatgtaatttattgaatactgtactgaaagtaaaaagcagaatggttgtatggtttctattctatgcgtattgcttgcacactatcagaaagttgaaaaattgttaagtggaaccatagttagtgaggacccatctgtatgcaggcaggcagttatggtacagcacactaagtgttgtcagcacatagaaatatgcctagtctcaaggttagagaaggattcccagtggaaattggatcataagccagtgtcctaaaggatgaataggaattagccaggccaaggagaaggaggatgagaatggaggagggtgttccagctaaggtagtagcctgtggccagatgtcaaagtatgatgctttcaaggaattgtaagaaattcagaaaggctggcacattggaagtaggaggcgaaagaaaggccaggaatgctaagagatgaggttagcttgagaatctatgtcttcacaagctttgtgggccattctagttaaggcatctggcctttagtaagatttttggtcaggtcataactccataagatttggatttagaaagaccactctgacttcagtatggatgattcatgttatagttattcattccaaaggacttggtggcctagactaaagtaatggaaatggagatatacatacatcatgcatacacacatctatacacatactatatataggaataggattagaggaggggaggaatcctaggtttcacacttgagtaatggggaagattgtaatgccattcactgagataggaagcgtagaagagggaaaatgggggttcagatgagcttttgattttaaggagcccatggaacacccaggtagcatatccactgggtaaacacaaacctggaacttaacagtgagatatgagctgtctatgaagatttggaagtcagttgaccaattgaagataattgaaatctattgtagtcataataattgtactgaatgtagagtaagaagagaaagcctggtagggaattctaaagaatgtacttcttaagggactagcttactaagaggatcctgaaaagtatcctaaggaagaagagcttgtgagagaataagtaatggtaagcaccatgatagaagtatttagtcaccttcttgaaagtacagaggcaaactggaggcagcagccagattgtaatgaataaaagggatgttgaagattatcttgtgagcatcttgtcagagaaagatagttggtagcaagaactgaatgtggagttggaagaggactaccatttttcatttttaaaaaatcctccagcctgggcaacctggcgagacattgtgtctacaaaaaatacaaaaattaggcaggcatggtggtgtgcacctgtagtcccagctactcaggaggctgagatgggaggatctgagcctgggaggtgggttgcagtgagctgagattacaccactgcactccacccagggcaacagagtgagaccctgtcttaaaaaattaaataaaaaaaaaaaaattaaaaaccttgtaaattttgagtaataaatatagagataattctaggaaattctattaggagcctttctggtttttccaattcctctttagggccaaaaccctgtgaccagggttcaagggcaggagtcaaagccttagccactccaatgcttcttgaagtcctgttctacctaacttttgctggcctaatacatcttcagagtgtttctgataagtaagtaaagtagttacattgtatttaactagcattggggatgtgaagaatcttgttctcccaaactgatcaattcagtcaaattaaatactgtgtatttcagacttaaaccattggatattgagtttatgaagcgtttgcatgaaaaagtgaatatcatcccacttattgccaaagcagacacactcacaccagaggaatgccaacagtttaaaaaacaggtgagcaggatgtgttaacccaggtttcttataccgttctcataatttgcagtttttactatttttagtataatgtgttgcaatccattcctcttactgctttactatattgtcatttatactgtattagaaataactcttcaatcttctgcctttgtcagtttttaaatatggctgttttaagtgttctgtaataacacccccacacagacaatttctccccatactctttagaattattttcttttttcttttctcttttcttttctttttttttcttttcttttttttttttttttttttgaattattttcttagaatgaattcccaggaagtggattattctttcaaaggctatgattgtttttatgggtctttatctccccactccccattttgtcatggtgctttcccaataaaacaaatttgtacatctgtttcactgtgactt

SEQ ID NO: 124993 - DNA, 2084 bp, Homo sapiens
ccagcattgttatttttattttgaaaacttttttggaatgaagtggtaaccaatcatttctttgtcttttccttttattttcccgaaaggctgaacattttaaaaacaaagtcatttttttccccctttttgtaaacatctgctcaaatcctttgtctttttgaccagtagtacttggtattacccgtatttattgatatgggttctttttattctggatatttagttctctctcattttcacaatattttttctgttttctcttttgctgcttatttttgttttcagtgcactaattttgttttcagtgcactttacgggatatttatagtttaagttattgttcaaacctatgaccctaagattaagagtctcatgctgtatgactgagctagctggaaggccactaaactgtttttctagactcacgtctagttgtctcaataatattgagttacacagtcacacatatttctaatttaattgtgtttggttcgttatatattacattttatgaaatgtaaggtcaattctggaacctttctctattccagtagtccaaaggccagtagtatattgtttaaaccacagcagctttatataatatttaaaagtagattgtaattatctctattgtccatatagtcctattgtaacaaaatactttgtttttcacctttttcaatatgaatttcagaataccttgaaacctgttataaaaagcctgttaaaatttgctttgaagttgtgctaaattcatactaattttcagaaagttttagtacattgtttttactgtatctagtatttttgtgttttacacttacccattcccatttttgttttgtaatgtgctatttctaagtttcaaacactatcatataatacatttctttttgtttattatgtgtttcgatttggatttttactgataaaggtaaaaaagatgaatatgaagtgacctcttctttcaaattggtcacatcctggtggttgtactcaggtcattttaatatacaacctctgactaaaaccattgcttttagagctagctactattactcatttttctcgtcatcatgtatttgtcaattccttgtttattctttttttttttttaaatataggtacgtaccctaattgtaaaagaagtgtggtcctattttttttcagtgacaattttacttctgtttacttctgtctactatagtaaccatgtaacacaatttgttcagggtccttttatagctgctgggaacctttgccaagaaagttgcaccaaaatataagtatagacagggaagctaggtttaggtatattagccattggtttgttatgggttcaaataaggataggtagttgaaaattatttggatgtctgtattctgtttagaattggagtgattttgaacatgataatttaatttgaactaggtcatttctgatgttaataataagttgtcttctctaggtttctgcattctccttattaattcttgagcttcttaatttctaggatgtgttttctccctgtgtccttccctaatcttacacctgttgctcctcaatttgtgtgtatgcacatgtacatgtaaggatttttctgatgaatgttcagggagcagtgctgtacttagttttaccttacttttgccagattctactaaaaattttacgtgagtttagccctgtttattcaactaaataagatacttgggaatttatatctaaaggaagaatctcagtcattgtaaataaatgacctaaagtcattattgtggaaatcaatcagagaaatccctttctggagttttacatcctttttggaactcttttggtatgacagctatatgactttaacacttcggaagtaattggatttggtgtttatatatcaacttcatagttaaaaaaaaaaaaaagactagcgtagtactttaattttagattacaactttgcatcattaaaaaacagtaaaggatctggaaccaaggacccatataggaatcgaagaggcatgtaatgaacataagactaatatactaattatgtatggtgctcttttgctgactacttcttcca

SEQ ID NO: 124994 - DNA, 1050 bp, Homo sapiens
agccacagaattgtgaagggctgaacatggatgaacacaaatccagtcaccaggatttgaatttccaaagttagagcttaacaaatatactattacctggtttaggtactgttatagttggtttgtgatcaagtaggcaagctagtcattagccccccgctttttttcccccaaatgccaatatagtttttaccttttatccccccccaggtatgggacaactttctgtagtgatttttagtaaataatttgaccagtatatgcttgaatattcttaacattaaagagaaaatttaattttatttattgtttaccttggtggcaataccatgtgatggcagtttactaaatatttgttaaatggcctataaaaactaatgcagaaactatcgaaagtaaattttttttttttttggctaacctgttgagtaatgtaactttttttatttttgaatttgtgaggactacagagatgtatttgaacaagaatactttgttttataggaccgtttacctcttgctgtggtaggtagtaatactatcattgaagttaatggcaaaagggtcagaggaaggcagtatccttggggtgttgctgaaggtaagattttcttcagtgaatgactttctaaaatatctcaaaactgattaaaaatttgtatttatagtaagtagtacagtatgcacactgtattgatatagtctagattttcaaggataatactgatttcaggttcttgtagtctcaattttctctttaagtacattggtatttttcaaacctgtatcctaccaagtcaggcaagtgtgtgttaagtcctaaagttgtagtataggttgaacattcttaaagagaaaattcaaaatgtgaattgctccaaaataaaacgttttgagcactgacatgctgctcaaaggaagcgctcactggagcattctgaattttggatttttggattaaggatgctcgaccagtaagtatagcacagatattccaaaattccaaaaaaattcaaaacacttctggtcccaagcatttcaaataagaga

SEQ ID NO: 124995 - DNA, 1043 bp, Homo sapiens
catctctcttttgtagtttacccctctactcccaagtaatattcctatttgtgatacattctttaaaaataaaagtaaagaacctgaaagttcttggctccctttttcattttggttaccttaagattttttctaaagtgattctcccttcactcacaccactgaattttttaaatgtattatagaataaatatattttttaccaataataagatttcccctttcagaatttcaaagttgtttctggagagttcatttgttaggtttacatatctatttctgaggattaaactacaataaggcaataatagagtacacttctctgtcatgccctcacattgagtgtactatgttagtgttaaatctcaaaaaaattgatctgttttgcatttcctcttcttgtttttacaccccaagttcctgtgaaatattttttgaaaagactaggtttagtggaaatataacatatgcggtctgcttttttcttacagttgaaaatggtgaacattgtgattttacaatcctaagaaatatgttgataaggtaagtgcaagcaatgatggaaatagcataagattttctttccctaagtaagagttggacagatttactttttgccttctataaatgtagctaatttaaatttatatcttcagtctagccatgaagtaaacactacatatagatgattctttctccaaggttttgaagtcatgagcaaaagttgcaaagtaatttgtctagggatacataggaaaattagtctctttatcattatactttgtgtcgagatttaatactgaaataactatggaaagtgaagtagaagaggctcttttttcttaatgtgaaaaccttgtgaaaactatataagagaaggctagtttttgagtccaaagctagaatttgaatgttaaaaggtgcacagcctggtagctggtgagtagggcacattttatgtactggaacatagtgaataaaaccagtattcctaccaggtgagaaatccctaaattgtgtcttacacacctgctgaaagagaa

SEQ ID NO: 124996 - DNA, 1114 bp, Homo sapiens
agacagtttgaagaaacagaaaattactctaaaatttccttgtttgaaaacaacttgatatgtgatctgaaatttattattatgtattaataaaaactcatatattaccttagtaatattgctaaaaggcagtgtcttttagattttatgagcttcagtagtggccaatctgcactctgttgtctagtatttaaatagataatataaagatgaatactctttcatagaaaggtcatccttcagtaactgtttttggggatttataggtcttaaaatgtcactggaatctaaatttggtgtcaagttagcttattttttgttggtttactttgagtgtaaatgaaaacagatgaatgccaccttccttaacaatagtcttttgttcattttaaatctgaaatttttgttttggtaaaattttgaattcatattaaaactttttaagcttttttccccctagctattaatagaagcaaactcttgctgtttgtttatgacagaacacacatgcaggacttgaaagatgttactaataatgtccactatgagaactacagaagcagaaaacttgcagctgtgacttataatggagttgataacaacaagaataaagggcagctgactaagtaagtatatatttttttctccaaaaaggtattatttctgtagtcaataatcatattgtttcattttcattaaatttcttctggctactcagtagaaaatttggataatgttctttatgcacagcagcataaatttatattgttatgctttgttaatagtagaagcttttttgaatgaaccattttgatagttttcacttacaaattatgtggaaacaaaggacaggctttaacaaaaggaatatttagatgaatttgttcttggttaccttctctattcctattccagggagtaaattagctggagtttcgttttcttcttttggttgttagagtggtgtaagtgactaccaagtgtgtagctttgccctgttgagcttatatctcaagctgtggtggtttcatgttgggttcgaaaaaagagatgtgtgaggaagctggtaaccatgtctgtgccctactttttaaaaatctgtcattattgaaaa

SEQ ID NO: 124997 - DNA, 1001 bp, Homo sapiens
ggaagagattgtaacacttgaaattctggtaaaactaaaaatattctacatatgttaacttcattactcattttctatttttcatggtaaaatgttgtttgaagaacaaaattaaattattttcttctaatgtttcattctgtgaatgtattttgggaatttttttcccattttccttctacagtttatttggtatgtcatccttaggtttgatatgcagtaggtttagagaacatctttgttttttagatttttttcataaataatcaagttttatatatgaaatatggaaagaagttctaggttataaatatattaatagtgacatatagcatctgatttgttttcatcagctgtttcatagttctgtattataatttttattcacagacatttaatgattacccttaatattcgtgacaggagccctctggcacaaatggaagaagaaagaagggagcatgtagctaaaatgaagaagatggagatggagatggagcaggtgtttgagatgaaggtcaaagaaaaagttcaaaaactgaaggactctgaagctgaggtaatcagtctaatatcccatctcttagcagacattgtgttcctttttaagtagtatcttcagtaaaatttatagataatataacctttttatacatattttttcaaaattaataccctagtgtaacaaaacggataaatttctagaagcaagcaccgtgtttataataaaataatacatacttcaatatgcaagtgcttggacgtagtatattaggtaggacagtgtaatagaatacttataatgaattattagttataatgaacaagtttgagttgtgaaaaataaaattacaaaccattccatacaggtggcataagaacactaaagatgagagtttgggggtggatttatgcacacaaactgtgttaggataataataattgaccatatttatttgtgtatgagtgaaaaagagggaaataacctttattgaactaaa

SEQ ID NO: 124998 - DNA, 2255 bp, Homo sapiens
atctattacatatttaggggtatgttttaactgttgaattatgtttttacgataaaattcttaagacaaaatgttagatatttgatttccaatacaactaatcaattactttctcttaatttatacaaaattcaataatatttgtaccttggttttcttttccttaatagtttcacttaaaactgaaaagtggcattcctataaggattatatagtttatcctcattactaaacattttcagatttgacatttgttctactacactaccctactgttaacattttccccaaagaagaggaaaatagatttgtgaaagcaattgcacttcaaaatgcaaatgacagtgggggaaaaagaataccctgtttgctgccagttgatactttttagtttgtgctgtttcatttgggaagaattgttcttgtatattaaaatggagttttgccttatttttttactgcttatcctggagttttgtcaaatatttgattgtctaagaaaatgctattatagattaacattgtcttagctgtttacttctaaatcttttaatttttttcagtgaaaaagtagtatctgaaaatcccaacattgttgtaattgggttagctgttgttatcatgttgtctatcatgtttataaaatggttactcatcttgcttattttccttttatcctttagaaccttggaaaagaacaagaagaaagggaagatcttttaaactctctattgaccaccagttaacgtattagttgccaatatgccagcttggacatcagtgtttgttggatccgtttgaccaatttgcaccagttttatccataatgatggatttaacagcatgacaaaaattatttttttttttgttcttgatggagattaagatgccttgaattgtctagggtgttctgtacttagaaagtaagagctctaagtacctttcctacattttctttttttattaaacagatatcttcagtttaatgcaagagaacattttactgttgtacaatcatgttctggtggtttgattgtttacaggatattccaaaataaaaggactctggaagattttcattgaggataaattgccataatatgatgcaaactgtgcttctctatgataattacaatacaaaggttccattcagtgcagcatatacaataatgtaatttagtctaacacagttgaccctattttttgacacttccattgtttaaaaatacacatggaaaaaaaaaaaaccctatatgcttactgtgcacctagagcttttttataacaacgtctttttgtttgtttgttttggattctttaaatatatattattctcatttagtgccctctttagccagaatctcattactgcttcatttttgtaataacatttaatttagatattttccatatattggcactgctaaaatagaatatagcatctttcatatggtaggaaccaacaaggaaactttcctttaactccctttttacactttatggtaagtagcagggggggaaatgcatttatagatcatttctaggcaaaattgtgaagctaatgaccaacctgtttctacctatatgcagtctctttattttactagaaatgggaatcatggcctcttgaagagaaaaaagtcaccattctgcatttagctgtattcatatattgcatttctgtattttttgtttgtattgtaaaaaattcacataataaacgatgttgtgatgtaatattgtgtgaggtcttaaatatcctacagtcgatgtacaagagtagagtatgtttgggaagaaacttttcagcttaagtttgcctcctctacaatgacatcttttatatgcttgtctcatttagaatgcatatgtgctgattttctaatttaagagataccatatctctctattcatttctatctctcatttgtatgcttatttttctgagaacattttttttttcccccagacagggtcttgcttcattgcccaggctggagtgcggtggcacaaacacgacttgactgcagcctcaaccctctgggctcaagcagtcctcctgcctcagccccctgagtatctgggattgcaggcgtgcaccaccacgcctggctaatttttgtattttttgcagcctcccaaagttctgggattacaggcatgagccgtcatgcctggcctctgagaacagtttctgactcattcagattaggtatactctcaagtccctggaaactgaaattttttttaactgt

SEQ ID NO: 124999 - DNA, 1044 bp, Homo sapiens
agtgtcagagttgagagaggcctggaggagaggcatgaggctgatggggataggtctcttcccaagagaagcggctcgtagcctttttggactccagtgtgataaaacccggacgtccctagaggagaatccacatgggcctagcctcattgtgcctgcgtttttaggggttcacgggcagccaccagtccccgactcctggttactaactctagcactaggtagggggtgctaatgcaaatttcttaattcaatgggtttctatgtttattgatttattttctaggcggccaagtgaaaggtaattttggacacgccaggcatggaagattcggtgtttgtctatagtaacctcttcagtccctgaatcctgcaccttccgtttttctgtgcttgtacggcctactgggcttcctccctagccagagagctcttctgcagtggtgcggccttcccgggagcctgatcctggcggaccatggggagcaccctgggctgccaccgctccatccccagggacccctcggacctgtcccatagccgcaagttcagcgcagcctgtaacttcagcaacattctagtgaatcaggagcggctcaacatcaacactgccacggaggaggagctgatgaccctgcctggggtgacgcgtgccgtggcacgcagcatcgtggagtaccgagagtatatcggtggcttcaagaaggtggaggacctggcattggtcagtggtgtaggcgccaccaagctggagcaggtcaagtttgagatctgtgtgagcagcaagggcagctcagcgcagcactctcccagttccctgcggcgggacctgctagcggagcagcagcctcaccacctggccacagctgtgcccctcaccccacgtgttaacatcaacacagccaccccggcccagctcatgagcgtgcgaggcctctcggagaaaatggccctcagcatcgtggacttccgccgtgagcatgggccctttcgcagcgttgaggacctagtgaggatggatggtatcaatgccgccttcctgga

SEQ ID NO: 125000 - DNA, 1047 bp, Homo sapiens
gtcattccctaaacaatccagtatggtaactatttacataacatttacattgtattaggcattctaagtaatctaaagatgaattaaaatatactggaggatgtgcataggttatatgtaaataatatgccattttatatcagggacttgagcatcatggattttggtatcacaggggctcctggaatcaatctctgcagataccaaggtacaactgtcatttttattttcccctttgattgttttgatcatccttataattattcaaccttgtgatattctttctgaccaagcgttgaggagcttattcatcttctaggacctatgaatgtgaagggtagagaataggagagtgagcaaagacggctggcctcagcgctggctccaccctgcagcccactgagcaggagacctcacgactcttgtccagtgtgaaggttgtcctgtttttttcttctttgggtttcctagagagatgatgatttgctgaagacattgaactactgtcgtcaggcaagagtacaggaaaagtttacccaaacccaccagggtgtagaagggatcacctgtaagtgactgggaaggtgacccgcaccgtcacattctcactcttggccaaatgtgttggaggttgatggttctctttgcctggtcacaatggattcagtattccagacactcctagcacattgttaatgtttagtaaacatgaactaatggactcagggcctgatccccttcagagtagggtgagtgctttgtctgtatgactgtcctagggtatcaaaagctgtcacagagtagatctcgtgtcctcaatgatagcagcacccattctccaagagctgtgtgttcgtcctgattcacagaaatctctccccttccaattgttcccgtattagtaagaggaaatacatttagtatgagcaagaatgggtgcaggtgatttctgggtggctcttatttacatccatgtgtacctgtaataaaagagtttcctaacttttgggtatgccttcgtgctttctaacagctttcccatttact

SEQ ID NO: 125001 - DNA, 1048 bp, Homo sapiens
tcaacacacacatcaatcattacagatagtggtgcatgctgagggtgatggaggtgaggtgaagagaagcctatttagatgggggtcaaagaatgcctcagctgaaagctgatggatgagaagaagccaggcacggaagaagccagggaaaagaatgctccatggaggaattggcaagtgcagaggccctgagagtgctggctccagacagaaggccagagttctagagtggcgggtgggtggggccgcagagcaaggccaggccagatcaggtggggccttcaagacttcttgtaacagcaggaggaggccacagaaggttagaagcagaggctgaagaaatgacctcttaccagatagtctgactgctgggaggtggtggggggcggggcgtgcatggagagggtcctgggagttgagtgaagaagctgttgcaggattcaagctaaaggcaatgatctctggggagatggggaagtgggcagagatgagaagccttttagaggtaaaaactggcaagacttgcctatattgtggatagtgtgagattcagcaggtagcttgtttgaaatgctctgaggtttctatgagataggtgcagaggcatatataataagaaatcctggggctgacacacatgcctctgtattattttaacatgatgcaaggtgttcaccttacccttcccctcagccacagctgtgtcctgggtgtggggtcttacttaggtccatagcagatggagtatgaggccatggtctgccctcagcagatggggcatctgacaaggccacatattctcttcagcatcaatgacaaatggacccagggcttgctctggggactttaggtgactatttctatcaggagaggttcgcatacattcagttcaacattgagcagctactttgtgcttactacctgatgaggtcagaggcatgggcgcaggaagaccccactttgtggtcgggggctcaccgtctcaaggacatacacattcagcaggtatttccaggatgatgtgtgggatgagggaggatgtgaagct

SEQ ID NO: 125002 - DNA, 1035 bp, Homo sapiens
gcaagtagttgttagatattgttagaatttcagcttagaaaaggagttgcttctatcttttaaactttgagataaattttattaaaagcatttgaaattacaaaatggatgtttaagatattaccatttgcaaccacttaattgtgaaaatcaggaggccaggagaagtggctcatgcctgtaatcccagcactttgggaggtctaggtggaaggatcacttgagcttgggagtttgagactagccctggcgacatagcgagaccccttctctacaaacaaacaaacaaacaaaaaaacaggctttcttgtcattggtcaacctaggcaagataaactggatgaagtatgagaaatgagactgtgagatcacccataacccctaatttcaaatacaatatttgcattcattcaaactgctgtggtattttgattgattaattctgttagttaagattatatatttaaatatataaatttctttcaaatcacaaaagtcccttccaatcctgaggctttttccgcagagagggaaaatgatcactgttactaccaaatacccttgaatactgagaaggaagagtggctgttcctatagataagatgtgtttggtttttagggctgccataatgaagtcccacagactggggggcttcaaccacagaaatgattgtctcacagttctggaggctgggagtttgagatcaagacattggccagcttggttttttctcagtcccctttccctggtttgcagatgactgtcctttccctgcgtcttcacatggtctttcctctgtacccaaaatctcttcttatgaggtcaccagtcatatcagattagagcttaccctgatggccttcttttaccttaatcaactctttaaaggccctatctccaaatacagtcacattctgaagtactggggattagggcttcaacacaggaatttggggggacacaatttagcccctgacaagatcatttaagaaaaattacccaggggtttccttctgggcagtttgtgagcaact

SEQ ID NO: 125003 - DNA, 1119 bp, Homo sapiens
ctgtgctgtcagtgtgcacagatgctgttgggtagccctcctggctgtgactcccttctggtgtcctgtgctcacctctgtgtttggtagctgtggaactcaatgcccatcccagagtcaatcattttgacttaagacaagcgattatatctttgcactcctaacatctgtctagcacagcctgacacctaggaggcagaaaaaacagttttgaatgtgcgagttgagtgtggccaaagtgagaagcacctggagttggcctgtattctgtggctccctcatgtgcctagcccccaaacactgccctcatgttacagggaaatgtggcaagtgaggatataaaggtgtaggagataaagaaatatggcaacattattgaagttaggaaccgtctggattttgtcttggtgcttccaagacctcagcatcacggagcagtgggttgtatgaagttcaaggctccctttttcatggaaaattacaagcacatttatttttaggtcccatgtccctatttgttctttcttcaactctttgtgtggcaatgttaacaaagaggaggaggagagagggcagcatgacaggacagacttgccccatctgttactccttctccaatatcaccagtgaaaaccaggattccccagacttttgccatcccggttcccatctgttgcgtttcttaccattgatgaaagccattgacaagaataaaagtgactgataaaataatagcatgggggaaagtaaaatctacaatatgcttctgggaatttgtcttaccagcgtggataaggttgtgcatcgcagcgttggttgtggaaacagtctgtgtgtccacttagactgtagtccagccacaaagggggacattctgcagctggaacagaaggaagagaaggcccacatggaaaaatttctgttctatagtgttcagagcaaaaagtaaggtacagaacaatatatatcttctttgcatttttgtgtaagagaaaagtaagaatatatatttgtgtttatttgtaaataattgagagatcctgcgtagacaccaaagagccaacacaatggcagtccatggtgggggcacggggagggctgggacagtgtgggaaccgg

SEQ ID NO: 125004 - DNA, 1118 bp, Homo sapiens
gccttctcatcgtgtgcctccacagtggaggctgaataggagtcagtgtgagaactgagaaatgtgaagatgggttagaaaaatctgcaggacatgcatcattccctgtcaggcccttgtgtggagttctctccccagacatttcaggggcctgagatcctgctgacagcctagaatttcagccaggacctctgtatggggtttcctggccaggatcttgcctgggggtgctgcttattttctgcagggacttgggtttctcatcctgttcgctagccggggtgaagcatgcctggggcctccacacggtaaacttttgctgccagagcaactcacaaccaggactgtagcctggttctgagggtgttggagctggcatccaggctctgcgagggtgtccacaggaaatgaactgtacagattgcttttaaatgataagaggcttgtggcaagactgaataattctcagcttgattcaggtactgaataggctgtattttaatctaagctaacgtttcttgaatgactcggtgtccgtgagaaccaagccatgtgctttatgtttctcgttgtttaatcttcaccatgaccctgcaaggtgaaaccgccactagccccattttatggccctgaacactggaccttacaaaggctaatgtggcccaaggtcatgtagcttatacgtggagctgggatttgaacccagaattctcttgagtttggagcccagcttttgaaccgtgtgctgtactgatcccagctcctgcctggcatctgaagcaggacagtcaaaccaacggcttcttacaggcagggcggaggtcatggccctgcaggctccttccagcatctgtgtccttgccctggattaatcaggtgaggcgggatgtgctggtggccactcttgacatgtcagggataagtgttgggttctgggtttgggtctctggctcccaaagagggaagaattttgtgcctggagatgcagggtcagaatgccccctttttgcatggtaagtggtgctcatgacagtgctgctcctcgtggcagggccatgccagtgtgcaggaggcacacagtaactttgaagtgtgggatttcgcctgggttcagggca

SEQ ID NO: 125005 - DNA, 1118 bp, Homo sapiens
attatatctcagtatagctgttttttaaaaagtcaaagacagagaaagcaaaaaaagcaaaaaaagaaatgttaacaataagtgaatccagatgaagggtagatgggtgttcattctaagattctttccatattctataggtctgagatttttcaaaattgagctgggtaaaaataatgctaagaaaatgtggtttgggaaaaccagttctgacctcaggtaacaaagatttcatttttttaagtaagtgaattttgtgattcagggattaggatataaacaaaatcactagacaactagtcagtaagtcagaaaacctagagttaagggacacccacctggttgggaagtatcagtccatcccctcttggcccgtacacaataatcccatcttgtattggggtccttgacaaacctgccaatatctttaaagagttcacaaaaagacatttggctggcttgataaacagtgtagtagaggagggcagccctccataaaaaagggtcttttctaaacagaacactgtgaatgcttgctagtccttcctctgtgggattatttggctttagctcatgttttttacgtccagtccaactgttccatggctgctggaggttgttaatacctcgaaaataatgtgtacctatggagaagaaaagttacatgaagaaaaagaaatgccattcttgttttaattcttcccccaaagttagattccatcaacaatcctaaaaccagccaggcgcggtggctcatgcctgtaatcccagcactttggaaggccgaggcatgcggatcacttgagttcaggagttggagaccagcctgggcaacatggtgaaacatgtctaccagaaatacaaaaaattagctgggtgtggtggtgtgcacctggggtcccagctactcaggaggctgaggtgaagaggatcacttaagcctgggaggcagaggttgcagtgagctgagatcctgccactgtgcccaagaatgggcgacagaccgagatcccatctcaaaaaaaaaaaaaaaaaaaaaaaaaaaaaattctaaagccaaattgatgtgtgcctacaaatcaaaacaaagtagaaaatgacctgatcctaacatctct

SEQ ID NO: 125006 - DNA, 1027 bp, Homo sapiens
atctgaatgatgcctggaatccaggaatctttgttccacttttgctctctctctctatgtgtctacatgtaaacctttcacaacttttctgtaagtctgaaataatggcaaaataaagtggtgcaaattgagtactgaggtggatgatgacctcactttggactaggcaagaaatcttgtaagatataatattcagctggatttgtatttagaaattcaaaggtgatgagcagggcattttggtagtgggagtaggatgagcatgccatagaggtggcaaatagcagggtttattcaggaatgaacagcaggtgattgggttctcatctctgagtgctttccttggcactgaacactaagcaaagtgggtggtaaggtcatttgcagagagtaaacgggtgggatgggaaatgtgatcgagactgtgatagggattcaaatggattctgattcaaattattcaaatggattctgagcaacattaatggtccagtggaataaatttgaaatggaattggctcaatttcttgtctttttctggcaatgttgagcaagccaggaaaacagaacagttagagattagcaagttaagtgcagcaagaaggacaagagaccaaggagaatggtattaaaatagtttctcttgagtctggctgggaaggagcaagtgaggcttaaaggaggatgggcagtgtttgggaagagacccaagaaaggacgatggcaggatctggaaatcttagactattcacagtcttgtttcctcatctactattttaagaagctggattaggtgatctataaattctctgactgctctaaggttttgttttgagacaaagtctcgctctgtagcccaggctggagtgcagtggcacggtctcggctcactgcaacctccacctcccaggttcaagcgagtctcctgccttagcctcccaagtagctgggattacaggtatgcttcactgcacccagctaattttttgtatttttagtagagatggggtttcaccatgttggccag

SEQ ID NO: 125007 - DNA, 2108 bp, Homo sapiens
acgcctggggcgatggatccgtttacggaggtgagtgagtttgcgggtgcagccagccatgacccaccgctctaggcccccacccaccttcctctgtcaacctctgggcgaacccccaccgggcggagggcgcgtgtgtgcgcgcgtgcgcagtgtgtgcgggccggggtcgccgcggctgcggcctgctgtggttggtgggttcctctgagattttgttgtttcggtcctacagataaaactcagggaggaaggctttgagtctgtcctaaaaggctgttgcgagaggtctttcagcccccgtttttaccatgtccctctgcagtcctggcgcagcaagagtgaggcgcaggcctgcggaacgggtcctgctggaagcagctggaatgccctgcagggcggggtccggggccggtgactcagtgcggctgccgccgggaaaggcagtaggatgtgtgatttgcggagttcacgcagcccgcaggggagatgctaatgaaatgacagcaaaacgttaaaataagcaggtgctagaaaccactgcattcgttcataaaaagccagtagttccttgagatcccattgttcagctaactaacgaagaagttcatacccgggactgaccattttaattgaaacaatgcaagtgtaccgagcaaaactatcagctcacgattttagagcaaagaaataaacttttcggtgtttctggggcatatcattacagtacttatttcatcttttgttcctttgagattgcatatgggttacatggttattgtgtcgatttctctagttttagcttttgtggagaatgtgcgttgtcacattcaggagtgttttgttgccagttgtccactctcttttattccaggacagttcctctttctttaggctgttgtgcaaatttcaaactgttagtttttgagtgttgcaaagtggacctaaaactgtttacactgattcaaaaacttaaatgctgtgaagagtggtaattctttcggggagatgtaattataattctataagttatgtatgagatattaattacagatttcagcaattagagtttacttatattcaagcatgacataatctatttttctgtttcaaattcttaatcatcttgggacaaatacatcaatttttttcaccttccttaaaggttctaatagaaaaatctagagcctatttttgtattagccttaaaatagggctggtcatgcaccaagtatctttcacttacactgaggtcgaaaagcgtgtatttattttatctaaactagaatacgattccttaaaacattagccctatgtgtcttcctaagtaacagacaggaacaaagcatttttaagttggctgaaaattgcacttcattttacttaaaaatgtcattctgaaggtagtacaaatctcaactgaaagaaactttacctgtttagatcgttttaggatgtgctcagaaatatgtatggtttatattatgaaaagttagatcacttgcagttggaaaaacagcttagacgtcttttccttaataggtaatgaatgaactacttgaattgattccaactcttgggtgcttaattatagcattcataacatttgcacagtgaaatgagctactggtacagttgtctatcaactgaaagtcagtataaaatgactctctcaaccagggtttcctctcagaaccatggtacacaggaaaattgagagactattttctcaattctcccaaggataattcaatgccaccctacaaacataggaaataagtctatcatattaacgccagcgtattagggcttaattattttggtaactccagttgagaaaggttacaatcatggtaaactctcttttcctcaaacaagactgttctgcattggtcttcctccctgtggtcgctgatactgttctggcactctttttttttttaagacggagtctcgcagtgtcgcccaggtgacaaaaccataaactcactactcataacgtcaagagtttgaagctctactcacaggtgatagtcatcccagtacaagaatactacaaagaaacccagagtgaagtgtaccaatccagaactttctttataaaaacc

SEQ ID NO: 125008 - DNA, 1054 bp, Homo sapiens
aaaagagtcaaatggaatttaatttttcagcctgcactaactactgtatctgagtatgcaaggcagtaataataatctgcatacctcctttagttgtgtgcatttgaaagaaaatgaattgttttacagggtcttgtgtttgagctttactaaaattgacttaaaaataggaacatcagttgatttggagtagaaaggagtattcatgactttatggaatggctaagatttcaatttaaaaccattttattatatgttaatatttagttaaataaaacataagattattttgtttttctttcctcttaggaagtgttttatgttttcaaaggactaatatgttatttatctcttgctgcttaccaccaccccagattttagtggctctattagttttgctgctgtaacaagttatcacaaatttagtggcctaaaataacatattcattattttacagttctttagagacagggtctcactctgaaatctgaaatggattttactgtgttaaaatcaacatgtcagtggaattgtgtttcttctggaggctgtaggggagaatctgtttcctaacttttcttgtttctaaaggccatctgtatttcttggcttgtcctgttcccccatcttcaaagccaaaaatcacattactctgacctctgcttccatggtcatattttccctgactctgatcttcctgcctctgtgttttccatcataaggacctttgtgattatgttgggcctgaccagataattcaggattatctccatctaaagattcttaatcacatcagtaaagtctcttttgctctgtaaggcaacatattcagaggtttagggtattaggacaaaaaatctttgagggaccattattttgcctaccatagtggcttaaaacaatactcttatttctcatgattcagtgggtcaacaatttgtattgtgctcagccgggctgttcttctgcttgtctctgcagtggtcatgcaggaatcttcagtgatctggcagattatctggagctggatggtctaaggtggccttattcata

SEQ ID NO: 125009 - DNA, 1025 bp, Homo sapiens
gggtagaggtggtatttggttacatgagtaagttcttcagtggtgatttgtgagattttggtgcacacatcacccgagcagtatacactgcaccatatttgtagtcttttatccctcgccccccttccgctcttccccccaagtccccagagtccattgcatccttcttatgcctttccatccccacagcttagctctaaatatcttttcattaaggtttttataatataaattgtgtctgcttgaaaagatctttcatatcagatttctaagttgctgaaagagaatggggttttacatacttctggttgtaactaaaatcatttaaaagaatagggaggggtgatgttttattaatttgttgagtatctaccctcaagtttttcatgtgagaaattacaaatttgaatgtcttttttcatcgtttttaatgtagagaaatcttgtacaaaaccatcgccatcaaaaaaacgctgttctgacaacactgaagtagaagtttctaacttggaaaataaacaaccagttgagtcgacatctgcaaaatcttgttctccaagtcctgtgtctcctcaggtgcagccacaagcagcagataccatcagtgattctgttgctgtcccggcatcactgctgggcatgaggagagggctgaactcaagattggaagcaactgcagcctcctcagttaaaacacgtatgcaaaaacttgcagagcaacggcgccgttgggataatgatgatatgacaggtatgaattgtatagatggtatggcccatacatctgttccaataagattcagtttggtatgttgaacattttatcagttaactcatgaaaaataaatgcttttgttttatctatatgttgagtatcctttgcttgcatatggtttgtctaccagtagtataagttggttatgtttagactgaagtagatcacgatgtggttcttggactagttcatagaaacctgatcttataactgtattaccttaatatctgcaatgaaaaacacttgagaa

SEQ ID NO: 125010 - DNA, 1654 bp, Homo sapiens
gcattgaatcccagctgtactacataattagaagtttggctttggacaaggtgcttaatattgcagggctttatttttctatgtgtaaaataggaaaaaaaggttatttggagggctaaataagagtcataaagcacttagcatagtacctggctatgtataagtagttaatctattaactatgaagtacatgatactattttgttaaatttttattgacttaattaaaatgtaatttggtctaatatagttaaaaatttgataaaggtactagtgcaataatatgaataaaactttttttttaaataaagagtgatcatactgctaatacttcattacccatgagtatattatgcagactaacccacatattatgatttaaatcatagcattttttaagttggttttttttcccaaatctttcaaatttgtttgatctattagagagcaaaatcatttcattttcataaatcttacataaaggctatcaagtaaataggacttgaattgttttgttataggactatttttagatattgtgaatgttgtttaccctaagtgttttcatgtttcagaaagctacttctccagtgaaatctactacatctatcactgatgctaaaagttgtgagggacaaaatcctgagctacttccaaaaactcctattagtcctctgaaaacgggggtatcgaaaccaattgtgaagtcaactttatcccagacagttccatccaagggagaattaagtagagaaatttgtctgcaatctcaatctaaagacaaatctacgacaccaggttacgtatttataaaaaatttagttattgctgattatattcaggatatctattctcagcattttaaatattcaattgtgaatggtacagcaatgatttgccagggccaatgcctgaatgttccaaatgagacctcagctttagttgattcaatgaatatttattaacgtagactagcctacttactggttaaaggacttaatatgttacattttaacagtttaaacatgctttttccaggatgatcatgctagattttttttctatattttttgattcagacaaagcatgtttaactggaaatcacattttaggggcataatggagaaacattcttgtagccaagtgtgcagagcagtgcttctcaatcttgagtatgaaggcacctctaatagcagagggaagtgaatgtgcatgcaaatgactccacttctaattttatttatttactaaattgataaatgatagaaatttttgaaaaaattgctgtttattgataaataatagatgtatatatttcgggagtacatttgataacttaatacatttatataattcgtaaagatcaaatcagtgtaacgaggatatccatcaccttaaatacttgtctttatgctagaaacatttgaattcttctcttgtagctattttgaagtatacaatagattattgtaaactatagtcaccctactgatctatcaaacactgggtcttttttcttctgccaaactgtatatttgtactcattaatcaacctctcttcatcccccagttatatttatctgtgtgtatattgtgtgtgagcatttacatataaaacaaaatttcttaccatcgtaaactgatactccaggaa

SEQ ID NO: 125011 - DNA, 2103 bp, Homo sapiens
cctttataggaaaatatatgctaatctttgatatagataagcctatttttttataatacaaccttagaatcctcttaatgggagtgatataggcccaatttgccctactttaaatttacttcatactatttcaatgagtgctgtggggttttttgttttgttttgtttgctgttttttgtttttgagacagggtctcactttgtcacccaggatggagtgcagtgagtggcatgatctcagcttactgcagcctcgacctcccagattcaagagatcctcctgcctcagcccaccaagtagctgggactataggcatgccactacaagtggttaattttagtattttttatagagatgggattcctccatgttgcccgggctggtctcgaactcctgagctcaagagatccacccgcctcggccacccagagtactagggttacaggtgtgagccactgcaccccgctgaatactattttaagacactgtaaagtcaaggtgtccttttgataaaatgaataattcctaattttccttctgaaggaaaaaaaggcaaaattcctttattttcacgttaggcttcctaaaagcagggtaaaataaattgactatagatatatgtaagttgttggaagttaccatggccagcacacttcgtgatgaaggtagatttattaatatacatacagtcaatttctaattatttaaattctggttgttcagtttgagagttttctaagccctactgccctctcctcattctaccttttcaaaatttttttttttttttaaataactaaattctatgagtaggttttagggcatgtacttaaatagaatagtaaactttttaaaattttgaagtatttttatagtctactttgtgaatgaatattcctgatagaatcaaagcattttgaagctgtaatgtagtttagaactttttccatagaaatcgtaataattttttattttgaatagcctccaaaaatgtgtgtgttttctgtaggaggaacaggaattaagcctttcctggaacgctttggagagcgttgtcaagaacatagcaaagaaagtccagctcgtagcacaccccacagaacccccattattactccaaatacaaaggccatccaagaaagattattcaagcaagacacatcttcatctactacccatttagcacaacagctcaagcaggtatggtgtactgcatttaacattattcatcacatggtctctgcatagaacctagaaatcaaaatgggttctgatgccagtctttttgactgagataagtagcatcttggttttctgtatcactaatttcagacaagattgggcacattcagggtggtatggccgtagacagtatcactcatctcaaattagaaatattgtcctgaattccatgtgtattatgaactttttaaactgaaaactgtttaaactttttaaacagtttaaaactgcaaacaaggaaaattttagtagtgtttggatgttaaacatgctaccggctcttgtgtaaaatacagcttttgatgggtttaggaacgtcaaaaagaactagcatgtcttcgtggccgatttgacaagggcaatatatggagtgcagaaaaaggcggaaactcaaaaagcaaacaactagaaaccaaacaggtaatgtaaacaagaaatataaaaacgaacttggtccccaaatagttgggatctaatttgtagttctgtattggcaaataattctttacacatttttcttttccaattaactctgtcacttttcgtttataaatcccttaaatgtgtgtaccaactcttgcttttcttgtgatatttttctatttcagtggaactcttcaccatattcattgatgaccttaaaatcaaattttacaaaaattattttcatcattcatttgatttcagagtctacttaatattccacttagatggtggttctaaaatatttcgagagtctacttttctcaatgatgactgtatacctttccccagataccatgtctttagactatctgggatcctttcagtcaccacatacctcccacattgctctttattccggtcaaagttcattaatc

SEQ ID NO: 125012 - DNA, 1054 bp, Homo sapiens
ctcttaccctccgggtaactgataattaaatggaatcctgatgtgtaggagctgtcaccagatgttataggtgtgggttgagataagtgacataggggtgggtgtttttccctttgtgtggctttcactttgtttttttattgttattttattttattttattttattttattctaccaaatacccagacttcaaggagaggctttcactttgattggcttatctaaaactgagccctgatatgaattttcattctttcttgccacctcctctccaaaaaaatttttacatactgagaattaccaagaatgtgaactagcactgagggtttgtcgtgttctgaacaaggctgggcctattcacatacactatctctttggttctaaggaaacttatacagaataatatttaataataatcttgtttcatttaataacatagaaagataaaatatatagttttgagaaataaaatttacttttcattcgctttttgcaggaaactcactgtcagagcactcccctcaaaaaacaccaaggtgtttcaaaaactcagtcacttccagtaacagaaaaggtgaccgaaaaccagataccagccaaaaattctagtacagaacctaaaggtcagtgtttccagattgttcatggttagtatgtagaaactcaaatgatgtttgtgtgttgattttgtattctgtaactttgctggatttgtttgttctaacgttttttggggggaatctttagggttttctttcttttttcacttttctttgagatggattcttgccctgttgcccatgctggagtgcaatggtgtgatctcttggctcactgcaaccctcacctcccgggttcaaacgattttcctgcctcagcctcccgagtagctgggattacaggcgcctgccaccatgcccagctaatttttgtatttttagtagagatggggtttcaccatgttggccaagctgttctcaaactcctgacctcgtgatctgcttgccttggcctcccaaagtactgggattacaggggtcagccactgcgcc

SEQ ID NO: 125013 - DNA, 1039 bp, Homo sapiens
tctggctaggactttcaatgctgtgttgaatagaagtcattaaaacaggcatctttgtcttgttcctcatcttaaaggaaaagcttttaatccttcactgttgagtgtaatgttagctgagggcttttcatatatggcctttgttacgttgtgtaccttccttctattcctagtttttgagtaattttattggcactttgtttttaaagtaaaaaacaaattgcagagtagtggtatgtatggtatgatcacaaaacaaaacaaaatgatatgtaaatatgcacaccttgggggaaactggaaaaacaaacaataacctggtaatattgctgtcccatttctctctcggtgggggaaaagttaatgcatttatgcctagtgttccattattggaacgctaagcttatgggagttacttatgtcctcctgctcaaggttgtcaccaagaactgatttttcacaaaataaatttgcaacctccagcataaatgggttaagagaggacaggtgttcagggaggggtgtttctatacatttctgggtttggatattttaaaacgaatacatagttttataatcagaaaaaaaaaacacacacaagattccataattagaaaattataggttcttatatatattaatatggtctttcttaaacatttttaggtttcactgaatgcgaaatgacgaaatctagccctttgaaaataacattgtttttagaagaggacaaatccttaaaagtaacatcagacccaaaggttgagcagaaaattggttggtttttattctttatttattattaactttgcacatactataggaaataatatattgatagaagcacatattcaaattgagagtatctctgctttttaaattaaatcagaatacactgtagcttctaccaagatgtggtactgttaacagttactgctagctcacaggcacctgtgaaagtgtggttaagaccctcactgactttgacagggataggaaagttgctgccctcccacgctctgtactggtagaggggtgt

SEQ ID NO: 125014 - DNA, 1491 bp, Homo sapiens
gggttcaagtgattctcctgcctcagcctcctgagtagctgggattacaggcacctatcaccacgcctggctaattttttttgtatttttagtagagactgggctttgccatgttggccagacttgtcttgaactcctgacctcagttgatctgcccaccttggcctcccaaagtgctgggattaccaatattcatttcttagaaagtgttattgaagctgaagattttcttggtttcatttattagtagtattttcttatttttctttttaggaggtgcttttttttaaggcattttttcctatttagtaagaatatgaatattaaattttctttgttatgcctttaattcttaaatatctgagtcacagtgtccacctattgaaatatttttcagaagtgatacgtgaaattgagatgagtgtggatgatgatgatatcaatagttcgaaagtaattaatgacctcttcagtgatgtcctagaggaaggtgaactagatatggagaagagccaagaggagatggatcaagcattagcagaaagcagcgaagaacaggaagatgcactgaatatctcctcaatgtctttacttgcaccattggcacaaacagttggtgtggtaagtccagaggtaagaaaaggctaactaaacaggcccaggacataagtaaactaagtagtattcgtatctcccctttcttttgttgacagatggacatttggctcagtagccaagggaattttgcagacctgttgtctgttctcttaaaagaaaccttaaaactcttgagtggtttccttttgaccttagatgaaatccaaagagtaacatggcttaaaaggccaggcatttgggctcagcttttgactctgccatttgctgactgtttattggtcaggttatttaagctctctatgccaccatttcctcttatgttaaacgaggttattaataatacctatatagtggagttgatgtgaacattgttgtattagtatatcggtagttagctccaaacacatgtaactaacatttagttacagctaactgctgttattagctttcaccctcaattgaataactgcagctctggggattgattcaactagaattttttttttgaagtataagtttcagctgtctttgtagttttatttattcttttatgtgttaggaacttagtttgctttgtttttatgatgaatcaatcagcttactggatttttttcttaatattaatggagaattcattgattttcacagaataaaatgaattatcatttaggatcaatgttaatatctgatgcgttttcccacagagtttagtgtccacacctagactggaattgaaagacaccagcagaagtgatgaaagtccaaaaccaggaaaattccaaagaactcgtgtccctcgagctgaatctggtgatagccttggttctgaagatcgtgatcttctttacaggtaagaacatttctggaaggcat

SEQ ID NO: 125015 - DNA, 1901 bp, Homo sapiens
atgcctggcttttaaaaaaaatattttaattataaaaaaaaatagagatggagtctcactatgttttctaggctgatctcacactcctgggctcaaatgattcttgtgccttggactcccaaagtgctgggattacgggtgtgagccaccatgcctggccctaaggaagcatattaaaaaaaaacagtgtaattgtaatttaaataaaatgaatcagatactttctaaatttctacgttgttggatgtaaccccaattttaactttaataagtatgaattggaagttttttcataaggaataatatttatagcttaattattgtaacatgctaaatgtttttggtgcatagtcgagaaacttgagcagtgaaactaacattttgactttcatctggaaattctagaaactatccaatcaagttagttagaattaaaatttaaagtgaaaatgatgatttaaaatgtgtatattttttctcctctcattggttttcctaggaactcaataacgaaataaatatgcaacagacagtgatctatcaagctagccaggctcttaactgctgtgttgatgaagaacatggaaaagggtccctagaagaagctgaagcagaaagacttcttctaattgcaagtaagtgtgatgcacctgaaagagttccaacaaatttctaaccagggaaaactcattttgatatttagaaatctttaagtttagagaaagggcttttcctagtcatctgttccagtggatctattttttgttcttgtttttataaggtttaagaactctatgtaaaacaaattgtagtttgcatgaaaggtagaagcaaccgaaaggcatttgaagaaatgcagttgtgcagattgaatgaatgaatggatgaatgaatgaatctctatatatacacatgtacacatacattctctctctctctctctctctctcccttccttcccttatcaataaatagctaaaacaacttctgtgaattttgctgtgtgcgtatatgtggtgatgatggggcattttggggtggacagatgataccacacatgaaaactagccgaaagttgatgtattaaattataaggacttggtaaatgagcaaccaaggttttccccaaccacctaccatgttttataaagatagtgttactgatttcgtcttcgctgttacgtacagtttccatatcagtacacttttttgaatttgctctcattagaaacagttacgattttaatatttggaatattgcgttgttttacatagctgggaagagaacacttttgattgatgaattgaataaattgaagaacgaaggacctcagaggaagaataaggctagtccccaaagtgaatttatgccatccaaaggatcagttactttgtcagaaatccgcttgcctctaaaagcagattttgtctgcagtacggttcagaaaccaggtatggtggtgatttttctagattgtgtgttaaattatgaacctcacctagattgaattgtacagaatagaaacaagtaaatcatgcataacaatgcaaagtttgtatctttggcctttaggtccttttattgagatataataaaaataagaaaacttcagatatatatagggataccaatctacacaataatggacattgctcttactgaaagtttgaatataaagttttattaaatgttggatatggtttttaaagttccttttaaaattttatttgtgtggaacacaaatttttttgtgtgtgttctggaataccaaagaaataaaggaatactgaactgatttatacacaatttattttaaaaaatttctttttgaggggaaggagggctagacataggtgagaagcaaatttcaggcatagggaaagtaaatggaggttgtgaa

SEQ ID NO: 125016 - DNA, 1050 bp, Homo sapiens
ataactggcgttgtatcatgtcagaaatgcatctttctagttcactgggaactggaatgctgttaagccaggaaaggccttctttagaatgactttaggcctatctttttccaaaaggaattaggatggagctggtttcactcacttcctttaggctattggtctctttcttctctgtggtgcaagagagttactaagagacctgtacagagatagtttctgctgctgattttgtcaccctgcattataactagcactgaagtcttttccatgttttttatcgggaagttgctttttatgcatacatttttaggtctatatctttaaaaacacatccatcccaattattaaggagtgcttgtacctctttcattaggaaataagttgatttttccccccacatttaaagatgaaggaaaatgaggcagtttttttttctctgtggcagcttaattttcttctactgggatggggtgaggaattgttacttatacttaacaaaagtcattctgaactaaacttaatttcctcgttcttcacagtcatggccagtccaggaggtcttagtgctgtgcgaaccagcaacttcgcccttgttggatcttacacattatcattgtcttcagtaggaaatactaagtttgttctggacaaggtaatccaactttatttctaagggtgtggtgttttttttttaatcttagaaaaattagctcaatggaaatgccacaatgcttttaggtatttgaaatcttcgactgaaaacatatgttcttagaattgcacatttttgctaggtatgagtgtacctaaatgtttttttttttttttgtcttggaagtatgtctcccttttaatagttagaacttcagtggatgcttgcttattctaagtatcacttctgactaaagaagtattacttcctgcatttagatgttaagtttataattttaaaacataatatcttgcctatttccatttctttgtggttttttttgtttttttgtttttttgtttttgagacagggtctcactctgtcacctaggttg

SEQ ID NO: 125017 - DNA, 1556 bp, Homo sapiens
tcactcttggtgggtgtggatatctaattttctctgcaccattttttgaaaaggctgctcttccgctttaaatggtcttggcatccttggcaaaaatcagttggccataagatgtatggctttatgtctggtctctcaattccatttcttttgtccatatgtctgttcttatgccagcaccacactggtgtttttgattttgtttctttgagacaaggttttggtcttttgcccaggccagagtgcagtggcatgatcatagctcactgcaaccttaaacttttggactcaagtgatcctcctgcctcagccttccaagtagctggtactacagacatctgccaccacacctggctaattttttcatgtttaatagagacgaggtctcgctatgttacccaggctggtcatgagctcctgggttcgagtgatcctcactccttggccttccaaagttctgggattacaggcgtgaactaccatgtccagccagcccacactgctttgattaccaaagttttgcgttacgttttgaaattgggaaatatgattccttcaactttgttcttaattttcaagattgatttggttgtttggggtctcttgcaattacatatgaattcaaggactggcttttccatatctgcagtttattgttctttattgctgggtggtattgtgtggtgtgaatttacaggttggtttatcagtctcttattgagtatattctcctgttgatggagaatagataaacccaaatattgtcgtctgttttctttctcacattaacttgagacttagggcttttggttttgtcaagctttaccttaaatgaatttattcttcaaaagtatttgttggtaaggaaccaatggctttttggccatgtcttttatactccaactttagaaaatgctctgttttcaagttgtaatagtctctgttcatgatttatacatgatttatcaagaaaaatcacactttgaacctgttttgcaaataatttacctgttttctttgcaggtcccctttttatcttctttggaaggtcatatttatttaaaaataaaatgtcaagtgaattccagtgttgaagaaagaggttttctagtaagtaacatcacttagtctttaacttccttttttccattttgtgaaatacagacttgtttcccataggaatgaaatcctttgtgattaagtaataagttggttcagtaaagatttgttttatgtcctttatatgccaatcactgtgctgccattggaatgtaaaagaccacaaaaaataattcctctgctcatgagtttttagtttagaagagagaaatacaaacgaacagacaagcacaatataatactctaataggagaaaacagggtgcatcggtgtcaattggtgggacaccaggtcttgactgtgtgtggggtgggataaagggaactgctgagagaagtaatttctaaactgagtaagttaatctgagagaaagatgagaagtgctccagatagggggagaatgtacagtggcttgaagggcccttctttgtcactcc

SEQ ID NO: 125018 - DNA, 1208 bp, Homo sapiens
gatcataagttaactcttttctaatcctgttagaaaacttgatctcctgaataaagattaaatgccagtcttgcatattaagataggtttaacttaatatgttatcattaattttttaaaatatataaggtatggtaattttgtattattaattctccaacacttgaggcatttctgttgtttaaggagcatttgattagggacactatactttttaaaagtcttaaagtaggtagaggtatttaatttagggttgatatctgaatgtttttaaatgcttgtagatgatgttgaagtaaatttctgatatgaataatcagtgatttttattattaagataaaagacatgataaaaaaacatacaaataggttttgagatatgaaatatgtcaacatactacagttagtgtacagaatcagcatttcattgttaggacattttcctcaactttctaaagccagcatttcaactgacttttccagaccatatttgaagatgttagtggttttggtgcctggcatcgaagatggtgtgttctttctggaaactgtatatcttattggacttatccagatgatgagaaacgcaaggtaatttatatagtactgtttagtggtgaaagccctgattgactttcgtgtagtgttcatgcaaatgttccctctggcccccatcactcacccaaattaataaccctttttgtgtactcactaagccattaaaaatgttcttgttggccaggcgcagtggcttacgcctataatcccagcactttgggaggccaaggcgggcagatcacctgaggtcaggagttcgagaccagcctggccaacatggcgaaatcctgtctctgctaaaaatacaaaaattagctgggtgtggtggcaggtgcctgtaatcccagctactcaggaggctgaggcaggagaatctcttggatccaggagaccaaggttgcagtgagccgagatcacgccacggcactccagcctgagcgacagagcaagactccatctcaaaaaaaaaaaaaaaatgtttttgttgtaggtgtgtgtgtgtgtgtgtgataatcctttaaaatttttatatcctatccattccctatgatttgaccactcttaaaataccttaacatgtatatttttccttcttttctactggatgtttaattatattttttgttgacatttgaagttggaaatgtttt

SEQ ID NO: 125019 - DNA, 1035 bp, Homo sapiens
ttgtattttgtttctaaaatttaataataggattttgtgtaatatatcatgtttttaaagaagttaatatcattgcccaagtaacattatttattatccccaaactggaaaatagaaataagcagaattaaaaaggaaaatcatccataatagacatagctattgttcatattttggttagatatgttttcaaacttttaaaatgtataatatataataattattcatttatgaatctttttaaaaggaaaagcatgctttttataatctgattttttacttgataaaatattctaacatctttcagcatcagtaaagataagtctaatgctgtgttggatagctatgtgtgttacactgtagtcattacaattattaatattttaaaaatttgtgaaatgtttgagacatccaaaagggcgtaaaataatttcatcaacctctgtgttattattccagttgaagctccccatgtaattctctctcccgcagagataacttctaccctaaaattgtttattgttcccatgcacttatttaaatttttattatacagattgaatatcccttattcataatccttgggatttagaggcgtttcagatttgggattctttttttttttttttttttttttttttcagattttggaatatttgcattatacgtgccaattaattatctcctaatccaaaaattcaaaatctgagatgctccaatgagcatttcctttgagcatcatgttgactctcaaaaagttttggattttggagcatttcagatttcaagattttcagattttggatgtttaacctgtacatgtatataaacaatatatgttgctgcaattgcatgtttttaaacattatacagataataacatattgtatgtattattctgcaacttgccttttttgggtcagtatggtttgtgaaatttgtctggggtggtatgtgtagctttagattgtcccctcttctctgtatagtatacttttgtaagagcacattacaatttatccattctcctgttta

SEQ ID NO: 125020 - DNA, 1137 bp, Homo sapiens
atggctgccaacaatccagggcagttgtctgcccttatctttcatagatatataaagaaatatttacacatgaaatccaatgtctaggtttccttttatagaaaggggagaagtgggtaagttgtagataaaaggcacttgagtgtgtttctcattgttatagctggttttggtacctggggctcattatactgttgtttgtattttttatttgaagttcaccataataaagagctttataggatagttggcaagagctaccagttgatatttttgggttttatttttatgtctagctaggaacaataataaatgttaaatatgtttctctaagcccagtgtaactaaattttaacttttaaataatagctttttaatatttaatttgtaccaacttaaatgctgcttaatgcttactgacttaaatagtcttattttctactaatttctcttaatttgtttttaaagaatcccataggaaggataaatctggctaattgtaccagtcgtcagatagaaccagccaacagagaattttgtgcaagacgcaacacttttgaattaattactgtccgaccacaaagagaagatgaccgagagactcttgtcagccaatgcagggacacactctgtgttaccaagtatgtattggcctataaatatttctatcaactaagcaattgattgcccactatgtacttaccactatgagaaatatcacagatggtccttgacgttgaaaagggcacagccttagtgagaaaacaaaacacacacaaagcagtaagtgaaccatctataataactaaattaatgtagttaaggaaagtataatactcaggttgtatcttagctaatgttttccagtatgctcacagtggaggcattttcatggcagttagataataatctttgggttaagtttaaagatttcatgcgtagttgaggagtcaagcattattcaaagagactttacacatcccttccttccattcccagaataccctcgtgtaatcagatgactcacagaaacaatctcattctattctgcaaatttctggatggagattaacagaataaaacttttgggagtgccccttttttaattaaccctgatctcaagtgtaagatacgaag

SEQ ID NO: 125021 - DNA, 1195 bp, Homo sapiens
tagcaagagtacatgggggtatggaatggagggagaagaattctgacctctttggttgtttgttcctgtaggaactggctgtctgcagatactaaagaagagcgggatctctggatgcaaaaactcaatcaagttcttgttgatattcgcctctggcaacctgatgcttgctacaaacctattggaaagccttaaaccgggaaatttccatgctatctagaggtttttgatgtcatcttaagaaacacacttaagagcatcagatttactgattgcattttatgctttaagtacgaaagggtttgtgccaatattcactacgtattatgcagtatttatatcttttgtatgtaaaactttaactgatttctgtcattcatcaatgagtagaagtaaatacattatagttgattttgctaaatcttaatttaaaagcctcattttcctagaaatctaattattcagttattcatgacaatatttttttaaaagtaagaaattctgagttgtcttcttggagctgtaggtcttgaagcagcaacgtctttcaggggttggagacagaaacccattctccaatctcagtagttttttcgaaaggctgtgatcatttattgatcgtgatatgacttgttactagggtactgaaaaaaatgtctaaggcctttacagaaacatttttagtaatgaggatgagaactttttcaaatagcaaatatatattggcttaaagcatgaggctgtcttcagaaaagtgatgtggacataggaggcaatgtgtgagacttgggggttcaatattttatatagaagagttaataagcacatggtttacatttactcagctactatatatgcagtgtggtgcacattttcacagaattctggcttcattaagatcattatttttgctgcgtagcttacagacttagcatattagttttttctactcctacaagtgtaaattgaaaaatctttatattaaaaaagtaaactgttatgaagctgctatgtactaataatactttgcttgccaaagtgtttgggttttgttgttgtttgtttgtttgtttgtttttggttcatgaacaacagtgtctagaaacccattttgaaagtggaaaattattaagtcacctatcacctttaaacgcctttttttaaaattataaaatattgtaaagcagggtctcaa

SEQ ID NO: 125022 - DNA, 1102 bp, Homo sapiens
cctctgtaacttgcactaaaaaataagggtgtctactaattagggtcaaataagatatccactggacagcccataatccagtgccacagagacatgaggtactgcctccccatcccatgggccaaccaagtatttcgtatggctttcagttcaccaactgcagggaactacgtggtcagagcttcagatactcagaatgtcctgccaggccctcagtgtgggataattcggtcagacctgagcgtttcataaacctagaaaaggggattaggtcaaccgccacctcgaatgttccctgtgccccatgcagggagcatttcataccagggccaggagaaagtactgctcttaaagggctttatccaaggcatcctggttcacattgagctgtaggatacttgcatttctttttcctgagtccagatgaggccacttcccccagccccatccaggcccatgcccacagctctatatggcagtgagttcctcagggctcctcctcaactctgggtctgaatttctagaggctcagaaaggaggaaagcacaggcattcttcaagagcaatgctgcatgaaaaatcaggggaacaccctggaaatagtgactttctgcaagggaggcagggaagcccccaggtgcctctaaatgctgctattgccgagtggatgcaatctaccagacctctctgttttccaggccagctaaataaagacatgacctatgcgcagttgtactccttcctgaactgcctccaggtgagcactcactggcttgcttcaaggcccgcttacctaccctgatcctctgtaatcaaaagtgttttcccgctctcaggtcagcccctgccacggctggatgtcttccaacaagacgttgcggactctcacttcagaggtatgactgtcacaggccttttgataccatctttgatcattctttccctgtgtttgctgcagagttttcactggggatgggatcctggcaggcagatggtctccaagctggtgaataacaaaatcaaaccttccaggtgcttgaggagccgagagaacctggtgcaccctgtctccctctgtcttgctctgggtctgtcctctgct

SEQ ID NO: 125023 - DNA, 1044 bp, Homo sapiens
tcctcaccaactccactccattatagcagcctgctgttcagctgaatttctctatcttagaagcacggccgggcacaggggctcacacctataatcccagcactttgggaggccgaggtgggcagatcacctgaggtcaggagttggagaccagcctggccaacatggtgaaaccccgtctctactaaaaatacaacaattagctgggcatggtggcgtgtgcctgtaatctcagctacatgagaggctgaggcagcagaatcacttgaacccaggagacagaggttgccatgagctgagatcgtgccactgcactccagcctgagcgacggagcaagactctatctcaaaaaaaagcaagtcctagacacgtgtgaaatcaacagtaccaatctgtcacgctgaaagcctcttttgaaaatatctgctccattaatgatcaactctgatgtaacaacaaatgggtgtgtcctgatcagttatatcacaagaaatgtgctactattcactgagaacccaagattgggaattgtgattttttttaataaaataaggcagaagcacagttaccccataagaacatcgatctcactcatattctgatctactttacttcctcatgtggaagagacagcttagacgcacagacctacagcatttgcaaagaaactgcggataactcatgggcaatcctatctatgcccatggcccatagcaagaaggtgattttgctaaactgctggtattggtagtaacttcaaaatggtgaattccttagttcctatataacatttggggaggtttctcaaaatctgtgtacacccctaagaatatgatgcatgtatgaatgccatctgtcctgtgattgtggccaaaaaaaaaatggtgagacaggatttagagcaactccccagtagcaatagccacccactcactattttaggaaacaggaaagtaaggccaaacgaggttcacgatttgcccgaggcaacagggttgattaatggcagagctggactccaccccaactgtgctagaagtggg

SEQ ID NO: 125024 - DNA, 1026 bp, Homo sapiens
ataaatattctatacagaataaatgctctcctcttctaagaacaatatagattttttttactaataaaataattgctgccattaactgagctcttaccaagtgctaagaacactttatgtttatttctgttaatcctttcaacaacagacattgtaaggcaagtattattaaatttcttcagtactaatactattgattgtaatagctctagggagtgttgagggagggaaaaggaaggaaaaattacaatgttcccattgattgcagcattcaactcaataccaaatgcgttaaaatatacttctcagaattgggcattaaaataatattcacaccgtagcagctggggaaatggaggcatggagaaaccaagactctcttcctcagccacacagatagtaagttacagaggagacacttctacccacgttgtctcactccactcagataccaacaaagataatacagtcattgggctatgatcccagatgatctgcagaaagagatcggcctcatccctctgcaagttgaacactatcaatagttaatggacagttacagtcaaatctggccatgtgactcatcacagatacaaagtgaacatcaggtgtgtggctgcactttctttttcctttagtgacatactgaaacagccccccaacactgtcaaataccctctgtcaatgaagattataaaaaacaaagcacaaaaaaaaaatcatctgtgaggaatatcatgcagccctagaaaatgatggctaaaagtcaaatatatttttatttggaaagacaaaacactgccgaaagaaaaatcaggatataaaattcaatcatacagtttagtttctaccacatttttcaaagaaagggaaaaaaaaggtatacgtaggaaagattggtagaaaatatagaaaatcattatgtttgataaattacgagtgatcgctttcatttttttccgcttttctgtttcctgatgattttatttgtatacagaaataacctttaaaaaactcgacagaaac

SEQ ID NO: 125025 - DNA, 1039 bp, Homo sapiens
tccttgggcaagacggaccatctgtagacaccatggatcctggtggagggactctccctgccatatattgacaaagcccttcacctgcaatgacttccccttgtccctatttatttttaatttttcatttttaattactcaaaatatgaatatattttcattgtacaaaaaaattaatgtgtataaagtaaaaagctgaagtcctcactttttgtccccagttttactccctttcttagaagaaagccctgtgatcagtttagtgtgattccatccaggccctttctgtgtattttcatttgtacatgaagaaatgaacactttgttgggattttcccataaaggctatcatattgtgtttaacctactgtaaatcagtgcttcaccttagccatacttcttggagctcttttccttcttgtccaatactgcatagtgtttcatagcatagttatttttttctcctacaggtggacatccaacttatatccagagtatcattattcttcgtaatgctgcaatgagcattttgtactgactctttggaatatgtgtgaggatttcttaagaaaaaattattggacccaaatgtttacatttttaattttaataaggcctccaaatgggctataccaatttatattcccacaattagtatatgagaatatttgttttcccacacccttgccaatactggatattgttcatcttcttaattttttccactataacaacaacattgtattgttgttctcacttgtaacctcctgactactagtgagtttgagcatcttttcacaggcatcgcccgttgtctttgtcctatctagtcgccctctgcccatgctgcagcacctacccctcagggatcatcccccagcctctctgtcttcagctacatttcttttttatacccctccagacagccccttcatactgaccccccatctaactggatgattattttctgagatcctatcatgtccttcaataccaatgtcacctcacttataatacctgtttactacttgtctcatgc

SEQ ID NO: 125026 - DNA, 1023 bp, Homo sapiens
tcaacaagggaaggtgctcatcataagaggggccctcccagagcctctcactgggttaagggttggtcatttaatttgctgctgtttgtctgaggtgtgaatacttgttctttattagagggaatatccaatctgatacatggtagttgctctaaagtgtttgtagaagggagagagggaggagaggagggaggaaggctgcctcacagagttgtgtaattgaattgaacaatttgtgcaagtttttcctgtctcagtgcctggcacataaggggaaccccgcattagttctcttccccactctcgcttaatgcaagttatctgggaaacagcacatccaagcatcatgagtaggttagacatttatttgtaggacagattcatgcagcagaggctacagaaatgggagtctggcaggaaagtgtgtgtgaaagccaaggaaggctctgaaagttgcataatgtggtgctcccacaagaaaggcactaaggtaatgggagcggtggggacctgagcagatgggaggcagtgtggtggcacggtgggactgagaggcagaaagcaggaggaaccctgcttaccttctgcaagcgccactgcaggacagacggaggaggagccaactagcggaactgggagacccatggttccaacgctaagcaggtagcccttgtctttgattcccgggccttgaaactctccagcgttattaaaaataccaacccaagagctattttctttttttggtaaagtaacaatcccccatctgctttgagactttaattctggggaatggataaaacaatgcttatttaactggtgatgacattttttatctttttccaacagcagttacttagattcctccaagtgactttgtactgtttgaaaataatccattcaggtctaatgcaggtacatgtaatagaaaagggaatatactgtgtagattgtccacagcagtgcaggatggagagagcccaaatgtaaacagtgaaggaaaggcactgaggatactccctg

SEQ ID NO: 125027 - DNA, 1045 bp, Homo sapiens
cgtgaaccttgaagagcatggttcctccttccatcagcctcattgcagctccgcttggctagacaagctggccctatgccatggtcaatgtgcagccatttgcaactgcaaaatgaaatgtgccgattttccttaaggtgctgttttctctcatctcttgtaggaggtgcttgaactcgctttctccatcttgtatgactcaaactgccaactgaacttcatcgctcctgacaagcatgaggtaagggtctcgggggtgataatttatgagataatgttatcttttctcaagaaaaatatagaaagaaattttacttaagaaaaatagacctgcctgaaaaaatgatgaaccaaggggcatcttgctgacttggaggagaatagaaacctcttgacaaactgcccgttgcaacagattcaacttcttagtagcttgattgatagttcatggtaaagaaaaaggatgtaaaaggcctcaaatgcagcaaaggtatacttgttaatccagagaaagaagcggccctggttacagctttggttttcattgaatttttcgtttttggtctggattttcccaagataaactggtctctcttctttaaaacatctgaggaagtaggttttctaccaaatttctttaagctattttaagaggtttagggctgtctctgctgttgggattttattttcgagatgcttttattcctttctgacatcttgttatatgtataatttgtttctcttcttgtagcacgctgtcagctatatttaaaatatttagcataaatctaggaaaatgcatttgtaagataaagtagcagttatggctgatttaactttcttttataaactggaacccaacatcatgcttgaaacttttatttttagatgataccattcaaatttttgttttgcgtgtggttgcataaacagctttagaaaggaagagaacattttaatagaatctgacttttgttccccatttcccctaggacatttagctcatttagaagttattcagtatctagttttcactggtttgaag

SEQ ID NO: 125028 - DNA, 1144 bp, Homo sapiens
aaaaaatattagcatctagattataaatttatgagttgagctccctagggagcatgaccatctgtgtttaatacaaaatcatccttccgagtgcagaaaggaaggctttttggtatttggtaaatggatttgaaatctggtgactggctctgtgcttaaaaatagggattcaaagcagactgtgctgaaattggtttcctatcaccccatcaaaacattccatttagatttacacagattaataagaacatgacatttttaatcccttcgagaaagacgcacttctacatgagatctcagactgggatggacaaccgcctgcctggtgccaccacaggttaaagagcagacactcccagtgcaggagccagcaccatactccctctaaacttgtctgacaatgagtaggacacagatgagtgaatttcagtagttaactttataagggaaaatatgaaagaacttacagctccacagaactggaaagtgaaggaacaaatagagagtgctcgactgtgccacgtttggctagcaggtccccgagttgatacttgctgatccttctgcctgtctcatgtgcagctctgctactggaatagtcacatgcagacatttacagatctgggtttctgggaattctaaccacattaggactgggaggtaatatatctcaaaagacacaataagctgggttgaagtccctgttcctactcactagctgggtagcctcgggcaatctgctcaatgtctttgtgctcctctttcttcgtctttcaaatggggataatgttagttcctctatcaaatagccataaggggtaagtaaaattatacatctatagcactttgatgcttggcagattatcaaacattcattaatgatgtttgctattaattttagctcgtagcgcctcagaatatagattttttttttttttttgagacagtctcgctctgtcacccaggctggagtgcaatggcatgatctcggctcagtgcaacctctgcctcctgggttcaagcagttctcctgcgtcagcctccactgggattacaggcacccgccaccatgcccgggtaatttttttgtatttttagcagagatgggatttcaccatgttggccaggctggtctcgaactcct

SEQ ID NO: 125029 - DNA, 1046 bp, Homo sapiens
tcaaagccccagcaactttccaaaggtagaaaaacgtgcatgtgcatgttcacaaaatatggcacaatttcagtttgtttgtagaactttcaggtaataatccttgctttaaatgggacatggagttttaaaactccaaacaaatctctgaactaccaagtcctatattgagagactgtcaaagatcctaccccactgctgtatgattggaggattctagctaggaccacatgctttgttatcagcacaagtcagtagatcagcaaacaactgcagtacccagaaactatagcatagggactcattttaactcttgtatacatcactcaaaaccttttcctcatgaccttctggtttgcctgtttcacaaactcctctccaaactgtcctccaaggtggggctagtagaacacatgttcaggctttgttattatttgttgactcgtatgtggcgtttcttgtcccaattcattacataaggcaaagattctactgtaaggacagtaagaatgttgaacacacacttgatcttccactgtatcctcggcttcagttggtcaaactctgtgtgcagaactcaactcacttttgctatcacagaaatataaacattctgcaattttcacctccaaattttgcctctttttacaagctctatgtaatttcctgtgaaacaaacttattaaatacattctattcccccatctaaccttgttgacattcctctcctctaatacaatagcctttcagatcaacagggtccccaaacagatacagagatgtattaaagttttctgttatttagtatttgctgggtacttgccacatactaggtttcccttgaggaacccagtctaatgaatgtggccaatgtgaatttataaattacacacagtgtaattaacatagcagcagacccagaatttcatgttgtgcatgctccaccgttccttgtctgatggggtgagtcgttcacttagagcagtacccctcccgagcagtgtgctaataagtgctttggagatggatcctcagataaatcttga

SEQ ID NO: 125030 - DNA, 1047 bp, Homo sapiens
agtcagttcagttgcattttatataggcaatgagctcatgactcctcagtgactggatgtgtttcccaactctctttgatttgcgttgaccagtgctcctcacagtaggggtgctacctaatgaccaacataatctctcaacataatttagggccttgtggagatgcactatttcattaggccacttggatctcatggagcagcagactattcattttctcaattgctcccgaagggatatgcagagctgatgaacctctttacttatactttgggagtaactcatggaccggacaagctctggcttgtttccaggggactcacttgggagtaatggttttcaagtgcatttgaaagccagtacaatagatttgaccatcatagacttgaatatataatatttcagtatacatcgccagctattttcacattgtggtgttacagtgagtctaagacatactctctataaaagtcatcagctgcttgacccattcattgtttattttttcaacaagtattatatgagtgctgaccattctgggctgggccacactaaacactgagctggaagaccataaagcatgcttaataaaggtttggagggtggcatgttgccccattaagaaatatttatgtgatcattttaatctcagcttagagaaattttcaatctgatgccttgatgtgtatttacctgtgtcttgatgtgcattccatcatatctaatgccttgatgtgtatttaccaatgctttggtgtgcactccatcagaaaactcagatttgagaggcaggagacttaacgggggagtgaccctagggaactaagaggaggtggcagcacttgcactttcatgtggagcttgaccccacttctatgtggatgaaagagtcagtgcagtgctggtggtgcggccagcccctggacatcaggaagtaagcctggcaggaatccataccccaatctgtagctgcctagaccaagcttaccccattagaggcagtactagagagtatggggctttggttctagcagagtctgctactt

SEQ ID NO: 125031 - DNA, 1052 bp, Homo sapiens
ccaggggcattccagcatcttgactgtgagcttggagtgtcagcctgggcagcagtcagtatattttagaaaaaggatggaggatgtttcataaactggcaagtctgttatggtggccgtcttttaagaggactcctactgtactcctggatgcgaccataagcagacattatttgcagcttctagaatagtgtttctcagcctgagttctgtggcacctggcagttccatgagtggcctcaggggccactagagagtgttagcagcaagtctgaatccctccagcttccttcagctgtaggagctccacttttgttttatacctctcactgttgcatttaattttattcaaataaaaagactgagcaaaccattattatttttaaacaacgggtattgtggtgcttttagggaggaaatcttagactattagcagtagcatacactattgtcaatagaggacatctgataacagtctgaaatcctttaaagagacaagggattttaaatgtctggtttacacttgattttcttccattacatgtttctgaataagcactgtgttcattgcttagggctgctgtaacaaagtactaccaatgaggagccttcagacaacaggaaattatggtctcatagttttggaggctatgagaaagttatggtctcctagttttggagcatggctcacagggccttgctctgtctgaaatctgcaggggaatctctccttgcctttcacaggtttctgttgaattgctggccatccttggcatttcctcgcttgcagctgcatcacttcagtctctgcctttgttgtcacgtggcgttctccctgtgtgactgtcttcatattgccatcttcttataaggacgccagttatactggactaggggccaactctgctccagtatgactgcatcgtaactaattacatctgcaatggcactgtttccaaatagtgtcacattctgaggtactggtgtgaggacttcagcatatcttttggggggagcaaaattaaaaccataaccggtgctaaagatttgtt

SEQ ID NO: 125032 - DNA, 1041 bp, Homo sapiens
tgttatgagatctttgaagagtgagtgagcaggccaggcatggtggctcacgcttgtaatgccagcagtttgggaggccaaggcgggtggatcacctgaggtcaggagttcaagaccagcctgaccaacatggtgaaaccccttctctactaaaaatacaaaaattagctgggcgtagtggcaggcacctataatcccagctactcgggaagctgaggcaggagaatcgcttgaacctgggagacagaggttgcagtgagccaagatcgtaccattgcactccagcctgagtgacagagcgagactccatttcaaaaacaaacaaacaaaaagagtgagtgagcagtaccttctatagggagcatatcctagaggctctgccgtatggtgggaaaatgttcaaatcccttttgcgtcttgatgtatataggaaggtggttaagagcatggatttaggaacagtgagaactgggtttgtatcctagccctcagtttccttcttcataggaaggagatagttgtagggttatagtgaagaaaaaaatgagataatctaaaatggttcaaatagcacctggcacacagtcaagaggtcaataaatggtagagactgttgtggtatggaggaagttactgctctgtggaggggtagtagctgtgtgattttatacagttgatttaatttttctgaacctcagtttcctaatctgtaaaagagagatgaaatgatgtgctctgtagaacctttgtaaggataaaaggacaatgtatgccaagtgcctggtgcatagatgacattctaactcaatgtgaaatcttctccttactccggactttggttgaaggagtctggtgtcttttgcacatgatgatgtcaacttgggtccctcacattgccttagcgtccttcacccaacccaccagtgcaggacatagtggtcctccccaccccgcccattgtctacccctctaaatgattttaagaaccaagtgtttgtcctcttaagtacttataaacttctctaagataaatattttata

SEQ ID NO: 125033 - DNA, 1052 bp, Homo sapiens
agcagacacgccctctcggccttcctctcagacactccgtaacatggtgggtctgaaatcccactgtaaacagcttcatggagtgcatcctcagcttgtcttcatgggccagtcctcagttcagcccagacccctgagccctcatggagatgaaggagccattgcttcgatctccataagggctctgtccctctagcgcaatgtcttgtgtgcagtgaacatttgagaaatacctaaatgactcggtctgctggaagagcagtattcctgtcagaaaaatattgagtcagtccccagccttgattaaagatgtataattgttaccttcaccttaggaaggacaaaagagataaattgcctggcgccatgaaacacagacagcccaaggggttgaaccaaagacagaagcagaagataggagtggccaggggcccaggagaaaataggagaaacctgtggcttggtggtgagtgaccctttgcccagtcacccactgtgaagagtgaactgcaggaggaaatgggaaggaaaacagatcttttgactctgctcatctcctgcagagaaggtgggctggttacataaaaagctactgtgggctgctcagttcctgagtcttgctcacagggctgaaggaaacattccctctgtctctcacagatgttaataatgagcatgccagtcaatccacccagtcaggagtcgctcatctccagctgtcccgggcaccttgttgatggtgggtcttgcatagtacattgtttcttgttttctgtgtctgtttaggatatacagggagctgtatcttctagatttaaatgctgaaaaaaagtggtgagtgagaaggggagaatggaaatgagatgtataggagcatgggggcgaacacagcacgagggaactccaaccgaaagagccataacctaaatctgagaagctaattttgcagaaccagcttagccacgggactttggggatttgctttggaaagatgtttgcattgtctgtgtcattggcatgaggccacacagtagttctcaaatgggaggagg

SEQ ID NO: 125034 - DNA, 1018 bp, Homo sapiens
tctccagtgggtcacctaagaaatgctttgggaataacaaagaggtctgtctcctccaggagatgatactgctctcttcctcctctgctctctgtgtatttttttttccttcccagctattcacacaccagtagaatttctcttatgtaagtggacctctcttgagactctgtgatggaaaagaatgtattcagttttttcccccttttttgaaaaagcatcattacaattcccgcttcccatccattcattttcataactgagtctagagtgatttcttttttctttgaactttacttgaatgtatcccgtccctttcataagagccacttttacctgggagcctcagaaggttagagtgatgatatggaggtgctgccttattaatcaaacgtttgctctgtgctgggcattaatcacttaaagctgcacagctggataagattcattagtgtcttctttcactgtgctcgtctccccgccccgcttgctcttggaggcatttactaaaatgccaccagtgcttccatcaccagctccatctctctcccacctcccgtggccacgtgctgtgtttggcccctgggtacagagaaagatcactaagaggttaccaaacagaacattaaagggcctctgatggcttctttgactgattcctttcaaatctgcctggatcctctggaagcctcttctcaggatgcatgttccacactgagcccagtggctgccctcaggagtagatgcaggcctcagagatgctgaacacctccctggcatgggtttgcgtgggatgcacctgttcatcagtcatgccccctccgtctggggacatcctgctggtgcccagaccatcctccctgcttcctgcttccttgccagatccttctctaatccacttcctgacttccacatagaggtctttgacttcagagtcccttgctttggcctttaaaccccccttcatttaatcattcttcagtaaacatctattgagtgcctgctgtatgccaggctc

SEQ ID NO: 125035 - DNA, 1043 bp, Homo sapiens
gaattttagatttcctttgttgtgcttttcttcccacccccaccccacccccgttaattcccttagatgcataactcaagccagagcttggaaggagctttcacctccttctgtttactcaacacctaccacatccaattagtcaccaaactctacattcttcctcctgaaaaatgccctgactctcatgcttaccttcttcccacatcattcatctttccctggtatttttctgtagtgacccagggtcactacaggaacttcttcagtgctctccgcttcttgggtttggctcccacgctaacccatcttccatacttcattttcatgtcaatctcatgatgcattcccctgcctcaaagtttttaatcggtccaaattgttttctagatacacttcaaactcctcagctggacatactggcctttgtttctggatcaagtcacctaggctgaggcctgagaatcagtattctttaaacttcccctgtgatttcagttcaagcagcttggctcttcaggggcccccaaaatgggcactgtggaaatactggtctgcttggaaccaacactaggtcaccaggccagttagagctggaaacttccctaagctacagccaaaaattttctagtacagtgtggttattttaggaataatttaaagagcatttcaccaaagagcagcatttttgcaagtatagattaaaagatcatttccatttaggaagcctaatttaattaagtcacacaatttttgaggtatgaaggcttttcttgctgagtcaggattttttgcttctctgctaatgcaaagcaggtagttgaaactgaagatttgctctgggacaatactatttacatgcctggccacattaaaggtcagggtagaaagtactgttctgtgggacagaggggcaagagggtattttgtttcaatcttattagagcactatgttaaactgtttttttcaagtagaatgtttaaattttaggttctttatgaaaaaatgcttaaaagctatttaatgatttgtgtttcttata

SEQ ID NO: 125036 - DNA, 1040 bp, Homo sapiens
tccattgtggtgtgacttctgcaataatgaatggctgaaagtaggcaagataatgtaagacttgaatggggttgcattctgaaaggaaggcagccagaggtcctcagaattaaatggaggacctgcagtaaaaatatggctctattacaccaagcattttcctcttttcctttccattgcctgtctgagatgatttggcagagtttaaaaataaatgaagtatattcatttttccttcagagtttttctttgaaggcatttggtaaggggacaaaatgaaatatgaacacaggcaggatgggggatcaagacatcaaaatgttagcattatatccaacatatatatccttatgtgaggaggtatgcttgcttccaattaagatgacatcatacaggcggatgtgatgcttccaagcagtgttaatgatctgctaggtaatgcagaggaaatgatgtgtttggaatgggtttttttttcccatttgtacctttccacttctttatggactgcaacatgtaatgattgggattaggttttttatagaaacttgatttcaattttcagtactgattagagacaggattcttttgcaggcatatcagttatgttgatcattgcttttcacattttattgtagctgccaaatccttattataaacagagtagaaccctacatataaaacccacaaaagggcaactctgagggaaaccaggttgagcatctcggcaattccccttactgagccattttctccagtgcctccctctcttctcccatagctgagtccgaaaacaatcttctgggagaaaggataaggtttcttctgtataacctaggggaaaagtgcctttaattattcattcattctctgctggaacaaatatttattcggtgcctatgataagccaggccctccctcttctagacactgggctgcagtagtgaggaggaaagacaaggggactgtcctcagggaggcagcgggggaggcagccaggccaccccagccatgatgccatgaatacattaagaatgggg

SEQ ID NO: 125037 - DNA, 1127 bp, Homo sapiens
tagaaaataaaagaaataatagaatcaataaatgaatctaagaactatttctgttaaggcaattatttaatagaaataattgacaattgacattgacaatctatcaaataaaatgtagagaaaatgtaagaattaacaaaatttaattgaaaatgacatagagacatagagctgattaaaatattattaatgaatttaatgggtggcaatatgccagtgtgctttacaaagctcaattagtacacccagacacgcatgcctgcacaaacaaaataactatgggctatctgtgaataatatatttgggataaaatatatacattgctcataaagcaaagtgtcatactttgccagttgaagtatagattagtacagtctttctgaaaatggcaatatatattaagaacttaaaattttctgtgatatttatccttctattccaagtcaaagactttatcctaagaaaatcagaagtgcagaataaatattctttgatattttaagagagactttaggaagactcatgtcattggagtgagctgatgatattaatggttgtggggagaaataaaaccaatagaatgatttcatctagaaaaaaaagcatggaattataaacttaaaaataattctggaagactctgcaccacaatgttaacactcattattgcagtgtaaggattacaagtgatttttaacttcttccttttatttttatatttctttctaatattactcaattggaaggtaatatttctataattagataataaacttactaaaacaaaaatttaatataaacataatggaagggttataataacaggcaaagcacatacaaaaatcatgcctgcataatatattgagactgaggatgccaccaaatcctgatgttccctggttagtttgtttactttccatttccctgaaaggggcatgaatgagaggtggagggagaagatattagctaggttgcattctctttccaaagcctgaattcttttttatttcgtgtttccatcactgggtcttttatcattaatctctaagatgtcagctgttcatcaccaggtgcctgaatccctaccagaaactcctattggtgttacctatccagggacacggat

SEQ ID NO: 125038 - DNA, 1073 bp, Homo sapiens
ttctgaactatctatccgtctgtcttctggcgcccatgttccattgaaaataacggtctttccaggtgtatccagatcgagcttcagaatccttcttaacacagcactaagtcaaccgctagtgagatatcagaattgtcttacagctgaaactgatttttcatccctctcttatgtccttgcctcagctcagtgccttgtgcaagactttgaaaagaagcatacagggaattatcatcagtatgcagggttttggtgataaggcagacagctctttactcatcctcttgctcagctgttccgtggaggtgttgccatctgacaaggagggctgcagccttgcgctttgggagctaacttctcttttcctttgagctgtaagtgatgagagacctgtcaaggagagctgttcactggcatcattcccagacctggaagtataatgaaataaagtttctttccaacttggttggaattcttgcagctgaatatttaagatagcatctggggcagttctgacgtccacttgcctggttggaaagaaacacccatgagctaatggaactcaggccttcacactggtagcccaagtcagggctgctctgggcaactcagttctaactagagtcatctaggccacaggtcccagcaggtgagatggagccccctccttgcctaatgagccagcaatttgaagtccgcatttcagaaactttgtcatatacaaagagggatatcaaagcaggagctggtttgaaaaccaccaacattggcactgtccctagacctagactacttaatgctaaaggttccagggcactctttctagtaccatgagggtagtagcagagccacaccttttagctttagagattgatgggggacaagggatgacagccgcgtcctagattccctgagccagcgtcaaatatctgggcaaagtaggcgtaagaagctttgcaaagaccaccttatgagccatgcttctgtcccctctaaaattttctgagaactgggtagagggactccttaatctctgtgaaccttagcttcctcatctgtagaaagggaag

SEQ ID NO: 125039 - DNA, 1064 bp, Homo sapiens
agattgcaatgctaagtggaaaggaatctgtaggggtcatggtaacaggtttttaaacatgggttcttggctatgcttgcctagtattatgcactttctagtattatacgaggtatgtaaatgtgtagaagacattttaacaagactacaaaaaatgtactacagggacaatatagcagatctcattttacattgatgctgtccaatggaaatatgatgcaagttaagtatgtgattttaatttttctagtagttcacctgaaaaaagtaaaaagaaacaggccagttaattttaatgatatgtattattttacctgctatgtctaagttattatttcaacatgtatctacaaaactattaacaaaatatttacattgaatttttcatgttaagtctttgaaatatgacatgtgttttacatttacaacacaactcaatttggatactggattttcacaggaaatctgtatttagatctcataaaattcatagttaaaaaagtagattcatgtgcacaagttgttccaaacatacatcaaagttttccaataaataactgaattgagtattggtttttaaatttaaatgagctaaaattaaataaaatttacaattcagctgcacagtcacactcaccacactcactcaccaaggcttccctagccaccgtgtttagtggctactctactggatggtgtggcactaggatctcagaacattccttgcacactaggccagtaacttctctcactccatcatcataccacagcacctttatctcttttacctccacaaggtacctggaccacctgctctggtaacagagaaacagaatgttagtattcacaaacatgttaacttttactttcaccgttgctcatggtgaactcaagatggacagctaaatcttagtttctccattacactgtttggcaagggggaattaaaacagtatgctgtttcctcttgcagaaagtcggcactcatccatctgtggcatttctttcttcatccttacttatcttggccctgctatttactgtgctctctggcccctctctca

SEQ ID NO: 125040 - DNA, 1321 bp, Homo sapiens
gcatgcttcaaaatgactctattttgcatcctttcaaacccctgaaaaaccagagagggtttgcaaagttatattcaaggattggctctctgccaggaaagggatgctctgagctattgctctgctccctggggtttaattttctgacactggtgatgaaattttcaatttcgttgggtagaaacaggaagaacaagaaagcagtactataaacaggcaatggaggggcagcgtggggaacgagaaactctttgcctgtagggacccttctagctgcaaacttaaaaatgtatgtggcaagatgcaacccaagcaccgagcaggattccagacgagttataatcattctgaacggggagaggaaaggtaatgccattggcttgggttgcagagagtgggggctgaagttggggcttctatctctgcctaagatcttttcccctgattgtctcctgattttgaggattcatcatgttactttttttaaaatgtgatttcctgtcttatgtgcctgaaagtgtcatagcacacttgatgtcttctatttacagtccacttgacttcaaataatggagagaggaaaagagaatgaagcatctggtttatgaagaaatgcacatgaaatagtcaaacaagagaaatcttattggttgtcctttttaaaaaatgtccttttgcacaggagaatgctgtgggtcttcacgtggctctagaatagaatttactttatcctaaatgggacctgtgatgaatggttacagaaacagaagagctagaaagctttcgcctatagaagactcaaggcagggtgagggcgactgggtgtctgggagagaccttctactctgtctattaaagaagtagggctgacgttgcaggagagggagaatttcctaactgcgggtgacaatgcatcagggacacctggtcacttgacaaggtcagtgacctgtttgttagctgaatgcctttctggagatgtaggctgctctctgatcccatgaggctccagatggctggatacattgagaattctgcctgactggaagagcttgtgtgcatgttaactctgcctgctgcaccacactcctcagtacacctcgatgctcgattttgaggaagtctggtttctagaggatgtgcattaagtgacagtcagctcgttagagtcaatgtccatttcgccttggcctcttctctcccccactagtgtcactttacatgagcgaagtgctggcacctgttggtaagaatgagagaagaaaccagctttttatggaagcagtaaaaaatgtttacaaaaaaaaaaaaaaaatctaaa

SEQ ID NO: 125041 - DNA, 1620 bp, Homo sapiens
tcagcatcctgggatcaaaagataaagtgacagtgtgacagggtttgcacattctgctcaggatcatctctccatgaaaatgaggaaaagagatgcaggtgcctacgtatgggaatgtttccatggaatattattgatatctccctttgaggataaaaagagctgtaaaaaggtcttctgactatgttcagttcaggttttgcatatgttttggtcttaaaaatgcaccatgtaaaatgattagagataactgtatactggtcagcccaaatactagagaaatatctctccaaagtctcttgaatgaaataaagtagtttcactgagccagtagtggctacacctctgacccattggggaagagtccccacttctgatctcacatccttgggagatatggtctgattcagtctgcactgggcctgttgctgttatggaaacgatatcagtgtgttttatgtgtgtgggctcatgcatgtgcacgtgtgtgtatgagggcattccataagagggctgagatgtaggtggagaagagcctactgcatatacaccctaactgtttggaattttcatgaggctaagtaccctgatgacctccctcataagaatgaattaatcaaacaaaactggttgcagcgtagccatgtcgtaaactgtagagaccattaccatcaccttcattgccagcaaagaacatgaatcctaatgaaatggatactcagtggaagcatccagtttgggaccaggagctggaaaatgaaaggaatgggtataagtgccacctctcttagtgcccggtaaatggaatcccttcatctgccttttaaaggctcaatataaatggtgctcatttcagttaagacctataggtgaactaaggagaatttggacagccagtttagaaattattctataatagtcaccatattttttattcaaaaatacatgtataccgcctaacattcttttttgatttgtggatttatttaaaaagtattacaaaggtataagaattacatcagatttagtaataatacatttaataaatcatgcttatggaaaggaataaaatttcatgagattgaatctgccccaagacaatatgggataaatggtactgacagtgcctgctccaagcagaacaaagagtacaggttgaacgtgtgagcgaaatagaaagggatttcttatgacctttattcagatgcccagcagtgattcccaccccaccccctgaattttctgagtatttgatactgtgattcccttctccttttgtggacagcacatagtaaatctgaatgtgttcagaagctggatgataggctacctatcatccatgtggagcctgtggagtacaagtccattaggtgtatgcagaacaacttcatgccagttcttgggaacttgacaagcagtcatccaaatatgatgctaacaaaatctaggtttccctctttttgaggctcaccagcagctctgtaagctttatgtacttttttcatcacagtctagaaggcgaaaaaatcgccagaaagtccaggttaactaaatagagcacccagtctgggatctccataacaaaaccgctggacaagatcccatgcaaaaattctttgg

SEQ ID NO: 125042 - DNA, 1078 bp, Homo sapiens
tcagctgagcagatgctggtcggtcagggaatcagatgaataaaaatttgcttgtgcatgtaccagaaaaaaaaggctgtgagtaaaagataatcaatgttttttggatgcagtttaccagaattttttattcattaaattttcaagttataaaagcttttaggctgataatggagacctgaagctgccacagatgcagcctcagcctttgctcccctgcatggctgagaaatcaagagagagatttgcagattcaaacacacacacacacacaaagatgacatggagccatatgcaactgccagtattggactgtttttgtctgacaaatacagcaatttcaaatggctcaaccaaaaattattgtacattcgtggaatcagttgtatttacccataagcatttactgttggtttctgacacagtcttcttctattattcacagtacctatttctctttctttattctgtgatcatttaactcaccataataagttgtagtaaagtctaagtcaggagcattggccctggacccaaggagtgggattcacaccctagctccttcgtttccttgctgggtgagcttgagcaggttaattgccctgccctgtatcccggtctcttcgtctagagactgatcgtcatggagttgttttgaggatgaaatgaaccaagattaggtggaaccacatgaaatggccaatattggaccacgtctgaatggcaaaatttgtagttctgttctgctcatcttaatcaatgaaaagcatttggggccattcccatgagggaaatgacacgaagatcacacagcacacatggcgctccagatgaggcatggagaggcatggattctagtccagctctgcctgtgacctcctgcgtgacccggggcttttctcctatcctgcactcaccaccctccctcctagacaatgctgtggccccggggatggcctccttctgtgctttgaatttcatcccctctcacctgctctggggctctgtccgttatcatttctaatctttgcatcattagtctcttcctctcacatgctgtcttctcaccagaatataa

SEQ ID NO: 125043 - DNA, 1189 bp, Homo sapiens
cagcccgccttccttgggacaccagtttatagatatctagtgcttggtagttaatgccactgctggaagagggtgtttggaaaagcagctgtcgtctgctcttccgggcttgggaagcagcagatggaatgttttttatttatataagagaagtagaattgaagagtgattaaaatatttatgctttgaaaagtactttctttcagtttctcaatatagcactctgcagaataatccattgattcaggccattgagtgtgtgttctatcattaccaatattttagagcatgcattattcatttttatgggcattagagaagagctaaactgcagctggatacctcagcacacaagtagccccataatcatttcattgaaatcctcatttttgagcgggataagaaaggggacacaagtaacttggatattttaggtatgggaatctcatttaaagcatgtgtggctaactactccactgtaaaaaaaaaatgtaatgagagtatacactttagagtatatgtctgtgtgtagcagtgtttctcagctttagctgtacgtcagaatcacctgggggcttttgaaaaccctgttatcccaccggccaaccgcaccacagattaattaaatcatcgggggtggcgggggaagctatgaatgagtattttcattaaggtagatttgatcattaaaggtgatttatgttaatagaatcgccatcattaacacatgtgatacttatcacaagctactgtaaatttcgtgcattgatggagtaggatgcttgttgacctgtgtgacccaggttttcatcctggatctgctattccagagctctatgtctgagaatctaaaaataataatagtttttaaaaggatacatcaccctgtcttttggtggggtgataataaattgaagtaattactgtaaaaatgctctgaggaagtaaaaatggtatatgtagttgtggagtgttcttttgtactgaataagataaagcctgtctatgaaaaatgagtaaattgcccttttcacaaacagacattttttggctatgttaaaaaaaaaaagtgaagctatgaatttcacagtaaattctgaactgaattagtaacccatgtaactttgacaaaaataggctttaagctgaaattttcatggattttggaagtgtcttcctccaaacaact

SEQ ID NO: 125044 - DNA, 1673 bp, Homo sapiens
ttaagcatttttgttgacaaccctgtcaatctaagccatggtaaatgactgctaagtaaaaccagtgcagtatccggctacactcacaaaaatatagtttccagatccaaggagggagttaatagtcccgtgataaatatacttgcctcagataatatctggaatattaggaatcattctggggcacaagaacacatccagaagaaggtaatgatgtctggaagcaacagtcgatgaaatggggtatgattagccttgagtagggaagtttaagaggaaacacatgaactctcttcaagtatttcaataatcatcaagtgaaaagatatttgacttactgcatataactctagaagataaatcaggaccaatgtttggaattgttaggaaaccagacaatagtcttttgttgttgttgttttctgtgtgtgtgtgtgtgtgtgtgtgtgtgtgtgtgtgtgtgtgtgtgttttaacaaatgaaaatgccctgcaaagttgtggggcacttctcttgtgtaaccaaaattacatggcagtctttcatggacattgctatgattcaagttagagtttcctttttgtcttttgatttttggccatgtgcatatgtactaacttctcacaaaataaataacctaaagacttttttaaatgtgttttgtccatgtctggaaatgaatgcaggttcttagaggaataatctgacaaaagtactttcagggatataaaagcagagaactggattctttctgcctgacacccacccaaccccaagacatctgctgaacattctgtaaatcacagacactgctatcaggctttctttatggaagagacagattgcatcattagggagcctcagacaaacacgacctggggggttggtgctctccttggtgctgaacggaggctgggcctttgggcttcctcccaggctaaggttggccctaaccttatccctaccctgcagcaattcaggttgcacctcttgcctgtttatctgataattctgctgcctttgctaattccagctggtaccgtgactactttgattccccattcagtgacctctctctcaagaaagatgagttatgcaagaggtttgagatttggataaggagctgtgtggcaggtgaaacatcacattcataggtctatattgacttattaaacagttgcgtcttctataacttccagagtcgtcccatggtatacattcattgaatcttagtagacttagatatgaaggcaaatattggatatggtgggttgcagcctgagaaagagggccttaagggttcgatgagagctctgatagaataaatacaaaaattggaatttttaaatgttttttatttctctaatacatacaaagcactgttcttgatggctggagatagcagttctttaaactaacatggctttgcatgaaatgaaatagctttgagtaaatgtcaccaaatgacaacaggaataacttgacaacaaaagcagagatcggatgaacttggcctgtctggagtaggcagtcatattctcctgataagaggagaacactgctgggctagcagggaaaggtgcttctgcccttctgtggggtttcaacagacagaaattcactggtgtgagcattgcttcccaagagcccaggcaactgggattgagcgaagt

SEQ ID NO: 125045 - DNA, 1130 bp, Homo sapiens
ctgaagtttgcataattatggacccaggagtctttgtttgtctcctgctgtagtcttaattgccaaaagatgaagcatttgaggttcacaaagggaaatcagcctgcccaaatccacaggactcctaagttgttagagatggcattcacccaaatctttaaagcgtatgttcttcactgtatattctgttgcttctagtctggacagtgtcttttctatagatgcctcagctctttgtttcttgttgtcatttctgtatctgcatccactggtcacagaagccatgtgcacacattcattttaatgtccagtgtttatgttgcaggatgagtcacaaccgctttttgacatggctgaagggagacgtggatgtagtgggaaagctaaatgataagctttttagaaatgtgttccctgggtgatggaatatgctcagtgctattgtttttaagcagtagcattcctgctaggacaagaaatgcaatacatatgctaatatgttcatgaatggttggaaagatgtttgaatcaaagaagcttgtctgtttcacatttacagccaatggaaaatgaaatttttataacaggttttcaatgaagttgggagaggtgccagaaactggagattgctacatagtagtgccttcctctgaattactgtaggcatgcatgctatctacaaggggttggataaaatggctgccagcttttttgaaacccaaagattctctaaaatactacatgaaatagacagatctctcatatacattgagtgtagtatgaataaacagaagtttttaaatttaccttgaattgtgattatacaaaatgataaaaattttcacatttttctcaagatttccttaaaatatttaatgaaacattagtacatttcacctattattactaaccccaaagcaaaatggccccttgaaactgtatttctttatgatagataacacacactaccttcttccttgcagtgccgttcttatgctcataaccaatctcccattcttccaagatctttgaaaatacaggccatgtcttatgcatcttcttggtaggctgttagttagtgtatgctaaggggctgagggtgaatgtcatcattatcacagtctttaaaa

SEQ ID NO: 125046 - DNA, 1051 bp, Homo sapiens
ctgccaagttctttagggttaataacatcttgctctttattaaatggtggtaatggtataagaattttcaaatggtgttagctgacacaataggaagttggtaatattatggcaatacacaaatgtaacagaaaatgttttctggtctgaaaatagagatcattaactcagtgaactgccagtactcccctcctctaaacccaatttttagatgaagcttggaaatgtgaagagaagtgttctcactaatcaacccagaggtcaattcatggtgggcatgtgcgtgtgtgtgtgtgcacatgcacacatctgcgttgaaaaggacaaactagcttctcctctactaatgatgctctgaatttgctgggctaaggtggtgttactgaagtggataaagcttctgtatcttggggacatctgaatgaaggagtaatgaaggccttgtaaagaacaaagctcatgaaagcatgaaagaagctcttgtgtagattatttcatgagaacctgatggcttaaggagaacttgatgtcacttcaaaatcattttcccattttctacctggagtgagaggtggtaggacacatctaccccacaaagggcaggctgtgccttctggtgatcactaagggagtcagtcttctaacacttcattctctttaatcctataaagttagacatattcctaaatggttcttagttttttttttcaaaacacatgacaactgtgtaccacaatatcattgattttaacatcttatatcagagtcagggtgtaaagcccgccacaaatgtattaaaggaaaaaataatgtaaaacctgcgattggtaatataatttcccacaaaatgattagaatttatttctgtctggttacatgtttgttttcatttatttaacaattatgtgttaagccccctcttcctcatcttttctatattatacctaacctactaaaaatataatacagatatttttgagtacttatcttgtgttggacatttttgataagaatttttacattaattatttaatactgaagccatcctatg

SEQ ID NO: 125047 - DNA, 1049 bp, Homo sapiens
tgatcacagatatgaaagtccctaacaaagggcctaatccatagtaggtgcccaatccacatatttccttgtaggtatcttgtttccatcctcttcctgaggtggtatcacagaaaactctaaaagtgatattgtcagaaataaacgccaacaggtggcccatgtgtagttctgtgcctgcccctgggcaagtcatttatttatcatccctttcgcttttcacatttccagctctgagtggtaatttggagccattgggatctaatgagaaaatgaaaggcattgttaccattattgctctggtgccatgaggtctctggtgggaacatttgagagaggaagacaataataaagaaaaaagaaacctccctagaattcagctgtactgtctggggcctcctgcacatgacttcaaagccacatttccttaagtggccattaaagtctgaatctccttcccagctaaaaataatttcaaatgattaacataacagtgaatgatttttggctctgtgagatattattgatggcagttcatactgaaaagcagtgaaacacagaaatggcttctgtcacacaatgaaagaggaaaaatataacaatagtccataaaatagtttctactatgctatactagaagattgacgcacataatattagttttcagcaaggataagttatctgatttttatgatgttcccataaaaagctgacacattggccctaagcttgcattcctgccttgaaataattttaatcttccactcttgacaagcactgcaaagggctgtgacttgctggaaccctgttccacagagcatctgtctgtaaaagcccccactggagtgatattttccctggtggatcagaattggctcccttgggtttatttaaaatactcatcaatatgggaaatatattggagtgaatataaaggagccatctcagggtagttcactgagctttggaaaatattccagcatgaaactctcatctgagactctaaccacagggagacctttccttgcctcaggtggcccgagtgggac

SEQ ID NO: 125048 - DNA, 1006 bp, Homo sapiens
acatagaaatatattttaatattataaaatcaatacattaaaaattttagtggtcaggtgcagagtggctctttcctgtaatcccaatactttgggaggccaaagccggagggtctcttgaggccagaagacaagtctgggcaacacagcaaaaccctgtctctacaaaaaataaaataaaattacctggacatggtggtatgtgtctgtagtcctagcacagacccaggagttcaagcatcacagtgaactatgatatgttcgtgaaggatacagtgccaccgtactctagcctggacgacagagcaagaccctgtctctaaggaaaaaaaaaaacatgcacacacacacacacacacacatacaaaaacaacaataaaaaccagatgcttgtccgctgttgaaaatgtagaagttttagaaaatgggaatgatatttaaaggagaaaattaaagccccttactattctgccaccatgagataacagtgtaggcatagtgatgtgttcccttttagcctctactgtatctatatttgtatcctcacattatctgcataaatacatgtgtttgcatatacatgtatatataaaaaatgtgggatcatactgcctctgaagttcagaatcctggtttcttttttccttccctcaaaattatcatcagtaacttctttctatatcttaaaatatccttcaagggcatattctttaatgactagatagcattatgttcaaaagatgtctatttctatatattgagattgtttccaaatttttactgtaaaaaacacctctggctatatctaccaccagaattaacgcaaaggattcatttttaatgttttacttagaagaaattcctagaagtgaaattgctagtcagtgggcatgtatgtatagttacttagatagatgttgcctaactgccctctgaaaagtttcctttgatgtttctggccccttagcagggatatgataaaattatagcaacaataaaagaaaac

SEQ ID NO: 125049 - DNA, 1029 bp, Homo sapiens
aatggaaattgaggtttgattataatgcatttcttctttcatcactaagatgctagggctccactgcattactgtccttttagcaaatggatatttccacttcttcaattatgcttttgtgtgggggttattctcaggtgtattttgaagagcagaatggacatacatttgtgattgaagccttgaaacagttttgccaaattcacctgtttgaccgtttataattagattacaatttaatactactgctctgggtttttttttaaaaaaaagcaagaaagaaacctacattacacattatgaaaatgttcaccatttccttactttgtctttccatggcaatatttattataatacaccagtggtgccgagtggagcaccttgtataattcatcacccagacacctctgctttagcaagtaaaaataacacagatgagcaacctgaaggactgtttggagtgcagcagcaattagaatagacacttaactctgggacattggtgtttttgtaccttgagaagtaccatccgtcactttcattcttggggaatacattctggctaaagaaaactcaagaaaattagcttttaacagttaaatctcttaaggacctttttttttctccaaatacgagcttgtactcttgcttatgcaaagtggaatgctctcagatcttgattctgccctgaattttcacgttctactcttacattctatttcaaccttaagtttaaagtaaaacaaaaacaaatgttctaaagcctaactttgacattaggaagttgcagacacttttggtctaaattaaaatcatcataggagagagcataaaagtcatttgaaggtgattgttttaaataattaaaaaactaatagtgggatttataatggtattctccaaggcaggagagaacttcatgtaaaattcttgcattcaggatcagaagcccttgtgataggcatagttgatacgaggacttttgccatgatggttaaccttcatcttgccccttactgtccccatctg

SEQ ID NO: 125050 - DNA, 1083 bp, Homo sapiens
gctgtttatgctcatcttgatggcagcagaaggcccactctccatgtgtaccttcactcatgttctatgacatgccgtgcccagctatctgctcttctcctttgcccaagggacatatgtctgtcctgctaaaagtaaacacataagagtgatctggtgtaggaggtagagattgctgggaatagaggggaactgagttcagctctgctacttagggccttgtgtccctgagtgaattactcacaaaccgcactgtgctcctacacctccaggttctctccagagcagaatgtctagaaatggattggaagtattttgggtggtgatttgagtagttgtgttcattttctggctgaaattgcagtgatctcagtgagaggagctctatgggaacagtcttattcaacctggggggaatagtttggaagagatggttgaattccagagcaggtgcaggcagggtaaacatgaccctgatgtgggctggcctctgggtcagtggatccccatccagtgggtggaggggacctcagctggcaagaatctgggcaggtagtcctcctcaggtgaatgttcattttgtgcttggggatggggtggggacagaataggggatagagcttgacctctggcaggtgtagagtagccctcctggcctttccaggacctggtggtcaatccaggaatcagggcagaactccatttgtgggctgaagtaacagagtggagatgaaggcaaacacctcgcaggtccctggagatgccacagatgctcttcatgcactgaagactgttccatctcccaccttctgatggagagaagactcccaacattctgccacaactcactcaggcctggtttctgcattgagactgggcttggacagctgaggcctggcattgtcaaagcagtctctcttcacctaagacgacaaacacatttattaatttgttcaatgaaaatctatccagtacttacaacatgccacagactatgagggacactgcaggtacaaaggaaccagatatggtccttgtccccgaaggagttcagaaaatttcctatacacttcagaaagtgga

SEQ ID NO: 125051 - DNA, 1015 bp, Homo sapiens
tctttctaagcaatttttctctataaagaaaaattgaataccttaatgaaattctcttgctctcagtgtttctgttgtttggaatactttctctaagaaagaagaaattattaaagaaaatgggtagctgaaaatgaaaaatgtggtcagcaatatttttattgctctttttcttatatcacaaaatttatgagagtacatacagaaaaagaaaggatgataattttcttgccttttgttcattggcataatttagctttaatctaccaaggtggatatgatttaacctgtccctattatcattgtcgatgttgaaccttcttaaagtggtttacttccattccatccaacatctagaagccagcacacatataaatctttccgcacaggcttaataacatgagcaccagaaaagactgtttataccagaaaaatgttggggtgtttggtattactgtgaaaacataaatattcagttgcctgctcgagagcttaaaataatggcctgaaatgattaatgggaggaatctgatgattacattggaaagagagttatgttttatttacagtgtagaactgactacaggtactgctgaaataaactagaaaatttaatacttagtaaggaaaaatactaagaaattgagcctggttggccaagtggaaaactttatcatcttccagtgtgggctcatgggaggaagcagccaatgatgacatggaacatgagcatttttgcattagaacagtagcagtgtaacctgagagatctctgcattcacctactctggtttacagctcaccaaatgtgaagatttctgtttacatggatccttgacttgagttatccttcttactccctaattacactaactcgctgagatttcagtgtgcagtattgcttactgtttactcagcttaaggatgtaagtcctaaatcaaacaaatcctgctgaattcctctgtctgataactgtgactgtttcatgtttatctcaatttcatgggggaaatt

SEQ ID NO: 125052 - DNA, 3120 bp, Homo sapiens
ctggcctttgaatagtcagcagagcttggcttccctcagtaatgttgtgattactgtgtaggcacaaacagaagtcatcctgctgttatttaatcctttgccctctttgtgctacctgaggtgatgctcaaagggagggcctttcggcaaaacgtggctttgattgctctgtgtgttttgcgcgtcctgcttttgttgcactatatcaaagtgcagggagcatttctttttggttgattaatgttcaatttgaggtctattatgaagctccaggctttaattactataccattacccagtcaattccttgccattttatatttatggcctttattatgcctctgtatgtgcaattgcctaattttattctggaagcatttcacctcattagctgggttttataccattcctctcatttgtccagattgttatttatcttggttccctgtgtgcgttttcttttctttttttttttccaccagtctgactcattatattaatacattctttttctccttttcctgggatgcattgttatttggctcttggaaatatcgctttaagttttttgtccttttccctggtcgtcagttatactcacattcttaacttggtcatttccaaccttctgaaagcccatctcagctgcctggcagcactggccctgtccaaaggcctgaggcctccgcagcctggacataccatggatggccgcctctctctaggtgaccaattaaagctcagggaaggtgaagggatggagtttttacttaagggcatgctggtgaaagtaacttttaaatattctcttaaatccttttctaactctctctccctcaatcccctcattgtctcagaaaacttcaggacttggtttactgacttatttttgtgggttccacctcagaccttctcaatcaaaccctaggggagcctcccagcagcctgcgttcagtatgttctccaggtgattctgacacacattaaagttagaaccacttttcttttttttttttcattctgagaatgctttattttgcagtaccatataattttaacacaccaaatatattttacagtaacaattatattcttcactcaggcataagatcacctgagtttgtggatgtttctcaacaggttgttgtcgtagcatttggacaatgtgattagacaacacccggggaggtggtcatttccaaactggaagttgtccagcattattaggaacgtcttgactggaagaaaattatcgaacattagtttggtcctttctctgttctttttttttttttttttttttttttttttttttgagatggagtctcactctctcacccaggctggagtgcagtggcgcaatctcggttcactgcaagctccgcctcgcgggttcatgccatatgccattctcctgcctcagcctcccaagtagctgggactacaggtgcccgccaccatgcccggctaatatatatatattttgtattcttagtagagatgggatttcactgtgttagccaggatggttttgatctcctgacctcatgatccgcctgcctcggcctcccaaagtgctgggattacaggcatgaaccactgctcccagccttctctgctcttttattttttttatttaatattttttattatactttaagtcttagggtacatgtgcacaacgtgcaggttagttacatatgtatacatgtgccacgttgtgctgcacccattaactcgtcatttaacattagataacctaatgttaggtatcataatgctatccctcccccctccccccaccccacaacaggcctgggtgtgtgctgttccccttcttatgtccatatgttcttattgttcaatttccacctatgagtgagaacatgcagtgtttggttttttgtccttgcgatagtttgctgagaatgatgtagaaccacttttctaaagagatgctaaaagaacttgaggaaacccatgtaagtcagaaatatgatttcatccaagtccttactttaccaaaaaaagcaagattaataactgctacagcaaccatgttttgttttctgtcgtgctttttcaacagcttttcccaagagcgataagaatatttcagaaatgcaaatagtaataccttggaacaagcgtttatgtaattattatggtgatagtagtatcagttgtctccatcaagtgtttgaggtgtttcaggcactaaggaaatctttacttccattttgctttcccatttaatctttacgaccctttatggataagtattccttcactcattttcatggagaaaactgaggttaagggatatgtacaaagtcaccaagaagtagactttgtctgttagaaatagatccaggaagtttgtttctgtccagagccacagtgctgatcactcctttgtgaccatgtgaaggcctttcctgctcaaagctttattactgtaatatttcaccctttctgttttcaataggaattggtaaccaagaatatgtgctttggggttaggccatctaagcttccatgctgggtctgtttatttctgtgctgtgtgaccttggaccagtgacacatctctttgtctctgtttcttcatctgtacagtgagatggcttagtattttggcatgtgctggtacacgtgtgtggaatgagacaatctgtacaaagcccttcaaagaaggcctgggagagaaatgctttctataaatgttagctgttagctgtttgttgccttttgctgccatcttgatggcatccctaaagcttttttcttttgggtttatttacttccaggtctcacttcctttctaggtagatctggtgaactagcagcctgtggttctgatctgttccattttgtttgtgtgcttggcacactttctataattttaatgttcttctttctctgctcatttaaaaccatcctattagggcttggacatgtttgtttaattctctggacttgattgaaattcatgatcacaattaacttcttgtgcagcccccttgaggcagctcagggttctttctcatgatggtcttcagttttcttgggaccaatcatcattagcattggcaccaagggagaatgaaggagaagtga

SEQ ID NO: 125053 - DNA, 1052 bp, Homo sapiens
ttcttttattgagactatttgctaattagtcacgtagttctttaaaggaaccctaaaactcaattactttgttttttaactgtaaggattttttgaaaatagcaaatgaatgcctgtggaggggtgtgattgataaaaggaggcttgaaggacatattgggtgcaaaattcaaagaagattgataactcttgagccatgggatcttctcctccatcagcttcactaacatatagctttggggaattgttagaattaggttcagagatactaattttttcccactagatttcctttcttacgtatttatttttgaaactcatatagcaacactagaaataggtctgaactaagtatcatgtgtttctcttttacatttggctcccctcctgtgtcagctggcctatgatgcacagtggctaatattgattagcctacatttttcttaaatacagttttctcagtctatgtaaagtctaaatgctagcagtaccaaaataaacgcattcaacttctaaactggtggtaaggaaaaaagtaggaacaaaacatagttgagacatattgtccaatgaaatcattgcctgtgatgccacagccaggtgtgaggtctggggcaagcttccaaactcatctgagcggcagtttcctcatcagtagaaccgggataagaatagcacctaccaggtgtgagatttaatacatgtaaagtacaaaatagtgctaacacccagaatgtacttagcaaatgttaacttcttaaatgttacttgtgttcatgagaatccaatgtatcaaagtgaaaataatcaatttgtgtgtaatggggaggaagttttactattctttactaaataactaaaaacattacaaaatatttaatggcaagttactttttagacttaatctctggtcatttatttccaattaagactggaccccactgtatttgacatgcggaatggtttttatttttgttacgatcatatttattttgagatgtatccttcttatcattagtagcagttctctagtattttaaaaactttccaac

SEQ ID NO: 125054 - DNA, 1061 bp, Homo sapiens
gatgcatttgaaaaaagttaatttgaaattttaatttcaacactgatttttaaaccagaactatgtccatctctcttgtctttttatcctcagctctggctgattcccgctggaattatttccaatatgttctccagaaaaccatctcctgtcagaaactttcaggatcacaggggccgaatgcgtctgtttagctattaggttgaatcatatgataacattacatttttgtacgtcaaaaatggccagatagtgtcacttaagtggttcaacccaatatgtttaccctgaatatttacaggtcggaaggcttgggagctagaaggccccattaggattttgttacccagttctcaatatttacaggggaccaccgggagccggcctaattgcccagttggtgatgaattgattcacctgtgctgaagccgtcctcatacagtccccctgacgaactgtgaagtgtagtgtgaacggtcaggctccaggaggtgtaggcttcaaggattacaataaaggatgggggttttttaaagcccagagggctattccctggcaggaaaggaaagttgggcaaacaccctggaggggcccaaacccaagagacctcaggacctgagattgcccctgactctgaggattcaaatcagacagatcctcttcctggcctcttctatccacaccctagtctccccacactgtttgaaatgatgtgggcagaatgcaggccactcacactgactgcagagggctgacttgggcaggtgggcatgagcctttctgcccagcgtgagtccctctggcacagctggatgctgacctgcagggaggcgcttcagcgagtacttgagcagggtcgaggatgagaagccaaactgtttctcatgttctcctgcaaaatgaatttatttccttgttagagaacagtgggcatacccctagtcaaatataagtgaaaatcgatgcatctttatttacaaaaagttagaaagatatggacagatagaaaaaaattacctgtcttcccaccactacaaatcattattactactactttggca

SEQ ID NO: 125055 - DNA, 1024 bp, Homo sapiens
gggagctgtagaccggagctgtttctatttggccatcttggaagtgacccgtaagtctattcttaaagtcatttttctgtgagatataattcccgaagtgcctacttgttggaggaggttgaggttagtataattactatcaaaaaatacactttcagaaattggttccagcttttcctgcccctcactccttctctgagcagcttgatggatccttccccacgtgtgtcccttataggtgtccgctccggcagataccccttggagacatatgcagagataactaccatttgtttggattttgctccaacacaaccagcttatacacattatacaaaaacttgcttttttcatttctcagttcatcatgaacatgctcacatctaagtagattgataatctggtgctttctaatatatttacatagaagtttatatcgcaaattctgttcctttcattttcttcttttttaaaccagagccttttctccttaacttcactaaatgaagctacccctctctttttcagcctcccttctttccggtgctgagtgttagccatctgagtgtatgcttcccaccatttctaaatgcttttacgatcgtgtgtatacatgtgcacatgcacgtacacactcatccacacacatgcacacataggtatatttgatcattgctgtacaaaaacgggatcacacttgctacattctataaactaagtggctgttactgttgaggtttgaaaaacataaaaaaaaaaaaaaaagccccaacattgctcaaggtgccagaacatacctgggagatccagacctctcacccaggttttctcaggcagtcactttctctgcacccagcttcaaatgaagaccagtcccacacagccctggcagctcagggcagcgttcgtgggccaggccttcccaacctctgctttgggtttgcaggagaacagccacctcctatcatccagatttcaggcaccgcttcctctgatatccaaggtcatgttagactgtacctgg

SEQ ID NO: 125056 - DNA, 1029 bp, Homo sapiens
atcaactgatattgaagcttgcattggaacccaggttggtctctctccacctctgtgctgccagtcgtgaccctgtgctgccccctatgtctgctcctcccacctgttgcaagtagccagcctcttacctgatgaagaccatcaggcctgaaggtccaggctctttggctcctgcagaaagcccaattggggtgggacatctggtcatgcagaagccacgtgactggtgggcacaggactcccaggcacctgttctctcaagggtgggctcttctggggacatttgggggctacttatgattcttttgagctgtcctttgacttattccttccaacctccaacataaagggccactcagagaagcagtacctatggcagctttaaaccgccctgctcctctgctgttctgtctgacagcatgagaagccagcaaaagcttcttcacatcagggtgccagtggggaaacaggaaggaaaagggggaataagaaggaaaagcatgctattttctacacaggggaggatttcataccaatgtgttcagaatggttttacaaagactgtgcatatatgctccaggtctgttcaggaaagattcatttgtggaggattgaaatgttcctattaatatttcttagagaaacagaggcatctactgaatttcacaaaatgtaatatgaaaactgatctccaagggtcagctttaatattttacttccttcttcattgttgaaaatatatttcagctctcttttacataccagcatacagcacagggagaagatagcataatcactgtgaaagtattatcaaatgcaagcacgcatttgcatttttggcaaacaaccacttttgattttacattgtattgttccataatatttaaagcacaaagtcctgaaattatcaaacctacttgagtttgcgatagtcagatactagtttcattgtgcttttaattaataaaatgtggattgtctaaattaaaattttcattatgaaatattttggccataagggaaaaaaca

SEQ ID NO: 125057 - DNA, 1087 bp, Homo sapiens
gttagtgtttagatttttggcagtagatgtctagtggaaaaaagaaccctatgtgttacacattttaggacattaaccagctttgcatgtaacctagcaattttatactaaaattttcaaaggctagaaacaccttctccatcagctctctttggatcagccttatttttttgccggtttcttcattattgagttgagtaaatcttgacatatatttattctgtatttttacaagtcctgttttcaactttaaaaaattttttcactttgtcaagattcaaacgtctcaagtgaaatagttactacttgtcattatggtatatatttgtaggttgacaagtgctcctggtggtagttcatagtgatctgcagagatgaaaatgcatgtttacgacgtttaaaagtagattgctgagcctgtgcatgacttagacttcatcaagtgactcggatgtgattagcaaatgattctacttgtgtggatggaagagtttcaggggccagagctggccttgtgcaaggaatctagccagaacatttcagaagagcctagggatgcagtggtgccccacgaggcagctgttcatctttgcccctccagcacctggtgtggggttttttaagctctcaaccatgtgtgtggtagtttcctggagttaccatccttgtccttcaggggatttgaggatttgagcctctttttgcagaggctccagaaacgcaaggttgggtcttcagaatgatctctaggaaggaattgagtgtatcagacattaaatttacttagttccagtttacccccaccgtgcactttttcttatctctctccctcttccattaatcccatttttctccctcctttccttccctcctcccctttttttttgtgttgacctatttacaaactcacctcacttgagatgatgtggaagattacatcacgcttaacatatatatatatatatatatatatatatatttgattacctgaaggctttctataatgccttagtggaagcctttatggtaaatgccaatcaatgaaacacagggagtagaagtttcctgtgtatttgaatgttgcatt

SEQ ID NO: 125058 - DNA, 1034 bp, Homo sapiens
tggaggcagaggttgcagtgagccaagatcacgctatggcactctagcctgggtgacagagtgagactttgtctctaaataaataaataaaaaagataacatttccatgtgaaaacctagaataggatagtttatgatgtcatcttagtatatgcttagcttcatctgatagaccgtaatgaaagattttctttcttcatgttttaggtacaaaacttagattaaaaaacatatccctgtagaaagcatgttgagacttctctccacattagtctgggattattaaataattattactattaataccatggagatgaacatacatgcaacctgcagaacaaatgaaacgtgttgctctgaagcaaagtaattttttaataattagtagcctatcagcataatgttcattttatgtcttcctaaactttttatcacttgcattgtggtttataaatattgacctactgataaagagcctttgctgctgttctttcgttcagtataagaatttctgctaaatatcatttcttcttcctttttttttttttttggtagggacaaaacgataaaatgtctctagaaatctgatttggcatggtttgtagagagattcatagtccaggattgtttaaccacacagagtcttcagggttttctagaggtttacattctgatgcatccataaaaaccaactgataatgtcattttttagataaaaatgtagtatgatagtattttattcagcattgtggcttgggactgacataggctttataaattatcgtatgatgtggtgaataggtacttgatttgttccacaaaaatctgctgccatttattttgtttttttgtttttcaagttttggcaacaacttattatgcaagattccctgaattcttccctggaaatgtgtctctcattcttttgggagatcattgcttaagctaggtaacaatctgatttcacggagagagttagaactcatgtctttgaataaccacggttacatacccatgtagccgcaagagagtgg

SEQ ID NO: 125059 - DNA, 1009 bp, Homo sapiens
ggcttctccatgttgcccaggctggctcgaactcctgaccttaagtgagctgcctgccttggcctcccaaattgctggattataggtgtgaaccactgcgcccggcccagtttttttttttttttttgagatggagtcttgctctgttgccaggctggatggagttcagtggcacggtcttggctcactgcaacctcctcctcccgggttcaagcgattctactgcctcagcctcccgagtagctgggactacaggcatgcaccaccacatccagcgaatttttgtatttttagcagagacgggatttcaccatgttgaccaagatggtctcgatctcttgacttcatgatccacctgccttggcctcccaaagtgctgggattacagccatgagcaaccacacctggccctggctctggcccactttttaccagtatttatttctgctaatcaatgtgacacatccctatggtgaaaacttgggagaggaaattgtggaaaacacacacacgagaaatcactcatagtcccaccttccacaggcaaacactgctactgttagcatctttcttcttcttctgtgaactctgtcctttacacagtggagactgacctctatgtttgatttcctaacatttccatgtgtcctcagtacacctggataaacatcacgtgcagaagccagataacattttgtgtgtgtgtgtgtgatggagtcttcctctttcgcccaggcggtagtcactggtgcgatcttggctcactgcaacctccttctcccgggttcatggaattctcctggctcagcctcctgagtagctgggattacaggttcgtgccaccatgcccagctaatttttgtatttttagcagagacgggttttgaccatgttggccaggatggtcttgatctcctgacctcatgatccacttgccctggcctcccaaagtgctgggattacaggcttgagccaccgtgcccggccgatgccagataacattttatta

SEQ ID NO: 125060 - DNA, 1047 bp, Homo sapiens
tctgcagataggagatgcagctttgggaaggggctggtttgttccatttaggataaaggacatttgaattactgtcaggacttttcagctggagatagccagaaggccaatggaaatacaaatacctagcacaagttaacatttgcttgagatttacagtaacctggcaagtgttttgttagcctattttaatgaaaggggagctgggaaactatagagcagagaataaactggccaggacatacatcgagtgtgtgacacatgggactccagtcttcatgtgtcaagttctgtgcttgttctggagaatttctccaggagagccagggctttccagagcattctggatgagaagtgccagtgagatgtatttagagggacaagttgctgaggcagcaccgggtgagatcatttgctgaagcctagagtgggttcttctctaagtgtgtactagagtcacatgtttatgtgtatgtacatgtattacatgtgtgtgcacaagtgtgtgtgcatgtgtgtgctcatctgccagcaggagagaaaatggtgataagagaaaactggaaagaggatggcccgccacgcagggactctgatttgtttgtaagagctgggaaacacaattgatactcttcccgtagcaggccattggtgcagtcctattttcgccgtttcctagtgactcacactgtatagatagtgctgccttatttttagtgctgagtatgagtgtgctgcggaaggctgccggttaccaaggaggctgtgcctctaagctcctgcagggagccccccgagtggtgactccagcctccgtgtcactctctgataacccctggcagagcacctccttaacccgaggggtgaccgctctgggctgccttccctccatccctgcttatataacggctttttgttcttattcagtttacgtgttagaaaaaattacctccatcttaaaggagagttctgggaaaatgttaggcagatcatagagagccagggggccttggttggatacaatcactgtgcgggttgggctgcgta

SEQ ID NO: 125061 - DNA, 1092 bp, Homo sapiens
gggaggaaaactagtgtttctgctgctgcatcagtgagtgcaactattctgatcagcagggtccagggaccgttgtgggttcttggggaggggttgtttctgctactgcattagtgagcacaactattccgatcagcagggtccagggacagttgtgggttcttggggagggggagaaacaaaccaaaaccatgggcggttttgtctttcagatggaaaacactgagacatcaacaggctcacccttgaaatacatcctaagccattgggaccaatttgacccacaaaccctgaaaaagaggtggctcatttttttcctgcactatggcctggccccatattctctctctgatggggaaaaatggccacctgagggaagtataaattacagtaagaaggaaaagctaaataatttctacagatcattcagtactgctcagtagtaccatgttggaattcacaggggaagtattataacttactgtgtttcaattcatttattttaaagccagaaactgccttgaaatggctgctataccaaaataccgcatccccaaaacctggtgaattctcagaaaaatcattctaggtgaagagaagccagtctatggtggacttgccttatatttcagcaccgatcccagtgtgattttatcataggctttcatcactaagaatgtggtgcagtctcttggagtacaaggacagcattagtaagaatctagaatacatttatgggaattggagaaattaaattttgacattcacttaatttttgtggtattctctttttgccacagagcatctctggaaagcacaagataatgcaggtttttgtcaatcgaatcacttttccctatatcccttattaataactgggatagtattctgaaacaagtactttgctttcaaatacattttagatttaacccataaacctaaaagtaaaataacagtatatttaaaaacacacatttactgaaatcttatacagttatagctatatagaatgcaggaggtcccggggtgctctgcagggaagctctgccagtcctagccagtccaccagacccagtcagcccctttcacctg

SEQ ID NO: 125062 - DNA, 1049 bp, Homo sapiens
attttgaagtgggctcacctgtcagagacagtcccagggtaagataatggcaaaattgcttcctatgggtatgcatcattggtttttctgctgcgtgtgacagatgcttccattgtagaaatccacagttgtcttggagacacccccatttcaagcacatcttctcttgacttatatggctgccatcatcagtccctttccagcgcttttccccttccactccctcctgcccacagtaggttttttcatggcctgtgacctgaagatcaggaaccttactgggctctgaaattcaaaggaaagctctgaaattccctgtgccctcaccttccttctccattccttatacctcccagtgaagactgtgagagccttcttgagtgttaattctagttgtttccttttctttcttttttaaaaaatttcatttgtgaaccatctccctagcatgtcatccgagcccagcgggccatcaacaatgagatggcgcaccagctgtatgttctacaagtgctcacctttaacctcctggaagacaggatgatgaccaaaatggacccccaggaccaggtgagtgctcattggacagcagtcaaagcacaggaaggacagaaagtgtcattaaaagtcttttcttgaggtaccctgaaactagggagtttcagagtttgatatgatgtcattttattatcatctcagaacttaggggcatggcttcaaaattaggtgaatctaggatcagaaaatataccaaatgcattcttccattaggctccaaacatgcatgttctttctgcatttattgaataagaaagtttgatgtcacatgaccacagactttagctcctggccccaagtaacatttaatagtagtagctttggagtcaagttcccagacaactagggcctcttggtgactctatgtggcattgattctgtggggttgagttagcaattttcgttctccagggatcagtgccaagagcagggtcccagattaaacctgatttctgggccagcatttctgtcggttggctgttggctgtaac

SEQ ID NO: 125063 - DNA, 1018 bp, Homo sapiens
actgcgaggaataagtcaagggcttgccaaggatagtaaacatgtcggagaaggttattagccatgagaagagctgaagcagtcttttgagaacctgaaaatttccatactcttcctgaagtttgtattttaaaataatagcttttcggaatgtaaaatcataatgtcactgcacttcttcacattatttcccacccctgagatccagatgtagctggggtaggcagagtgttggtatctgcgtctcccacccctcctttcacctggaaatcagcggactagggacaattccgatggtacctgggaactgccatggtgtgctgtgcatttatcatgtgcaaagatggagaggagatgaggcaagtggtctctggggcagcaaaaaagggagaaattagtgttgacaggggggaagcagcaagagtttacttgtcgtggaaccaagttatttagcttttaagaacagtcattatgctgatataataatggctttttattgtgagctgtcaacagacagtaataacttttaatgaggcctctaaaataaaacctttatggtacccatgtgtttggattactgcgatccattattctaacctctattttattttccgctcacattgtgatttattatgtttggggatttagtgattaattccttagagaatctattttggagcttaaagtagtattttaacttttagtactgctcacttaaatgatttcctgtttgctaaatttgggagagatgaaaagaacttgttttaaccatcagaaattggaagaaaggggtaacgagtttttcgtttaagagagtggccggtgactgagaagttgccagttgaattgtgttgacaagtgagatttgtgcgagtcccttaagaatgcaacaagaacataataagcatataaaagccatggattgtgtggatgaaggagtagcctgggaatgcaagaggaatggcaattaacatatgttgacattaccatcccagagaaacacaggtatccttacaat

SEQ ID NO: 125064 - DNA, 1059 bp, Homo sapiens
gcatagtgagaatgtagtaacactcacacgctacttacaattcactgcacagcatttggagggctttaagcatgtttgcttgttttcatttctccaaaaatctctgagctagttgtgactaccactaccatcatcatcatcatcatcatccccatttttaataaatgaggaaagagaagcataggatggtgcataacttgcccacttagggctgaagggagaacccctgctgtctgactccacaaactacctacttagccgttttcgtttagctggttgcatcccctctgttgcccctggtctccggcagctttggatcattgtctttccctgagaaccacttccccttctataggttccatttagcattacatcttctgtggtgatgcagaatttcaaaggtcatttttgaggctgggctgagtagaacagtaggaagaagggaaattgagaagctgttttaaaagaaatgttacctgttttctattctactagttggaaataaaactagttggaaggttcaatctaaatatgttaggagactttgtaggatatcaataatggtatgcatgagcctacaaatgaaaaatctatataaccaactttatttttttaaaaattgaacctaggaatcagtgctgttacataatacagtgtacagatcctgactggcataattcaatgtactcaaagaaagagtatttatcataaaggtgttaatacttataatgatgataatttacaataaaggtgaatatctatgaaagattctgtgtatctaagtctctgctaaagtgttgttttgaaagctgtagacaccaggatattgtctaataagggtcctaggtggaactgcatttgcccaagcctaatctctgtttggattttcaaaccacatattagacccaccttatagcctactgaatctcagcaagtcttttggtcagcaaacccattatgtggagtgattatctccatcgatatgccagaaaagttactaactaaagacgaaatgctggccaaaatcaaaatgagtatgtttacttgcatacatgtttg

SEQ ID NO: 125065 - DNA, 1100 bp, Homo sapiens
ggcaggagaatcgcttcaacctgggaggtggaggttgcaatgagctgagatcgcgctactgcactccagcctgggcaaaagagtgagactctgtctaaaaaaataaataaataaataaaattctgtattaacgggcttgccactccatggaaacatttggaagcactattcttttataaaattagtagcataaatttacatgcttgttttgagattggctgaattttgttggaatgaagatggtgtctactaagttgatgagaaacatttatttgaatcattccagcacacatggtgtgttggctgtgacagtggctttccaccagcatgtaaagtttgcagttggcttaatttgtggctgtcagtactgcacaatctttagcctaacagtttacaaaatacaaataatccaaacaaataaaaatgttcctggatgtgccatgtggttgctttatatttgtaattcttttagccttgactctctatacccagcattgatttcagaggtagaacttgccttctgctttcccggtttggagcctgaattactcctctaggagtggaaataaacacctatgtcaaggttcagtaagagcttttatagccatctcacttgaaagaggtgattgaatcccttgatttggaatgtaataaaattttagcatggccatcctttctttgcaactgagagtttgaagttgaatttggaaaaagttcttccatatgggaacttactatgtcacccagcaaccggtcctaatgaatatgttatatacagaatatgtgtgtaatacagaatattatgtaatatgtatatattatatacctatgtgtattttacataaatattatatgctagtaatatataaaataggtcctattatatattcctatctgtctctgcctatctgtcatgtcattagatagatcaagagagctatccttcctctgagtaccttgactggtgtatgctgtgaaaaagctttactctcacttaccaatcattcccactaatggatacttgagaagcacatatagctctatttgcagtctcagaaatggtgctgcacctccttaacagccatagagattgaaatctt

SEQ ID NO: 125066 - DNA, 1032 bp, Homo sapiens
tctgcctgctttatcttccacaggcattgcccaaactcgtactcaatctctgttctcataacttagtctcagcatctgcttcacagaggactaaaactgacacatcaaaactgactcatgatgaaatagaaaatttggacgcccatagttattaaaaaaattgaaattggctgggcgcggtggctcacgcctgtaatcccagcactttgggaggccaaggcaggtggatcacgaggtcaggaattcaagaccagcctggccaagatggtgaaaccctgtctctactaaaaatacaaaaaaattatccatgcatggtgacaggcacccgtaatcccagctacttgagagactgaggcagagaattgcttgaacccaggaggtggaggtttcagtgagccgacgtcgtgccactgcattccagcctgggcgacagagcgagactccatctcagaaaaaaaaaaattgaaatcatttctcgaaaaccttcatacaacaataacaggttacactggtgaattctatattatatattatagaagaaataccaaatctaaacacatgcttttggaaaatagaggagagggaccagttctcattattttatgataccagtatcactctgataccaaaacctggcaaagacaatacaggaaataaaaattatagaccagatgcaaaaatccacagaggcatgttaataaatacaatcaagcaatatgttaaagggataataccttgtgatcaataagagcttatctcagaaatagtttaacatttgaaaatcaatcaagcagctcagtgttttatgaaataaaggagaaaacctaaagagaaaaatcatcttaatggagagaaagcatttcataaaatctaatgtatattaataataaaaattctcagcaagctaggaatagagggaacttcctcatcttgataaagtaatctacaaaaactccatcatacttaatgttgaaagactgaatgttttctaccctacagactgagaataaggcaaatatgtttgctttctgc

SEQ ID NO: 125067 - DNA, 1113 bp, Homo sapiens
aaaggagaggaaaaagaatggggaaggcaaatatttgaggaaataattacagaagaaaataatgatggagatatatgaagcaagttcttcacactggagagacatgatagtagatagatactcagatctgtaggaaaatatgaagaacaacagaaactaaatatgtgggtaatataaaaagacaaaatgtagttttactttcctttaaatttctttaaaaggctgtaactatataaagcaaaaattataatactgtttggtagggtttatgacatatgttgatgcaatatgtatgacaatgagagcacaaaggatggaggtataagagcaactacactacagcaagcttcctagtgtataatcttccgtttaagtagacattaatatactaatggtgcacattgtaatacacagagtcacaactaaaaacagtgcaaggaagcataggccaaaacacaaaggagggattaaatcagactactaaaaaaatttgattaattcaaaagaaggtaaggaaagagaagtagaataaaatatagttaagacaaacagaaaacaagttggttgacttcaatctaatcatatcaatacattaaatgtaaatagactaagcagctcaatgaaaaggtttagattgtcagatgaaattttttaaaaagcatggcccagctctatgctgtttataagagatgtactataaagacaagggcacatgtacgttgaaaataaaaggatggaaaaacatataccatgcaaatgctaataataataaaactgaatggttttattatcaggaaagataagacttgaaagcaatatgttatcagagttaaagagggataattagtaataaaaatggtcgcctcattaagaagatttaatcctcctttttattttaaatgtgtatgcacctaaaaattttaaatgtgtatgcacatttaaaattattatacatgtgtataataaagttttaaaatacgtgaagcaaacactgactactaaggagaaaaagaggcaaacccatcagcatagttgatgattttaagaccagtctttcctaactggtatgaaaactaggcaaaatgttaaggatatagatgatttgatcaacac

SEQ ID NO: 125068 - DNA, 1354 bp, Homo sapiens
ttgacctccagggcttaagcagtcctcctgcctcagcctcctgagtaggtagggactacaggtgccaccacacctggctaatttttaaatattttttatagagacgaaggtctctctgtgtttcccaggctggtgttgaactcctggtctcaagtaatcctcctgccttggcctcccaaagtgctgggattataggtgtgagctaccgggcctggctttctgaatatttttaaatcagcttttcttttagcaaaatttttgtggatatttaatttattttgttggaataaaattcctgactcagagtatgtatacattttaaagctgttttaaaataagaatagcccaatagcttgcagaaatgttctaatttatactttaccattcttgtaggagtatgtctatttccaataccttggtcaatactcggctggttttctggttttcctcagaaagatagcagtggtatttgtggagttctcactaatctggggaatttataagtgctgttttatttgtttcattgaggtcatttctccaaaatctggctgtattaggaacattggaaggagtcccatagttattttagtgatatgtaaagttcttaggtaattgtcttaaaaagaaacattaagtgtataaattattagttcctccccactctgtcatacatatgacacagatggaaaagtctagtgctgtgtgtatgtatattacatgtatataaaaattgtcatcatttttgcattaatacaagaacagtcttgaaacaggttccctccatctcatattaacctttcgttattcaaattcttttcatcttgcctgaaccagaggtgttttcattttctgaatgttgtgaaaactgaggtatagcttgaattatacactttgttttgatgttccctagcacccacacttgagatggatttgtatgttttattgattcagcgaaatgtacgttactgagggctgaaccatactcctcacactgggttaggcatgtgagacgtaagaggaggtgcatggaggataacacaaagatgtatatgacagttttccattatgtgtgaccttttccggaattttgccttcacacaaaagatgaatttctgttttgaaactttgttaacctccaaggacacagatgatcagctctaacttatgctattgcctctgagaacttggtgtctcttagaagtcttggctgttctgggaggtccagtgcaggccaaagcgattcatctacttgctgccttgcagccaaggccagctgacaccatgcacgttttgcactttacctcctcagaggccacagacccagacagaaagaagctgctcctgtggtctctgc

SEQ ID NO: 125069 - DNA, 1025 bp, Homo sapiens
atgttgtcagaatccagtgtggttactgtaagctggagctggagcttgaatcagcgagagggaagttgaaaaagtttagggatccaaggagcttgacaaaggaatggatacagagggtcctgtctgtgaggggagctccaggctggaagctggtctggaatgtgtcaggatcctattgcctgtttctggggagcagaggaggaggacgagttgttataaacaccttcactcatcactggattacttcatgtacctgccagacatggtagcctatactacataccccccacggcttctggtgagagagtggggcctgggggaggctgcctcggcaacactaacatgttaaataaaaatgtaaaaatgtttacccctgtttattgattaagctaagtcaaggacaatgcatcagagccagttgtaatgtcacctgctgatatgagttggttctgccacaagtacctaggtatccagggcttgagctctggcacattcagaatgatatttgcaaatacttctgaaattattagaattgcaattgtaattacggttactttaccgtggtaaagacagcaaagcaggggcgcatgtgatctgcattctgaacaggggcctgtggtggagcccctcacctccagaggccggcagttacagacttcgacaatgaaactgcctgctaggagcttttgttttcagtttctcattgctttactttgctagggctgccataacaaaataccacagactgagtggcataaacaacagaaactttatttttcctcagagttctggaagctgcaagtccatgatcaaggtgttggcagggttggtttctgctgaggttgctctggatagtggatggctgccttctctctctgtcctcatgtgcacatccctgttttttctttttgtcttcaaatctccttttcttataaggacaagagtcagattggattagggacacctaatggcttcattttaaattaatcatctcttgagagggcttatctccaaatactgtccca

SEQ ID NO: 125070 - DNA, 1103 bp, Homo sapiens
gtgacactttgggaggccaaggctggcagatcacctgaggtcaggagtttgagacccacctggccaacatggtgaaaccctgtctctaccaaaaatacaaaaattagctgggtgtggtggtgcacacctgtaatccaaactacttgggagactgaggcagaagaattgcttgacctgggaggcagaggtttcagtgagctgagatcgcaccactgcactccagcctgggcaacagagtgagactctgtctcaaacaaacaaacaaataaacaaaaaaaaggtgacatttgagccaagactggaggataacagggagccagaccctagcattgtaggaaaagaaacagccagcagaaaagtcctgcagcatgaaagagcttggtgtgttagagaacaaaagggaacaggatagtgagctggaagtgagaggaggtaccagagaaattgtcgatgttgactagggctgcatcacagtgtcttctaaactatagtgggaatttggatctccttccaagtacaatgaaaagctactattttatcctggggttcatgaacttatgtaggaggaacactacagccatataaaaacgtaaacttttcattgcttgaatcacaaatgtcagcaacaagccatgataggataagcagtatctgtgcctttattatgaacagaaattaaagtacatccatttattactgtttatcacagttatctctaaatatcatttatcatcttatgcctaattagaaattatggtagttattagaccttacaacagatcttgttatttaatgctttaatacaggggtcagcaactatagcctgtggactatgtccaagctgccacctgtttttgtacataaaacttactggaacacagccaaacccatttatttacatatcacagttgcaacagaggtattctagcctgcagtgcttaaaatgcttactgtctggctggaaaaagattgctgacacgtgcattgataaagcagcatatatattactatgatacaatttttttttttttttttgagaaggagtctcttgctctgttgcccagactggagtgcagtggcgtgatctcggctcattgcaacct

SEQ ID NO: 125071 - DNA, 1011 bp, Homo sapiens
cacgcccagctaattgttttatttatttatttattttttttgtattttagtagagacagggtttcaccatttctggccagaatggtctcaatctcctgacctcatgatccgcccacctccgcctcccaaagtgctgggattacaggcgtgagccaccatgctcagctgggacttacacttttattggagcaaacgagtaatatgagcaaagtttgtggggaaagtctaattttgtgtatttatagttgacatggggattggagaaaaaaaaattggagatgtggagacttatctgcagggacctggtgatgggatctttagaacaaaggtggtaggaaaggtctggaaagataaaaagggagagaggttgtggaagaagtagtgatgagacttagtgtcttgtaaatgtgtatgtcacagaatgtattaaggaagaaagagaagacaaggacaagttcgctagaaatgtgcctcaaagatctgctgaaagtaggcaagttgagtgtaggaactgatggaaggtacgattttgggttgattcgctagggaagcagttgattggaaattcatggcaaatagttattaatgatgggctggtactcaggaaagggtgctgggtcagaggaagcagaattaagggtgatgagattggggtgtacgctcaaagatctatttgatggcaggagttggaatgaggagagtcaggagttcagaagaagagttaggcggtgagaagcaatgctgtggacatcacagaggaaacagctacataacctgttagcaccttatatctgaagagtgaagacataaaggttaacgagactcctgggcagtagtggtgccataatgagggcagagaagtcgtggcagaatcaggtgtgggatctgagggatgtgtgctaccgttgggtagattgaggggtagggaatgtgaaagtgatgatttttgtttccacttttaataagatacctgcaggagagttaaaatgttctgtctaacagactgttaga

SEQ ID NO: 125072 - DNA, 1059 bp, Homo sapiens
tgacagtcatttctgtttatcctattgaatctgtctgaatttttatttttaagctatgcacataaatacagttaattttacaaaggtgaacttgacacacataaatgaattatttcacatgggtgaaggtaagcagaccataaggcctgaattgattctccctgtgaatcattcatttccacatgaaaggaaacacttgattacaaaggcatggtggagtgcagtggccttctgtgcgtctagagtcatctggaagtacttggaaaagactgatatcaaggaagtttgaagacaatatgggaattaggaaagtggttgttgttgctgtcagatataaggaaattggggaaaaacgttgttcttgatatccatagcaacattgatatgtaacaatattcactaaaataatcaggaactaggagaatcacaaaagattataattgatctaagtagtcctttatttttgcattgttcatctctatagttctgtcattatctaaagttgcagtttcccttccaattgaagggaaatacaatgtctgctgagcagaagcatgttagaatatctaaaggagaaggtaggtctgcttgtctttaacccgttaatacattcaacataattatttctatctttgcttatcttcatagtttagtgatttttatgacagaaagactgtactttatcctggtaaaatctaatacctaatttgtttcatgaagcttgaaacaagacacttttggtaaaccatttaactgtttttttgaaatgaatcatcatttgtcaagaaaaaggtggcagagtatcatctttcatttttttttttttttttttgagatggagtcttgctctgttgcccaggctggaatgcagtggtgcgatctcggctcactgcagcctctgcctcccaggttccagtgattctcctgcctcagccctctgggtagctgggattacaggcgcaccccaccacgcccggctaatttttgtatttttagtaaagacggagtttcaccgtgtgggccaggctggtctcgaactcctgacctcaggtgatctgc

SEQ ID NO: 125073 - DNA, 1104 bp, Homo sapiens
agaaggctcttacatggcggcagacaggagagaatgagaaccaagtgagagggtgttccccttataaagccatcagatctcttgaggcttattcattataagaataagaataagaataagaataccataagaatagtaccgtaagaatagtatgggggaaaacttcccctgtaattcagttatctcccaccgggtcccttctacaacatgtgaaaatttgtcgagactgaggggaagggactgttgacctctagagggtggaggccaggtatgctgccagtcatcctgcaatgctcggggcagctcctacagcaaagaagtatggccccagctgctaattgtgccaggaatgagaaagcccaggctagaacctttcttccctaaatttcatcagaagtaacagtgattatatatagaagccttaagtgctgttttcttgtgaaaacataaatttaagaggataaagtctggacttctgaggataaaacatgaactagattatccattctgcaattgtgcacctggctgtatcccagaggagccttgctatgcccccctccctttctctcgtggtttgttaatgttggggaaaactgatgaggtctaattgggcttggttaagtgaattcccaaggggaagcctccttgctcctttgctctctcaatggctgctttgtgtacagctcccctctgactctccactggagccacgttattgtattctcacctgttcaacaggttttccctgaacggtctgagaaataaataccagttaaaggggtagaaaaacaagcttggcctttgattcctagaaggttagatgaccttttttgctgtaattctagacaattttatgtagaggtgggggcaaggtacttaaaatgcattttaatttttattatttactgtcttaacccccacgattgtgtatgctttcttttgaatagtgttacctaaaattcacacaatctgtttgcacattagagcctgctttcttaattcttatgctaggatatgtaattgaacttggatgtcgaactgaagtaatgtagcacagataaaacgcattgttcttagagctctcaagtattcaaagagcataca

SEQ ID NO: 125074 - DNA, 1059 bp, Homo sapiens
taatttgtacatgggtctcttgttgttttgggaattttgttctaagacatgttgaagctgtgctgtagttattgggtttatgagttgttggggtattatttatttttaatgtactctgttccttcctcttcccaaagcaaataatcaagaattaatgtttaactttaagttggatccactcactttatattgagagttattattactttaattcacgtttcttttccctgaagccctgatatatctttgggaagatacattttttcatgcattaattattttcttttccagtatcaattgcagatattacaatcacagcaagaaacatctgttgtacctttattatgtgccaggtactgtgctgcctgctttatatgaattattattacgatcattaaatttttatatccacgctagactttacatactgtctatcataactcacattttataataaggacttgagactggggaaataaacttgccaagtcgacacaatttaaaagtggtagagccaagagttgaactcacgtagtctctgactctggaactatgctcttaaaccctacactcttgatgttgaagatgtagggacatctttgcatttgaagacagaaatgcacatacagcccagaacttttcagtgattccaaagacctctgtattttcacgtaacataactttggaagccacagattcgctttgctcaatctattttgttcaggagtacatgcatgctaatttgctcaggcagtagctgaaagcagtgagagatattccaacaaggctccagattgcaagagaaatgagtgtggatttaaaaattaacaggctttgtatgcatataactaagaatcagcttacttgccatgaagatgagtaccaaggccccaaagtatgtatgtcagaaggtaggatattacttggttttgtgtaattggtaataccaaggtcaaatcaacttagataactggtttaaaccattaaatagcttttttggctttagatatttctcaagatttttactgcaagctacgtgcattgcagtctgcaggaaga

SEQ ID NO: 125075 - DNA, 1018 bp, Homo sapiens
tcctgcctcagcctcccgagtagctgggactacaagcgcccaccaccatgcccagctaattttgtttttgtatttttagtagaggcagggtttcaccatgttagccagatggtctcgatctgctgacctcgtgatcctcccacctcggcctccgaaagtgctgggattacaggcgtaagacaccgcgcctggccaatttttgcatttttttagtagacatcttcctctttttataaagataacagtcctagtgggttagcacctgcccaaatgacctcgttttaacttgattatgtctgcagagacctatttccaaataaggtcacattcacagatagcaggaaaggacttcaacgtgtctttctcaggggacgcctttccatgcataacagctgcctctggtccagtctttctatcccctcttcagtggtgtgtccaccagcaaaacttctgtgcctcagtttccttggctgtaaaacggtgccctcttctaggatcgttgagagaattaaatgaaatcatgcttggcagagtatcacgctcatagaaagtgctcagtaggggtttagcttttacagctagttgcttgcagtcatttgatttcataagctaggtttgtggagaaactgaggaagtgaatgagccaaacacaaaagtaaacactgttgataggacaggtggttaactctttcagtgccacaaaacacattctgactcacctgcacacaaattttgcttacaagattgttgtcagcactaattttgctccaagtatttgcttgattaaaatctcttatgctactctttgcagctgacctataacagaaataaatgaactaactagagatactttcttcgttgggcttccatctagagctaagctttacttaggctttcaaattgtaagcaaatgcaaaataactctcttgggaaaattccagagaatctaggccttgagctgttgtaagcaaatgtggccctccttttagggcgggaatctaagaaatggagattatgc

SEQ ID NO: 125076 - DNA, 1093 bp, Homo sapiens
tggaagaatattcagaaatccattgcaatctagttttgataaagcctttaattttccactccttccttttgcaacttcatccatgtgctgcatattcagcccctaagaacccaggaatgaattgatgtgctgccttcaaaacagcctggcgtttaggagttgtgattatattcgagaatctccaggcttgactgttcttagctttgatatcatgaggactatcctcacagggaaagatttatagcatctggggtgagaactttaatcgtggcccaaaggaacttgtgatattttgataaggggcttgaggaagttgttggatatagagcagaatgtatttcggaagggtgcaagcaattttgagcccttctggctgatcattgcaaaatgggtgagcactgggagatcagaaaatatgtggtgggcaaggtagaaagaacgtcaaactggatgaaataagaaaacgggggaaagctatttgagaggaaacttggcatatacttagtatttgtgtctgtttttctcttgaaatgggctgttgtgttggcagaggcttctggctgctgtcagagatatgaacatctgtgctcctttgcagaaaactcaggattctaaagtgtttggtggaaattgtttaactctgccacttgctccatctcctcattaggaagaggttagtctgtactgctcagagtgtgcttttaagaggaagatgtggcttagggttctgggcttcacttttacatactgcatggcagaagcaggtttgcagcagtgaaatctgaggccatcagatacaagtgtgtagacttggtgtaaatcagtttgcttgcttgggttggaagtaagaatgaaagatgccaaattagtaaggcagttgtgatacaggcatccgaagagagccagcaagatggacaggtcacgtgtggctaagttttggaaggctttgctttagtcactgtagttaatgctaaaagctgttataaatgaccccaaaatatcagtgacaatacaataagagtgaagtatttgatcactttaaaatgcattctcctattcccctaattaattctgctgttcaccaagtcttcta

SEQ ID NO: 125077 - DNA, 1030 bp, Homo sapiens
attattattattattattaaaaatatataataattattagttttggtgtgggttactctttgggaagtttaaaacaaaatgttccaagaggtccccagattgaaataggtctcttggtcacccttgctaagaaacccagttctgaacagcattgaccttgaacactcattacaggacagattatttgtgaaatgagtaatgtttgaaaatcatctctgtaggtttttcggcattgctaaattgtgtcattggttggaattttcagatcacaaccatattttgattcccaggcttttggccattttgctaatgtgccagaatctctaaggcctagcccaattgctaatattgacaaattcttgaggagtatatatggtttgttcaggaataaaacggataggactcagaatcttatcagctcatacctgtaggtatggggcaatccatccatctagcaattttctaaactatgtagcctactgtgggatactgaatccctgcccatgagtactgagaaggactcatggaaggatgatagctttctttgcattatttgtttctagcataggaaaactggctaatgttcgtacagtatgagaagtttttagtccactggactggagattcggagctgcccaggtggtcagtgctggcaggaaaaggtaaagaagatcaaagcatatggcttttctactttgcctatctttttcttgaaagaatttatggctgatgaagaccattttgctctggaggaaatgatgatctgttggtggcatgcacctggcctcttagtttgctttgttgtcctgggaagtgggcaagtgccccactggaccttgatctgcattccacaggggactccctgctttagagggacccctacccatgaggtccaaggatgaccacccagcgtagcccccagcaagtactcacacacacttcctccagagcagatcatttagtttaagggaagggcatcatcactttcagagatgggtgttttagtgattagacatgcgacttctctggt

SEQ ID NO: 125078 - DNA, 1401 bp, Homo sapiens
gtatgcagggggtggaaaccaccctaggactttagtccttggctgggaagagactgctgcctttaactttcaggaaagggataggagtattttaaattcttaattgctactgtgtgcctggatttgttccagcatttgatttggaaatattctttatttttcttctttttctttttcaaggctagtcaagtgaagtagtgggagtggagaaggaacaaagaaatctgtaaatggttaagatcaattagttgtaaacacctcggcacttggaccaaacggaaatattcatttgttaattcacaaatatttattgagcgcctgctgtgtaccatgtggtgtactaggtgatccataaacaatggtgagcctccttccaagagaaaaataggcctgttgatttcatgggctgggctgcttatacattagaggaggaagtttgcattgatcaaaggatcacacaaataagtgtgatgtttaaactctgctaagggctgttgaagggggagttactgatgctcagggcgcctacaacagggagattaatgtagtcagggaggtcagggaggagggtgaaagaattttactgggtacagacaactagcacatgaaggctgtgtaaaaggctgaccttggatgttgcaggaactggggagcagagtgcctgaggcagggagcactccagcgtggattagactggagaggaggcctgattgggatcatggggctgagcttttatcaaaagggcaaagggaagtgactgaagagttttacccaagggagtgacgtgatctgatttatgctttgaaaagatccttctggcttcaacctgtaaattttacatcatttaaaattggtcacaatgtgactgtacaatcactcctgttagaatctaaccatttctaaaagaatcaatttagccactagtgtcttctttaaattttaaacagcaatttaaaggagtgatttagcatgggtaatgcaaccacttaggaatgatgaagtacctagttctgtggttctcagacttcagaatgcttaagaatcactggggacccaggaaacagcatttttagcagcctctcaggtgatcccagtgcacgtggtcccagacttcacttttcttttctttcaagaagcatcatcctacaaagtggtgactaaaaaaaattataaacctcaaggtaccacctaatgaggcaaccagaagaggatggaacctccttatcgcccaggtttgaacctggatctgttctcccaatactggggggattttctttcagtgcacccaaaatggattctaaatcctttgagttacttttttcatttattttctaatcctttcatatgcagctgttttctcagatctgtggctcactctctgtgtgtctctgatattttact

SEQ ID NO: 125079 - DNA, 1043 bp, Homo sapiens
gactgttgaaatgttcattggcaggtgggtggttgtaaattgttaaattttcttctttaatctgagccagatgatcaagctgtcaaccagattagaaattatcctgggaataaaaatagaaaaataaaagaagaatgtctgtagtcccaagtgtacagacccagtgtggccccattgtcccagcacgttcaattacaccagctttcactttccaagtgcagtgggttggacaattcattttatggccacctaagtggaagccacctgcttccatttccaatcgctctctctggatgtggccggtttgtttgggtgctttttctacttattgcttcttcagaaaggcagcaactagcttacaggcacaccagctcattaagcagtagctcatgtacccattaaacagtcacttagtaacagcttttaaggagtgggttgaaaagagagaaaccttcatctagacactaaaatgccctggatagaagtatgggtgtcagagagccatgtgccaaacagaaactgcttctccaaattagtgctttgaaagtgataacttttggtctccaccttgacttccattactatagtcatgaaaatcacttgtctaatggctgtatgcatatcttcattggacctgacaaatatacagtcttcagtgtgaaaaatttctggtcactttattttacctaggagagtggtaaacatgggttattcagcaactacagtgtccgctgtgtagcaacgcctcttttctatatatcaggattggtgtgtaccttgaaatagaatccaatggtaaatatatgtttaaagacccataagaagacttagataatgaaatacagatctacagtaactcactggagagttatgttcttaccaaaatatctagcagcttaaaagtgatttcaaacatgtacccattttacagatgagggaattcaggtgtcagggaagctggctgcccaacttcacatagactcaaaaccataccctcttttctgcagcataccatatggtacatacccctgctgccaagtttt

SEQ ID NO: 125080 - DNA, 1066 bp, Homo sapiens
agctcctcataacttttgctaattctcttgttgatagattcataccaactaagaaaaccagagactggagtcctttgaccgtgatggtttctcctttgggcgatgctgaggctacttgtacggttctttttctacttgtaggctgttggccattttactgacccattatttcaggcagtgtcagcctcagtgctattgacatttcgggctggataatcctttgttgtaagggctgtcctgtgtactgtcgaatgtttactgccttccctggcctctgttcactaatgccagtacattagtcgtttgtgacaaccccagatgtctccaggtattgcagattgtcctatcaattttcctgtccccaagctgagaactgctgctttgtcttcctgtgttagtgagaccagttgtgtgttatcagatagtctagactttcaacagcagttataagtgccccagttttctccttactggttattccttagagtctaaggtggtgtattaataaatgagagggctcaccctttatgttcatttctttcctccagctctccaagtttcctttctagctctcttctctcttatactgcagttgtttctctaatccaaatgtttttcaagtttcctttccatgcatgtttcttcctagtacctgtggctgaaaaacactgtaactagtgagtttttgtctcagtttcttaacaacgttttgaattctgaccactggttactgccttaactgtaacctttacataatggcaataagataaatgaaatgagggaggtgggtagcaaagctcagcttggcttgttcagaggcctttgtcacaagacaaaggaaatgtctgtgtgggaatgagttaagtgagttcagtgcctcctcctttgcttgtcaaatccaccttgactagttggatagtaatggttattgatattccattagtgcgaccaggacattgtagcaggtcagggagaagccttcaaggtactgctttatgcgaagtcctttcccactttgtatattagatttctgtcctaatcttgccatgttaactttcttatgtaa

SEQ ID NO: 125081 - DNA, 1022 bp, Homo sapiens
ttctgctctcctacaatatggaagtgaagacaggaggctgtaagggaggctgtgtggcagatgcaggggagatgagaaatgcctaggagaagaaaaataaaagtgagaaaacattaaggtgttctgcaggtgcagctaagtcttgaacatttactaaattactatattgaaaagaagctaactcttgagtgtttcaaagtaatttaacccctttgggtgtttggtgtgagtgggtggggcgggtggggaaagggctttgaagcctttgctgaaggatgtggctgggggtgaggcaaggagctcacctgatcacacactgtgcttacttcatcaggttgcctaatgctcaagggttaaaggtgatcattcctatggaggtaacatttcccttccagatctaagacagtggatacaattaaggtttgtaactcaagcttgtaaccactttttggtgcctgaaaccatccaagtagatagtttggtttataagacattctgttgaatctggaaaacgtggtggattaagaaaccctctctgcatcacaaagcctggagtgtttgctactaattgtgcaactttagttctggttccttctagtcaaccagagaagtgctttttaagcttacggctgtaacccatgagcggatcatgatatcactttagtaggccaagaccagcagtttaaaatgtgaaagagaagagtggtgtggaaaacagcatttcataaaacagacacccagtcttaatgtcaaagtattgctcagtgtaggtaacgattttaaaaagcctgtttcaataattctggggaaaactacatttttaaccaacttgccagggattctgatgacgacgttctagagggctacaagaaatacttagctatctccttttaacaaaatactgttggtttaaccccctgcaggagatgctatttccaaatgttgaaccagatgcagttctgtcggctattgacttaacttttcaaaatgctactattggccgggcgcggtggctcacgcct

SEQ ID NO: 125082 - DNA, 1067 bp, Homo sapiens
aaactggagggtgtttggaggcatctccatgggtcttggtgaaaaaagaatttttttatattacataattgtattaaaaaatgaatttgtataaaatttccgcatggaagctttcaacatttttaaaaagagaaacttaagctttcctccttgaacataattttttttttaagtcaggctttatgcatgaaatggttacatgcaatttctggtcaagatttaaaatgatgatgtctttaaattcttgatagtcaccactgatgaaaaccattgctgtcaaggtaggtaataaaaattttaaaatcatttaataacaattcaaaaatgataatgagtcaaaaagctctgttttttcattgacaagcgttacattgaaaataccttgctaacgcaactcaattttaaattcaatcaaacatttttatatcaactgttacaaaataatgaggaagctctgatttgctgagtaggcttgcatggctagagtagtcaccctgctgctaaatggatgtcgtaaaagagaccttctgctacaaactgctggaaccattcaatttagacctctgactaatgctacatcttccagtatcctgtctgacctcccagcaaccagccctagaacccaaaaatgagacttctcagtttgtacactttgagaggagctaccccactggtatttagggaggaaaacctagctgtgtcttggaccaaagggctgctggaggacttccttgtttgtgtggcacaagaggtaaatatccaagttggagaggatgtctttcttactcgtagggtgttgtggatgggaagcatgaatgggattttgttcaaggggctcccagcctactgggtgtcttgctaattctgggtctcctccacttcagccagtactgaagagcagtcaaaagctacagcccagagggtgctgctggctagaaagcttggctcaccttggaatcatctggatgttttaaacaatactgatgtatgggtcttatgccagagattcttttttaattgtatgggtacagcctagggatcaggatttgtaaaaaacataccaggta

SEQ ID NO: 125083 - DNA, 1067 bp, Homo sapiens
atggtggatgtgtggattatggggtaaaggattattgaataatttttttacaatttctgtatttttagctgtttacttttgtaataaaaatctgtttactaagataattttttttcaggatgatgcttcttgaaaattgcttagttgaaaaatggagagatcagcttagtaaaagatccatagtaagtatcatgaacaatgctgtgaagatggatgtaagtgcacataacagatttctttagagttggggaattcttcccattctctaatctccaagctctcataagagccagcaatagcaacagtatttgtcttttgaataggccgttaagagtgtagctattctcactcagaatttttaccaggaatctatcattcgacttcaaaggtgatttagttgtgttcaatactaaggtactggttatttccaagttaaatgagccttttgtttctttattacatgtagttgttttagtgaaccatgagatacttgagcagacttaatatctattgagattaaaactgacatatatttggaggggtgaaatatctagtactaaaacttaccctatcactatacacagcagaatcttttcctgtatttataataatttaagacttttgtcaaaaattatatgcaaaaagtaatcgttttgcagtcaaatctatgatttttgtggtaacatcgtagaaatattggtaattcaattagaggagttagaataattttttcccagagatgtgaaattataccaatctaaagacaccaggtaattggttttaaatttttaaagcatccttctttgcaaaatatgtcatatatattcagaagaatttgtgtttataggttcacaaaacatattgctattgcctatgctctcttagtttgcaccaataaagagatccaagcaagagaaaagtacatattaacaattgagttatggagaatgtagttagaacacagcctccgctagtcagtgcgtttctgaataagagaaccaaacactattgtgttaaatcagagctaaaaactcatgagctgctcaggagcatgcttagttctatta

SEQ ID NO: 125084 - DNA, 1105 bp, Homo sapiens
ggcctctctttatggcatttgcatcattaggagttgcaaagtgaatttccatggtttgaaacgccaatggactgtaagatctatagcaaaagggcaccattagtttatagaacaaaaccaaacttgataatatcatttattctaaaagcatttgttcaagtattaggcgacttgaagaaagtacggaaagggcagaccctttcaaacaatatcaagggtgcaaaataatgcattatgaaatgcagcacagagcagcacagtcatcatggtggactgggaattgattcgaagtctttcaagaacatgaatgttttcagtagggtcttgaagggcacagtaataataataacaactaacagttgcatacttattatatatgaggcatgacactgaggactttacatctattatataatttagtttaaatctcacaataacttgacagtataggttttatgatctccattttacagacaataactctgaggtctagggagattaagcaactttcttaagatcacacagctaatgcttgaggaagctaggggggggttctgacgcctatggtataccaggttcacattcattcatttatttaacaagcatttgttcatgttaggcactgtgtataaacagaatggctcctggctttcagggaggtcagagtctggaggtgaagtcacataaataaaaaaaatttccatacagtgggatgaggggtgagagctggggttgtgatgagaagaactcagttgggcacctaacccaggcttcctggaggagctgaaatgagagtgagttccaaaacacctgtacaggttttccagggagatgtggagagactgctggtccagggggatgcaggtgtatccatgcctggtatgtgtgtgccatcccggagtttttagagctgagtaaattccaaaaaccacagaccactcactattagggctgaagcccaggacatggcgaagggtcatactgaggagttttaaacagtggaatttgtgattagattatataaagatccctggatgtgtccttaagaatgcattcccaagatgtggacacaaaatggagccatgtggagcaaaagtggaagtga

SEQ ID NO: 125085 - DNA, 2037 bp, Homo sapiens
tctacttcaatgagtcttattgctggcatgaggaccagcattctcaaatccaccagactaggtcattctctccctgtagtcagaactatgtggggagccaaattatcatcaggcagttgtgagcaaagagttggagcaaattcattgagcaaacatctaatgattgcctgccctaggttaggctgtatgctcaatgtggagttttccatcatgaataagacaggccagcctggggtaaggtttaatggtaatcaggcaaaggcaaagtgatgcattgattttcacaatagagatgacttggtggtggttctgtgctaccccaactgtgctgttcctgaccccttccactcagaatggacccttggtgagtactgctcaagtctgtctgagcaacccttcttccatgactccatgactgactaatatagcctttagatgtgtgttttatacctttagtggagtcacagccaactcttgctggcttagaagcatttttgtccctttgcggtgatttctcattcctctgccctaatccaataggtgctggtttcacagttaaacttctaaaagacattgttttccctttctttccgagttcttggcaaggttctttctgacagtcacatcgctggccctaagtcagatgtggaaaagaatgtttaatgcataaacacatttttaagctctttaagtgtagatttgttggaacaaactcagaaactttttcaggtattaacagtctggccaagcaaccagatgttatttgaagaaaatatggatgagttgtctcttcatatttatgagtaagttgagaagtaagttttagaattggatcaacttcttaagattttcattttgcatccagatagttatggaaaatcccattgatagttactgtggaatgactaggattttccaggctctgttttccctgagatgatggaaaagattaaacaactttacaagcttcagataagacaagcctgagcagcaaatgggaaatattagtaattgataccattttattttctaattccaactgtcttttctgactccttgattaaattcacaagtatttatttgaaagactgaaggaaatcaagaagatgattttcatatttcaggcagcatgttgaactttataggggaagcagcgttgatacacaatgaaccctctcaggccaccagtaactataggctcccccttacaaaatggtggcttgggtgttggaatcaatgaagctcttaatgcagagtgagcagagaggcagtaaaacaatatgcacagtctggtatcttggaatattatttcatcaccagtcgtacatgttctattaaggatttgtatttgtaaaacatgaaaaatatgtcacaaatggggcagcaggtggattcttattcaaattctgattaattcatgtctgcttctcttgattctcccagagcatattatttcttggagaagagaatagcattaacctcttttttaaacagagaatcagcctcctgtagtggagagagcaggggcattcatgttagaccatgatggagtgacaaccatggcttctaatcctgccttcaccccaataaggtcctcaacattgcagaacctctgtgtttttcatcttttaatttaatttgaatgatgcctacaatgttgatactaaatcacttttaggctttcatttgttaaatgctaggtacagatagtattaaatgatatcctgaaggcaccaattgtacttttattatatcaggctgattcactgtttctaatgcaatgaacttgacacagattttaaattttttctcaatctgtcccattgtgtagacaaattaattcaaagttctttttcttccttctctttttcatctaagcctgtgcttatgagtagaaaaagagaagaggctaccttgaaatgcctcgggcccaaactcagaaggctctgcactcaactgagcctcccttcctactaagaatggaatagtgttgcttataggggtgttggtccaagtatcagctgtggatgattaatt

SEQ ID NO: 125086 - DNA, 1045 bp, Homo sapiens
acatccctccccacacacactcatacatatatacacatttacatctatatttatttctgaacctccagttctaatccatacaggtgtttaaactgatgccttcattctaatccaacactacatggttcattctagttttttttttcctttcatttttgctactcccttctcagccagtgagaaaactggcttactattcaattgcagtaggtaaccagtcatgtatcattacgctgtctccttcacacatgggctctgcgctccaggccagcccatgtagaagcctatcttccttggtcctacctagtggctttagtctaaattgttcaagagaaaggagtagatgaaattatgttcttaacatatgtttgtattgcttttggattctcagtatgtcatcattacaaatcctcagagggtgtttctgtgtgactgggggaggcagactaatataaagtgctcaataaatctatttgatcatgaatcttgtcttgcatggattggattttcattttaagaaatcacgactttgtgaatattaagagcatgacttctcctttgacctttactccatcattttggtctcagatggctggagatagcatattcttttgtgagctgaggaagtcttgactgcttgtggcctcctgatcctcaaagaataaaccatactgatttgcaatacttgagtttcgcaatatttgagtttttcttcaagaaacagattttcttggaagcacacaaagtttgatttaagggacttaattcagtgtgtctatagaccctggatttcagacaattaatgctgagatggggagggagaagcaggcactggggaaaaaagatccaaagaagataagcccaggagagtaaggaggctgatggaatgtaagacaaatttacgaatggaagccagaggtggtcactatactgctttgaaaacatctttactttctccaataaccttgagctgtttcttcctgattctgaccttgaggatggtggtcaggggcaaagtgcccaaagatctgaaaatattccacca

SEQ ID NO: 125087 - DNA, 1068 bp, Homo sapiens
tccttagcagggtgcctaagttaccctcagtccccccaaagaaaggagaaactcttgggatgatggctcccctaaagaaggcaacttctcctggaggaaaaggatatacatgccttggatgactcctgcccgctcacagaaggctgcttttgttgtggcttaaagttagatcttctggtagagttctagaatgtgggccctgccgatgagtgacagccaaaagctcaccttggaagaggcaccagagtcacagccccagctctctcagggaagacgctgctccagagcatctcagaagccaccagggaagacagtggcagatgggaagccggtggtgcagggccaagggcacagctctgcctgacgcagcattgtcagcaataggtaacatataacttatgaggagtatctgagtaccagcaggcactcttgggagtgaaggatgggggaagagaatctgccccagacttcatatccattggaaatgccacatcaggtgctgtatcttggcatggattgtgtttcctgtaggtgtgggagttcttcttctcacagtcaagccctccacctgtcccttgtcacacaccctgtccttttgaatagaaattctcatcctagcccagcttcaggcacggcctggcttacccttggaccccagagatctcacccttctgaggtctcaactctccttaaggagttaggaaatgaagcttgggaatccacttctcggacatcagaacacagttccttttgcacaggacaagtatttatttaggttccacttagtatattgaaaagaatttgaagtgttttggtggtttgtagtcctctttcatcatgctgaatcaagcctcaaaaaggtcaatttctgcagttgttaaaacacagaggaatttttatagtgtgtgtgtttgcataagtttataaggagctttgtcacaaggtcttctgttttagagaaacaagccattttactcctttcatagttcactgcaatttattttatactaattttcgtatttacctttatttcaattcatgttttagtcagctagagaaattattcaa

SEQ ID NO: 125088 - DNA, 1010 bp, Homo sapiens
gaatacttttgatttagggttagggatttttccccctctcttttagttcaaacatgggtggacattgtggaacttttctttgttcactgtgtcatttgtcttctatttcacagatggaatcactgaattcatcacttgacacagtactagtttggataagtttagcaaggtaaccaagtaacgggtctaattaaatctttactggaattagtccagtttgccacatttccttgttaggaagaattctgaaaggtaattcccgtctgtataccatatctacccatacgcctctttctagaagcaggatctcacaaaacgacttatggtatccttgttttattgatggattctgataaggtggtggattattcatgttcataaaatgaaaacatacaatatgttgtcgtgtagaagtcactgtctttaaaatctaactgtctcaaacattggtcttttaaaactgcattattgcattgcctaaaactgcatgaaagaaatgaaatgaaacagcctctgagggatattaccttacttatgttcacagaaggatggtgattaacatcatttggatttattcaatggacagtttgcctgagtgattgtctatgccactcattgttttaggttttagagattgagtagtgagcaatttagataaggcccataccctcaaagactttaacttttgttggagaatataataaacatgtaaatcaaagagacaagtttagataggaataaatgtcagaaaagatactactgggtagagagtttgagagtgactgggttgtatggagaaatgggatggtcagggaagacctccctaaggaggtaacacgaggtgacattttgggtgatagctgaatgtttagctgagtcagccatgagaaaatgggctggaagtttctaggcagatataaacagtgtaaaggagctaaaggaagaatgaacttggcatgttccagggacagagggaagcccgtgtggctggagctgagtgaacctagggg

SEQ ID NO: 125089 - DNA, 1034 bp, Homo sapiens
acatgattcacccctcttagtttagagctagggctgtggaggcccagagaaggtcagtgagttttaaaataatgcatctaatggccaaacttctatcaaattttcaccctgctcattttcaggctagtgttttttctgctttattttcttcatgaaagtcccctatcaatatatttctgtacatataaaaatataatatttcaacagcatgaatttattgtccataaacttgtaaaagttaattttaaagagatgagacattgcttcttcttgggctacaataatcatttgccttattttccttcccttttctgaacaatgaacaggtataaactttctggatgaatctagtctctgttaatagaaagctgtggtttaaaaatgacttttaaatttttgttttaattttagaaatgtttgaaaaggagtttaaaatgtgttactattttcctagccttaatcttacgcttagaagtatgggaatattgcctacagtttgctaactcatagtttctcttagcaagtagagtttcttcctgttattgaggaagcccttaggtcagtgatataacttctttttcttagtaatatgttatgtttaaaaataagtcaaaatcagtttataaattaatatgaataagaaagctgttaacagtggtcttaaaatttaaaaatgcccattatttatttctaaggtttgcatattttagtaattatgagtggaatatggtagatgaataataacagactaataaatagcttaatttactttctgtatgtctttttgactctgctgtaacttaatagaatttatctttttctttagaataattttaatggaattagtatcttcttttttaaatattggaaggtacttaagtttaagcaaaagagagtttttgctctttaggccaaaataccaaacctagacatcctggctatctctattctttaagatcgttcatgcaactaatgcccatattctgaagacccaggtcatcatgatttgaccaccatcttctgccatgagccta

SEQ ID NO: 125090 - DNA, 1050 bp, Homo sapiens
tccaggaaagcattcagtagatgattttctagcccatgcacagttatacttacaggactgtggaggttttctccctgtcacagcaaggtaactgagtcgttcaccaagaggtttggtccaggtcatcaggaacacctttcagttgtagctaacatcctgccttcaccctttcctacagtcagtttgcttcttctctcttgccattctttgctaaaacagctattttgtagtattgctctaaaacattatgtgttgcttctcatttctctttctctttatgtcttcatgaaaacataaatcagtcaaggtactctgttgttcagttagagaaatagttgcacagtggagagggttgcacagttatatttgatcagcttggatttaacatggtgtctcttttttatttcccaaaggtgtcttctctttagggatggtgaggttggaaaaaggctcctgtaaccctcctccaggatgaaccacctgccagaagacatggagaacgctctcaccgggagccagagctcccatgcttctctgcgcaatatccattccatcaaccccacacaactcatggccaggattgagtcctatgaaggaagggaaaagaaaggcatatctgatgtcaggaggactttctgtttgtttgtcacctttgacctcttattcgtaacattactgtggataatagagttaaatgtaagttggtggttctttcataactttttaagaagtgtttccagagacaacagggtttttttgttcgtttctcttatcatttgtttcatttagtaatttccatctttttccaaatgaagccattgcttttctcctcctgatttggacctttcttgttctttaatattattgtttaaggcaaatgtgatcagtttaaaactcatgttgtctggggttttgaaatttgaattcctggtattttgctctgtaacaggagttgacaaactataggctgtaagacaaattcagtaggcctgttttaataaagttttattggaacgtggccaggcctgtctgtttacatattgtttatgg

SEQ ID NO: 125091 - DNA, 1181 bp, Homo sapiens
ccctttttcatcagtaagaaaatgcagagacttaggccaaacatgaaaacgcattttgatttgcttgttttgtatttttcatgcttcatatccagtctaaaagtaagtcctgtcaaatctgcctctaaaatatattcaaaatgtgaccacttctcttcttttccactgtttctccttttccactgtttcccttcttttccactgtttccctttcttttccactgtttccagcttcaaccaagccacattatcactcatccaaactgcactcctggctggtcgcctgcttcctctcaccctgcaatccattcttctcacagtagccagggtaacctgtgaaaaacaaaagtcagatcatgtcactttctgttacagctcttcactggcaggccatgcttttagaataaaatccaaatgtcgtactttggcttgcagaggccccagaagcctctcagacttcctccccaccctctgttcctggctcacggtagatgagcacacttgccttcttctgttctcagaaaggaataagctcctttctatcttgggacccttctactagttgtttcttctatatgaaatgattaatttcctttatctttttatagaattcaacttcttattttgctagtatcagtttaaatgtcttcattattctgtcacactgtcctgcttctgttgtctgtgtagcatttgttttcttatttgctatctctctcaccttgccagaatataatctccatgaagacatattattttgtttactgaagtatttcctatatttagaacagtgcctggtgcgtagtagatgctcagcaaatatttggtgaatggataaagatcattgtggcagtggtgagcaggtgggacagattggcagtaagaacatgaattcggaagctgttgcaggaatgtcatggaaggcggtgggaataggaaggaaagaactaacctgagagtcactaaaggaaggagtatgagaagacttgttgataggccgattttatcatccccagtatgcaaagatgactctaaagtttccagtgatgaactctagaagagtagtaccagaactgactgggaagggattttgtgtgaaactaaagatagtttatttaagacatcttgaggtagagacaaaaattttgaaatgaggatttagagtataagttagggataga

SEQ ID NO: 125092 - DNA, 1035 bp, Homo sapiens
ggaataatcattcttataatattctggatgttgacaagtttccttagtccggagagacagtaatgagactaaatggttgggtgtctttcaatcattattcctccttcctcccaggttttcaattctattcatttgtagaggtctgtagccaagcaggtctacagaggatccatactaattacaaagaaatgtagacctccttaagggattttcgggcacaggatagtatttatggtatgctttcatttttgcataacaaatacaaatatgtgaaatgatacctaagctaggaatacccttccctatggcaactttcattcgaatttgaacctggcaaaggtgttccttaatgttttccctcttatccaggtctctggttaactgtccttccattggtcctcttttaaaccctctgcatttgtttgctccctctgatcaggctaatccaggggctctgacagttaccctgcttgggtgctgcattagctgccgacacatgtccccttacttgattttttaaaagtattatgctccatagtttcatttgtcgaattttgagctcgataatacaagatttattttgacagtagcattgggagaggacagaaagttgtatcaggtttgagtctagtactgtccttatttcattatctattcatgttaaaaatatatttaaattgataaaagtgcagaatctttaaatgccaggagaaataaaaatgagaaaccacagagaatgtttacacttctatcctgtgtcatgctaatggccatcattgacgtttgcccggatgtcggggagtcttggccttccaagacctaagacagtggagcgtgatcagaaagtaaggtagtcctggataaaggtgaattgccttctttaaaaatatacttttgtatgatggaagactttatcttagaagggaaaaaataattttcttaacattttaattttcccaactatgaactacagaagccattatttttcactatacatttatatctgttgagtgaatgaattcagagttgaggaat

SEQ ID NO: 125093 - DNA, 2095 bp, Homo sapiens
tttcttttaattccccacccattcaatgttctctctctctaaataaggaattgtgtcatcatctcaaggaaataaaagattaatgacagataagggagggcaacagaaggagccattcctattttcttgttggagagcctttattctttcaaatggctcaaatagaacccattgacatatctagtcactgaaaggaaaattcacctatttgtataataagatgatgaaaatgacatcttttttttcttgccttgttttttctttcataatgggagattaatgtgagacctaatttgctattacattaagttgtagagcagggattcccaaatgctggtctacagaccagtgccagtccctggtagtctccagctaaatcacagtaatgaagacagtctggtgagtttttcataaagctgtgtcatttttgtatatattttttaaaacatccctttattttcttactttcagcttctggcagtttttcgatttaaagtgttaatacttgcatatgctgtgtgcagactgcgccattggtgggcaatagcggtgagtatgccctgcatgagtgggtcatctcctccagtgctggtggccaagtcctgctctcaacaggcctgggctgggagaagatacagttctaatgcaggtggaatcccaccagctttcctgagtcccgtttcctccatacttaagtaggtttaatactccagggcttctttccaatgttaatgagtaactagatttgtctcttggtgctgagccaaatgaggaatctagaagcccaacagtgattattggccaagcaccaagccaccctctacctcattttgcaaataagagatgagaggagacctctgtcacagagatatttggaaaatgtcttatttggttgaaactgcttagtgattgttttcatgacatggtctgtacttatttaggtaattgccttaccccctcctttcttccccacaaccccctgtcttggagggaaaagctctcagtctctctgttgttgccttggacttctcaaggacaaggacttttttactcctctgtttcctggcatctagcacagagagctttggtattcttaataagtatttagagattgatagaattactagcagttctgcctgacagatgtctgaatatttgccttttgtaaagctttaataagtcagttctatgggaagaaaatgtggagctcctcagactagagagagctgctcagaaataacctgcagttctgcaattagagggtgagagctcgggtctgggtggcccaggcctgggtttctccagctgggaataggacttgtgctgccctcctgagtccactagggggcgatgtctgtctgggccatgtcttctgagcattctcagaatcacggggcagcggtcagaccatctgttaatccggaagctctcatttcatggatataggctgacagtcttggccagacttgactccctttcctgaatactcttttgctgatatcatcatagcttttgatgattgtaccctcccatttttctgcattttctacaacagatccctttgggatgttgtattcctgagtccccatatgtatgctagtatttgtcagactatccctctcaatgtttgttttagaaaagtgtttgacatatagatattcagtgagagctgtaagacagtatcttcaatatctgctttcagattatctgaagaataagtctaatttagcaaatcattttattgcttctgattcttgttttaaaaaacatttgcagagaagagtctagaagctggaaggaggagaagtcagctggtatttaaagagtgcttagtgtgagcctgtaaagttaattagtgtcagaatataaaatgctaaactgcctcctctcccaagcagctctgtgtgtgtgtgtgtgtgtgtgtgtgagtgtgtgtgtgtgtgtgtctgcaactttgttaatacttattgagcaagatacttggtgttccctgtcctccttctgtcagtcaagctactattggtattcattttggtcaggtttcaccatgctaaaaatattagttgaaggaacagtgacaaggctcaggtattat

SEQ ID NO: 125094 - DNA, 1930 bp, Homo sapiens
ggctttggaattgtaccttctggtggatcaaacttagttacctagcacaccagcctgctgaaatgtgggagaataaaccacacacagtcatttagggattgtgtcacatgtagaagcccattttgccccagtgtgggtctaggggagagagactgagtgatatgggaaggagccaggctaggcacaggtttttcaggccttgcctgctcctggctcagacgggtctcttgtgaagagggaggtaccttcacagtgtgagatgcctagtgtgaacagtgctggattatgtgtcttgcagttgacaacggcagtgaccagtgcctttttactagcaaaagtgatcctttcgaaggtatggcctaccactttttctatacagttaccatcttcagtgatgaagcctcgtttttcagtgtgagtttgtggtaactgcatttccctttcctggtcgtattttccagcttttctctcaaggggcttttggctatgtgctgcccatcatttcattcatccttgcctggattgagacgtggttcctggatttcaaagtgttacctcaagaagcagaagaagaaaacagtaagttcctctcaaagtcagcctcctgaggcggactggataccaagctgggaggaagagatgtggtttcttggtgtgaatggggctgcaaatgggtagagttaggcagtggtggggtcttcattctttagtggctacagcagaaatcgagagaagggttgggtggatgaaagggtaagtaacagaaagcagctcctctctccagctatcaggccaggcttcccctggaagaaaatgtgaacactggtgaaaagggcattcaagcaataacaaaaaatagccagcacttttttctccccagacaggttgttcttttctccctgttagcaatagacaggacagtaagcattttgtgcatgtaaacagaactgtgctgtttagggtcagagaaaataaaaccaattttaagtgagtggaagcaactattctaaatacaagccagtgattctccaaagtctcccattgtgatccatacagcagttggtggcttcagatgggcctctgttagaacagttaaatgcctagggctggggaccattggtgggtttaggatgaagattattcacaggaggatgacagcaagccagagcgacgctcagcctttcaccatcctctgagtagctgagtcatagctaacaaggtgtactcatgaatcctgccaaagctgctataatctcatcatggctttcaatatcccagaatattcactaggaaggccaaatgattgattaagctttatggtaaattaccaagctgaaattcttctccacataatgtccttaatggaagcccacatgccccacccacccatcttaaaggtgaaacgatcaaagctcatttcagacacccatgcagtttcaagacatgctgtttttatgcctctgctggccatctggctcaatttgccctgcctcataggaaaaaaaaagtatcttatagaaagttaagcatgattataacttcaaaaaacagcaggatgcaaaataatcttgcaagtggttttattttggaaaatctcatttacatagaagaaatatataagaaaaggataattcaagagtagattttaaaaacccattaatcagactgagttgtaccttctatcctgtgccgtctattcctttgtgaaagtgtatcttggagaagttataagtaaagctaatgaaagtcttttttaattgtatataaatataaaactgaactttgttgaaaacatatgaactattactatgactgaggcttgaatggttataggattaaaccacattcaaagtgactaataaagcagaacacacaattaatgaaaattttaaattagcacttattttcattgtcagtagcatgtatgaca

SEQ ID NO: 125095 - DNA, 1036 bp, Homo sapiens
atgtacccaaaggaaatgaaagcagagaccacagcagatatgtgtatacccatgctcatagcagcattattcacagtagctaaatggtggaaacaaatcaaacagctgtcagcagatgggtggataaacgacatgtatgtacatccaatggaatattattctccattaaaaaggaatggaaagctgggcacagtggctcatgcctataatcccagcactttgggaggccaaggtaggaggatcgcttgagcccaggagctcaagaccagcctgggcaacatagggagaccttgtctctattaaaaaagaaaagaaaagaaaagaaaagaaaagaatagaattctgacacatactataacatgtatgaactgtgaacacattatgctaagtgaaataagccagacacaaaaggactgtcgtatgatttcacttagatgagatacctagagaagtcaaattttcagaatggtgatgatggctgcacaacagcatagatgaactgaatgcactggatggcatgcttaaaaatggttaaagtggtaaattttatgttaaatatatttttctatggtaaaaaacccactatttttaaaattgctaacacttttttaagtgtcaggtgctgttctaagctttattaatattcactcatttactcctcccttgtctgcttatcttctgagatacagatcacaaaccatagtgtctaatcactcctccattacatccattttttataagtctgtgtcttaccactaatctcttgtaagattgtgtctaacctattttcatattcttaatgcctggcatattagatgtttgctaagtgcctccactctgtgatgtaaaactcgtattatccctaatgtagagatgagcaaatgtggcacagagaagtgaagcaatttacccaatatcacactaataataagtggtgtagctgggatttgaagctggggtccagtgctagagttcatgcttataactgctaaagtatattagcctcttggtgtttatgaaaatatagacttggtca

SEQ ID NO: 125096 - DNA, 1082 bp, Homo sapiens
tgtgatctcatggcatttaaagttttatttgctatacatttgcttttaccttacagcgcatgcatttttcatgttataaattctatataaccataattttaagtggatacaagatatgttatggaactacagtattaacctttcttctattctcagacacttagctttcttttctaatttttagagagaaaatctacataatgaataataagcattatttcctcagggataggtctatcctaaggaaagaattccagagcggaatgaccaggtcaaatctaggaatatcctgaagctcatgagacattgatccagaagggccagactgtggtcactgccacagtgctctctcactgctctctcgctcgtctgccacagccattgttagaaacacctagattcaattatttgtaccaagctcaacatttttgcatgtaaaaaaatatatgcaagcttgtcagcaaagaggcagaggaagaatagtgattgataatagttattggtctgcatgaatattcttagtacataagtgaaatccattttgacagattagtgtaagtgatagattattgtttaaaggttttcctgttacaagaaataaataaagctttcaaatagcagttaacctaaatctcttgaggattaaacatatgtttaatgtttttatgtgtatatgttataattttaaacctatttatttaaaatagtttgttactgtaatggaatgaaatactttttctttgtccccttctccaccacgtaggatctgaagaagctgaagaaaaacaggacagtgagaaaccacttttagaactatgagtactacttttgttaaagtaagtgtttgaaatgaaaccataacaacaaagtagttaagtatggagatttcctttgagtagagtcaaagtagaattcaaagaataagagtgtaaggatagccagagttatcttacttgcatgaatttatcagtcacattttattaatgccaagtgtcttaacattttttatacaggtatacatttataaggttttgaaaatacctcagatttctaaatttctaaagaatagagatgaatttatg

SEQ ID NO: 125097 - DNA, 1018 bp, Homo sapiens
ccaccacagtcatgtagacgcgaagcaaaaatgtgggcatgctcgtagttgagccttttctaaaatgttttaacatgaattctaatgtgaccacacgcatggtccttcgtgtgtctgtcacagcccctcttcagcacacagacttttatgtacatgtaaggtgaccgtggcattttgccttttaatgctatttattaaatacttttgtcttctctctttttctaagtgtgaaaaaccctcacagaaagtcatcgaggcaaaaagaggcaggcagtggagtctccctgtcgacagtaaagttgaaatggtgacgtccactgctggctttattgaacagctaataaagatttatttattgtaatacctcacagacgttgtaccatatccatgcacatttagttgcctgcctgtggctggtaaggtaatgtcatgattcatcctctcttcagtgagactgagcctgatgtgttaacaaataggtgaagaaagtcttgtgctgtattcctaatcaaaagacttaatatattgaagtaacacttttttagtaagcaagatacctttttatttcaattcacagaatggaatttttttgtttcatgtctcagatttattttgtatttcttttttaacactctacatttcccttgttttttaactcatgcacatgtgctctttgtacagttttaaaaagtgtaataaaatctgacatgtcaatgtggctagttttatttttcttgttttgcattatgtgtatggcctgaagtgttggacttgcaaaaggggaagaaaggaattgcgaatacatgtaaaatgtcaccagacatttgtattatttttatcatgaaatcatgtttttctctgattgttctgaaatgttctaaatactcttattttgaatgcacaaaatgacttaaaccattcatatcatgtttcctttgcgttcagccaatttcaattaaaatgaactaaattatactgtgtgctgttttttcaaacatgaatattccccttgactcaa

SEQ ID NO: 125098 - DNA, 1035 bp, Homo sapiens
aaactggttgccattgtatataaggtaggatagggaaggaaggaaatatatttacacagaattgatcacagagttttatttagtagtaattactgtataacctgcaagtggtggttttccttattattatttgacagaagctggggttagaggagctttagacattttgggttccagttaaacaacaaacagtaataaagcatcagcgataataaaatgcaaatctctaacaaaaataagatgaattaaaatttgattaatatagtgcttttccctgttgtagagggcattgcattactattaataaatatacatatgaatggcctcatatcagagaataggacttcccttctggctttagaggccttcttcctccttgggatatggcaaatatcttcctcttttcatccaggttggagagtgacttgtaagagtgtctgcttgaaatctggctgggaaattgatttttatgtattcttatcttctgcaggtggaaacactgcatgattttgaggcagcaaattctgatgaacttaccttacaaaggggtgatgtggtgctggtggtcccctcagattcagaagctgatcaggtaaaagaaaagataggaagatgctttgggctacgttgatttttttctgagggtctgttggacacaatcacttcctaaagatgtttctattttctgagatgctacaagccatctgaaaagggcttaagggcttgtgacagcatagatcattaacgaggtttctaggacacccttttgggatgctgttgcattctttttttatataatacaaacagttgactgtttcttatcacgtaaccactttctgggaatgttatctctgtaacacctgtcttcaggaaatgcagacactatgaatgtgaactaaaagaccccttcaaaagtggttgcctctgggtgtgtggatattgatgaggaaagaacctggggaaccctctggagtgatggaaatgctttgtatcttgagagggatgtctgcatgtatttgtcaaaactcattgaac

SEQ ID NO: 125099 - DNA, 1042 bp, Homo sapiens
agaaaaaacccagcatatagaaaaagaaagtcaacatttcaaaagtatattctagaaatgttagctaaacccaagataattttccataaaacaaagtataaatggatccttgacgcataatacctgagccaggcaagggaaaatatctgagagtgtcatccatctccaccctcgatcagagacaactcgcatctaccccgccatgagtatgggattcctttctgaagcatccaggccatttggggcctgctgctactctcacagaagtatatcctttgacacatatatttaggggattcagagcaggtgattctatgtcaagacttgataaatccctctccagctcctgttctgaaaaggatatctaagagtccccagatagcgagtaaaatggaacaaagaaaatgtttccacgtctactgtaaacatcaagcctatagagatttctcctgatttgagaaaactaagcaagtaaatacatttttagattagcaaacacctatagagcaatacaaaagaaaaaataattattgcatgccagagttaaaagtttctttagagaacatgcaacaataacaaaaattacctgacatacaaagacaaaatttgaaaattgccttcctttttgttgtcagtaaaactcaagatgacctcgataggtgaaacaaaagatgaagggtgagatgataaggcaaccatattgagaagaaaagaaagtcactttgaaaggcagatgaaaagggaactcaataacatgagaaaagattttaaggggaggaaatgtaatattagaattaaaatttgcatgagatgtggtaaagacgagaagcaacactatagagaatcgatttagtgatatgaggacaagctggaggagttctcccaacacataaagagaagcacaagcaaagatgatagatttagggaccaaggagtgaagatacagctcatgggtagaagttcatcctgaagaagagactataagaatgttacagaagcagaagtggccagtataatagaaaaaaacatgctcaaactgaag

SEQ ID NO: 125100 - DNA, 1043 bp, Homo sapiens
acttttctagaaaacaggagagaatgtgtctgtaaaacctcagtgtgactttgcatttggttatttctattcacacaggcacagtgattccagcaaaaactagtctcctaatgatgaaccccagcagaacacagtgaatccattaaagacatgtatatttccatgtgaatataacttaagttccagtatttaaagtgaaattgtctcaagaattcatgcttcaaaataaatccttgtttgtttcttgaacgtgaaactaccccatttatcatctcatccctccactttgtgagaggtagaaagcagtaatgcatagtagagttgtgattcctaatttgataccaaatgagaagagagagaaaagcttagttaggggatgagtaagaaatagaaatagttactcctggcgttagagaagattcttaaaagatcagtgttgcagttatgatgggaaacatttttagcaacagcttaaagcttactagtaaagatgaatgaagagaccttaagagatatcacttttgagcatgtcattgctacacttcagaggatttgggctctttgaggactagttcatgagggttatttgtagcactatggttttctcatgggaatagtgcatacttatcctagctcctgcctttcatattggatgcttggaattgagattaaatagaatgatttcttttaaactattttaagtaaggaattctcttctggaaagtttgtcttcaaggctggtttgatatatttgcaaagacaggtgtgtctctcataccttgtcaatagattgtcacacttttgccttttgggcaaccagctgaaaggcagagtctctctggcctgcaaataaatatttaaatgtttcaaatacaaattatacttgtgttagtaatggagccagtgaagctcattcttcatgttcattggtgattctccagctgagtgatgaagatggagaacggaatttttaattatcaatcatgaatggtttatgagaaatggagaaataccagtataaaaggaaaggcaattggttataa

SEQ ID NO: 125101 - DNA, 1081 bp, Homo sapiens
ttaagctggtcatcctacatcctcttgaatgagatgggaaggaaatagcattagcagtgattagggcctgcatttcctcaaagatgtgacaagctctaaaatttggacaccttgtttacttcattttaatgaggtgtgtgtgtgtgtgtgtgtgtgtgtgtgtgtgtgtattaaaataacctcatttgtgtttcaaatatagttttctactcacatagtgaaagttgagattgattagacctgtgctatccaaagctaagtgccatttaagcttatattaagtataatacaattatgtaaaatttaaaatgtggttttgttaccctagcacatttcaagtgctcaatagccacatgtgactggtggctaccatactggataagcacagatatggatcatttccttcaccaaaaaaagttttattgaacagtactgtacaaaatgcttaaaaaatgcttatgatttcaagaacttttgtcacctcagcatttttttatgttttagatttgtataactaacagtatttttgtttatttgctttcagacattgccctgggacctatggacggtaagccactaataactctgttttttcatgtatcttgatccccagaaatttggaaaccttgttatattttatttcatttgcaacagaaagaagacacatacatttaatgatgatatagtcccctagaatgatcattaggccactgaaagtcttgagcattatcagaaccggaagatgatggtgaaggaagagtacagtggaccagactcctgggtgaataatggtcaataatttgaataatggtcaagagtttggccctttgtttctttctgtggtggttggtggcaaaaggagctgttgcagtgaaggacacacacacttaaatagaagacaaggaaagtgtgaatgagaaaatggaagagatgggctacttggcacatggtaccattttaaaaaaaagtgattgtattcaatgaagcttgggttaataagaacttgagttttagagccagatagccctggattttagtccaaactctactactcataaccttgagactttgagcaattact

SEQ ID NO: 125102 - DNA, 1062 bp, Homo sapiens
cactgcaaccttcgtctcccaggttcaagcgattctcctgcctcagcctcccaagtagctgggactacggtcatgcaccaccatgcccaactaatttttcttttcttttttttttttttttttgtatttttagtagagacagggtttcaccatgttagccaggatggtctcaatctcttcacctcctgatctgcccacctcggcctcccaaagtgctgggattacaggcatgagccactgtgtctggccctcacttttcatacatttctcagtttttaatgtctgtgatgaatattaattagaataactcctattcttcaaaaatctgtctccaaaaatctgtttttatgtatactttacccattggtttgacgtttcaatttctaggcaacaaagtttttttaaaaagaattttatattgaatgctaaacacatgtaatttaaattgtatgaaaactgaccccaactcccttttctgtgatgtactttatgggactttgtcttagcctggccctttactgtgtaacttgagcctgggttatgctgacttcaagcccacattgttttcatgtattatgataccacaaataaatgaacaaatgataatgtttagtattatagatttttttgtattatcaaagcaggactttcgtcctgtgtcttatttggcttaccttctttctaatccaaaaatattattaatgggagctcattttgcagcaaatgttgggaggcatggctgtctctctcctctctccctcccgttcaccctcactcatacacatacacaattgaaactaacaatgctatggatgaagactggatcaaatgataaccaaatcaaggggtagggtaccagtgagggaatgaggccgttgggatgtggtcagcagtacacaatggcaccttccttttaaaattttagcttcccagaagaacatcagcagtattgctataatgagtccagatcttggcccattttatcgattgggtcatctgtaatttcttgatccaagttctctgagctgacagaggagactccttgcatcttggtatattagg

SEQ ID NO: 125103 - DNA, 1133 bp, Homo sapiens
acttagcccagcctaccttaaacgcgccgagaacgcttaacattagcctacagttagacaaagttatgtaacacaaagcctattttataaccgtgttgaatatcttgtgtaatttactgactatagtacactgtagaacataatagcagtcatttaccctcgtgatcacagggctaactgggaagtgtggttcactgccactgccccgcctcatgagagagtgttttcacacattctgctgaatgcctattgcttttacactttcctaaagtccaaaaaaatcatagattgaaccatcataagttgaggaccatctatatgtagttgaactaaggaaagtcttgggaagatacatgcattaaacagacctttaaagttttctacttttcaaaatccttgaatggaaagtgaaatgtaagctgcctatagtaggtctcaccaattcaaatgaaaagctgctttagttttgaaattttaatttatttccaaaatgagaaattattttcagtttagttcagaagagggtattgccctagtttaacctttaaagtatatgtgcctggccctacagctctgtgtattgtacttgagttgagatgaatggactcttatagcctcagttttgtttttgccttgaaccatggcttatcagggctcagagagcctcacaagtagacagcattctttacctgtatcagataggcttgctgctatatgcagatacaagtttcaatcagagctcaatctgtccatgtagctctgttcatgtgacctttcttcgtgtctgacacattgtctttggctggattaatgtttgtatttaatgcttcctagacaaggaaagggcctcctgtcccacctctacctaaagtcaccccgacaaaggaactgcagcaggagaacatcatcagtttctttgaggacaactttgttccagaaatcagtgtgacaacaccttcccaggtaagtgcctggttcagggctggtatgtccatgaaagtcccatggtggaaggactctcaggggctagccctaaagaaagtggcggttccagaaccaacaacataattttaattgtcattcaggcttgttttaattacttggttagtctgaagcattcttacatgggagat

SEQ ID NO: 125104 - DNA, 1021 bp, Homo sapiens
tcagattcactaaatggctgggtgattttagagtttttatttttaacctatctatgccccactttactacttgtaaagtggggacaataaaacatggctactgtgaagacaaaagataatacatgaatgaggtctctgtagtgcaaataaatggtaccagttatcaccatcactgttgcaattaaccagaattaacctggaaggggagagcaggacaacagacagtacctgttaggcttctgggtttctctgaaatggaaaacccctgattagatgaatactgttcttgagaaggccccttgcccaatcccctgtgttcctctagtgattcgggtcctctccgcattgcaaagacaccatcaccgcctgaggagccttcacccctcccgagcccgacagcaagtccaaatcatacattagcacctgcgtctcccgcaccagcacggcctcggtcaccttcacaggtaggaagaggtcaaatatattgggggatagagctcatgatgagatgaaggtggccccatctaggataatcccacggtgccggggctttaagagaagtttccagttagggagactgagatgtgaggctttaggcattgtgattgtcatgaaggtatccacctgcttttcttatttgacttgatatttcctcacatgccctatattcaagttttttgggacttcttaccacgttctcggcatgctcaggcgagcatgctctctcttctcctatctcttgctacaaaactcttttctttcaatgctccatttaaatcctacctctgcatgaaaccttccctctcctagtggtttagagttggcaggtactgccaagaaaagcggttatgtttatatgtcatctcacattttttggtacacctggacattttttagtacacacacttgcatatgagtggccacttaataaaattgaattgaagaaataattgaagagaaacaataagggctgggcaaaggtaactgtagagagaaactaccacctttattctccctatgt

SEQ ID NO: 125105 - DNA, 1071 bp, Homo sapiens
ggccttgttttaggcaaagtcagcctcatatctgtggttggatttgagcgagagtttccttccctgcccaagttggagcagtccactacttgttgtaggagtcaggtcttgggcctaggaagcttttatgccccttgagactttttcttttacccttttgcctacagcaattatttttgcctaaaatctagaggtcagaaggctctccatctctaccagagccacattggttttacttttattgctccccgagaagcagtagatctttgcttgcacctgtgggtagaagggtttggtgccccctcctcaagcggcttaaagctttttgtttttgtggttgttgttgttgttgttgttaagaggaaatgttccatagaaatgagcagggctttacgcctatcccctagcagccatatatcacctcattctcatccacactgcaagggaatgtcttgttctcagactttctcatggcttccaatgttgacccatgggaaagagcttgcccattagcacaatctgtgcctttggccctgtgtctttggccaccagctattccaaatgacacattagtccaggggattctaatgaacaaagtattgagaatcacttgtaggaaaagagatttcttgggaagtaaatctgtttttatagaattgctgttggtgtgagtgttatcagaattataaaaccaaatctaacatagtttcccactatcttcagaatagaacatttaaagatttcgactagagaataatgagtatagttttgccttctctccctgaccaattctggattattttctggtctttgactgcaaactctgccctcagctgcttgtgattagcctaattattatcaaaagggaagatatttatctaatggcttcaacacaaaggattggaggtgttcatctgattttcaggagtcacttagctagtgaaactccagcccatcttgatctccagtcaagatcctcagcagctctggccaaggaaagcattttggcacctggctgtcaaagggagactcttatgtccatgcttctttcttagtgagtgcatttcctgt

SEQ ID NO: 125106 - DNA, 1037 bp, Homo sapiens
gagaatgccttaacatagtgacagtaggaatactagttgtaataatagtaatacctaatattcattgtacgtttaacataattgatactccataaatggtaagacctttcccaatatgactgtaacttttctgttttccctggggaggcttcagaaatgatttgttgtttgtttcagtggtggatttttttctgatttcatggagtgcgtcaaaagcaaactgtcttagtggaattattctcagtctcttagccccaaagtccatctatagggttatggggatcttttgaagtttctgcattctttagtaatttagaatcagaaatacagttttaatgagctgagctctgagctagcctgttttgttaactagaaccagtggccaaattgccttaaaattttattgcattattaaatgattctcatttttcccctagcatctcatatctgggaaagtattacttgtctaattttatagtttcagatttttttagaagtttggtgaaaggtatccaattaaaataattcagcagtggtctctttatttcttttagaaatgtgatgtgctgtgggaagacttccatcaaaaactcgtggatgggtccttgctaacactggatacctacctggggcaatttcctgacataaaggtattttactctgtgtctataaagggaaggattgagtggggtcatgtagttattgaaacatgggcaagagaagaattattacaagtcctcaaactgacatcaaagatagttggtaacttttcatttatttaagcgtgggatttttatgttgttcctatcagtttgaaaagaaacgtcattacagaaatcacatttcgcttttagtgaactgcttcagcttttattattctacagaagtctttttaaacctatagatataaaatcataaaccagagctaccaaaagttccaatcttctttataatcaaaacttttattatatagcatttgacagggatttccattagaataaccagtggtcacaaggaagtgagaaatttcattgtaa

SEQ ID NO: 125107 - DNA, 1282 bp, Homo sapiens
acatatttactgcaacatcatgcttttagtcttgatgattaaaatcttatataattttattttaaggttatattcatgattttatttttcatcacaaagattatttggtctacagtgccaaatttctttttcttctcttaagacattgttaaaaacctatctacacagttgtgtatagtttccatcagacttaagacaaagatttaaagaaaatgccagaagttttttggcatctggattatagaagggggtccactagtgactaacgcttgttatgaatttgaggggtatatttcttgatagagatttgcttgtacttgggtgagggtgaatttggacacttggcataatgtagcttccacctcagtgttgaccatatcatgagagaacgcatccccccttgcttggattcagagtgcgatgggttggattcaggttttgtctcctatttgctgtcccttcacctgcacgactctgtttcatcagagtccccagagtcttgagtcatactgtttttttcctaccccagactctgcaagggcttcgtccgatggtggtcaagtctcttcagctcatgtaggcaggacacctcattgtcaagggcttcgtggaatgtgcccagcgatgctctgagggaagggagatgttggctgtgtctaaagagagcacaagtgctatgaaacaccaagttacatgtggacttttatacatactcctcaaggatgtacttctgtcatttcagacatcttttagtttgtccttttctctcacagttgaacccagaattagctacctccaatccagcaagaatgttgagttttcagtttaacaaatgatttttatcttaggattcactgaccttaagtttacaggatgtgttttttatttctcatgacagtgctctgattttcctctcctctccctgtttccagcccccttttatcccccgtagtgacaaaggccaagacatcaatgtggccaggtcccaccttccggctgtcggggagagtcttctgccggaggcgcatctccaagtccccagctcttcctggccccttgttttgctctcagccatgagctgtcttcgtggcttttcagtacattcattaacctttgtgcagggggtccttgggagagactaaaaggactgggtgatactttatgtcaccatgttgtgctcagaagcatatatctttaatgctattctttaatgttgcaaaccatagttttgcaacatatcaaatgtatccctaatgaaaattcagacccaaaggcttaggaa

SEQ ID NO: 125108 - DNA, 1031 bp, Homo sapiens
gcgattctcctgcctcagcctcttgagtaggtgggattacaggtgcctgccaccacgcctgactaatttttgtgtttttggtagagacaggttttgccatgttggccaggctggtctcgaacctctgaccttaactgattcgacctgccttggcctcccaaagtgctaggattaccggtgtgagccaccacacccggcccacacatacatttttacacagaaaaatctctgacctcttgtctggggtagtttccttaagataccctcttaagaatatatatttacatgacttggagcaaattctacttgttcagtgcccactctataggacacaaattatttgtacctagagtttgctttgggctttctctcacattcatagtactaaatctttctttggccatccctaaggatttgatcacacttccccttttagtttttggcagagctcaactgcttatcagccaagtaaatggcttttctctttagggatcccgttaaggaggctgatttgaattaagatgctctgatgtaattaaaggcagaaaggaagttggtgcagtgaatagttggtggtctatgtctgatagtgtaattttgggactgaattgctggctttcaaactcttttccacttccctcactgcagctacttccatatgatttgactgcccttccttcccggatctgccatctccttatgttcaagtcccatcttctttaaggtcaactcacaaggaatattctagtggtattttccccatcccctcagtcaggagtctcttttcctctgtttacttcagtagtacgttatttgttatctagttttcttacatgatagtaatttagctgtgtatctatgttctcattcaattgtaaaatatttaaaggaagactcaacgtttagtcatttttacaaaccttcaatggcttctagtacttgctaggtgcctaataagtacatcccagttttgacttgcctgcttgtcacacttattctctgtatttaccctttgctttgcatattatgtg

SEQ ID NO: 125109 - DNA, 1022 bp, Homo sapiens
gactagtaatgtacctatattatagggtatttgtgaggcttaagtgaaataaagcatgcagcaccgtttttggcacagcataagtattcagtaagtgaagttgtgaaaattagacatccccaagtgtcagagagacaaggtggaacttccatttgtttctatatagtctgactcagggatccagctggtcatgtgagcctattgtcagtgagggctgactggggtgtattgctgggatccctggctccccattccatcgggaaacccagtgtgcctgactttcttccaggacattctgtagaaaccactgtctgttgttctccggcctaaaaattagatttacacctcatcgtccttcatctatattcaccttgtgcgggtgagctgtaaatgaggcagtcctttgactgctctgttatttgctgttgccataatcaggagagaagctgaagtaatacggctgggtaactggttgtgatttcagtagtgggcctgctgggtttgcccacaggccgtgttacaaaatgctggcagctggcaagctgcacactttgtgggtccctaggaacctgagaaggctggaaaacacatgaattatacagtttgacaacgtgaacatggaaagggcatgtcctttgtgactttagtttttcattaaatgaactgttcttggattcagaatctatatataaatttccttatgtctcactgtttcctgtttggtatgttgctgccagtatagattaaaaggagtgactacaagtagaagaatgcaaaataagcttctttatgcaggtctgtttcttatatacgtgccaattgcaaaaacaggagactgttattttctttcatcaattgtcactctagatgccttttgtccccatgttgactggcctgggtcaccggagtacagtgtgtcagcaggatgtgtctcaggacaaatgctgaaccagcatcagcgtctttctaaggcaactttcttcgagataggaaaattgttacataacatgttgttttatatc

SEQ ID NO: 125110 - DNA, 1014 bp, Homo sapiens
tccttcttcacatgacagcaggaaggagaggtttaaatgaactttgtttgagaggtttgagtgaaatgttataaaaccatcagatcttatgagaactcactaactatcatgagaatagcatgagggtaactgcccccatgatgtaatcacctcccatgtggtccctcccccaacacatggggattacaatttaagatgagatttgggtggggacacagccaaaccaaataaatgtcctttggagacttcccttagaatccttgctttgacaatataatgctcattctccattttctacattcataaacattttgaaaattaatatttaattataccagtattaatgactgtattatctaggttaaaaaaattaaactgttatagataagactaaatattttttggtactatatccccagtgcccaatggagggtctatatagagtagagttgaaagtacgtatttgttcatgtttgaaagatgcaacaggaaacttgagatctgggtatacttacacttttccatcactgtgaaatgttttaatagtgattttttttttttttttttttttttagacagagtctcggtctgtcaccaggctggagtgcagtggcgcaatcttggctcactacaaactccacctcctgggttcaagtgatactcctgcctcagcctcctgagtagctgggactataggtgtgtgccaccatgcccagctaatttttgtatttttagtagagacggggtttcaccatgttgaccaggaaggtcttgatctcttcacctcgtgatctgcccgccccggcctcccaaagtgctaggattacaggtgtgagccacggcgcctggccttaatagtgatttttattaaggtaatagtattgaatgataaatttggaaggcctagaaaaaaatagaatagaagaataaaaatctcacccatcgtcctaccacatgaacataatgttgataatcactcctgttattcttttatttatccctaaatatttattc

SEQ ID NO: 125111 - DNA, 1100 bp, Homo sapiens
gtacaaaatgtgatccaaatatcagagagccttttattacctggacttaaataccacagataactcagggagtttaagctgacagtttctcctggaaccacctcttctgaagcacgtttagatcgatgtcaagattggtttttgctggcactaaatagtcacagctttgaaacctcctgacccacctgccccaggaaacattagcacccagagctgtttcctaatattaaaggtgctttgaagtacagtaaacagtgtcgactcagtgtccagatgagcatggccacagctccttgatttgtttattctcttcaggagcgaaaaaagttataaaattggtgagagccccacagtctcagattttaaccagatattgcacaggtactggtcattttattcattagcacactagagattcagaataggtgtggattttatgtgtgtgtgtgtgtgtgtgtgtgtgtatttacacaattcctaatatttgggtcaataatacttgggaccaaagtgtgtgataggagaaataatgcagacttcgaagttaggacaacctggtttctaatctagactctgctgaacaagccatgaaatctctctaaacctctgtttcttcatctgcaagttgaagataaaatagatctatcctgttggagatgaaagagaagacatgtaaagtgcttagcacagggtgcaggatagcacagatcatcaataaatagtcatgatgaggataatgatgagaagcagaactgggacctgtgtcccctacttggtgtggccgaatgtagactgtgtgtacctttgtgtttctggttggagccacctgctgtcacttgtactctgcatcagctctagacccctccttccatgtcagaccttgtatttttacatgaatgtgatatatatatatgagaaaagatcagtctatgttgcttagagctaactcactagcaattggccctttcatatcttgatttgttgcaaatgtgagttactgtttagagtagttttgaaattgagcagatgctgttgagttgatatattctgtgattggtaccacaaggtagaagaatctatgttattatagaaaatacaaa

SEQ ID NO: 125112 - DNA, 1502 bp, Homo sapiens
tctctactaaaaatacaaaaaattagccaggcatggtagcaggcacctgtaatcccagctacttgggaggctgaggcaggagaattgcttgaacctgggaggcagaggttgcagtgagctgagatcatgccactgcgctgagatcatgccactgcactccagtccaggtgacagagtaagactcagtcttaaaaacaaacaacaacaacaacaacaacaaaagaacaacaacaacaacaaaaaacattgcgaacacaagtaatgacttaaacagactaacttaacaacttgctttcactaaaaggaagttgaccttatcttgttggatattaaaatattacaaatataaatagacaaatcagtggaaaattatggaaagttaaaacataaagtcaaaggtatgtaagaatcattcaataaatctatttgggccaacaactcatcatttgaagaaaaaatgaccccagctttattctatatgctctatacaaaaataagttcatagctaagatgaagactaatgtgaggaagataaaataaatgttctcagaggataagggtgggcacatgcagggactgaggaaagggaactctttctgagccaggtgccaaggcagatactacacctgaaaagattgccagattccaccccatagaaacacaaaacaagaatacaagttaccataaacaagatggaaagataaagctattttcaaattttaagatatctcagcatatggtattagtattttccattgagttgtgatgggtggggttttttaagactggctaagcctattagacattaatgtcacatcctgtgagtatcattggtatttggtaggagtaatttttgcctctgcttgtgagagttgataaaaatctattttcattgtggaaaaaaataaaaagataattcacctcagcatggggaatgtatacagtatttaattctgcttaagaaatctcagacagtgaattacctcagagcatatctcttgaattaaaatattcatatttgactgtataacatatgttttaccttgaagtcctagttgcagagctgattcagaggcatctaggtcaaatacatgatcttctgatgtcagtgattcattataacccttttcctgttcctcttatggggcaaatattcagtagagggcaattatttaacataatataactttcatgatgacagattcctgttaaatggaaatacaatcatatatacaaatctgcatgagttgtatgaattcatatgtcataatcaaatggatgactatgaatctgaaacttttattatttattgtatgaaaaccatgggctgttttttttccctgcccttttagtttactttaatggttgacaagaactatgtgtgctttttgatagtcagctcagaggtttatcctgactcaaaatggagtagcatacatgaaatgatgtaaaatcaaaatgttcacttattcaatgactatttgttgcattgttgctatggg

SEQ ID NO: 125113 - DNA, 1996 bp, Homo sapiens
ctccgccttgtgatcaaatgatcaccctcttctcacagtcatctcacctttccagcaaatgggattggggccaagagcccactgggcttttaccaaagctttgctttggcttaaaatatcgctctttgcctcatgatgatttatcattgactacgtaaagcacgttcatatagcaacaaaaagacactagctcatttaaactgcccgttgtgttgcttagaactctcatatctcctttgccctaattcttctgtaggaatattcctaatgtgggcttgcctaggggaaatggacaggttgaagaacatggtcattgcataatttcgattgctgatgtgtactgcacatgtgggttaaaaccatgaatcacaccacagatgacagtgtctgggggccaggccttccaccatcacttcttgcagccctcagccttctttctcctgtttgatgtcagtattgattattggtgtctgtagtgacaattattggcatcaatatattggaggattggggagatacacagcaaaggcaaaaactgttagcctttctcgtttcaagtctgagggttttcagggagctgaccaggataatagatgtgctacagaaccccaaaagcctagagaggggtcaaaatagtatgttaggaagacagggagctccccagtgaaaaaaggtggaagaagggggcagagaggagagataccttgccaggcaattgtttattgtctaagttaatcttcactggcagagagagcacgttgccttcagttttacccatgaggacaccaggagcagagagataaagggctggatggtcagagctgctgacagtgattgtgaagctgcacctgggaaagctgaccgggagccgtgctcagatactcacaatcctgaatgccacccaggctgtgtcttatgcacagcaacacccacgggtgctcttacaggggttctaagaagagccacagaaaatctctgaagggccaggcgtggtggctcttgcctgtaatcccagcactttgggaggtggaggcaagaagaacacttgagttaggggtttgagaccagcctggacaacacagtgagacctcatctctactaaaaattgaaatggaaaaaaatttaaaaaaagcagagaaataaaatcaatgtgacaaattaagaaaagaaaaagaaaatcactgacttatatcagccttttctccaagggggaagctaaaagaaaattctgtgttttaagtaattttcataaggctttgtaaatggagtttaacatcaggaattcatcccacaaagtcctgggtattggaagtctcaggtcctattttcagtgccttcagtggcctatgtaattcaaataaactgagaacattgtgcagggttccttgtcttcatccttatagcatctggaccccctgcactttcattttattgtgcagtcatagatatcgatgacttagcagatattaattaaaccattttccagtagtagaaacagagcctcttggtttcttttcctcaactgctttcctccacttactatactcctaccttgcttcaccgggggtcctgaggtccctgaaggggtctgtcaccctcctgctgttgaccactggagcctctttgatggtagcttgagaaatcataaagggtatttaccttttgcattcaaaatgtattatacattaatggacatgcaccatttatgtataaccaaatagacatttaactatgttagcattttgcatgttctgctttggaaatttagctaaagtggagctcgtaataagaaaatgaggtgatttgaagtgctggttagttgctttcatattgggtggatcttctatgaatatttgggacctttagaaattagtactgaaattgagaaattttcggttggtagaatttagggcatttctctgaatgtgtcatttctaagtcaccatctccattaaagaatgcttttctgagcctccttggatccctcaaagctagg

SEQ ID NO: 125114 - DNA, 1053 bp, Homo sapiens
gtagggacgtttctctcatgaactgtccacattttgtgtttgaatcaggtgggggagtggtcaccattttaaactcagactacgacttgcttgtgcagaggagatgtacacatggtgtctgtgtagatgattgggggaaggattgtgatacagctaatctcgtggtgtcagaggttctttggtgtgctatattctgcctcctgtcctctgggagcagtgtcctatgctcacatgagtggtattccctgcatgtatatgtggttcattaactcacgatctccatctttggctctagcagaggccagtggcatggcatgcacccactggctcaggctcaccttcattgctctgccatctggctgcactgacattgggctctgatccccagcccttgctacagaaccacgtggccactgctacagtagctaacctgctgtgtcttcactacatgagtattaagggcagctggggtaatctcaacttcaggtctccttagcctggctacactgtgcagctacaggatgtaactgtgccctaggctggtgagaggggcagcccaagaagtgatctttccagagtgttcagtggggcataaggactgtagctcccctctgaccctgacattatcctcacttctcagggaggagaggagaaaattggggtatattttcttccacttttgttactcttttttgcagaggggaaggctttcttcttccttctgttatatcctcctgtggcagagcttgccaggcaccatggatgaagggggcacgttcattccactttgggaaagagggctctatgagctggggcttccaggttttatctccctttttagacttaatgaagggtaatggaaaatttgcactcaaggtatcttaattcttgtgccaagtccagttagaataaagaattgggtgtttcccctgctaggctctgtgatgagcagtcccatatattaactcatttcaccctcgtagtgaacctatgaagtaggtgctattattatccctatcttacagatgaacagactgaagcacagagatgaat

SEQ ID NO: 125115 - DNA, 1045 bp, Homo sapiens
aatgccttatcttttgaatattcatttttccagtgtttctatatggaaatacaagtcagtgagcaaatttgtagggagaatgtttgcacacctctttaattatctccttagataaattcctagaagaagacttattgcatccaaggtttgcctatttttattatagctagattgccttccagaaaggtgtaccaatttacattctcatcagcagtccatgagacacttgccaactctggataataaaatttaaaacaatgtttagctatgtcattggataaaatttgttcatgattaatttcatttgtttgatttttaaaaagcaaacttttgtgcattcgtgtttttgttcttgaattgtgcttttatatttctgcccgttttctgtagcaattctgtcttgttattagtaagggcaaaaactttatcaagcctaagggttacaaccattctttcttccttttctatttacttttaaattgtttggtgatttctactgagaaaatgtttttgttgatgttttatgtatatctgcttacatctattggttggttttgtctggtttctcttttgcgtggttgaattagtcaggatcctgctacatgcaggtgtcagaaagctcaacccaaactggcttaaggaaaaaaggaatttaattgctaataataataatatctaacaatttatatatggttcttgtacatataaatttagattagcttttaatgaataaaagctatatattcacataagatatatgaatatcttacctatagtagcctatatacatattcttatacatatgtatatgtaaaagtatatgcagaccatatctttcctttagcttttttttttttttttttgagacagagtctcgctctgtcacccaggctggagtgcaatggcgcgatctcggctcactgcaagctccacctcctgggttcatgccattctcctgcctcagcctgcccagtagctgggactacaggtgcccaccaccacgcttggctaattttttatatttttagtagagatggggtttcac

SEQ ID NO: 125116 - DNA, 1036 bp, Homo sapiens
ggtcaaagtggaattgcaagaaggatggagttgtgcctgggcctcctgaactctggtgatgccagggcttgatctgcaaaggagatccttgtgcagcctgaggaagcaagattgacttactggagttgagttgtcacccacaacctgccatccatgcacaatccagataaacaaactgaggagcctcggagaaccactggttgcccagaggagttttaccacaaggatgggcagtttgtcagtatttaagccgggactttgagctgcattctcacatattgcttctccattgtgaatagtgtcagctagagtcagggccatactcgtcaataaatagggacagggtattaacttaatattaggggagaaagtgatggcaagtaagaaaggagggcactcccctagatgccttctggctaattcctacacatccttcagtttaaacattgcttccccagaattgccttctttgcctttccagataaggctaccttccctgttaagtgcctccatagcaacctggagttatccaaagatatttgagcccttggaataatttaatgattcattttgttcccattagactattatttcctaaagagtaaggagtgccattatttgtctatccccagtgcctctgttaaatgtctggggatggatatatgtaaaagacactcaagtatctgttcactgatgttgtggattggtttggatatggtttgtccccacccaaactcatgttgaaatttgatcccccaggtggtaatgttgggagttggggcctagtgtgaggtgtttgggtgatgggagcagatccctcatgaatagataaatgccccccgacatgggtaagtgattagttcccttgagaatggattgttaacaagagtctggctccctcagtttctctcttttgcttcctctctccccatgtgattactttgcacatgccagctccccttccactttctgccatgagttgaagcagcctgaggccctcaccagctgcagctgcccctatcttgaacttcccagc

SEQ ID NO: 125117 - DNA, 1124 bp, Homo sapiens
taacaaaaattaatctagttttcaaatgtaaaaatatttagaaatgttctatgtactatagtaaacataaaagcatacccatttgaaggaattcattcaggcccagttgacagctgtcatgctgtagagatgagcaacaacagtagagagccattgtgtatcttatgtgtttctcagcctgatttgtgttccatgatgctatcatttttttagtgtcatattcctccaggtcacattagacgtattctgctgttgggtgtccttggagtcacagagtaacagctgatctagactaaatcctatgttaaccagaaataaactccagagaaaggagtgccatcctattacttcctctccaccccctgactaacgctaccttagtgtttctgaatatgagagtagaaaaagaagatcattttttaaatatgtgtttttaaattgcatttttagaactctgctgcacagttctgcaacatctgcagtgctaagaaccgtggaccaggaagtgcaattttggagatgaaaaaatagctcatttctccttgtcagtctccttgtcaccactctttttgagactgtttttgcaacaacaaaagcatttgttgacactcgtgctgttaagagatttgtttatgtttatattatactcaaaaacaatttcttcatctattcctgtactaatggtttctctttgcagttcacagagaatttggggctctcttcatgccttgaaattttggggtccatagtgaatattttgttatttatttgtttggctcattctttatatagtaatggaaacataagtctaggagttagaaatgaattttttagaccttagtaaaaccatttaaccataaaatggacaactgagaattctcccagctgcctgaaagcgtcgccaactgtggttatcctgcaagctgctacctgcaacttggacgttgtttccacgtgctctgctggctacgattcttgcattctgggtttggcttttttctgtgtcatcaactatggttatcctctaaataggcatttaatgaaacattgtacaaattgtcactcatttgatgacacctgggaataacattagcaggctgatgtcctgcaccattatgtttact

SEQ ID NO: 125118 - DNA, 1079 bp, Homo sapiens
ttcttacatttgtatggttaatataacatggaatcgaggcgagtatgaaagcagttatagtggccattagatcgggccaccccaacatttttagggagaataagtattgtatccgtttgagggaattaacaaaaatgtttttcagtaaggtaataatttttcttgaagccattcagtagtctgttgcctgaaagctgttaaaatataggattttatttaaccttttgtctgttttctagaatagtgcaactttattatccttgttaaatcagaatttgtcataagaacagtggaactcattattttcatataaattattatactaattacaaagcatcttaatcttttccttaaaaagactctagcaattactatttttcaggatgctggtaacttctatagaacttgaattaaaacatttccttaaaaattcggactgttgttcttcctctaatttacttgaaaatgaggttttattaataatggatgaaattactttcctagaaacaatttttgcaggtaaagccaaaagaaaaggctattagctgaggagcattatgatgtgagatccattgggccaggattcaccatgcaggttgcaaagtagaggtctgcctgcactcagggtgacagccttaggtaagaggcagggtggaaaggagaagatattgcaggaacattggtggcatcaaaaacagatgtaagagatgaaagggatggcagagctgcagggacaagaggttgtgccagagagtgtgatgtcattaatgtttctgaagcggagtcatggtgtatacgtgttcaaaaagtgggatgatggtaaaggtcatttgtgtagaattagtagagaaactgaggccacagcctttctgagtcatcctaatggacatgaaggccaggaggaagaaacaaggtgctctaagccaggctccagcttctccacaggggacagtagtattaactggacaacacgactttaaaagtgaagaagtctaaagatgggggtgggggtgtgagagatcatgcagccttcactccggagagctttgtgggaaattgggttcatgggagagaaattg

SEQ ID NO: 125119 - DNA, 1113 bp, Homo sapiens
tcagaaaagcagtatgcacagctacctcatgaggcagaatgactttagggcctttaaacattttaagtgtatctgcatgtgaaggtattgacctccagaatatatataagtctatcaaaagtaagtcagagtatgacagacctggcttcaaattcacagtgtactatttagtagctgtatgatcttagcaagctactaacatttctatttcctcttctataaaagaggaatattagtagaacatgcctcatagggttgtagtgatggttatatgatgtcatttatatgaggcacttaaatgagtactcagtacagagtaaatatccagtaaataggagatacttattttgctatgttatagacagtaaatgttggtgtcacatgagaaaatagccttgtcttagctttccacctatgtaaacaaattaagagatatgcaatttctttaaaaaaattattaaaataccttaaatgaactctttctcccatcttcaccccaccaaggccgaatgggtaatagccgaagtgccctgaagatgattatggaggaattacatgatgttgataaagcaatcgaatttgccaaggagcaagatgatggagagctgtgggaagatttgattttatattccattgacaaaccacgtaagcataaaagccatctctggttataacttttttttctctcagtgtaaccagttatgtctagattaaaaactatttcaagatacattgggttaagaaaatggtagcgtacctacaataaaaataggccaggtgtgttgtaatgatttccaatactcctcctgtgctggaaaacctggagcctcatcactttgcattacctgcatgtgatgaagaacaggtggctacacagtttattaattgtgtccccatgaggcatatttttacctgctgcaagcaaattgaataaatgtcatctgggttgtgttggtgtggtttttttttgtttttagcttgtatatgggagtgtttatagtttaagtgtatagaccttaccagtcttttttggaaacatgtaactgttctggacattgatgatatttggatgtttgtgttgtagtatttagcctctttcctgcactattttta

SEQ ID NO: 125120 - DNA, 1071 bp, Homo sapiens
caggaagcctgaagattggtttcttaaggtgcatgtgtccatggttaggcgtcattgtgactagattcaacagcaataacaaacatcagcgcatttacagtctcagctgcagggcggctggtgctctatgtctgttataaaccaatccacttggaaacagcaacccaaggtgttaatgctcgtgggattggtgattaagtcttcctgtcttcagtagattgtggggtttttgtttacatttaatattaactaaacattgaattgttttttgacttctgagtactgtattgatagacttaatcttgcctgtgaggagaaagtgaattactgatttcctgtgaagttaactttttttcagacagctaaggtaaggaatcagttttgaaaactgtttcagaacacctgcattcttcttgatttttactttgtatttttgtttttgatgttaccagtttaggcagcatttcatttgaagagtcaacaaagaggagatgcagaatgtatggaaatgagtttagtgcccgctacttgagtttttaagaatatgtgcttgtcccaggactctaccctcttttgtgtaaaataatttttatgatctgggaagaccactcatctttttatttctgagccaaagcagataccaatgatgatattgacaactactgtcattaacatttctgtagttcttagtgtatgctaagttcattggttctgagtgatttcgtaatggcaactcgtttaattgtcacagtaactcaataaaatttttgtagataaactgagtctcagagagattagtgacttgcctaaggtcacagttggtacgtggcagagtcaggttttggggcccttctagagaaattatcggaatcctttgctctcccaaagggttttcctttccacttctccatcacctagaggttttccctgaagactgcttctcccccaacctgtccatgggaggtgtttagagctaaaaatagcaatgttagccaggtattgcttttctcattttaatgggtcacggcttatcttttgttccttttagtatttgcataagcttttcaagag

SEQ ID NO: 125121 - DNA, 1916 bp, Homo sapiens
tgtgtgtgtgtgtgtaaaagaaatctaattacaagtgctcatgacagaaataatgaggtttataaaacagtgttcttattcaaaaaattgaaattttagataaacctaaaagtagaaccctaaaggctccaaaaggattaatgcatttttcaattatattgtactgtatttagagatattgtgtgctatattaatctccaccaacttaaacttaatttagataggagctagagctacgtctttttctcaaagatgctttagccctttttaaaatactgagtcaagtctttagggactacagatttacgaagaattacgtagctccaaggaagttcaggtagagaggctctgcttgtctggcagaggatgagatgcttatgtaaaaattaattacattttcctcatatctagtctcccctcatgcacccccttccattgttctccagagctcgttttgcatatgttcctgtggaaaaaagatgaatgagctgaaactaattgctattctagaatgtgatccagatgtaaggaatcagagtcttctggttagaagagaccttagggataatctactccaacaccctcgtatttcagagaacaaaagtaacatttggagcagacagctaggtcgtagcagagtctagaacagggcccccaggtgttccgtgtgaggctcagtctggtgtgctgctttccctcttcctcttgacataaactgtctagtttgtgtttcctgaatgataaaagtggctaaagtaaattctgaaagtccaaaagctttatgtcattatgaaacttcaggtatctcattctctttctgactcttattcccttctcctcataaaaccagctccttctgtctgtggagtctcatagggagactaggtcgaggttgaagtagctggaagaaaagctcattttcttgatatactggtaaagagatgctctccataactactgagagtctcatgagaaggtgtgaaggtatccgagacatcggagggcggggggctaggatatgggcagtcaagatgttttgtatttgggaagttatagcaaagcaccattttagtagtgtgcaaaacacataggcttcagattgagatgcatttgaaaatgcagttcttcacaaatgtcattttccataagagccattgtaaagccaagggcctccttaagtatacaaaataagccttccacctgtgaactgtggtaggtacactgcattgtgtttagtcttctcttcttaaataacggatttcattgactgtggcttttcttatatgtttcagaaagctgttgacatgcttttggacaatgaagataaaatttcagtgagtgtcatttgtttttatatgtgttaccagatgaacgtctgggactcctatagctgtgaagaagagagtttatcagataattttgtagctgtctttctgtcctcatgactccaccttgaaacttttcttttttatctagattaaaaaggtagtggaagaattggaagacagaccagagctacagcatgtggtgagcatggcagtctcctccttttgcccttttgattgaccagtgggtgaatcacctttcagtattggtgcgaggaggatactggagtgaattcttcaaggaggttaatattccagttggaggtttcaccacaaacaatgttctgtaattaccaaaatgcagcatatgctgtgaattcaaggtcagggattaattgtagatcaggcagttgaattttgacccacaattgaattgtgatggaaaaaagttaccaatctatctattatattactataatataaatatatgtaacataactatatatttaactataatgaatgtttttgtgttatgttgtgtctaggaataagcactctccctctgtagttgccattaaatataaccatggc

SEQ ID NO: 125122 - DNA, 1141 bp, Homo sapiens
tccgagaatggcctggagatctgtataataattcagtcatagttcaagcagttcgggatcatttgaagaaagatagtcagaacaagactttacttaaaaccctggcagaattgtgagtatacttaagtgtttctttttccatatcagtctgtgttgaaaagtttttcatactttagatttggcaaactccaagtggagaagatgtattttataccattttcctacattccttcttagtaaaaacctctcataaacctcaaatgagtaggcgataaggacatgtgtgaaactgtacaattgcaatgtaatctgtttcccagagaagagaacccctaacgcacagcgcttgggagaggcagtggttaggaaacaaaagggtgccaagttttagatcactcaagcataacagtttcccaatgagcaaggctctggattctgctcttctagggtcttcaagtcagttaatttaatctctcaaatgtcaattccttatgggaaaattttaaactttaaaagagatgtcataatagaggactccctgaccctgagtcagggctcagaaaatggcagcttggttaatatttttcatatttcttgggcacattcagtgatgcaggctttgtgcgagacgcttatgatacagagatagataagatatgctctcaagtacttcgatctagggaaacaagaagtatactgcaggtctagccaagacgaccatccctgcatccacctctcctcagtgcccccatcacctcaggccactcctctcccttgttttttcttcttttgcccaaaaccaaaaaaggtataccaaaatgacctagaactctggacgtgttggattttccacaagaggaggttgtgtttatggcattctaagttgaaatgctaatcattttctcttggaaacgttgtcctgttagataccccttagagtctgcagcacgttcgtaatggaccaacagtacagcttcagttcagtgagctctcaagagctgacttagggacttaatgtgaaaaacattgtttcaatggaaaaacacatttcagttagacacagcccccttaaaatcagcttttggaatattagccatttgtcagctgaatactgcttgtaagaattggaacggatgtttct

SEQ ID NO: 125123 - DNA, 1028 bp, Homo sapiens
gtttaattgtctgcatatctttcttctaggacttgtgagctccttggggatggtgaccttctctgtctgtccccagtaaaaagtgtggtgattggattgtagggcattatagggtcattgaacagtatttgtaaatttgacttttaacacagtactgaaaatatctgaagaacacaagatgtatttttcctaatttcaaaagatgattatgagttggtgaaggttggtaaactccagttgaaggaaggaaagatgaatagattacctgtactcctcgattacttaagaagtcgacttttttcatctctgtgactttctccctcctattatttagatttctattaactcatcaggaagaacagagagataaagattaacctaggcaatttttaaattcattcatacatgtatatacttttgaaaatatattataatttattgttagaaagtagttttcatttaaatcctgttcaaaacatttttttcagagtactgtattccctcacatttttaaagtaaaaatatactttatgttttctgcataattggaatgcagttttgttttttcatattttaatggacttttttttcccttttccttacctaggctattagtccttatttgccaagaggtgatccagttctgaaaccactcatctatgaaatgatcttacatgaatttttggagagtgattatgaggtatggtgttctgatgtggtcatatttacttgttctcgatgggaggtgttaggaaatctagaaaggaatacaatggagcaatgcctgtaaaggaaacagatttgtagtttgcatgtggcaggtgaaactgagctagagaaactccagtataactcatgtttatgtagacagtgaaaacacttagtccgtgtgcattttaaggaattccttaaagttaccttctttctagaactaaagaaaaagagctaagtgctattttgtagatttcataaatacaatagcagctgctattccatctttgatatcatcccagaagaaagagaattat

SEQ ID NO: 125124 - DNA, 3499 bp, Homo sapiens
acattgctgatgcttttcttatacatataaaagagccttttctatggtctagtgaagtgattttctttttattttgttcaaaatatttttttattttgctattctgattttgatatttttattgttacagtggtcaatttttaaatatatttcagttttctccattttttttcagttgtttcaaagtttagcaatttgtaatttctccacagatctgatagatttttcttcactagttgatcttttatagttgctattttatttttggaatgttttctgattgtaagtttcctgaggcctttcccaccatgcagaactgtgagtcagttaaacctctttcctttataaattacccagtcttgggtatttcttcataggagtgtgagaagaaactaatatgtatggctaactagaattaatttgtatgatatatagaaatgtaatttaaattaatgtttctctcttttcccccactaggaaagagaatactgtgccaggcctagactggacatcatccagccactttctgagacttgtgaagagatctcttctgatgctttgacagtcagaggctttcaggagaatgaatgtagagattatcatttaggtaggagatatgaaagatctggctgatatgcttttttaatgtttttttctcccccttcctacttgcaataaatggaatttaaattaaggtgctgaaagaatcttaagagaatacctgcgtagactgtgtgtgctgaaaacaaggacatttggatgcagagatgttgcaaaacttgcataagctcctatagtaaaagggaaggctagagttcagaccaggacccgggggaggattgggccccttgttttttgttcttgtattttttctattgtcctaactatttaatgtgacacataatttaatgtcaagctgcatggctccatggttgtcatatcactcccattttatgtgtcaggaaagttcgctctggggtggcagagaagttgtctttcttgtttgtaactgagtgctcagagcctgaaagacttctggcacattttaggtgttcagtgaatatttgttgagtggacggagaaatacacttagtcactgctcataaatacagggagaaccattaatatttagtcataccagagacatctgtgtttggctgttatcatacccttgtaaaatatattaatgaaaatagaacagttcagctttgtaggaatgctgtactactttaaacacaattgacatttgttgagaatattttcagttctcattgtggccaaaggaaatgaagaaatattctatatatgtttaaactttcttatatgaagaccctaatccattgaaaaacataagagtatattctagacttggcaaaaagcaactgtgattcacaactgaaaagtgtccaatctaggtatttggctcagagcaaactctcctgcacacttagaaacccttcagaacaggttttataattgaattctgcaggaaaccctcagattggcattgtgcacaacatgctgaaatgatagattatgtccctagggcttgggcatctgtcatttatgccttaggtggccttgaccttgatgaggaggaaacatttatcgctgaccatggggtgtaattgttctgtaaaagtagaacaatgctgtaaatggccacaaataaaatttatatacagtagatgaattctaatatgcagtagacatagagaatttttaacactttttcagctgaagtcagagtgttgatgtattaaacgtagaattttaaactcaccttatttttttttcaagttttttagtatgtcattccctccctttctgtccttctccttccctctcttgctttttggtcaagtatttttacacttaaatatttttaaaagcactgaaatacgcttctgtcattctttaccctgtctcccacacttaccttccagcagagccaaacacacaacaaagatagacacattttctgttcgctcttgggttgggtaacctaaccaggtcctctgaaaccattgccaagttttctgctgttcagtcaccaagtcgttcctctcttttctcacctacagaatactctgaaggggaatcacttttttacatcgtgagtccgagagatgttgtagtggccaaggaacgagaccaagatgatcacattgactggctccttgaaaagaagaaatatgaagtacccttgattttacttctttgaaagtattgactcatctacagcatagagagagaagataaaatgtttttgtaataaatcttttatgtagtcaaagtagagtttcccaagccaaaaatatgtaggaagttaataactttctagtacccccttcagaaattagggaaccaaaagattgcaatggattgactggctttcctgttaagtgggggaggagttgggagtggagggaggaggtgagttagatctagactgttggaagtttcattttttgattttgttcaaagaaattagagatagtatttcagaagtgtctatttagatttaatgaaatcgtttattttatacttatcacatttttactcacttaggatggtttgaactatcagtttggatagaatgatgttgtccacttcattgaggtttggcttagattaatttgaatagataatgcccaatatcgcttaaaaaaaaagaaaaaaaccatttttcaactttaatagctacaaagttacgttcttagatgggcttatatactaatttaaaacaacatccacaacaaatagtctacgtatttgttgtactaagtttgtcaccatctgaaaggatttggaaaaaaattttttttttcatttataaactatttaaagtccaggtatcgatacctagttcataacccagtaattaccatgttactttaaatccagtagtttctcaaagaaataattgtatgttttaaatatttatgttaaagtagtatttgtaaactttccaaaataaaaacaaaatcagagatttttcaaagacttaattttagatatacataaacatgcgtatagttcacttttttattgaaacataagggaaaatgctcctttatcaatatgtcataaagatctagaagacagctgcctttttttgtatggagactaggagactttgttgtattttgatttgtgtctgaaatgtgattccattgtcctaatgaggaaatgaattcaaatggaagtgggagaagtcttcattttggttgactgcctttgagtttgaattcagtgaggttcattcaaccatagcattaacaattccaatgcttcaagcaaaagccatgggaaaatggagctttattcgtgtagtgcagaatgctaaaccataataactatagtgtttataacctcaatatctttctctcccaccttctcccattttccctccctccttttctgcttttttttttttttaaatcatccttatgtttggaataaaggaagcattgatggcagctgaaattagccaaaa

SEQ ID NO: 125125 - DNA, 1057 bp, Homo sapiens
tatattgtcattcaacatttctttctctaaatctatatgaagaatattccttataccttcatgttcattttgacaccactgtctgcagccagcccttctgggactcagcatcgctataaaagataaacagaatcttgttaaatctaaaagcaattatgtttcgctgcattagtaaagactaatggaaaaacaagacaccaccatttattctaaaatgtcttactttgtggcagaatggctgcagacatttccctaaatcagcaactcacattagaagtgagttcttttttgcatgatatcattaccagtgggtattaatggagatgaattgctgagtgggagagtactcgaaaccagataaatggccattattttggaattcttaatttgagaatcatgctgagtattactataattgcaattttgttttctataagagatttttgttggtataagggaattactttaacaaaaagaaagacataatttagtttcagttttatccaaatgttgattacttgcttacctgtgcgtctggaagtcttgacaatattattttcatgtaccacatcttttctttatgaataacatttttgtcagcttgtgatttagccactgcatatagtccgtgtccaaattattaattctcaattagcaaaatttggcaaggtttagtacttaacaagtaagcgtttattacaacatctggaattgagaagtgaaatagatatgtgcacctgcaatttttctttgttttgttttagaacacattggagtttctatcatgttcttaattagagaacaggaaattttctgtcttactcatacaagctattgtggactggggagttggcatgtagaggaggaaagatttgggtaggattatttcgtagtttctctgttctgtatcttggagctcattctcaagaaccaaggcctttgatgtatatttggttacctttaggagaaacactgacagtgtctgtcagtgagactaggcagcctatttggcatcccaagtggggagaatacctccttctcccaccccttcttttgt

SEQ ID NO: 125126 - DNA, 1115 bp, Homo sapiens
ttccagggaggcaaggaagtttgctgaagtgtgtgatcttgatgaggttacttaaccttcttgaccatccttttctcacctgttaaatggaggtgataatatctatcttttaggatgggtgtgggaattagacatggcataagaaatgtgcctaacatggtacttggcacacagtagatgctcactaaaccatgatggttattatcactatgcagactttcatcccaactctgtgactgctgatagctggctcagtggtggccctattagcctagaaccctgggatcacattattgcagtgtggttcatctgtactgtaatttacgtgaaatagaccatatgtggatactaacagtatcacattactgacattttactactatggttaatggttaagtaccattttttcccctcttaagagtaaacctttaagaatataagccatttccacagcaggaggcaaaatagtttggataagagtccttaagtaggataacagaaagggaaatattaggaggtctggattacaatttcctttagccctgaatagtgtgagccactgttctttggtaaatgaggtgaaaatggcattaagattaaagaaatacgtatggctgtacatttcttagaagccaattgtttataactctttctgttacaactcagactctcaaaaatagcacgaaagttattcctatcacataggctgttgatttattctgttaaatgaaaaataataataatataatgaagattaagcttcttggccaatcaccaacacatgaagagattctctatacatagggcttttgggacatcatattttctttcaaattgcattgttaaaaatagattatggtttgtgcctagcatccatgttttaacttcacttgcatctcttgtattctcacaggactccctgagcctctggtacttttcaccaaagtcttccatgatctctgtggtatggtagttggagagctgacatcatgatgttgggaaatgaaaccaatgtttgtgtgtcattttctgggagttttctgccaggggtagttgacttacatgcaaggaattaatgattgacttcttggtcttaatttcatgtggaattttgt

SEQ ID NO: 125127 - DNA, 1014 bp, Homo sapiens
tgagtcaaatgaaaaacatagactgtttctattacagtttaatctgtgactaatatcttattttcagtgaaaaacttaaaagaggttttgatttcccaatttacaaaataaattagttcccggacaatcatttgaagaacttttgcgatacaaatcttttgattaactaatgtgcattattttccatgaatcttggtgttttggtgccaccttgtggcttggccttgtagtaacttcaacactcatccattttaaacaacttcctggggagaatatgatgtgctaggaattctttccaaggtacaaataacatactactgtaagtctacattaaagacgtcgagagtgacttgtttgttatttggtcacgaggataggtaaaactagtaagtaaagaacctgatacattattttcagtttctaagattctttgtttatgctttttgtccctagctgctactgtttgaacggtcttggatgaacagatggaagtctgctgttctgcatgaaggggaagggaacataaggagtgtgaagtggagaggccatctgattgcttgggccaataatatggtaaaaaatatgcctctgtcttcctaatgcttgttcagtggcagaagaatggccaacttgatagggctgtaatgaagggaaaagatgccacttgctgtggtggtgatttctaaagggtgtaaggacgattggtatcatacctaggaggttaaagaaattagattgcttttggctttcataatatagtaattcccaacatattctggaatctattttagagtaagaaacctgaggcatggagagtagccaagaaaatgaaaagctatcttaataattgaaggactgcattgggaatgggtcttgaaaatatcatttgcctgttggccaaaggcaagtaagagttgatatgaaacaagtgcagaatattgctgatttctcttttactcccagtataatcatagacagaagtatagacctgtctgtaagaaagtggatcgtaat

SEQ ID NO: 125128 - DNA, 1050 bp, Homo sapiens
tctgtctatataggtttcgcagaattaactgcaagggcatgtccaaagtctgtgttgctaatgcaggaacggaaaaccaaataccacatgttctcatttgtaagtgggagctaaatgatgagaacacatggatacatagaggggaacaacacacactggggcctattggaggatggaggatgggagaagggagaggatcagaaaaaataactaatggatagtaggcttaatacctgggtgacaaaataatctgtacaacaaacccctgtggcacgagtttacctacataacaaacctgcacataaacccctgaaattaaaatacaagttaaaaaaaaaagtctgtgttgcataggaatggtgtttactaaaatattgtttgtaagcaagtggcatttgagtgggctctaggaacccttgtgcacagaggttttccgtcgtaccaacattttgtctatactgaactggttttaaacatgttaaattcagataaaggagattgaagcattataacttgttcagaaaataaccactgaatttaaggaaataatatatttgggaagttctctttttcttcccacatgtttatattctatcttgatggacacagtagagctgttggtggtgtttagagaagctgcgtgtttgaaactttggcactaagcctaagcacgaagcaaaacaaagacacttacctgctccatatgggttcctggtcattcattcctgcctccttcagggttcaagaccccatttgccatcagtagccagccaccatcctaggtcttctccacactcactcatatttttctcacttgccttcttgacttttaaaattttgctcatgatcttttctaatcttgaatatttaaatccttttgtaacaagactttcccattgttatcccctttgtttatttttattgagacagttttatttgctgggttttactattctctatttctctattttattacctggatcttctgcaccttcctgacgtagcacaggtcctcctttgtgaaatatttgttttcttcaagccccttgg

SEQ ID NO: 125129 - DNA, 1018 bp, Homo sapiens
ggctacaaatctttttagaatctagataatccggtgagccttttcttaccactgccatccctaaacatgaagtgtaggagtgcttcctcgtgtgtttgttcatctttgggtcagattggagctggggttttggtggctagaagggttttgacattagcagttcctctctgtctcctgtccagtgtttggatctctaggatagtatttccgcaagttttcagatgcttgattgtagccttctacctgaaacttcttcccacattacttaccattgtagttttcaagtgaatcgtctgaacatttttaagaattaaaattaaggctccctagttaattcacagttacaccacaggcagccaccaatctaacggttgcacgttgaggcattgtaaatacatacctttatttattctaggtactgtgttgtaaattgtggtctcattcctagaaatgtatttcatgctgtcatcaatgtaccaaaattgattaaaaaccattgattagcaggaagtaaaacacaaatgtaaccttcacaagcatttttttagatatgaaaaaccaagcaataaaatagctctactgtttaaagtatttttcggtgagttttcctatgtatactaagctatctgaggctaaaaatagaaatataatgcttaaataaaaatcattttcagtcggaaaaacaggtgttcttcattgctgattgcttttttgatgtcaatatgtaggactcccagagtatttgaatggtatctacagcggtcagggtgggagagttgggtccatagcaacttcattttcctttatgattcccattgtctcatatccatcaaatgcctgttaaaaaatatacttttttctttaatgagttcagctaactttttcatatatttccatactgattgtagctttcccctgaactctgatgttaaaactaccatctctcttccttataaccatcttttgctccttgctgataatatcttcttttgcatatggagagtcctgtgcttattct

SEQ ID NO: 125130 - DNA, 1078 bp, Homo sapiens
ataagtcaaagactgtctactcttaaaactttggtttggggttctttccctttaaaaagccattatatatcatcattctttaaggaaaacctgtttttattcccagtacaatcaaagcaccctagggtaatacaagcaaattatttccacttactacagaagatatatatatatatgaatgagatatatctatctatctgtatatatggaggggtgtgtgtgtgtgtgtgtgtgtgtatgacaaaacaagtcttttaaaagtgtgataatagtttgtgatttagaataatttatttaaaaaagccattataatttattttacttatgttaaaggctttagaaacatgtaactgtgtccgcaatttaatgacttgtaacatacaaactttgatttatttggatccattaaattttatcatgtaaatatgtatttactaagtactaaaaagtaccattttcttgataaactataatgatctgtttgcatatggttaaatggagattttcaaaatgtgtatcagcttggtgtggtttgcagaaatctccagagaatttcctttttctacatgttgtgtggtatgtacttgtaaagattatttatgcttcatgtttttgacattagcgtgttttgtttgttttgaaatagatttatttagttgaggtattttaggatgtatttttctaatttcattaagaaatatatctgatgttaaaaactaaaggcatttagaaggttacattaagaaaggaggacttgtgaaatgatcactttcattttgaaagtgttcgcaaatttttaggaggagctgctctttttgtaactgagttatagaggtttatatctttgaaaaatgagataactacattggctcagtagctacttcaatcctttcagctgcaattttaaactagcagcagaaactaggcagaacaattttgaaaagcccaacatttagcaaatggttataaccttgcaataatcatgttatagatatcaagatccctcctctgttgagaacaggtggcagatcacatagggggaaaagagaataaagacatatgtcagataactgagagg

SEQ ID NO: 125131 - DNA, 1049 bp, Homo sapiens
atgaggaagtagaaacaatcagcagagactcttctttaaagaaatttagtaataaagaagagagatcatctggtagagagaggggccgtgtcctgggaaggtttttgccgaccatgttttggttcatggcaaaaaccagtgaagaggaaaagattaaaaataaagagaatgcttcttggagcagcactaagcaatgagatcaacagcttaggtagggaagataatcttggaagagtcctagaccctctgcctgtgaaacaggcatgaaggaagtggactgagcctagctattgcaagttagacagtgaaggaggagcacttgtgggcaatgaccctgatggctttattttcttacatctgaagggaagaaaagggtaacataatgtgtttgaggagcagaggagatgtttggaatcagtccctgatctacagttatgcattacgagagagctagggggagagtttaagaatgtgaaacaatagaatgtgtgaatccttcactactggtattgaggatggattaggaaagtgttgaagggaagaagggctaacctgggaggtaggagtgtttagagcaatgaaggatcatatgctaatccttaaaaatgacattgtaggaagaggaatctattccattgtaggagggaaatgtgtcaattaatacaagtataaaatatgtttaattgaaggtatatagaagtaaaattgtgtgagattttgtgtgtgtgtttacctaaaaaaaattctctatgttaaattagaaaaacacaaaattagttaagttggtgatttcatgggtggtttggggataaagagagaaggaggtggagtctatgcaagcttacagccacaacagatgagctccaaagatggaggtgcactgagtggagccacgagggcttttgttttcatcccctccccaagatgttaatgatgttatgtaatcataaagcccttgcaaatgaaggaaacagtaacaagggtggtggagcaaccttaagagaaacctgggtagcaaggggctggagaaagattggatgagtgggaag

SEQ ID NO: 125132 - DNA, 1023 bp, Homo sapiens
ttcacaagagaatgtgaaggaagattgggctggctttacattcaggctgaagaatttggactccatttggtagataactagaaattactaaatatttaagaacaaagtaaataaactgaactaagctttaagaaaattaatatggtgactgtatacagtattgattgaaggacagataagagtcaagaggactagttttagataaaaattatggtagttgaggtgtctattatagttgttgaaggaagaggtcatttatttttttcacctgtttattcaaacatttattgaccagcaggtaaaggagagatagggtctgatgtatgttttaaaaagttgaatttgccagagtggagggtgatttaaacaggagagtgattggggacaaaagacaatttagaagcctaatataatactctaggcagggcattacaggatctcaatgaaaagaatgatagtgagtgttcaagatggaaaggatgaaatttatttggacagcctgtgctaaatagacttagcgagccttagtgatggcttggatgagggtgatgaaagacggaagagctcagggtcagttcaggttctcgctttggggatggggtgtgggatgccatcagttgcagtagggtatgtttgagtaaggacatggctaggctagtttggtcctgagtttagataagtgtagtacatcaggtggggacgttacggaggttttagaaacatgaatatgggcctcaggatggagattggcccttaaacacaaacgtgataaccatagttgaataaggtgaagctatttttaaagatattatccaatttagagctgtagagtgagaagagaagactgatggtgaaattctggaacactctaacttgaatactcaggctgtggaagaaaaaacagcaaaggagtctaagaagaagcagttggagggactgtaaggaatcccgaagagtggtgtcagagaagccaggggagagagggtttctacaaggaggaagtggtcagcagtgtcgaatgca

SEQ ID NO: 125133 - DNA, 1053 bp, Homo sapiens
catcccttactgtttcatgagggtaggtttcctctatttcgggtaacaaaacatgtaccacatacttctaaggtactcacatggctctctggtttgtagctaatgagaattctcccaggactttgcaggagcttggttctatggctcattgttaggaattttctctttttcttcattaggtatttttttttagcaggttcagggtagttgttagggctactacaggagataccgttttcaaaagggtcctctctcgtaacctttaattatgtgattcttatctcagatgagctcttcccaaaagcggagggattccctttacagataagtgtgattttcacagacaaaatggcaaaataaataaagagggagagagaggggaaataaatgagaattgttttggattttattatctttagtagtataacgtgtgagcagctagtttggcatgtcatagtagtgaaatgaaccaaaacattgaagattttacaaatcacccttgtgctgatactgacaaagcttatgagatttgtctcgtgaagttatatgttttttatattgaaatagaatataagaacacttgaggaaaatgttgctcagttaaacatagtaatagaaactgaccagagagttctattcttgatttgccaccttcagcagttactcctccagcccctactgtgggtatgacagtgacatttttgcttctggcgaattcttaaggatagtgatgtgtatcggtgcctgtttactatgaacttgtttgattttgttctcttttttgtttattcctctttatcactatactcttatgccttcaatatgcatttttaatttttgaagggacatttatcctcagcaattcctaatttaattttcagcattacatccacagtcccagtatttatccacacatttactgatctgtcagtctttttctacaggcttatgcatcatttgtttacatctcatatacttttctgcataatagaaatcactttttttctaaaatttctttattccatctataaggcagaaggaagtttatccatt

SEQ ID NO: 125134 - DNA, 1019 bp, Homo sapiens
ttttagtgtggaaccatgatatatttttggaaataatcttcccgtatttttattaacattggtagaattgaaagtaaatcttttagtacacataattacatgtaagctacccccttaccatgggttagtcagtattgtgaaaattgagaagctagtatagaatgatctggtaaagtggttggtgatgataaaaatataaagacattacacaaacacattccagatatctaaatctaatgcatctttaaataggttttgtgggtattttttcctttcttcagtgtgttaaggttcctagataaataattatttattagggttatttcaaggataacctttgatatttgcattcagttttcaagtcataattccagcagttgtttaaaatttacaccgtttattcagctggtgctcattttcaatcttttttttgtcatgacttttctgcagttctacattttgagacacacatatcgtatgtgtgcgtgtgtgtgtgtgtgtgttcagtttcagtttactggcatatgtttctagaaaacttttaggataagtacatacaaggtttattttgggatttcttgcatatgttgctttcatatgtaaactatagtataaaattctgggttggaatattttttctcaaaattttggagatgttgctcccttttttctgacatttatttgtgtagacatgtctgaaaccagcctacttttgttcttttctaaaacctttacaattttttttttggtcctgccttggaacttggactaataataataattacaacaagaacaacaacagtaataaatggtctgtgtaattcagtttgctaagttatgtctagttctggtctcttttcattaattttttctggagtaccgtcagtccttttgatccatacactgaagtattgttttcatttcagaaaagtttagttcggttataattttgatgattgcctcagttgcatttgttttcatttcttcaaagaaattcagtaatataaagctgaaggcaa

SEQ ID NO: 125135 - DNA, 1044 bp, Homo sapiens
agataaaagtagatcaacagcatctaattgttggatagaaaagaaaaagaatttgagtaatatagcaaataataaaaaatgaaatggggaaacataaaaactataaaataatgtaactaagccaatgctaaatggatcagatattgttatattgattaaagaaaaataaccttagctttgaaggacacatattttacaaaatgagaaagtgaaaaataaaaatgtgagcaaaatacacagtaaaaagccaaacagaaatcaagcgtgttggtagtagaaatgtgataaaaactagaatttagggcaaaagagcattaaccagcagaaggcatagtatattgattacatttacaagttaaaaggaagattgagtataatcattgtaccctttgatatgccaaattatagggcatctagtatctggaccaaaattcatttgaaattcaaggataaatgaacaaaactacaattggagtatgaagtttttgaaacttgtttttaatcagtctttgatagatgaaagagaaaacagtaaatatatagagaaattaaataatataaatagcatgattttaaaatacatattttgagcctaaaatagagaatatgaattattttgaaattatgtcttaggtttacaaagacaaattattaaatttctaaaaatagatattatacaaaccacattctcagaccacaatgcatccacactagactttattaataactagattaatgggcaaatacaacatcaccatccttggaaatgaaacaaaatgttacttttctcaaaaaggaaataattactgtaattacacattaacttttgtcctttggtttttgaccaatgataaatcaaaagcattttattatatgactgacaaatgagtcattataattattaggcagtatattaatgtctggaaattacaagatggtgaacaaaattgttctaaagtaaaaagggaaaaaattaaggaataatagtaagaaattaataaaatagaaaaattttaaaataaagtgaattgttgagtttctgca

SEQ ID NO: 125136 - DNA, 1042 bp, Homo sapiens
tttattgaagtaatgttttgaacatttcccagattgtgaataactgtcttgagtacatagtcactgtctggtgctgtgtgcgagccaggcttctaccattgtccgtgggcttgtggcaggcacaggcagaagatgaagtttaacaaaaggaaaacagctcaaggaatcagcagtatgccagcctcttaggaggcaaacccttcaaatcctccctgtgcttttaaaggttgttaggatttagaaaaccaatgtctatctaataagtcttctgtaggtggaaaggccgttccgtgcccctgcctctgttgaggttctaccgtcctggtgggtgcaacagcggggtgaatatctgagccttttacctgtcagccatgcacacggggctgttggtctcaggcacagagtaggcacagcagcctagggttttaggggtcaaatgaagttgcaaatggtcattttctatggtctcataagtttacagcatataaatgctcttatgggggagatggttaaaaactcttgattagaggaaaagttaaggaaaaaagaagggatattttaatgaataagcagagactgatttataagcattctcataaatacagaaaatttaagctccattgttaaacagggatgacatggatgggcaaaattattttctttccaaacaagatgactcttcctcaaaatttctttccgttcttcacattctcagatgatttttattttttttagattatttccaagatgttaaagtttaatcaaggacgtttatattctaatagagtaatttgtttttaggtcattagaatggaagtttaagtggctaaagtttcctaacaagtttcctaacaaatttagttttttcagtctatgttagaagttagagaatattagggctctacggagatatatataaatgatgcagtctgtatatcttaaagtaatgattttatattattcactttaattttgtagcatcagggcacagccctgatgaaccataaagctacttgaagcactgcagctagtttgaaatcac

SEQ ID NO: 125137 - DNA, 1672 bp, Homo sapiens
ctaaaagagcatcctgtaacacacccccactggggcttcagaagcttaaacattcacccctagatgctgccgtggggtcaggagcaccacagcccacccatctgcatgttcctcctaggggtttgagcagcagggcaccgaagaagtgagccacactcccatcacatgccctgtgaaggagatgagggaacttttcctgtttcaatattctttgtatgtccttctaaagttttaaagttttgctttttacattgtcttcacttttcctcaagaaaaaaaaattctcactggactgtgagaagaatttattccttgatattgtgacagatactgaagttcttaccttgccagaaaaaaaattacacgaaaatgagtcccttgaacctactgatttcccattttctttccttagctcctgtccagcccttgaccccattgcattagtggaatctactatcccagattggatgtagaaagagcagtggtgatataatgattagagaagaaactctggcggggcggtaatgtccagcagaaggatggttgacgggttctggaggtggcagcactgcacgcaggccaggcttggggtcagacgccagccagccagccctgccacacgttcattagtttggtgtgttaccacactttcttcatctgtaaagtgtggatcataatcacacctgatttcaatgatggttttgagaattatatgaacgaatacatgtaaaatatgtaacataaggcttagtaaacattagtcgttatcagaaggtggatcaagctaagagtccaactgaacatgtttactacacttcctgaagaactattatttttgaatttattcatatgtttggctttaataatgttcaattgtatatggggtaggcaaactgaaagggaggtagggaagaaagaaagaaaaacgaaggggaaaaaaagagaagcttctgcgacacacccattcttacacccattttgctgcctccctatccctcagctcctgtgtttatttgggaggagtgggtatcttttatcacattacacaaatagtattttaagaacattattaagcttgagtaattaggtgtgtgaagtcgatcccagtgcaggtctagtgagttgacttcagaaatgtcttttcgatgtagcaacattgcaacatggcttgtaagatgcttcttttgaaaagttttgagagactgcttggaaaatgatttaatggggattgataaagcagtgtttttacactggagagcattataacaataatttctgtggtggaagtagagtcaaatttgtgaagtgttaagtagtctttcttcgtcatatgttggaaaaataaattaggcattttctctttggttaataacttggtctcagttatttaaattatttgtactacccaccctttttaggtaagtgactttactaatgtggaaaacaagggctttactctctcaaatgtttagattttagataaatagaatgcattagcattgctgcagctatcattaaatcaaaaataaaagtgagaaaaataagaacacacctttactcctaacagatttttcctttatcattgatggtatcatttacttgtatattgagaacttaaacagggatatttatgggccctgctgagatgttcagaaagctctgcagccttcat

SEQ ID NO: 125138 - DNA, 1011 bp, Homo sapiens
gatggggtttcactgtgttagccaggatggtcttgatctcctgatcttgtgatccgcccacctcggcttcccaaagtgctgggattacaggcgtgagccaccgcacccggccacattcttcttatgaaacagggaatcaccaaagggtgaggaacatttaccatggacttcttgtcttcatgtatattgtgttaattatctagtagtatcttgggagtaggggagtggagaggaaagaatggatggtgagatgcaataggagcaaattatttggcaggtttagccaaaggaccaaaggaaaaagaatggagtgttttcaagggagtgtctttgtggtgactgactttggagttcagagtatttagggaactaaatgaaccagaaggatgatggtaaatcggatgtcatggaccagatatgtggataaagtatgagtgtctgtgcatatggtttaacaataaataattttaagcttgagtttgttttgttaataatagacttcttagtctctgggaaccatgacagggtatacttcaaaatggtagtgtatacttctttcttaaacaagctctgtttttctgtttgtgtagctttgttttattcacctgctctagaacttatttatttggctataatttctaatgtttttcatttaataggatcatgatatattaggatagttgaatacttaatggatatttttcatctagccactcaagacatgaagttcttgttacccacacaagaggttggtttgattgttgggctaggtatcaacccaatgaccacaaccaaggagatttagtaagatttagtatttagtaaagggattttattgcttgtaacaagtagggagaacaccagggatagttctcaaagcagtgtctcccggagctggggactgggtcaggttttataagcatatgataatgaggtgtgatctgactggatcttgcaatgaggtgatgccgggaggtctgatcttactggatcctgacttggggtgatgct

SEQ ID NO: 125139 - DNA, 1052 bp, Homo sapiens
cttaagctatgtatccttgaacaaagaaccctgctctactcttggtctaatggtactcacttatcgacctgaagcaaataccatctgtagtatgctgttctagatgtggcatcattaattggcaagcagggcatgtatctttttgatatgatcaaagtggttcattgttggctcaagtgtgccagtgcctgtaatacttgtttaagactgattgacaggtctcagattcttgtgtgtttaaagaacttgttttctatatttgaaccccgtattttgagtgataagagatgtgtcaaaggaattgaaaattacttaaatggaaatcattctaacttctgataaatgatgccaaggcaagtcatatttccagttgtctgcattaaaaaataatctcaagtttgtgggttaagtatttatagataacttgataattttgatggcttctacgcaccaaagtggctaagaaaacatggtcagaattaaggatgcttctctcttttagagtaaagtgtcatacttactgaatgttttaacatctgacccttcagtggtaactacatttaggcaaatatcccttaaatagctaaaactgaaaatattccttcactgaatgaaattaccctggtatttcacatatttcaaagtcagggttgaagtaattttaactttgtggaacatgactctgaattgggtagtagactggggcttagttgtctgaagcctttggatttcattcttcagtacagggtactctcagttctggtggttctttctttggggttcaaggccattattgcaaagtaagagctttaaaaggattatgaataaggtgtagacctaggggaggaatctccacctttgcagttgggagacagggaacctgtagaaagtgaaatttgaggtgaatctggaaaggtgaatgtgtattttccaggttgttagagtggagttaagacagtgatactttttttttttttttttttttttgagaaggagtctcgctctgtcgcccaggctggagtgcagtggcgcaatctcagctcactgcaagc

SEQ ID NO: 125140 - DNA, 1013 bp, Homo sapiens
aaacccacctttctaatcttagttttaatttcttccctctctagtaatttttatctgctcactaccttctaaatattgccatgggcttgcctgtttctaagcttttgatgacttcttttctctctagaatacacttctgtgaatctccattctttctgcaaggtacttcccctggattgtagccctgaggtgtttccttcctgtaaactcctatattactactatttcacttgtagtgtggcccctcatagtgtcagtaccagcctcacattcctatttaacgtcttggaggatagttgccatgtctcctggtatacttctctcctcttccccaccctttctcttttctctgctgccgtttggtatccagtaagtatatattggctgataatattgttttgaaacataaccatggaactggtgattttctgttactacctttcaggaggcctctgggagctggttctctgttctcctgtgtattattctaccttcacttgtccattggatgtataattagaaattttatactgagagctactgtagactgaattcttccccacctcctaattcatatgttgaggtcctaaccctcaatgtgatggtatttagaattggggacttggggggtaattaaatttagatgagggccaggcatggtgtaaactcaggaggctacgacaggagggtcacttgagcccaggagttctaggctgcagtgagttataattgcaccactgcactctctagcctggttgacagagcaagactgtgtctcttaaaaacaaaaacaagttaaaaacaatttagatgaggtcatgagggtggagtcctcaagatgagattagtgccaacataagaagagacaggagagaccttcccttcctcccccttcctgccggccatataaggacacagcgggaaggctgtctgcaaaccaggaagagaaccctcaccagaatgtgaccatactggcagattgaggacctccagtctccaaaactaggagaatt

SEQ ID NO: 125141 - DNA, 1087 bp, Homo sapiens
ctttctgtaaggttattttttaaagattgtgctgcttgactgaaacacttagtagtgcctgtaaatttgagcgtttcattatgggttgcaatgaagcatgctcacatgcaatgaaatacagagaattttggactatttgagtaatgctgaaataaataaaaaggaagaaaactctcatgtcatatttcaggtagtcctaaagtttcttctggtttacttaaggttagttcagagaattaaagaaacagtaggacttacgacataaaatgagtattttttgacagttattttataacacaaaagggtttttattttgcatgataatataaacattaacactcaacattatatattaacttttatagaagcatcctaaagctaactgatggtataagtacacctgagattttcggtctctcaatatggcatggattttccattcgaaaaaataatttgttgtttgtgtatgtgtgcagcttaagcgatagcactgatttacacatttgccataaattagggggagtttctgaatcattcttttctcactttgagttcaactgtaggttggtcgtgttttcaccgctgcatttaatttactgcctcagtccatcaggcattgtgtatagactgcatacacaccattagttgtcagtagatgagggtcctcatgagtcattctgacagctggcttgcactatcacaataaaataggccctgttctgttatttcccagaagctggaaacaagccttctccaaggcatgcatatcttttgagacattgcagatcatttatgcattaagcatcttgtctttaaaaatggttttgttactacttgtgtattaatagtattattaattaattaactggcctctttgttcttcttacagtttttggcattgggcacacattatggcaaggtttatttacttgatgtccaggggaacatcactcagaagtttgatgtagtaagtattctgtataaaataatgtatgagctaaacttcatgttaagtatttgtgttttagaatattggtttaccagtttgttttaatagcataaagaggatctttattaattcaatcag

SEQ ID NO: 125142 - DNA, 1031 bp, Homo sapiens
tgtctattttctaatttcttttttaaagttcagcacagctgtcatctactatgttccatagggtcttagagatacttccattttaagcattctctttaaatttaattgtaattaatccatttttatgtctgtttccctcattataccataacccttttaagtcacacttggtcattgtctaagcgtattatagagtgtttttttttgtgtgtgtttgttgaatgaaccagtgaatgaatgaaatggagaacaaagtttgcctgcctagaggtcaaacttcattaacattgtacgtaaaccaactttgccaaagagcctgatgtttgggaactgtaatcaatgctaacttttagaacatgcactctttatctgaagtccatgtttctatttaagaggattctgatccagttgagtgttttagcttttaattctgatcctaattctgctactcatcgactgtttccagggaagtctcatcaactttctgagcttatttcctcatgtgtaattgaaggcactccctgctgtaatgctttgaatactataaaacactatgtgaaggtagatgatattagacagttgaccagatttaaaatggactactcttgtttcctttgcattgtccaaaggactgcttatcaccttttctgcttgtttccttacataaagtccagtctttatggatgtacatttatcagttacttaagttacttacatgaagtttaaggtaaaagcagttgtgcttagtggatgatgcccaatctggtagtatagaaaatgagtcaagtttctgtaattaaacatgaaagggtctagtgaaattatatttattctttgcccatcttgaattttaagtacattcaggtgaaaaaaaaaaagaaacaaaactcaataattacaaaagttcaaggcttttaatggctggaaggtgggtaaaatttgagaatttgtatttatgttgtcacatttgtggccattttgcattttttgttatattttaagtagtggaaagtattagcaaatgatgaaaa

SEQ ID NO: 125143 - DNA, 1069 bp, Homo sapiens
tacaacacactccaagactgtattaagtagaatgtagacagtgatcaaagtcaaagatttatatgaaacgggttttggcaactctgtcgctcacttaattcctcaaattataaggattcaattaggaacctgttaagattagaaataatgggaagctcagtgcttttaagttattcttttattaagttattcttttattaagttattattggaaagtataagggattacattgtaggtgttatgaatagtagaaatgccccaaattattacttatacgaatgaatgaatttattccacatctgggtccttgccgtaacaaagctctcaccaactttctgagtccagggtaagtactagatagcaccgttagcctattcttggaccaaaacagtttgtgtcatagtcagaatattggggggcagggagcttcacccattgctctcttcttccctgtgaccttgtaagttttactccttccacaaaaagcaaactgctcttgtctgatccatctcctggctttatcctatgttactagcagttggcctcatcctcccgcttgcttcccacccagttcctttttacttcaaattttgtttcattgtaaatagagtcctgtacccccaacactttattagaatgtatgcctgctttctcatgttttaccagcaaccttctcctttgagatgccagccatttggctgcaatgccatcgaccccttttcattgctgccattctccaacttctggtcccttttcttcactcattgaatattggccttgtagttcttcaaccaaatttcattccagtgacccttacctcttctctgtttcatctccccattgataaggccacactttggatggtgtcagcactggaacttgaggatcttagcctctgtgacactctctgttgacccttgttatacttcaagcttttgtgctcattttcccacaagctatatgactttatggagtcctgatctctaatcctttcattctttttcttttatttttctgtgtctatgaaatgattgattatcctaactctatcttaccagcatcttcagt

SEQ ID NO: 125144 - DNA, 1047 bp, Homo sapiens
ggtgaagctggagaggatgaaggtcatctccacagagtgagatgtgaatagttgaggagtgctccactggtggtggtttctaccagcctaatttgggctttataagatatctcacctttccccaatcagtatattgagtatcattttattttgtaaaaacaaaacaaaatggattttaataaagaaatggtatccagaggtgacattttaagttctgtgtaagtagtaacagtagaaaatgtgatgatctttctcttaacccctagaattcatgtgacacacatttttaaaaagtaaaattcaagtcttcatttggcctgtaacagtgatgccatataaaatgtaccaatatatgtgaaagatatgtttaaacaagatgaaaaatgtagaacccattctgcacaattatttttggttgtaaacactgaaaaaatcaatttcttgtatacaaattttaaattattaggtgaaaagaaatgtaaaatattcttgttggtatacaagaccaagttaggtaaacaggacttcctccatgaaaatttaccccatggtaacactgtaacaacatcactaaacagtttttcagggagaagtctttaaatgctttgatttgttatccttaaaagtaatttccctcctcctaagtccaaaactcagtaagattgaccatgatgtgacatttattttcagatagtgtttagaattctgtaggatggtataaaggacttgtctttaattaaaagtgctctacacttagtaaaaatctatgtgagttgaggaattgattctttttaaaagaaagccgcaaatttttcttgtatgggtaaatgtcactctgttcatatcttcgcttagctgcaagtcaggacttgtactattccactaggttgtcatagaaacgcagttaactgtcatcttaactcagactgttgatggttttatttgtaggtttgtaggattattaaaatttaacaaaaattattgatttgctttttattaacactgggttgtttaccgtggaagtccaaactgcatgaaaaccttttt

SEQ ID NO: 125145 - DNA, 1049 bp, Homo sapiens
aactagggctttgaggaggcctttgtcaaacagaaacaaggaccactcctcgcctcctgactcaaccggagaattgttttatcccatgccgtgtcctcacagggatcaatatttaatttaggagcaaacaaatgagaagtttttttatttagctttgagtttggctcagagcttccaactcttttgctcaccatcatttttatcctctctgatccttatattattctctgtaacaggcagaataatggttccccaaagatgtctacatcctaatccctggaacctgtgaatatgtcatgttacacagcaagggaaaattaaggttgctaatcagctgactgtaggagagtgagattatctggacagggccagtataatcctaagggtctttgtaaatggaagagggaggcaggagaaaaggctgtgatgtgggaatgattcaacctgcctttgctagctttgaagagggaagaagggcccacagccaaggaatgctggcgctttcagaagctggaaaaggagaggaaagggattctccccccagcttccaggggagggcagcactactgacaccctgattttagcccagtgagatctgtgtcagacttctaatctacagcactgtacgacaacaaatttgtgtcgcttcatactactaagtttgtcacattttttttacagcaatgataggaaactaatacagtaaataatttgattgaatgaccttgtctccttaacacttttcattaggccgcatttcagagttttggaagtcaaatacatccagcaaggagaacatacagaaaatggttgtgacgaaactgctaatactgtggggagctgtatttataaaaatgtgtcttttctgatgattgttcaagagtgtgtttaaatgatcatttcacttgacaattagggcctgattctatgctgtcaaggctttaaggcattcctgtctctgcaggctcaagaaatgctataacaaatctaaatagcacaaaggtttctttcatccatgagctatttcagtttcagtgcagccgttttta

SEQ ID NO: 125146 - DNA, 1661 bp, Homo sapiens
ggtttcaccatgttggccagtctggtcttgaactccttacctcaggtgatccacctgcctcggcctcccaaaatgctgggattacgggcgtgagccactgtgcccagcccagatgtttttgttttaatgaagaacataaatggggtattcacccatttacctcatgtgcatacttgagtggattctatatgaggaaaaaaaaatttccttaggtttaatgtgattttcctgaaagagtactcaagtgtctttttagaactgtacatacaggaaataggaatcttaagtgtggtttattggcatagttatcaaagccttgtattgctgatgctaataacataatattcagcgactcacagagatggaaaggatgttagaagtcattaaactcaacctctaagcctcactcttccaaccccagtggtgttaggaaagtttataatgttgtgggtggtgaatggaacataatgagcagtttataatagatgttcagtaaagaagtcagaatagtgattgttaatgttaaagtggactatgtccacaagagaaggatcagtacagtaagaggactaaaaccaggaactgtgatggtgagtgcagaggagaaacattttagaaggtggaacatgatacatgtcattaactctctggacagctatcatgtagtgcaataattgttttttttatgtagtgctaagaacaaaaatgttactgtggattattgtagcttcaaatgaataagaactttatgagacttggattgacattaagctaaacaggctgcattgagttacagaggagattctaatattcattgtggttaatgatacaagtataataaaattcttaattacaaggaacatatccccattttacccatggcctttgaaggcaaggactgtgttgtcctccaggctgtactttggaaggtgcctgccacctgtcaggctcttgctaatttttgatgaatgaaattaaaatgattttaaacactagatttacatttatcccgctgtccaacttgtattgagtaatatatgcatcgatcttccttaaaatgttcatttttttcttgaaaatgtattagttatatctaaaatgtccttgccccatttttttcttgttctttgtttatctcatggattgttgtaaagtgcttacattcagtgtcagcatattagttgtaaccttttattgctattgatatctataagtacgttaagtaaatcttcattttgctgacctctttgaggatgcatggcatcagcagattctctctttcactggacaggtgagagattagcaggatcaagtcaatttttccctttttgctttgtttccttcagagcagcaagattcattgtctagcgagagggaaactgtgttaaatggcagaatttgtcttagtggtgatggtttaaagagtgcatgtaaattatacagcttgtttacacagggtctgataggtaccactgtaggagattcttttaaaaagctattttagcaagacagtcattttaactcaaccagattaatagcatgataattaatagcacaagaacttttcagtataaaaattggcttgtagataacatgagatggcagtttcctcttcccttctgagattagtgaggctgctttgccagatgggtttccattat

SEQ ID NO: 125147 - DNA, 1679 bp, Homo sapiens
agctaaaagtgtataaaaatggagaaaatagggctgcgtgcggtggctcatgcctgtaatcccagcacttcgggaggctgaggcgggtggatcacctgaggtcaggagttcgagaccagacgggccaacatggtgaaaccccgtcactactaaaaatacaaaaaaattagtcaggcatggtggtgggcgcctgtaatcccagctactcgggaggctgaggcaggagaatcacttgaacccaggaggcagaggttgcagtgagccgagattgtgccattgcactccagcctgggtgacaagagggagactccatctcaaaaacaaacaacaacaacaaaaaaacccccaaaaatggagaaaataactgttctattgaactttttagaaaacttggcatacatttttttcttggtatcatgtatcataaatgccagtaatctccaggattagcaacacaaaactaaatgtctccacattatctttcgtgagtgttgtttctttggtgattgctcccctccccatttattttcagaagaaccaaaatagtgacatctgcactgagttattgtggtataaaacagctcagaggatctgaaactaaaaccactttttaggtatgaatgaaaatttttttataagtcactgggaaattcttgcttttgcctaatatggtaaaggtagttgtcaaaagtaactacatatatattttatagtttacagaaaaaatgaataccctgcattctgcctggaaatcttctaaccagcagttttgcttagctccaaaacgatttatagttgaccttcatattcacagatgcccaacagtatttgtccatatctttcttatgaataacattctgcttgaagtctggttgtttgtgtatttgtcttatctctcctagagattgctgagtcctcaagaataagaacaagaacttactcatgtctgtatcttccacagggctagtgctttataggtactaagtgtttagtaaagtgtttaaatgaatttattagggggaaaatagcatttcaaattgtcaaattgtatattagtaggatttgcgtgaaattattttatcttacttgcaccttttttaagttattaattcagatgtaatgtggattacatctatactataatgtaggttacattctatactttctttactcttgcctgctccccaggtaccctttgatcttcctaatcaaccaacctggaccctggtccattaaagtatttccacgattagaccatctatttcttaatcaagtaggagagtttctactttgaattctccttctgcattttagaaattaggggaattctgtccttattgtagatcacttatggattattagatgtcatatttgtcatgtatatccccatgtgattatgttacaataaaaatcaaatcaatacaaatttgagtgcttcgattttcttgcctgtaactgggaattttactctctaaaacttttgtgagtatgaagtatgttaaaacttttgtgaatataaagtatgttaaagtggctaggttgaaatggttgtataaataagacagaggttaatcatcgaaacctggacttggcttacgtatgcacaattctcttttcttacagtttggctaagatagatattttaaaggcagtgttactactaactaaaggaaaaacaa

SEQ ID NO: 125148 - DNA, 1067 bp, Homo sapiens
aatatttacttctcccattaattatatcctgtactcctagtaattttctaacaagccaactggaatctgcaggccatcagaaaagtgttaaaaattatgcctcgtgttctaaaaggaattaatgtctacagctgcctgcttacaaaaaaagagctggtcacattggagattgctgatggcatcgaggtggttgcagtagcctagaatggtggctacacgtcttgtcatctgtagagtatcaatatgtttttataatgatacaataacctgaaccctgtaacggtttatggtccttttgagaattcttatggattcttagagtgacagaggtctgagaaaagatcttgaaagctttcacaaaatctggctgggtgacagaaaactagcaggactgtgatttagccgctaagaaatcctgttgaccaggaacatcattaaacttttaagttaaaacaagaaccacaaaacaaatggtagatgcaaagggtaaggggtacccaaagtggcagcaaaaattaaaacgtgccgaagattcttagataaaaggcaaaatgcagcaagcccattgttgatcttgatctcctacttagaaataagcattttttaatataccattctgaatattgcaatgtgtgttggaaatctgtattcatgcatttcctttatggaatctgtcagaactgattgttgctctttcattttctctggctatttttagtcaatgataaataaagaacttgaattttgaatctggcaccagtgagatatagaaccagaaacagcaggaaataaccacgatgagtaacttcacatcagtatctgcacggagagctcagtcctcttaacatttgtaatactgctaatttctatgggctttttaaaatacttccacatgagctctcaaaacccataaaagtgtggcatgtaaagtaaattgtttgtcacttgccgacgacctgccatatttattgtcaggagaaatggacattagttggaaaagcagttgttaaaggccaaacaatttttaaagatggcaaagatgcacgagggttttcctttttctaaca

SEQ ID NO: 125149 - DNA, 1034 bp, Homo sapiens
tgctcagtgatttgtggattttatggagccaccagtagcctatatttttccaacttaatcacacagacatactttgttgactttctgcctaaatccacataatggtagtaatttgtctatagtttcctccaagtctacaaagctaatgtttctcaggggaaaaaaaaaaagaattcttcctctttatttgttcatggataagatgtgccagctctgtgccattgccccctttaagcagttacaacccgcttatttaatacagttgctgtgagttttgcatgagaatgaagtcaatttctccagtctatagttttcagaaaccatcttattccatcttttgaaattttttacattttctcaatttcacaccccattctcctatgcaaattcaaaagttatgagacaagttttgttcaaataagctttgaactaaggtaacctaaggactcttaaaaaagagggtaatggacaacaggggggatctaccccaccacaggaataaagatcataatagatggatctaataccaaaaatgcactgttggggggtgatatttatttccctcacactctatgcacttgtggattttgttccaaagataaaatgtttgggtaagagtcatttgaagactaatagagtgtaaaagaagaaactcaatactccacattggtatcactgaattcagtagttgaatctatattctaacctggcgctgtttattccctgcatgtttgattggtctcaatgaaactatgagatccttgaagatagaggctatgtcttatcattgcttggactctctacagtggttagcacagcacaagacatacagaatttcaataagtacatttgtcttgacttgaaagaaacaatcaatgagagccaggaaactagagtagaatcaaaattacttcttagataagcaatatgcgtaaccacatcctttcttcatcgcttgagcatctatcatacaaccagttccattagagtacagtaagtgtttgtagaactgagcacacagtaggcatacaaca

SEQ ID NO: 125150 - DNA, 1043 bp, Homo sapiens
aaacattattaacgatataccgcataacacacagaagatacctggggatcagtggcacagaaaaccaagaaagcctttacagtgtgctgttatttcagtctatttttggtgaatatattaaacaccctggcagtgccaaccagtaaaaacaaaccaagagagcaagcctgtgagagccagtaggacgtagaaagcttctcagacactgcatcctgtgctccatttgtcattctgtgtgtgggatggacatccggtcctcctcctctggaaaatccacagccacaggctcacatgagctgttccttttctcttctttcttgcagattctccatgctttcagcctatttacactgggctcacagctcaaaaaagggcaagaaagtgattatgtaaactcagacggagagaaactcaagctcctttaggcagtctactaacagtagggcgaataaatagaaaatacgatcatataaagaggatacaatactgagaagagtaagtttgggggtagtacagataactagaattaattatatcaagcaaagaacaatctgtaggcaactgcatctgagatgtgtccccaaactgcactaaaatcataacattatttttggataatcttctagccacctgagagtaccatgttttttttcaaacatggcattttaaatagggaactgcagacaataattcttaaaccagaaaaatatttgaaattttatattagggaaaagaaacacattgatagatcatgatgatctacactatggctgatcaacttgaaagtgtagctcaccatgatctatcagtttgaacatacctcatttgttcccacaattcccagctccctgctgtttccctgacctgtaactgctcatctccgatgatcgtggagttgagaggcagcggggcatagtggaaggagtgctggctcttgagtcagacttacatggattgaaagcttacttataccagctgtgtaatcccaagtaagtcatttcatcttttgaagtctctgtttcctcttctgtaatgatatcacc

SEQ ID NO: 125151 - DNA, 1026 bp, Homo sapiens
atctgagttttctggataagaacactaatataaagaaatctgagtgttcacctctggcagtcaacaaattttgcagagagatgctactttgtccaatggaccatcaccctgtttaaatttcataagaatttctattttatcacggagctaagtagaaccaggagaaaatacaagagtggaaactgtcagaggaagaagaaggaattcagtttcctggtggaataactgtttcttgggggcctcatggaagatactgggctcagtagcccaggctcccatccctctgagctttaaagtgaaagtttgataatccacacaacagcatcaatgcacacagactaaaagtccacagcttccttttcaactcttgttattgtcagtgatctgacaaaaagcagcctgcacgatcacacatacggatttagttgatagactcaaggaactagtaaggacacataaacaatagagacggcagaggaagggaagaaagattagaggacacatttacataaaatgtcagcccaagtcattgggctgccgaatcctgtgccagtgtctggtggcaacacaggccttgggactggagtagaccatggaaacccttccagattaaagacctgcccctcacatactggttaatccaactgaatctcgctgatctagagatggggctaacaaaggcaaaaattttactttcccagcccgctgattcccagatcttggccacttgccataagtagtgacagtggggtaaggaaagggccagggtgggatgcctgctccggagcccctcctcaacagacctgtctggcccgtcagtcctatacaggtgagagagcaagttttctgtgtagtgaagcctgctgaataatggtaaaggatcagtaaagacaatggcacacagagtgcaccacacccagacttggtcaagccagggccacaaagaaagatttctttctgtagttgtcagcagatcccctgcatcagaatcgcttgtgttacttgttaaaaatgcacatccctggg

SEQ ID NO: 125152 - DNA, 2973 bp, Homo sapiens
agcctccttccagcagctctctccagttcttgtctgtgatgatgcgtacgttgctctgccgcctgtgggtccagggagcacccccaagcaacagtaccaggactgccagcggaactgcaagactcctggagggtgccatgtctgccgcttgcccacctcacagcaagcgtggcggcccaacactaggttttttaaaaactgtgactatcagtgttttaaaaattgcccggtaactctagacttcaaaagtgggataagtaatgataaaccaataataaacttaggagaagcatagtctgctttagttatattgttatgccatattatggtcagtaacacagtaaaggcctaattcatctgctttctaaattggttctgtacttttctagaaaagcctacatgtatatacttagttacagctgcacttctccattacttatttttaggaaggttatagagatggaatagatgctggcaaagcagttactcttcaacagggcttcaatcaaggttataagaaaggtgcagaagtcattttaaactatggacgactccgaggaacattgaggtaatttttaaagtctaaatgctgaatcattttaacctcaatactactggaggatgtttctgtataaataaagtgtttaaactgaaatgcttttcctggtgctaaatacactaaagcgtgtcgcagatcatagaattatattgccttcaaaaagtcaaaatctttatcagctcatctactttaatgtgtgaactacatattgtcttttcgtgcaaagaaatggtaagaagatgtatacttctgctacctgaacaattatctatctcattgaaaggtcttcagattttgaataaaacttgtagtacttccacacagtatgacagacctctagactagaagtacatgatgaaaatagttggtaattaagataaaattgatttaatttactttagtcctgaacattgaatacttgtcaggatgccattgcaataatggcatatatcggagccaaatggtcaaatgatacacagagccaggagcctagcagccttgtccagtttgatgctctataccaagcttgtccaaccagtggcctgcatatcacatgtggcccaggacggctttgaatatggcccaacacaaattcataaactttcttaaaacaatatgagcattatgaaatttttttcatgatattttttcttttttcttttttttttttttttaactcatcagctatcattagtgttaatgtattttatgtgtggcccaagacagttcttccaatgtggcccaggaaagccaaaagattggacacccctgctttataccctttacactgtccttggtagagaaaaaaaaaatgcttcaaagaatcgctaattttaaagaagagtagatgataaaagttaccaaaacaaaccgaaaaatttattgtatttgggattttagaaaatccaactattaggaaccagaatttagtctgctacagtaggaaaacaatgtgaatattcacatcatcaagttgatgttacataaccttagaaagctactgctgaatcttttatatcaatggattctatttttaaatacttttcataataatcattattttatgacatgactataatattaaatctgttaggactagaagaatttttacctttttcaaggaaattgttagtagttcagcaaacagtttctactctgtgacataagcccaggaaagtgaagtctcttgaaaacttcttttctctaaccttcattcttgatggcaagcaactatgtgcttagaacgatggttttcaactttggttgcaccttaactctgaaacttaaaaaaaagataccccctgagattctgatttaattggtgtggagtataatctgggccttgataggggtcagagctcttcaggtgattctaatgtgcatccatgattgagaattgctagttaagaagctgtttaatgtccttaaagaagaaactaatttttctttctcggagttgtattcatcttcaacagatattacatagtcataagagaaaaatataaaatcaggaaaagcgtatatagagttatgaaagaggggttatgaattataaacagttttatgattaagtccaatcgtttaattgttattgaaagatagtcttatatttttaagtcctattttgctatttaacccttgtttatacttttgttcagtgctttgctctcctggtgtcaccttcataataataattcaactttgatcaataaaataaacaatcttctggatgcagttggccagtgtgaagagtatgtgctcaaacatctgaaatcaatcactccaccgtcccatgttgtagatttattggactccattgaggatatggacctttgtcatgtagttccagctgagaaaaagattgatgaagctaaagatgaaagactctgtgaaaataatgctgagtttaacaaaaactgtagcaagagccatagtgggatagattgttcatatgtagaatgttgtagaacacaggagcatgcacattcagaaaacccaagccccacatggattttggaacagacagccagtttagttaaacagctgggcctatcagtagatgtattacaacacctcaaacaactataaaattaccttcccttttctaatgaaaataatgttcagaacatttggtttcctaacaatcgaaatttgtactggtttctgcatcaaacacctcaactgtagggttaccctttatggaagtttgaaattaacactattgtcttcaaaattaacactattaaatgtaatataagccttttttctttgtcactggtaatttttatgtagttttaagatatggtcagaaatttctactgtcattgacatttccaaacttgtggtcaaaatgaagtgttttcagactcattagcaaaagtgaacaagaattaaacatattttgtaaggaccta

SEQ ID NO: 125153 - DNA, 1022 bp, Homo sapiens
agaactgctgaggccaccaaaaatgttgtgatatgtaaagggagtgggcagctgaatgcatatacctgcgtccttacctaatatatatcctttacactacttattaactgctttgtgggaaaccaaaataaaagccttcagcccagtctaagttgtgattctaccctcttccaactaaggttagagcttagttcttagaactaagtttccagtctaagatacaggagagagagagagagagagagagagagagagagagagagagtgagtgtgtgtgtgtgtatagagagtgattcaccaatcaggcttcttgttctacagaaattctcaaatctctgtcatgaagatactttaccgcaacagttgcctttcttgattttgcccctacgtaatgccttttctgaacaaacatgctggagcacgagtctgccatcactgtctcaaattcttaatttctcatgcactctccacctttaaactactttttgctaaagtcactgatagccagtcacacaactgtccatcactgacttgttttcagtcctatcatttgtctcctctccatcattggacatgaacaattcactgcttatacaatcccttctccttgccttctccaacagcactttttcttgtccgctcattactattccctatcattttgctaactctccccgactctgactgctgcttagatgtagggattccccagagtttcactgttggacctctttgtttttatattctgaccagatgatctcacctattaatgtcatccctgttcatccatagctggaaacattaagtcttcctctgcccttcctgtgccatcataccctacttctaactgagttgctttacatctttcaaacagtttgagtctggcctcctttcattctaatcacccagattttaattaatttatgtaccagcctcatcactaatgtcagtacctacaatctagctgtcttcctgtccattctgtctcttaccaatattatctttccaaaacagtttacttc

SEQ ID NO: 125154 - DNA, 1126 bp, Homo sapiens
tccctgcctactcgaggggagaatattatgtagaaagtggtttagcacatatactaaaggagaaactaaattctcctcggacttcttagactttctatcctccaaacgggaagatagtttatgtcactcattttgtgatgatgtgtctagcttttacatattcctattcaactgaaaggaagggtgttagctcaccactcacatatgtgcatactgctgcagatctgccaaaaagagccaagagtcctcagtgtgtaacactccgttttcttgccctataaatagtctgctctttccaaaaagaagatcaaagtactaatcagaactacctacagattgagttctgcggaagttgaatcctggtgctttcatgcatgtgtatgcaactcaccactgagagaggccttggacctttggatcctctttctttcgaagaagctgttgagttagttcaaggccactaggtggtgctcgtgcaccctgataagttagcacgtgtttcattccttggtaatgtgccctttgcttagacctcatggtcacaagtacaagaagctagtgattatccctaaagctataccagacagattgagccatttgtgaagttgggtggatgaggagggcttttggggtatgtcgacaaataagaaattaggatcctcctgttcttgtttaaattctaggctgagaatttttctaaatcaaaataactgatcataagaaaacctgttcaaaagaaaaaagcaccttttttccaaagctctgaggcctaaaagtaaacacctagaacccaaagcatgcagccttcaatcagaagcaatgtaaaattctaacctcacctgcaggaagcatctctacttgccaagcaggactgcacctaaactgtttcaaacaacacttgcagttcatctcttgatctcactctctctttttctctcacacacacaaacacaacttttcaggatgtaaacatagggagagacaacaactttgttaacctactcaaatatatcacaactcttctctttttagtcaacaaatcgacaaccaactaggttttcctctcatcaaatacaactctagaatagttaagcctgtttccttattaatgacatagtcatcgtta

SEQ ID NO: 125155 - DNA, 1066 bp, Homo sapiens
cagatttggcaatctgtaagtcacttatttttttttctttttttggaggcggagtctcactctgtcacgcaggctggggcgcaatggcgtgatctcggctcactgcaacctccgcctaccaattgaaccaatttggttcaaacaattctcctgcctcagcctcccagttctcctgcctcagcctcccagcctcccaaatagctgggattacaggcgcccgtcaccacacccagctaatttttgtatttttagtagagacgaagtttcaccatgttggccaggctggtcttgaactcctaacctcagcctcagcctcgcctcagcctcccaaagtgctaggattacaggcatgagccaccatgcccggctttaagtcacttccaataataattattcctcattatgtagcttaaatgtttacttctccttaacaactttcctaaccctgtttacctcactccctgactcaggcaccattttctgtgctccctgtgcatatttacattaaattacttatgacgttacgtgaaaagtgcctatttacttacctctcttccccgttagacaatctgctccttgaggatatgctctgtctctcacttgactttgtatcttggcccttaggtcagtacctagaataaaatagatactcaacacatgcttgttgaataaataaatgaatacaagacacaactaatataggaaaaataactaacatgttaagtaaacaggccatgtccacaaaaatttcaagggaaagattttagaagcaaatatgatttgacatctctgaaactgactttctttctcttgtaatttgtgcttgcaatttaaatttgtacctggacttttaaaagacatttctgtgataagtcatgatgactatggcatttgccatcatttaacagattagaaatacaaggcttgtcccttaaaggaaatcatttttgaactgtggcttcttcatagtaaaaaaagattctactaaaatctttagaaatgtaaaagaaaatatttagcctagtaacgctttctctcattattcatgatgtgctacataatcaac

SEQ ID NO: 125156 - DNA, 1006 bp, Homo sapiens
ggggtgggatggcaaatccggatccgaacagaaaggagatgcagcacggggacaaataatttgttgagaagaatgagtaataattacaggtcttgaagttcaaacttaggttgctgaagaagatgaggctggagaagaaaacaggagccaaatcacgaatcgtctatgccttggtgaggcaatgagtggacagattacaatttaagctattcttctgttggtagagaacagataacttgggggggtggaggtgggggggcagagaaggataagcagagagcccacaagggggccattgcagaagccagtaagagaaaacttaaggaccctgtgtgaatggtagtgagcatccaaaggagatggattcctaaaatattcaagaggccatatcaactggtaattggttgctaggggcagctgccagataggagaatggaagaggcaatgatgatgccttgttttgctttgagggaggggcaggataagggtgtattttactaaataagataaggaagagttaggatgagtcctgggaggggacatttttgcagaaaaaaaatgagttcagttttggagttgatgagtgaagtaagagtggtgctgtctaatggtggttgctatatgggtctagagctctagggaggagctgggctgaagttggaaacaccacaggtttagatgaccataaccaagctgactgcagtcttacgtcattgagcacagtttcaaaaccacttctcctttctccctgcctttacttgggaaaattactgaaatactgcattaaaaaacccaatatggtgatatgtgtccatccatagaccaatattctaatgtttaatggtcttctaaggaccctaaaggtcaggtttagcagaaactggatgtaacagtggtaactattaatagtatagcatcattaactcataaaatgaaatattatctatgtttatattttaatattttaatttttttcttttttattctgtaggaattgctccattcc

SEQ ID NO: 125157 - DNA, 1052 bp, Homo sapiens
tcccatactttattaaggtaaattgaagttatttgccagaggctaggcacctagcttgtgtttagtagagcctagatttgaaagtaacaattgctgagagcactgagtattattgcagttaatcctaaatggctgtggaaaaggcagttctgactgagctggaactggagcttcaggaaggtgaagatactgattcctctctcttggacatcaagtgtggcctggggttgccagcagtcctggccaggtggcctcaagcagcagccattcttctcttttatcttcagcgtgcctacaaatacagtgttatcaccgtccatgtgtgccatgatggaaaaatggttgggcatttttcccgtgggtgtcccggtaaagtatttggactcaattctggtgtttgattagtgctttttaaagtaacagaatcgtccctatttgagaggaataccataaatctatttgtagtgacctttccttgaaatcacattttttttagttcgttctttcactaatggaaatgggggagaagctatgggggacagtagaaagaatggtaaaagaagcagagatgtgcttggtctgtttttaaccgtttgagaccattaatcattttctctgggtttaagatggaggcttaaaagtggcagaagtcttgtaagggtttagctgctattcagtgctggtagaattctcttccctcctaagcctgtgcactttttaaaatgcacttttaaataggcttaatttgaagaatgtgtccatctctctctctctctcttttttttttttaaaagatgtacccttaagtaaaaaacagctgattgtctggcccccataagtaacagttattctgttttttctttaagacatctttcttattaccttatcgcattcataaggatttgggttgccgtatagaaaaaaagaaattaaagttctatgggtttctaaaatatgtatgagtaaattttaggtgagaatttgcatctttgatttaattatacgtgaaggtgatgacttagtttctgaaagtcaagagggtagtctttaca

SEQ ID NO: 125158 - DNA, 1194 bp, Homo sapiens
aaagtatacctgtgactgggtaattcataaaggaaagagatttgtttggcttacggttctgcaggctgtactggcatgacaccaacatctgcttggcgagttgaggcctcaggaagtttttactcatggaagaaggcgaagggtgagcaggtgtgacacatggcaaaagaagagtgagagagaggaggaggttctgggctcttttaaacaaccagctctcatgtgaactaatagagtaagaacttgctcattactgtgaggacagcaccaagccattcgtgaggaatctgccctatgacggaaacatcccccgactaggcccgcctccaaccttgggaattacatttcaacatgaaacttggaagagacacacatccaaatcatatcaattacttccatcattgcttctctcagactttccagatatactattgtgtcatctgtaaatagttttttttccttcttttccagtgtttatgcctttaactatttatctaattgcactgactaatatctccagaacaagattaaatagcagtgtaacaatgtctttaatagaggtactgattgcttcattgtattatcttcaccatggatatacaaatgtgtacatttcaatgtagataatagtttggctatgtatataccttacaagggttgcacacagtccttcgctgtgtctttaagagatgcttatggagattggctgggcgtggtggctaaggcctgtaatcccagtactttgggaggctgaggctagcaggtagcttgagctcatgagtttgagaccaggtcgagtaagatggtgaaaccctgtctctacaaaaagtacaaaaattagctaagtatggtggcatgtgcttgtggtcccagctactagggagctgaggtgggaggatcacttgagcccaggaggggaggcttcaatgagctgagatcatgccactgcactccaggctgggtgacagagtgagaccccatctcaatttttaaaaaattaaattttaacaaaagatacttaaggagatggatgtggtaagaagcaggaaaggtcaactttcctagtgcatggtaggaaaatacggtgtttagcatggtaactgctccatggtttctcagtttatacaagcagccctgagttttcttgcttctctacacagttttctggatttcattttgttttttacccagcta

SEQ ID NO: 125159 - DNA, 1053 bp, Homo sapiens
cattcattggtcatttatatttcttagcctgtgaattgtctttatttcctttgcttattatttttctgtagtgaggacttgaatcttctttataataacagatttattgggatataattcacataccataaaatttgcccttttaaatgtgcagttttgccaggtgtggtggctcacgcctgtaattccagcactttgggcagccaaggcaggcagattgcttgagtccaggagttcaacatggcaaaaccccatctctgcaaaaaatagaaaaaaattagccaagcatctctacaaaaaatacagaaaaatcagccgagcatggtggcgcgtgcctgtctgtagtcctagctactcgggatgctgaggtgggaggatcgcttgagcccaggaggtggaggttgcagtgagccgagatcgtgccactacactccagcctgggcaacagagccagacctgtctcgaaaaagaaaaagtacaatttagtggtttttaatatagtcagagttgtgcaattatcaccaatatctaattccagaacattttcattactttcaaaaagaaagccatactcattagtcatcagtcctgatttcttctgcccctcagcccctggcaactactaatctattttctctctctacagcagtggtccccaaccttattggcaccagggactggttttgtggaagacagtttttccacggaccaggggaaatggggaggaggatggcgttgggatgaaactgttccacttcaaatcatcaggcattagttagattctcataaggagcatacaaactagattgctcaggtgcacagttcacaataaggtttgtactcctatgagaatctaatgccaccactgatctgacaggaggtggagctcaggcagtaatgcttgctcaccctccgctcacctcctgctgtgcggcccagttcctaacaggccacagactggtaccagtttgtggcccaggggttggggagcctgctctacagacttgcctattccagataatttttggattccataaatggagtcatacaata

SEQ ID NO: 125160 - DNA, 1054 bp, Homo sapiens
agaactacctgagactgggtaatttatgaagagaagaggtttaattgactcagagttctgcaaacttaacaagaatcatgaccgggagccctcaggagacttacaatcatggcggaaagcaaaggggaagcaagcacattctcattatggtggagcaggagagagacacgggggcaaggaagtgctacacttttaaaccatcagatctcatgagaactcactatcactagaacagcatgggggaaaccacccccatgatccagtcacctcctaccaggtccatcccctgatgtggggattacaaattgacatgagattttggtgagggcacagagtcaaaccctatcagatgagtttcaagctattaaaaacattaaattgttaaaagcacactgttaaaatttgtggtatagcaaatagaatgtttaagagtaatgaaggggaattattcatagtgaatactgacattgtctaagtgaatttttagtgcagtgttgactacataattgaggagtcccagttatagccaaagtaacccaaaatgatgctaggtttaatcctatatttctgtccctattaacaggaaggtacaaagtgtgactaattttttttaatggaacctgcacttttgtatacattatccttgtttgatctttattatcagccaagagatatagagaggacggctattcttccacatttattaaccttcattcaacaattcttttgaacacacctgtaacttaaagattttagcaccaattcattatgttactttgacttaagtaatacttcaaaaagtattccttaacaatagcattttttgtaaagctttaagtggttcagtctctgaataattattttatacttttagtttcatttgttccctctgttagtttcagtatgttaacacaggtagaccaaaaagatgacagtatttatacaccaactatgtgcttctttctaaatgcacagataactgtattggtgattccatttacatttggttaggtttcaaatgagagtgctatttcctcccagctttttgttttga

SEQ ID NO: 125161 - DNA, 1377 bp, Homo sapiens
ggaatggcaaagtaatttaggatctcttagacctcataaggcttttattcccagtgatatgagaagtcttaggaatggctgtattttgagagtagaggtgacagatttgccagccaatcagttgtgggctgtgaaagaagagttaagaatgactccaaggggccaggtgcaatggctcacccctgtaatcccagcactttgggaggtcgaggcaagcggatcacttgagcccaagagtttgagacagtagaggcaataagtcaaaatccagtatctacaaaaaatacaaaaattagctgggcatggtggcatgcgcctgtaatcccagctactcaggaggcttgaggtgggaggatcgcttgagcccaggagatcaaggctgtgctgagctgtgatcatgccgttgcactccagcctgtgcgacagagcgagaccctgtctcaataaaaataaaagaatgactccaggagtttcagtgtgagcaacctaaagaatgaggttgccatttactgatagagggaaagctaagagagaagcaggttggagtaggttaaaccaggcatggagttttggacagtttggaatttggacagttaagttgcctattagacaactagttttatgtgttaagtaggcagttacatgtgaatctgatgttcaggggagagatgaaatccagagatataaatttggatgtcatccccatatagatgctatactgagtattatggtttgaatgtttgtgttgcctccaaaattcatgttgaaacttaatccttaattcaacaatattaagagatggtgccaataggaggtgattagttcacgagcgcagagtcctcatgaatgagatcagcaactttataaaaaggctaaaggaactagctaggcccttttttgctcttctgctccttttcctagtgaggacacagcattcgtccccgctggaggatgcagcaacagggtgccatcttggagcagatgatggtcctcaccagacaccgaacctgcttcaatttggacttctaggccacagaactatgagaaataaatttctgttctttataaattacccaggcttacatgttttgttacagcaactcaaacagcctaagtgaactcatgaaaggaatgaatgtagatagaaaaaagaggcccaaaaagagatggatggaaaaagagaagccataatgactttggaaaaccaggtgattgtggtatcctggaaaccaaataaagaaaatgttttaagaaagagggagtgatgatctgggtcagctgctactgataagtgaggtataacgaagattgaaaattgactgttggatttagcagtgtggaggtgaccttaacaaaagctttatatgagtaggcttg

SEQ ID NO: 125162 - DNA, 1074 bp, Homo sapiens
tcacaattccattttattttttaggacctttttgaacattagtcttgtagtagcttatagcttctgagaccagcatttaatttgtttgtagtacattgtacttccaggtgataaaacagcattaagcagagtacctattcctcctgggtggatgtctcagaattttgccaatactgatgaactgttctccaaaatcattttctagagtttagggtttttttccatctgaatatgtactagttattttcatgtactgtgctagatgctgagattacagaactgagaaagatagctctcagctcccaataattaatttgatgagtagcactgatagaagttatatccagaatactagggaacaatgaaacaagcccattgaaggctggagagcaattggaaggcagaggacactgcacagggggttctatttgaacaactttctttacctttatgtacacagtcacatcaccctatcagtaaaaatgttttaattgaaaacatttttattgaattgtatgaatcaagaacataattgcttctttcaccattgaataatatgttatcaaatatgcattaaattggtcgtcttagaaatggctaaaatatgtatttatagaataagaaggtatttgaatttaatcagctcagtctccaatcctctttctttatctgtttgaattctttgatggggcttacagacagtttattccagtttttacagtaataagtaattggaaagatcttgctagtgagccaaatctgcctctttttgtcttctcctcagtaattttagttttaaattgtaaaaattatctcccagtctgtgacttatcctttcattttcttaaccttcaaagactggaagttttttattttgatgcagtccaacttatcaatttcatagattttgcatttgacattgtatctaggaaatcatcgaatgcctaacccaaggtcacatgcctaactctatgctttcttctagaacttttgtggctttaggttttacatttagaaacaatccattttgagttaatttttttgtatatggtgtatatgtgaatctaaattttt

SEQ ID NO: 125163 - DNA, 1042 bp, Homo sapiens
tttttcttttcccatttcttaattttttttcatactgtaactccagtttattgttcttcttaaaaaggtatgtagatctgaatatagcatttggaaaataattgattgttgtaaactcacttcaagtatatcttctgtttctttgagttatgtcatgccagtccctacagagtctgttaaccttacttggtatcattgtttcactttgcttattataatttaacccaaacttccccaaattttccacaattatattattaatagaaattacagaatacatcaggatcaaggcatataaggattaaggggagaggagtaaaaaaagaaatgcgcaggggcagaattaaggaatttagattttcacctatgagcaatgtggagtctctgaagaattttaagtaagctgagttaaactaatttcactttttattgtgatcagctgaacttacataaaaaggcaggcagtatttatctaaggggatttgcatcagtccctttggtgttttagtgagtatatagtttttttgtagtggcagagtcaaaacccctattcagatatcttaaatttattcccaagccttgtacattatagttgcatcctgtcaagtgaactgtaactagcaattcaaaattcagagttacttgaatgttcttgtttctgagtatttcttgggtttatgagattgacaactctatttaggccagagtatttagtctactggaattaagcaaatacaggtcccatctattcatgtttgctatttctcaatttaaaatcctatagcatgtaagagcattagcattttatttgtctttctttcaatcctttagagttaagactcactaatttgggattagttatgactctatgaggctactactgatttttgataggaacaagaacccaggaaaggaaaaaaaggtaatttatgagctgcagccaattatctggcaaccagaatgccttgttgttaagagtctattgtaacaagtttctttgtcttcatacagcacctgttactgtgcaacaagaccgtgtttt

SEQ ID NO: 125164 - DNA, 1020 bp, Homo sapiens
gtgtgaaaacaaagagatcctttagcctgctttcgtatctgtgtggacatattgcagtgcagctgataccccattattgtcagcatgcagttgtactgggaaattttcacttttgatcatagctcattactgaaacccaactattttaagagaaatgcccttgagtcataggcttgttttattgccatggtattctctgataaatggttcatggtttttcccctaagtgagcatacttcatttgccatctgtttaaaatcactacagattgaaaactagtatattgaactctaaggacatatctctttcttacactggaattctaaagaagaatgtactgagcattacttattctttcattcttcttagattcttcttaatcctttggtgaaaactgagacacaaaatggctgcaaataagcccaagggtcagaattctttggctttacacaaagtcatcatggtgggcagtggtggcgtgggcaagtcagctctgactctacagttcatgtacgatgaggtaagtgctaattttataatggatcaaagtttaggctttcagagagtatttccctagcttagttttggtgctattttgtatggattgtttgaatccttgaaattactaataatttttttttcatttttgtgtttagagccatctgtacataacttgattttacaaatcaggaacttatggtccttaaaaacctcaggctttaaaaacaaagctaaactaaaaacagtacgcctttttttagtaatctaactttagcttttttgtttttaggttttattggcgattcctacctttaattaatagaagtggtgtgtataatacttaagagagacttgaggttaacatatataaaatatcttttaggctgggcacgcacggtggctcacgcctaatcccagcactttgggaggccaagacaggcagatcacaaggttaggagatcgagaccatcctggctaacacggtgaaaccccgtctatactaaaaatacaaaaaattaa

SEQ ID NO: 125165 - DNA, 1076 bp, Homo sapiens
ttgggaagaagtctcataaagtttaagatttgactttctgttgagtagtgtaaatcactttattgacttagttcattttagaaaaagaaaggatttaatgatactttcagtgcttaccaaaatattgacctttaagttatttccacagttctagcatgaaaatttatattcagagttacatagaaaaaagactattataaatttggtaaaatatatgtgtaatagtttttgcaggtattgtgttttaaggaagaaaagctgttttcaagctgtaaacagcctagaggtaataactcagccctctctgtttgcaaatgaggaaaccaagaaattgtctaaaattaaaattagtgtagtttttaccattggaggaatctgggcaaagggtatacagaactcttcttgtactattttggcagcttcacatgaatttataattatttcaaaataagttttgaaacgtaataattaaaaaattggtgtgtttttatcttttctagtttgtggaggactatgagcctaccaaagcagacagctatcggaagaaggtagtgctagatggggaggaagtccagatcgatatcttagatacagctgggcaggaggactacgctgcaattagagacaactacttccgaagtggggaggggttcctctgtgttttctctattacagaaatggaatcctttgcagctacagctgacttcaggtatgtcctagagtaatgttgttgcttgtgacatactatacaacaatttcttccccagaaacaagtagacaactagaggttctaacttgttagtcttttactctgtctctaattgtgtttattccctttttgatatcagtatatgactctctctactgtgttatgtacacacagttaggatactttgcatagtcttacagctctcccggtgtcacctgtattggagtttgattttgtgacagcttcagttacccagagtctctatgagttactgaagtatttctctttagtgtaaactactactgccataacagttcatacttagagcacataatggagcttactcaggttttacatctttctctgt

SEQ ID NO: 125166 - DNA, 1016 bp, Homo sapiens
cactttctaaatcttcctcccaagaaccaataaccctactttaatcatgaggaaaacatctgacaaatcccaattgagagacattgtacaaactgccagccagcagtcctcaaaactattaaggtcatcaaaaacaaggaaagtctgagaattaccatggccaactcaaggctaaagagacatgacgaaactaaatgtcatgtggcaacctggatgggatcctggaacagaaaaaggatgtcaggcaaaaagcaagcacatttgaataaagtttggaccttagttgctaatactgtatcgatattggttcattaattgtgatttgtgtaccacagtagtagatgttaacaatagggaaaaataggtatggggcaaacaagaactttctgtgctatccttataatgttaatatttctttttcattttctcttatccagggagcagattttaagagtaaaagaagatgagaatgttccatttctactggttggtaacaaatcagatttagaagataaaagacaggtttctgtagaagaggcaaaaaacagagctgagcagtggaatgttaactacgtggaaacatctgctaaaacacgagctaatgttgacaaggtaacacgtgactctttactactgcatcatgttaaaataggttggtttgctttaacttggctccattttgtctggagagtctatgaaactttcaaatagaggtttaatccttgttgatttttatcatccctgaatactcagatacatgttaggaattttagttcaccttgtccttagcttcccaagagacattaaaacatgagacactacagctaaatgtactttttttctttttaaagcactgatggcattcctgacttttttccccccttatcctattgagtctttggataatttagaaggaatcgtgtgagtcccaagattccagcactaaaccgttcttacctctgacctgacatctacccaaccccacttaagttcttaaaaataagggtacctcccaa

SEQ ID NO: 125167 - DNA, 1019 bp, Homo sapiens
ccattatgacaaccctaccctagtgacgtaattacgacccaaaggccccatctcttattgccatcacataaggaattcgggtttcagtatatgaattttggggtgacacaagcattcagtccatagcatgccctatcatagtttcctgggaaccatggtttctgaacacagtaactagggcttgggtatttcagttagcttccatttggaaatgggaacaagaatacctgcttcataggattattgtaaagatgaaatgaaatcacatatgtaaaatgcccagcctgtgcctgccatttctaagtcattagaaaattatagatttgaagagacaatttgtatggcaaatatttttaaaatactaatgaaaatatatgttaagattgagggtgtttgaggttttaaaaggcaacgttgaacattctcatagcatatatatacttttctaatcgatgtttcgagtaggttgtagaacacactataaaaactatttgaacctaaggggagtggggaagagatgcagacactggcaatccaagatagaaagctatattgtaacagtccttgtggtgatcatctgttggcatcagaggccctgggaagtatggtgtctgtattagcacagctcttacaggacaaaagcctagggaaaatggcccaaaaacagcaactggcatgtcgtagaaaggaaacacaaatggcctttaaactggaagagaggctcggtctcacttataaaaagggaagtacaactttaaaatatagtggaatgtcctttttttacccgtcactttgggagaaaaaaagcaaagaggttgagaatagaatatactgttagcaagagtatagaaaaacaggaacctctcatatgttggtggaagggcagttttgtgatacccatcagaattatgacccagcaatttaagtgctaaaaatgttattttttttttttttttttttttttttttttgagacggagtctcgctctgtcgcccaggccggactgcggactgcagtgg

SEQ ID NO: 125168 - DNA, 2216 bp, Homo sapiens
aggtattttttgatttaatgagagaaattcgagcgagaaagatggaagacagcaaagaaaagaatggaaaaaagaagaggaaaagtttagccaagagaatcagagaaagatgctgcattttataatcaaagcccaaactcctttcttatcttgaccatactaataaatataatttataagcattgccattgaaggcttaattgactgaaattactttaacattttggaaattgttgtatatcactaaaagcatgaattggaactgcaatgaaagtcaaatttactttaaaaagaaattaatatggcttcaccaagaagcaaagttcaacttatttcataattgcctacatttatcatggtcctgaatgtagcgtgtaagcttgtgtttcttgggcagtctttcttgaaattgaagaggtgaaatgggggtggggagtgggaggaaaggtgacttcctctggtgtttattataaagcttaaattttatatcattttaaaatgtcttggtcttctactgccttgaaaaatgacaattgtgaacatgatagttaaactaccactttttttaaccattattatgcaaaatttagaagaaaagttattggcatggttgttgcatatagttaaactgagagtaattcatctgtgaatctgctttaattacctggtgagtaacttagaaaagtggtgtaaacttgtacatggaattttttgaatatgccttaatttagaaactgaaaaatatctggttatatcattctgggtgtgttcttactgacaccaggggtccgctgccccatgtgtcctggtgagaaaatatatgcctggcacagcttttgtatagaaaattcttgagaagtaactgtccgctagaagtctgtccaaatttaaaatgtgtgccatattctggttcttgaaaataagattccagagctctttgatcgcttttaataaactgcaagttcattttaaatgaagggccagcatatatacttgcaagataattttcagctgcaaggattcagcaccagttatgtttgaatgaaccctccttttctctgagattctggtccctggaaatccctttctgctagtggtgagcatgtaagtgttaagtttttaatctgggagcagggcataggaagaaaatgtcagtagtgctaatgcattttgcactagaacgcttcgggaaaatattcatgcttgccatctgttcatttctaaatttatattcataaagttacagtttgatacaggaattattaggagtaattcttttctgtttctgtttataatgaagaacactgtagctacattttcagaagttaacatcaagccatcaaacctgggtatagtgcagaaaacgtggcacacactgaccacacattaggctgtgtcaccattgtgtggtgtacctgctggaagaattctagcatgctacttggggacataatttcagtgggaaatatgccactgaccgattttttttttttcctctttgcagtggggctaggacagttgattcaacaaagtatttttttcttttttctcagtcctaatttgaacaggtcaaagatgtgttcaggcattccaggtaacaggtgtgtatgtaaagttaaaaataggctttttaggaactcactctttagatatttacatccagcttctcatgttaaatatttgtccttaaagggtttgagatgtacatctttcatttcgtatttctcataggctatgccatgtgcggaattcaagttaccaatgtaacactggccagcgggcccagcaatctccatgtgtacttattacagtcttatttaaccaggggtcctaaccactaacattgtgactttgctttgagacctttcctctcctgggtactgaggtgctatgaagccaactgacaaagatgcatcacgtgtcttaggctgatgccactacccgatttgtttatttgcaatttgagccatttaaagaccaataaacttccttttttaaaatgtttgtggtgttacttgatgtttacaatgtaacatgtaacattcaaatgtatcaaatgaggcatctttaccaaacaactaaatcttttgagctctcagtttggagacttcttttgtgtaatgccagatttcctaaataacagtgtcagcattgctcagatttaatcaaggctcagaaatggaaggactcgtgtacaactacattgaagatattct

SEQ ID NO: 125169 - DNA, 1010 bp, Homo sapiens
tcaggccaacgtttgatgtctggagggaagcgtggcctattaactatcgaatagcctgcaagttagaaacaatccagcccaatattgagcacaacctttcaaaatctggttcattttaatttcgtaactcataagcagtgctagaatgagcacatttaagtaataattggcataattttaaatctcattgtgtgtacagatccttaacaccaatatggaatatgatgttaaatactatgcgtcataatcccagcattttgagaggccaaggcaggaggtttgcttgagcccaagagttcgagaccagcctggacaacatagccccatttacaaaaaaattaaaaaatcagctgggcatggtcttgctcacctgaaggagttagaaagtcatgtcccaaaattttgtgagaagaacgtaaaaatttggcaactttatgttactaccttaagctatcaaatcatttactaaaatttctgtagaggtttcagagtaatccagtatcagaagtctcctttaggcgaagtctgtaatcccagcactttgggaggccatagtgggcagattgcttgagcccaagagtgaagactagcctgggcaacatggtgagacctcatgtctacaaaaaaatcaaaaaattaagcaggcacagtgacgcgcgcctgtaatcccagctaccagggaggctgagggaggaggatccactgagcccaggatttcaaggcagcattgagctatgaataagccacttcagccactggggacaaagtgagaccctatctgtatttaaaaaaaaaaaaaaaaagcctcctttggtgtctgaagtcaagaatggcaagtcagtagaggtctttgtgcctttagtattcaatagattttgatggactgcctgctctgggttcggctgggaatacgcaggtgaaggacaaacaggcgtaagggacaattgcagagattcatactgaagaaagtaccccatgtataaggagaggaagtgaagtttcaaaaagat

SEQ ID NO: 125170 - DNA, 1479 bp, Homo sapiens
acagcagcagcagctggcgccgctctcgcagtccctacagccctgtgctcaggtgagttctgccgttctgcctgtgtgtgccttggctgcgctggccagatccccaggaggaagggaaagtggtgcccgggtcctcagaacgactcaggtccaccaccgagacgagacaacaccgcctgagcctcccaggaaggataggcgttttcgcgcgcgtgacacttttttagggggtcgaagggacaaagcaactgggcgaagggaacttttctcctagctgtggcagggaagatttctaaggaagaattaaaagtttcagacttgttgcattaatgtgttaacaggtttctctcagttgctctttgcttttctggtacaatttgggtaaacctagaggtggtttaagtcttaattttgaaagttctgtgaagaggtttcattgttgggaatttaggaatggactgcaacttaagatctagtattgtacaggggaataagaatcaggtactgatgtcagagttagatgtggattgcagatgtttcttatgattattacagaaatgggagaagcagcctttctgtaaagtttattcttttagtatgttaaaaaagcttaggtggaagccgatagttctgaatactgaagttaaaaaaggtatctatttagtgatattcttgtgtgggatagtttttacctgatctttcaaagtcataattatagaaggtagaaaaaatgacaagactgtggtttctttgttggtttgtgatgacacccagttgctaataacattataaatctgggtggtgtaacctagtgtaaccaagtgaatggctgagtacattcttatactattataagcctgtaactgcttactttaaaagctaagtagactttttcttagatatatacccgaaggataaaaacacaatataactagacctttaaatatcaggatctttgtccagaaatctttaaaaggtgtaatttaatttaatgaaattggagtaaaacttttctgtagctttcttgccttttttgttatataatattctttttaaaaagtgtgccttaaaatatacttatccactaagcaaagtgcattaaaaacaactttcgagtattttatgggttcttatattccttgagatgtttggacattccagaccttatagtgtagagtattgcaaaatgacatttgtatcagtttttcctcctgggtttcagtaatggcaagtggatgtacagtacctctaagtatgggttatgtggaatctcaacataatacgaatatgcatctgcaaaattagcagacctttttgaagtatcaccataataaatgtaaaggtgtgatgtttatagagatctgagcgtgagtttgtctttaagccaaaaaagttctataaattgcttcactcttaaagagtgttgaagcatacttaaaatgttagttgataccttagcgaagaattgaaaaactcatt

SEQ ID NO: 125171 - DNA, 2038 bp, Homo sapiens
attttttatatacatatatgaaatatataatcgtggtatgtatgactaggactattcatatttagcaagtattttttgaccctgtattgtatgccatatactgttttaggtattgggatgtagcaggaaagaaaaagttacttgccctcatagagcttgcattctggaggaccgttcaacacataatcttttcatggtgtttacattgaccaccagtatttctaaagagttgaatttggaaggaactttagggtgtcttggctaacattgctgacagatggccatttggtatgtgcctgaaatacatctagaggtgggaagcacgttagttagaggcaacctgttcactagatttgggacttgagtgttttagcaagatccttgaagactcagtttcctaaactgtaacagggaaacacttgtttttctggattatttcaaggattaagtgaaaatttatctttttaaagcatgcagccttacagaaatatttaaggtcgttgaattattcaatatcccaaattgttagaattcttcatattgtgaccaaaatccaccttcgaaccattgctccaagtttaaccctttggaatggtacagagcacacgtgtatgctaaccctttaaaatataaagacagttgtcatgatttctgagtcttctagactaaaaaactcatacggttttcagatttttcacattatatctagtttgtcaaatgtccagcttaaaacatagggcctagaattaatagctaaaatagttgattggaaaaatctaaagattttaaaatataataagtgtattgttactttttaggaacggttaattgaactcacttgtacagattaatggaaaagttttatttattttcagaatttattacttgtggtaagtggcccatgttctttaatgaatggactgctgtgagttccatgaaggcaactgggctgtcttatccatcattgtatttctagtgctcagcactgtatctggcacaagtacactcttaataaatgttgaataggtgtaaatgaagggatgctggagtttactgaacatacaaaatattaatgtgggctttgtattacaaacttcattcaaaatatttaatacagaccatgtgtaatgctgtaagaaacagtgtaatatttccccagcctatgcagaacttacatattaatgaattgtcagcgtagatattttcaaggaaatgcatacacattcaaaatagtattgaaatcgtggtatgaagatgaaaaacaattttaaataagctgaaaatagagatagggtttcaccatgttgcccaggctggtgtcaaactcctgggctcaaatgatccacctgctgcatcagcctcccaaagtccagggattacaggtgtgagccaccacatccagcctgaagctttttttgatgtcagataaataaatccttttcattttagtgatttccacttcacaacttgttctttgtcttcatttgaatcttcagtcctcggctcatgcatttcttttcatcagttccctcttagctttactttttcccctgtataatctgtttgccgtattttctttactacttgactgttggggtgtggaaggtcacgtaatcttgctgactggccctataataaatgtgagggtgtgctgaaaagaggggagggtaccgtttgtagtgttttactgtgtgccaggcattgataaatatttaacatatattgaccaccaaaatccatgtgatagttggaaacattcccattgatggattgggaaacgggagctctaaaaggttttaagcgatttgttccaaggtcagcttggattcaaaccctaggctgatttgaaagtacatgctcttaatattaaagagcatggattttggttacaatatgaaggtggattttggttacaatatgaagaattctaacagcagtctattcattaaagaacatgggccacttaccacttaaagcatatgctttattgaaatttagttggcattcaggggcgctggccacctcacataatgacctg

SEQ ID NO: 125172 - DNA, 2102 bp, Homo sapiens
tcccgcctgggcctcccaaagtgttgggattacaggcaagagcagctgtgcatggccaagtctaaacttcctaatgttccatcagttaatgccttttatgatctggctccattctatcacagttctgttttcaaagacatttttatttctatttttatacttgctgttctgttagcttaaatgataagagacactccaaactctcttttgctcttcatctccagctttgcatttaaaactcagctcaaaaatcccactgtcgtgtgtgtgtgtgtgtgtgtgtgtgtgtgtgtgtgtgtgtgttttggtagagatggtgttttactgtgttgctcaggctggtctcctggggttgaacaatcctcctgtccttgcctcccaaagtgttgggattacaggcatgagccagtgtgtccagccttaaatcccactatcttgagacctttttccattcatctagataaaagttagttttttttcctgtgcccccacagcactttatctttgttgtagagttttaaaaaattctgtttaatatctgcttagttggctggctgcctttgtgttttccctactagattgtaagctcctagaggacaaattacagagcttatttattggtggtttaatttaaatacattttttctctacagattagtgcaaaccagtctgcacagatgcgagttatatctgtaaacttgcttggtattttggtttacatacactctcatactctaggatagggcaggtaattgtttcgatttataaggagggaatttaagaacctccttctagcttctactttattagaatgagtagaggatgctgggagtcactttagtgtgaatggaataaattcagacctagtgtttatatttgccctctgttgtgctgatcaagataaattcttggtgcgtttgaattaatctttaaagagaaaattttctgagcagacattatgtcaaacttatttcccaactctgaaaaattgtagctatttttgaaaaaccagttggaagtgaatgttgcttaatattcacatataagataattttaattttttcctttattttggactttttttgtgtgaatatcattttgttgttgttattttggttttggttggctttgttttctataaatttataagctttgaagtgggtgttggaagcaaaagtaccaagctaaaatcagaagcattacttgtttgcagtgattttgttccttgaattcctgcacatttaaattgtggaagaacctagtgttttttatgtatttggaaagtaaaattgatgtacattagaggataaatataggtaaaactggaatgtaagtaaaatggaaatgaggttagtgagaggaaccgaaaatggtaaatgatctacacgcctccctgcttttctgtttgcattttcagttgcataggggcactttcactgggatattttattggcattccaaactcaatttacctaacattaaattatttcacctttcttagagtcattttttttctgttactgctctttattatttttcacctgtttgcaagcataatagaggctaatggtagaaattttccgttagtatagaaaagtataagagattaaaaggccccttaggtccagctacctgatgagatgatcactcatgacattttgataaatatttttctagacttttttatgcatatatgcacagggatgtatgatttttccataagcgggaacatgtaacaatgctgtcttgtagcctgtactccacagtacagcataccatttttattagtagctcctagtattctgttgtatggatatagcataaattgtttggctgaatccactttgataaattcttagttttgttttttttttaatttttgctatgtgtgtatatctaaagcaaatttttttttgtgtatttgttccattatctttagattgaatttcctggggataaaatttttgaggcaaaggtggtatatacatttgtaacattgatacactttcaaaatgcctttcagaaggcttttacaaatttacatttcccaacagtgtggaattacccatttcctgagtctcaccaacacttggagttgtcac

SEQ ID NO: 125173 - DNA, 2146 bp, Homo sapiens
tgtttggatttggcttctttcttcataaggctttatgaagtcctttatgctagtccttgagagatggataagccttgaatagaagatggagggcaagatgatattctcactaggccagtatgtgggaatataaaggcatggaagtattgggcaaatttagtacttgataagcaaaggtaggttaggaccagacaaattatgcagtaccttgatactaggctgctgtgaattcttttcaataggaatactatcagcagtgtctttaattgtgtaaatatttattgagcatctaccactgctaggtttatgatagaagtcaaggcttgaggatagaatatctcagtttagttggggaagatagattatctgattatttttattctgagatataaacagaattgtgatgggatcgtaggacaagtaccagctctagctgactggcgtaataagagagggctttataaaggtggtaaacactgtgctgagatacgaagtatccttttgtttcctacataaaggaggtgaagagaggaatatgagagaaacattctaggcctgacacttcctatattttgtgatggctggacaaggactttatatgcaagtcaagcagggccgaaggctttggggtaactgaaagattattcaagtgcagagttaattggaaagggtggagactcgaggtgggaacctggtagggagacttgcactgggcccagtgtgtgatgatgtagtacctaatgtggaatagtagctatggggataaagagcatggaaaaatggagagatgcttgagatgtagaattggtggagcttggaaaccaaatagatctgtgagaagagataaaagagatcatgtggaatgtagaataatttccaggtttctgctgttttagagggtgccactgcctcagaatagggtgtatttaaggagaaggagggtggatttgaagaggaagcttaatagttttagctgtattgtgttgaagatacatgtcagagttggaagtagagaggatgatttgcgggggtgatgggggacgaattgacaacatttaggtaatcatttaagccacacatagcataaattaaacttgtgggagaatgaatataggaaggaagaaaaacctcaaggtgcggaaacagccatagaagtaagaaaatcatgaagatgaaaggtagtagaaatagctaggaagtgctccaaataattgcagcagagagagacttttaaggttgtagccaacattatcacagacagtgacgtttttttctttttctttttttgaaaggtaggtcattggttgcttcagaggtgaccagttgcagaatggatgtatgtataagccagattgtagtgatttgaggattgaaaggacaaaagagattttggccgtaactggaaggacagataaagataatatcagtatgtcatcattttctctttgttttgttttcttgtctgtttttaaatatcttagagatttgagtaatttattccttcaggggaattaacaaatgaacagcaaaggttaacatcacaattaatagagtaagccagctattgtcatagagtagcctagcatagtgcatctcagactttaatggatatcttgttaaaatgcagattgtggttcagtaggtctgggctggagtctgagacacagcatttctgacaagctcacaattggtgctgatgctgcctgtctatggactacactctaagaagtaaggctctagagagtatgagattgatgcattataggggagttagccttagatagaaagaggaacacctcctttcttaattgaggtggagtgtacggtggatgaaggcacaggaaatacagattaaatttgcaggcaagagacatgcctggtagtctttgtttttttctgtgaaacaataagtaaagctatgctatgagaagactaggaatgggattgtgtgagcttgatgaaagttgtgaaagtttggaatagctactaagaggaggaaaatgagtgaatttgggacatgtaataatcgctgaacagtgaggattagtttggttatggtgtctgtagaaatggagcagacacagactagtaataaagtaaaaaagactagtaacgtagatttttttctttcttttttttctttttt

SEQ ID NO: 125174 - DNA, 1162 bp, Homo sapiens
tttcgctcttgttgcccaggctggagtgcaatggcatgatctcggttcaccgcaacctccgcctcccaggttcaagcgattctcctgcctcagcctcccaagtggctgggattacaggcatgcgccaccacacccgtctgattttgtatttttagtagagacagggtttctccatgttggtcaggttggtctcgaacttctgccctcaggtgatctgcccatctcggcttcccaaagtgctgtgattacaggtctgagccaccacacgtggccaagagattgcttatttttttaagatgatatggtactctagggaagtggtaatgaggtctaaagtagaacagtgtcctcgagaatggaagaggaggatgtggtaggccgaataatactcacccaacaccacaccccctccaggtgccatgccctaatcttttcaatctctgactgttacaccttacattttaagaggaacttcgtagatatgattaaattaagtatgttgatatggcggggttattctgggttatctggatgggtcctgtgtaatcacaaggatttttataaaagagaggctgtagggtctagtcagagaactcacgtgatgacaggaataggagagagaaaatgtcatgatgaaagtagaggcccaggtgatgtaaggttttgagccaaggaatgtagacagcctgtggaagctggaaaaggcaagggaacattttcccaagagactccagaaggaacaaagctctggtgacatgttgattttagttcactgagactgattttggacttctgacatgcagaactgcaagaaaataaatttgtgttgttctaaactgctgactttgtggagttttctgttacaacaacgatcagacacattcagagggtatggatataagggaatagtatagagttagaatcagtaaaatgagacaattaagaggttgtggtatgggaactgggaaactagatttctagcctgggtaaatgagtggagagtagtgaaattaaaaatagagaatggtaaggagtagatgttacaggagggtatatttgctttgcaagtcataatttcaggaactggtgagaatagtattttgcgtctagtaatatagattagagtggaagaaaatttgaaacaaggagatgaatttaagag

SEQ ID NO: 125175 - DNA, 1489 bp, Homo sapiens
ttctgaaacgaactctaagagactctacttattgcccagtagtaagtcttgtctttttcactcttgccatagacagagcactgcttacttctgaacttacagttgaggaaggtacttttgagatgtggcaactgtctcctggtaaaagatttgtcagactttaccctgctgctactactaccattgatgtagccttattgcctacttcttttttctgagacagcagtgatgccttgtcacatttttcgtcctaatttttacatttgtagaccagagcgagatcagggcaatccattttgaagaaaactatgatcaccaaataatactctactttaaagaaatttttatttttcaaaacttcaaaaatgtaactttgaaattaagtaaatttctattttatttcataaacttgaattagcactgtctttgtaaattccaaactgaacctttctcaattactgattaaatcttaattatttctcaccagacggtctggaaaatcccgaagcagaagcccgtattcatctaggcattcaagatctcgtagcaggcacagattgtctagatccagaagtcgtcattctagtatttctcctagcacactaactctgaagagtagcctggcagctgaattgaacaagaataaaaaagcacgagcagcagaggcagcaagagccgcagaagcagcgaaagctgcagaagcaactaaggctgctgaggctgctgccaaggctgcaaaagcttcaaacacttctacacctaccaaggggaacacggaaactagtgccagtgcatcacaaacaaaccatgtgaaggatgtgaagaaaattaaaattgaacatgcaccttctccctcaagtggtggaactttaaaaaatgacaaagcaaaaacaaagccacctcttcaggtaacgaaggtggaaaataatttgattgtagataaagccaccaagaaagcagtcatagttggaaaggagagtaaatctgctgctacaaaggaggaatcagtatctcttaaagagaaaaccaaaccacttacaccaagcataggagccaaggagaaggagcaacatgtagctttagtcacctctacattaccaccgttacctttgcctcccatgctgcctgaagataaagaagctgataggtaagtgcaaaaagtatttgtcaataactgttcaaagaaaaaatgtaagtctgaagtgagaaatgagttgacctcccctaaccccctcgaaacaactttagtgaaaaagactacaagtgaatgaattttcttgattatatgcatcttaaaatgaagcacattgcatacaagatggcaaaattaaagtttatactaagacattcagggaaaaattgccattgtcttgggatacaatgaatatttcaatatgattttgggtattagaaatgccagtattctctttggtttagttttccttgatgatgtaatcagagacagaatattttatgaataagttggccc

SEQ ID NO: 125176 - DNA, 1202 bp, Homo sapiens
ggcacctgtaatcccagctatttgggaggcttgagacaagataatcgcttgaacccaggaggtggaggttgcagtgagccaggatcttgccactgcactccagcttgggtgacagtgagattccatctcaaaaaaaaaaaaaaagaaaaaaaaaaagaaaaatgctttgcaaaactgagtttttatgcaaagcatgtttagttgattttcaattttaatgtacagttttatagttaattctgtatcgttttaaaaaataaactttatttttataacagtcttacatttatagaaaaattatgaagatactacagggaccctgaataccccgtacccagtttctttactgttaatatcttacatcagtatggtacattcgttaacaattaatcaatattgatacaaagttatcattaaagttcctactttatacagatttccttagtttttacctaattctatatcatttttactccaaattttgcattatacagttgagtatagtgtattactttagctggaaagaaacttggacaatagtcttataatgtgaaatactgttgaatattcatgactattgctacttaaatgtaagtcataagcatatttttattagtcaacaaaatttttgttttatttgtctgacttctttcactttcagcttacgaggaaatatttcagtaaaagcagttaaaaaagaagtagaaaagaaactccgatgtcttcttgctgatttaccgctgccccctgagctaccaggaggagatgatctttcaaagagtccagaggaaaagaaaacagcaacacagttacatagtaaaaggaggcctaagtatgtgcttgctttctacctgctcttaaattgaccagcagtgattctgggtcatcagaagttcataaaacactaaattaaggtttaaaataaaaaatgtacttattctttcaacttaaatatatgaattctattagagttttgaaaaaaatcataattgcttgcattcctattcacaatgactaataaaaccaaatttaattttctctcgtaatttgtaatgtattaatttcctggggtattgtatatgttaaagatactttctgttattaagagattgaaataacacaaacactgaaattgggcagagtagaagtcagcatttagtgagaccaaataaaattagtaatgggcaagctgctgtttcctt

SEQ ID NO: 125177 - DNA, 1197 bp, Homo sapiens
aaatttgtcaataagttttatagttagatttttgttcacattctttatcaaactcttgtttcgtaaaagtagattatatatattattgttaatggatgcaaaataaaactttctggagattggttagagaattttgactctactagtgttggtttcatcttctcactgaaaaattatattttatttctgaaaagccttcatacaagctctactactttttttctcagtttaaatacttgtctacagaagaagagtcagtatgtagaaatgatacctcagtttttacgataacttacaataccaaatcagtgttacttgtttgggatagatgatgataaatactgcaagggtagggaaaaataaagaatatacaattgggtggcgagtagatattgagttattagacagtttattcaatttgcttgattgtatataaaaactttagaactatatttgatagaatatgtgggcctcgctatggtgaaaccaaagaaaaagatattgactggggaaaacgctgcgtggataaatttgatatcatcggaattattggagaaggtacttacggacaagtttacaaagccagggataaagacactggtaagaatgccaagttctggggatctttgggcctacggaatgtacttagtttgtgtttctcttctgatgtttggcttcagaaattttccaaaaaattaaattcaattttattgtgcttttgtttcatcttgtttttttattctatatatgcattttgtaagatatgagtacatgtaagtgggtctgtatatgtgtatattttaaaaagtgttcctttagtatttgtgatatactgtatggtaggatttagtttttctttcctcttttatggtgaataattcttatactgttattaatcagagggaaaggtatcttgacctgaattaattttagtagtaaattttttttgtcataagccttacacaacactttcatttagccttcagttttttttcctgcagtaactatccttggaggccagttttagcagcttaatctttcagaacataatcaggaattcagagaaagttttaaaaggcttcacaggagagcaaaaagtagctgtgtcagaagctatgtattttacttaataatgcatagagctagtattttatctttctttactcataactgcttattgaaataaaccaataggcc

SEQ ID NO: 125178 - DNA, 1020 bp, Homo sapiens
acgcctggcctagcatctttctgttttctttttattttttcccaagtgaatgtaaaagcatcttagttttttcactaaatatataaatggggagcatagtatatttggacttacctcattctttctaatggttgtatagtattccctggtttatgtaaatattccataatttgtttaatgacagacttaattttttgaactataaatattatttggtatattggaaactgaaacatactttgtggttctatttttgagaaataagaacagaattgaattaaaatacatttaaagttaagaaaaatgtcatctgcttttgttaactggtaacctgattttattaaattccttaataggagaaatggtagccttaaaaaaagtacgtctggataatgaaaaggaaggctttccaattacagcaattcgagaaattaaaattctccggcagcttacccatcagagtattatcaatatgaaggaaatagtgactgataaagaagatgctttggatttcaagaaggacaaaggtatgtgtgcatatttaaataacgaattttttgtattcatgattgatgttgctaacttggaaattttttttatagatgtgactatttgagtaattacaaactattgctctaatcgtgaaactatatttttaagtttggtagagttgaataatgaattgatttactttagtggtttttgagtaaacttcgtaaagggtatttgccaatattacacataaagtattcactagtaatatatgttttattgggcatcagtgtatagtttttagtattcattttttagtagttgaaaaaccagttcatagtagtagtatttttaccctacatttttatgttacaaatgccttaacatataaggaaactttacagtaggcatatgtattatttctgaaagtgtggaggcaaaaatcatacttgaaattgcctttaataatctatagtggggtatgtatatatgtatagttattatttagcagagaagctgacaaaaaat

SEQ ID NO: 125179 - DNA, 1047 bp, Homo sapiens
gctgggattacaggcatgtgccccacatccagctgttttttttgtattttagcagagacggggttttaccatgttgtccaggctagtctcaaaacttacggcctcaagcgatccacccacctcggcctccgaaagtgttgggattacaggtgtgagccaccgtgctccagccctcctttttttttttttgagactgggtctgtctccttctgtcacccaggctggaatgcagtggccctgcagccacagtctccaaactctggggctcaagtagtcctcctgcctcagccccccaagtagctagaattacaggtgtgcactaccacacctggctaatttttaaatttctgtagagacaggatctctccatgtcgccccaggctagtctcaaacccctggcctcaagcagtcctctcgccccgatctcccaaagtgcttggattactggcgtgagctaccatgcgcagccatcatttgccttttatctctcttccatattgtttccttaggcagtacttctacattttcatttaatgaattgaaatctgttggctttttattgcatttttctttgatgtaactgtccacctccttgtgggattatacatttgtcaaaacactattttatctattctttcttcactgacttaaattggctatttttataattattagatatataactgggatttgttttctggtgtgtattatttccactgttctgtcagtccctatggtatgacacaggtcagattaatttctagtagggcaagtgtttattttcagaaatgttttggctagtactctggtttgttttcttcaaggataattttagaattattttgtcaagttaagtctcctcgctcctggtgacaaaagagaaaaaccattggtccttttattgaaattgctttaaaatacagagttttatatgtgcgtggtacctcaaacctgtaatctgccactttgggagccaaggtgggaggatctcttgagtcggggaattcaagactaacctgggtaacatagagagaccccatctctacc

SEQ ID NO: 125180 - DNA, 1025 bp, Homo sapiens
gacctcagatgatccacctgcctcagcctcccaaagtgctgggattataggcatgagccacagcgcccggctgtcttttgctttttgagtattgatttttctttttttgagacggagtctcgctctgtcacccaggctagagtgcagtagcgtgatctcggctcactgcaagctctgcctcccgggttcatgccattctcctgcctcagcctcccgagtagctggaactacaggcatccaccaccatgccaggctaattttttgtatatttattagagacggggtttcactgtgtcaaccaggatggtcttgatctcctgacctcatgatccgcccaccttggcctcccaaagccctgggattacaggcatgagccactggcaatttttgtttttaatctcatacataatatctagcctttcctattaaatatgacattggttgttggtttcagggaggtaccataataaacttttaagaaagactccttctgttgcaagtttaccgagagttctttgctctgttttaaaaattaggaacttatctgaaccaagttcagatgctttttttgtcttcgtgttagtttttctgcttttcacaaatgtaatgaattatatttctcattcagtttgtgtgtaagtttcttttaggatttctaaatctctcgtaagtacgtttgtatagtttgtgtgtgtgtgctatgtgctattttaggttttggtagcaggactaagctgttttttataaaataaagttgtaatttcaaattatattgtttttcctcaaattcttgcttttaggtactctggagctgtataaacagaattaaattacatgtttattgaggcatttagaagtcgcctaacatctttcttggcctgtactctttttttttttttttttaattaaaagcagttcttttaccaacttttaattttttgataaactatattgactttattcagcttctaagagacaatttgacgtctaaaacattaatcacacctagaaactatacaatatgg

SEQ ID NO: 125181 - DNA, 1845 bp, Homo sapiens
ggttctcattttaattaatagacagtgttctatgcacctagcccctctaaaactggagaattaaacaaattaaaagtgatgtcacttcgttcttgagcactgttaccttgaacaagaaatttgtcttactgctaagtaataaaaaggatctcattttattttcattgaagtatgcttttctaaataggaactgaatagtaataaaatactattctaatattataatacagtaattataataatcatattactataataattttaagactatccaaggatagtttactttcttgttttgtgaatttatccactacttgcctttccctgtattaccttgatgatattgcagtgtgagcagagttaaagtttacataggttttttttttttaatcagttctaggcatagaatataaatgtgtattgtcaattaagagtaaattaataccttttgttcattttgtcttatttccaccagagggcagataaaacttgcagactttggacttgctcgattgtatagctcagaagaaaggtaagcataccttcaaatgaatattgtagatactagagtttagtattagaagctatactaagaataccttattgatagttttattttttaaaagagaagtttacttttcatggttagtacataaaacattgaaattttataccatattgggttgattattgtaattacaatattttatacattatctcaatttaaaaattgatcttcaacaggtaaaaatgatttttttaaatgaacatctttaagtgtaactgaagtgaacttaaatttctaatacgtattcagatattaaatattcttaatgaaaaccttttaaattgcatttttaaacttataaactttggtttcattattattttagacagattttattgttatatctacagttctttgtttttttaactccctagaaccctttatttaaaccaactgttgggaggatgttcactgtataagacacaaaaatgtagaacttttctggctaaagttggattatatacccaacttggctttctttgtgcctggtggtagtgaaatatgatttgtcttattaaaactaatatgggatttcaaaataaaatatttttgtgcaatagtaggttttatgtaaataaaatacggaattaatttggcttaataaatctttagtccatttaccccattccttttttgtctttatttccatatgtgtatatatatatctgaaataatatagttaaagaattttaaaattattttatgacaattttgtcatttctttaatatcaccataatttaatataatgaaacatcagttgattgcagtcttaggaatagatgtttactttcatttaatctttgctttttttggttaaagcaataaacaaaaactctcgtttgaatttttcagagtaaaaagtcttattttgttaaatcttgcagcgcctgtgacataattctggaaagtattttccttatatagtgttctagagtagaggtttataagtgatatgttttggatctattcaagttccatgaaacccctcagaaagtgtgcagtgggccaggcgcagtggctcatgcttgtacaaatcccagcactttgggaggcagaggcaggcggatcacttgagggtcagcacttggagaccagcctggccaacatggtgaaaccccatctctactaaaaatagctgggcttggtggtgcacgcctataatcccagctacttgggaggctgaggcacaagaatcacttaaacctgggaggcggaggttgcagtgagccgagatcacaccactgtactccagcaagactgtctccaaaaaaaaaaa

SEQ ID NO: 125182 - DNA, 1050 bp, Homo sapiens
taagtgtagctgccaagttgtacaataaatctcttgaatttacttttgtctaactgaacttttatatccttaggccagcatcttccccccatactccctatgccccgtatctggtaactaccagctctactctctacctctatgagttgaggttttttagatttcacgtataagtgaaatgatgagttatttgtctttatgtgcctgccttattccacttaacacaatgcgcttcacgttcatccatgttgtcataaatgacaggatttccttgttttttaaagacttgaatagtatttcattgtgcgtatatgccacattttcctttttttgttttgttttgtttttttttgagacagagtctcactctgtcgcccaggctggagtgcagtggtgcaatctcagctcactacagcctccacctccggggtccaagtgattctcctgcctcagcctaccgatagctgggattacaggccacattttctttatccgtccatctcttagtggacgcttaacgttgattccctatcctggctattgtgaagggttgagtgactttaaagatcaaaaaatgttagcagagccaagggtgtatagttaagttttcaattcgcaattttttattctttctgtcatatataatagtgcctcttggtagaagttgaaaggaaaaattggtctgaactgtacttaatccaaaacttaacttgaagtatatttttttcttctgctgtttaagaagcatatgtattttattttatttgagacagtctcactctgtcgcctaggctggagtgcagtggcgtgatctcagctcactgcaacctccgcctcccgggttctagcgattctccagcttcagccttccgagtagctgggactgcagatgtgcaccaccatgcccagctaatttttgtattttttagtagagacaggatttcgccatgttggccaggctggtctcgaactcgtgaccacaagtgatctgcctgccttggcctcccaaagtgctgggattataggcatgagccaccatgcccagctgag

SEQ ID NO: 125183 - DNA, 1047 bp, Homo sapiens
acttgctgtgctcttgaatgcctttgtgaatctacataagctgtttcttttgtatgtaattatacttctcacctgagtttgacaaattttttttttctttcagtgtgcaattcaggccctaccgcctttgaaatctgtcctgaatcccacaggcatcattgggcacatcttcttttatgtgtttagagtatattattcattctatgtattatttatagtacatgattataatttatattaccaccatttttcttttttttttttaagaaaaagaagggaaaaggaaagaacaaacttaactaacgtttgtgtacatcactttattatacatagtttcctttcacaagaattattttaaaagaaagttgagatggatgatgtaggtatcattcttatgtacattttaaagttacagaagtttagaaaatttaagtgcatttgcaagatcacacaaccaataagtagtagagctcaggatcttttgacagaaagattattttcattatatgggagtgcttctctggtaagactctgaattcagccttgattacctagaagtatcttccaggtagagaactctaggggcctctcaagtctgctttagaggtaccattaggctgatggcaatttttagagttcttttttagtaaagggtctgctgaattttgctttttgtctttgcatcctccaaatatatttttgacaaatgagttatgctgtaggtttaatcttccagcagattaggaagttatgtgatatttctacttttgaatctccctttgtcatattggatttaattatattttaagcagtttgaaagctcttgaaatatctaatgagaaatctataaacaaaaaatattttgatagcaacaaatatttaaaattacctgtaatttttcccatgaaagttatattaaagtctgatgacttttttttttttgagatggagtttcgctcttgtctcccaagctggagtgcaatggcgcagtctcggctcaacccaacctctgtctcctgagttcaagcgattctcctgcctcagtct

SEQ ID NO: 125184 - DNA, 2048 bp, Homo sapiens
acctcaggtgatccacccaccttggccttccaaagtgctgggattacaggggtcagccacggcacctggcctgactttaaattttaatacttggttaatcacttaaggtttaaggaaaaacaaaagaattgtttgattttgttttctaatgtgttactttcctggcagacaaagaaatagtgtctgccttcttttaaaaaatattaatgagatttacaaatgaaagtatttagcagaaggactggccttggtgtctcttgcctgtaatcctagcactttggaaggccaagatgtggagattacttgagcctagaagttcgagtccagcctgggcaacatagtgagatctctattttaaaaaaagtagaaattgaaatgcacaatagttaacgttgagaccattatttttgggtctttacaaagtttagtttcttgccatccaataacaacttattgaagttactaaattttgttttccaatttaatggcagaaggactgtgtgtgtgtgtgtgtgtgtgtgtgtgtgtgtgtgtgtgttttcctgggttattgagtttattgcttggaattgatctaattatgtaaagtggagtggttcatttcatttttagatttttcttttttgtatgtacacatttatttgataacatctaagaagtcgactatatgtttttcagtcctgtttctttttcattgtgagttaatttgctttttgtgcaaatactgggtatagacacaccacaagaatgtaatttgttttttaatccatgaaagaaaaaagcatcgtatatgtagtgtcacatcagtttgcttcttctttgtgtgatctaaacaagatcatctctacgatgttgacagttggtagccaaatctaatagcgcaagtttgaaattcatttttgaggattctggattttttttttttttttttttgagacagagtctttcttgctctgtcaaccaggctggggtgcagtggtgtcatctaggttcactgcaacctctgcctcctgggttcaagcaattctcatgcctcagccttctcagcagctgggattacaggcatgcaccgtgatacctggctaatttgttttgtatttttagtagaggtggggtttcaccatgttggccaggctggttccgaactcctgggctcaagcaatccttaggcctctgcctctcaaagtgctgggattacaggcatgagccaccacgcccggatggattttcttttatttgtctgtctttggataatgtattttcatattacaacgtgctttaattttcctgggctttaaatttcctggaaccaaaacatagtttcagtctcttttacttttgtctttacatttgtaaacggttaacgggatttaatattagcatcctaatcgtaacgtggatttttgtttgatagtatactatattactgaattgggtgatacctgaaattgtccttattctcttctgactccacctacgttggaacttgcttttatgattaaatacttctgtctgcacactttctcaatatttgcttctttttcattagagaggtagaaagtgaggcatggtacctattatgcaaaatttttgagtaaatcaggtgtttttccttgtccttagtaacggtcattttcatttgtcttttgtcattgttaccttttaaaagctttttaaaaaatagtttattaaaaatatttaaaatacaattaaagtaccactaacttctttaaagttttcttgccagctctgttctctccctggctttatcccctttctctggaaaatgaacatttgctcacccgcctcagggaactgaaggtttagtgtgattggaacaaaaaccaaatgataatggattttataggccttgtgtaggtattctctagatggaagcaatgtgtactatagccataacatattcatgtttcatttcacgctatcactttgactgcactttggaaagtggtttggccttatacgtctggaagcaagaacaatcacttaagaaagctgttgcagtaaatctaaataggatgactatagct

SEQ ID NO: 125185 - DNA, 1071 bp, Homo sapiens
cactgtgatgatagaggaatttaaaagttatttttcttggaagatatcaaaaggagaaaaacaggagttcaaatagggggaaagaacatgagagaaaagattgtgtttattgttatgtagttatgttatatgaaagtattaataagttaggcaatgcatatgtagggtgaggaatttaaaatagctgagtgctacaaagcaaataaaataacgactatagtgtcaaagtaggggtggtagtggataattgggtaattttcgttaggggagttaagataggcctcttttaggaagtaaattggagctaagaccagagtgatgagaaagggaaaacttaatgaagacctgggccaagaacattccaagtacaaaggagaaggaactcagtacggcctgagaacagacttgggaggtttaaggtcaaaggttgcccagtgtaataggaggtaagatccttgctgtacagtcttatcaactgaagtaaagtttaaattttatttgattgcagtgggaaatcactgggcagttttaagcaagcagttgatacctggttttatgcttaataaaaaaactgaaaagaagttaagggtagctgggcatggtggtgcatgcctgtaatccaagctactccagaggcaggagaattgcttgaatccaggaggcagaggttgcagtgagccaagattgcaccactgaattccattcagggcaacagagcgagactctgtctcaaaaaaaataaataaaataataaaaacaaaaacgggcagggcgggcgggggggtgcaattagagatggaagccaggaaaccagttaagatattgttgtggtcataccagtgaaaagaataatggcttggactaggtatttggattggggatctattttggatgtagaattggcagaagttgtttggaaatttgagggaaagatgaatcaagaatgacacttggatttttgacattaaaagctgggtaggtgttagaaaatagatcccagatttcttttgtaggtttgatagatttttctgcaatggattgtgaatgtcttaaagatgacatggcattttg

SEQ ID NO: 125186 - DNA, 2072 bp, Homo sapiens
tcttttacttattcctttttagtcacctgaatttgtttagtttctctacgattcaacatacttttaatttttaagattttttaaaaaatacaagacactaaaaatattttttaaagtaaaataaaaattaactatttgtagatagatttatataaatttaaacatttccttgagcctagttatccagttgcacttttataacaccattgtataggtttgatatactcatagatccttgatgtgtttgagaaactagttgtcataatttttacaaattttgttcttccacccagtaaatcatgtgtcatctaaagttagagggcaatatacattaaggtgcctgacctgtgcccagcattgtttgggctttgtgtgtggggttcataataaagaatgttacgaggttttttaactttctgggaaaatacaaaatagggagttaagacaggtaagtatgatgtaaatttaagaatgtgaagataaatatattattaatagagattagactttatgaatatgcatcttttactgtgttgtaaaggaagtatagcacttgaatgagaaaaatagggaaaggattttattaaaaggggataaggcagctgggcacagtggctcacgcctataatcccagcactttgggaggccgaggtgcgcagatcacctgaggtcaggaatttgagaccagcctggccaacatggcaaaaccctgtctctactaaaagtacaaaaattagccaggagtggtggcgggtgcctgtaatcccagctactcaggaggctgaggcaggacaatcgcttgaacccgggaggcggaggttgcagtgagctgagattgcgccactgtactccagcctgggcgacaagagtgagactccagcgcaaaaaaaaaaaagggcgggggggctaaagcataaagaggtgagcataattttaaagaattactaagttcagtttaactagagtagctaaaatttgaaagacttgctcattatgtgaagataagtgattccagtaaacaagcaaaaatcactgagaaaagtacattaataatgttagaaaaacctaatcttaatttactattaaaaatattcatcttattctgtcctcttttcacagtttttaccaaagtcaaatgtttttgctagctttggagcactgttaactatagtcctatctgtggtaatgctataatgcccaaattgatagttttataatgctagtgcttaagttatttggagaaatttggctggatgggggcagagcaggtcaggcagatcttacactgcctggaactgcaaatctataggtggcaagagggaattgctttctaaattgaatgctccatttccttaacaagactggtccaggaccaagccaagcttaggtaaatgggcttggaatacagcctttctggggaatttgctatggcttttgagtccttgtgatttggaaaacatctggatataaagagatgtttatagctgatctgaatatatatgtgatctccctgaagtaagtaactacagatcagccgaagaacctcctctgactacttaggattctcttcaagcgtgtcaatcagctagaacgtgaccattctctgagcgttgaacactttacattgccagataatttgtgctgttttcgtcaaacctgaccctaatataacttgactaaataatcttgtctgtggcaaataaagaggtagcagtatatttatgtcctcttttcggaaggtgataaaggaattatttgataaagtacgatatgtattgctactttgcagagtagacctcaagtagatacttgagtagacactctgcatttgtgtgcttttttctattcacacactacagtgggtatgtgaatcagtgaaaaattgccaaaaatatgatcaattgaaaacttttgttaggtggtctttatttgaactatatcttgtcatccattagtaatttagcaagatttgatcagaaccagtcaacgctctttaaatcagttaatcccattaaaggtttttatggaaaggaaaaacagtgctcaacaattgagttgatactaaagctttg

SEQ ID NO: 125187 - DNA, 1165 bp, Homo sapiens
cctcccgggttcacatcattctcctgcctcagcttcctgagtagctggggctatgggcacccgtcaccacgcctggttaatttttttttagtacagatggggtttcaccgtgttagccaggatggtctcgatctcctgacctcgtgatctgccagcctcggcctcccagagtgctgggattacaggcgtgagccaccgtgcccagcctatcagtcaactactttttgtttttatcttcatatattaagggaatttttagttaaacaggttgccctcacatacattttatgatcttatattagatacctttggatgtctgtattttttagtaggcagatgaaagtgtttttagttaggattatagggattgctttagtaaaataatatttcctcagagaatctgtcttactccaacaaatactaactctaaagactgttttctgtgttttttagtcggccgtatactaacaaggtaattactttatggtaccgtccacctgaactgctactgggagaagaacgatacacaccagccattgatgtatggagctgtgggtaagatagccttatttactggtttattttacttgaaacttttggtagtgaattaaaatagatcatttggtaatgacgggtattttttccattagctgtatccttggcgaactcttcactaaaaaacctatatttcaagcaaatcaggaacttgcacaactagaattaataaggtaagctgctgattataatattggtgggaattgggagagtgtcatactccacaggaaatttaaactctcccaagtttgtcttttcaggaagagaacaacatggttctctggagggcttatgactgctaaatggaggacaaactgaaatgtaggcactttgatacttgttccagtgaaattaaggatatcaaagcccctgggtgggtgcatgtgtatgtgtacatgcgtgcgtgcatgtgtgcgtttttttaagtcaaaggacttgaggcccaaaagataagactggcaaggaagagtaaatgtaggagagaatgaatgctagatacatattttttaattatgaaagaaatgaaaaattcatgttttggggtattgtttaaaaatactcttgtaaatacacataaaaatatgtgtctatatatgtgtgtatacacact

SEQ ID NO: 125188 - DNA, 1001 bp, Homo sapiens
tatccattttatagcatgctgtactgttactaagaaggaaatagttggtcaggcacaatggctcacgcctctagtcccaacactttgggaggccaaggcgggcggatcacttgaggtcgagttcaggaccagccttgccaacatggtgaatccctgtctctactaaaaatacaaaaattacctgggcgcagtggtgtgtgcctgtaatcccagctacttggaaggctgaggcaggaacatcctgcctcaggtagcttgaacctgggaggcagaggttgcagtgagtcgagattgtgccactgcactccagcctgggtgacagagtgagactatgtctcagaaaaaaaaaaaaaaaaaaaaaaaaggaaacagttgatttggagataaagaaatggaaaagcagcatgaatagttacagaaggctatattgagattgatctcatttaggtaaaacaaaagactcaaattgttaatctgaacatggactttcaagaagactagggaggagaaattttcattttctagtttatatatttcagcatgtttttattttgttaagatacttataattttataaagagattgaccgggcacagtggctcacacctgtaatctcagcactttggaaggccaaggcaggtggatcactagagcccaggagtttgagaccagcctgggcaacgtggccaaaccccgtctctacaaaaaatacaaaaattaggtgggtgtggtagcacacacctatagcctgagctattgggaggctgcggtacaaggatcacccgaacccaagggaggtcgaggctacagtgaactgtgattgcaccactgccctttagtctgggcagcagagcgagaccttgtctcaaaaaaacagaaataaaacaacaaaacataaaaagatgcttcaattttgatttcatagcattaatttcttttcagacatgaagaaaatgaagtttctgataaacaaatctgactataatgaggcaacggagtat

SEQ ID NO: 125189 - DNA, 1088 bp, Homo sapiens
tctgtttacctctaggaggtacccgaagactctccaagagggtacacctggaatttttttaaaggaatttccatatccatatgtctgctttcctaagactgagctttgaggatggcctgcttgtttaagcaagttcttttacatctcctctttcacaattagtcatgttataaaataaaggcagatgcaataatatggttgaatcttagcaatattagtttaaaaagtcattcccaaaatattacaaacagcatgacgcgcttttataaaattaacaactaaaatttttaaaatataaccttttatgagtacatatagatggcaacaaaaagtatatacaaaagaaaacagggatgatggttacctcaggtggaggaaggcaaggggataggttggtgggggtaggggtaatatgattacagtatgttattttcagcattctagcttttgtttggtaggttcatggctgcttattaacattattaaaaataactaaagtaactaaaataaataaaagagagccatgcatggaccaatgatgagtgacacaaggattatgattaaaccaagtctatgcacctgaggtccaaaaacaaaacaaaggcatacctctcagccatcttactatgatgcattgcctcagcgtgtaaaaacctcctggagtaacaaacaaagggacaatttgaaatatcgatattgggaagctttcaggcatcataaacccgccaaagaatttcctttctaagtgtttgtatgatatgatgtgggtctcagtctctgttgggataccttaaattcagatatactgtagtactgcacagtggggtaactggagtgattccacctttctatcctgaagctcagggaatgcattgctcttgaaggacagccccatgagagcaaagcaaagtaatccattaaaaagggcttttgttccctcccacaatttaaaagtaagagattattttctttcctttttttttttttgagatggaatcttgctctcgtgctctgtcacccaggctggagtgcagtggtgctatcccggctcactccaacctccgcctcccaggttcaagcaattctcc

SEQ ID NO: 125190 - DNA, 1161 bp, Homo sapiens
ataagcatatttctgtaggcattcctaacttacccaaagttacaaaaaaaaaaaggtaatttgaagaaaaacacaggcattttatcagaatctgaaaaatgtcatgatttcaatatagtgcaaagataaccttagattttgcataataaactttattttagagaaagtacggtgtagttaagagctcagattgtggaatcagaatatcagattcagatctcacctctgccacttacagaatatttgcccttgggcaagttgcttggtctctttcggtgtcagtttcttcttctcagtaaaaggaggctaataatagagtctgccttctaaggttgttgtaaggaataaaggatattaaatgcttagaaggtatgtgacactcccttagctgtcatcattatcattattcatttcccattcacaatgtgctgtttcctggttaaatccataacatgaggttttagtagtggtcttgattttccttttgaagtatttacccctaaagatttattcaaaattgactgcagttctttttatgtacaggtacattttaaatgtacatgatatttaactagacttgaggttctctttttacagtatttcttaaatactctccctcaaatatatattttcatatggtaatacagagccattttggtgtgggagtgggaggagctgtgaattatgacagttctaattaatataattttgtctttagtaaaaacaggccctggacagcacttaaaccacagtgaattggcaattctactaaacctactacaatctaaaacaagtgttaatatggctgattttgtccaagtgttgaacattaaggtaaactctgagactcaacagcagctaaataaaataaaccttcctgctggaattttggcaacaggtgaaaaacagacagatccatcaacaccacaacaggagtcttcgaaaccgttgggaggaattcagccttcttctcagaccatccagcctaaagtggagactgatgctgcccaggcggctgtgcagagtgcatttgcagttctgttgactcagttaataaaggctcagcagtcaaagcagaaagatgtgctactagaagagagggaaaatggatcgggacatgaagcgtcattacaactcaggccacctccagaacctagcact

SEQ ID NO: 125191 - DNA, 1072 bp, Homo sapiens
tgcagtcctggcaaacagcagtgacccttccacggggccagagagtactcatcctttgccagcaaagatgcacaactataactatggtggtaacttacaggaaaatccgagtggccccagcctcatgcatggacagacctggacttctcctgcccaaggacctggatattcacaaggatacaggggacatattagcacatcaactggcagaggcagaggcagagggttaccatactgagtatctgtttttcctcaggcacatcatttttatctggaaagacttttctagctgcaatttaaggcagcaatccaagagacttgaataataataattcaacaacagctttatttttatgtggagaagggtcttgcatacaatagtttaaaaaagacaaaaaaaacctttgcttaaattcatgctgttctaaaaactagatcgattgtacatcttcacaaattctagttaacaattttattttgtattcttgcagttttaagtggatgctaattttaggggcataagccttttatggccctcttgcagatcttctgaactatgcacatttgtgctttttttgtaagtttggaccaacttttatgtaacaaacagcccctccccacctccagttttacaacaatcagaaagggcactgatttatttggtatttttctttttacaaagctacctttagtcaaaggtcactgtcagtctttgcacctgctttcagtgttattgtgaaaggtgtactttgtgctcatttcagaaaataaaacacaacctttctcttgatgcaacagttttataaaaaaaaaaatggtcaacgttatttttgttttgttttgcagattatcaaagcctagcaaaatgcatttaaatgaaatagtgggttttatatgaaaactatgggtggggtggggagggaaagtaagtgccttaacaggtaagcttaaggtctgaaaaaaatagttaacttttacccccatttgtcttttaaagggaatcaatgcattaaaaaggcaagaaactctgaagtttcaggggctgcctgttcagttcctgttaggtccattc

SEQ ID NO: 125192 - DNA, 2065 bp, Homo sapiens
aactgcaatcagtacatattgtttgagaagttctacaaagttttgtcatttaaatggttgaaagtaatagctccaggagaattttagagtaccattttctttcaggctgccatattatccctgtttccatttgccatggataattggagggtcatggtatagaagcaagagttaataacagaacttgcctaaatgtgttaaagttcatgggggaggggtggcaaataccgtattttaagttatgcaattgcccttttaagaaagtcaattctattcacttgttaactagaaacattgcttagattgaatttattgaagcaaaaagaaaaggcaatgagagagaacttttatcttccttcctgtcacattctgtaaagttgattatgacttctgccagacttagagcaacaactttagttcattttaacatttttttttaatgaagagcatcaaagaatggagtagtccttatttaaactgtaatggtgtcaagtctcactgtgtgcacactctcacacatacacacacaattatactaattctagaaaggaaccaaaggtaaataaccagtgtttccattatcactaaatggaaaaattgactggaagttagagttgtgccaattaatcattttgttcatcaactgttctggtaacttatttttttttattggaatcttaaattggaacaactgttacagaatgtatattgctccagttctaaagccagttaaccctgtgccctctaacttatgaaccttcatttcaaaacagtatgtgggaagtcctgtagtttgataagagtaaaattattttaaagaggataatttaccattttactactataaaataagttgatatcagttgaccattttattttttgatggactctttttgttgggagaaagaaatgaatggaagaaaaaaatatgttgcttttatttgaatattgattactaacaacttataaactacattgcaggaaatgaagaaatattttgaaattagcaaaatagcaacagtattcaagtatctgaaattttaatatggtgagtcttagagctttagactttcctataagtgacagtatctaagttattcttaatagtcacacttgataattctgctgaccataagcagctaacctacagttgaagatatttatgtgacatgaatagcctgtgttttaaaaattaaatattttatataaaattgaactgtgtttggatagtttttctaatcaaacatttcagttatatatttatgttgggagagtggctgggaggacagggaaattgttgctttgacattgaaaatttgaactagaacttctaatattatccttacacagcactactgtgagacatactagtcttttatatgtcacttagaagaaaaaatgttgccaattaagccacaatacaatgctaagacgtcatcaattgtaagctgcatcccagattcagacatattatatgaaaatatgtcttataattgatgaaatatgatagtaaaaaattttaatgcttcccttcatagcatttaatattttaattcagtgaatttggattaatagaacaaagttgggaaatcactagttctgtaggttataacagcagtcatcgctgaaaatttgagtgaaatctaaagaacacaaaatattgcttaaattttttggaaaaaagcaggtaagtcagactgcaagttaagaagacaaaaatataaaagatttgacctgccaaaagaagaaagtatttatcttctcccacgtgaaattcccttttgtatttactgacacagcaggtttttctgcatgcaactcagtatgtttcctacgtcttcattatttgttggagagttgcaagtcatttgtgaaaccttaaaatgccaattttaaggagttgtcatttgtggaatgtgaaataaggtaataattctagctgtgattcagagctttattctgtcagcaaatacatagtcagtgcctacaacatgccaggtagtaatctagtccttggggtacatcaataaccgtcaacagtgttaaatcatactttcagtgtgct

SEQ ID NO: 125193 - DNA, 1110 bp, Homo sapiens
tccgcctcctgggttcaagtgattctcgtgcctcagtctcccgagtagctaggactatagatgcgcaccaccaagcacagctgatttttgtatttttagtagagacggggttttgctatgttggccaggctagtgttgaactcctggccttaaatgatccacccaccttagcctcccaaagtgctgggattacaggcatgagccacggattacgtatactttagacagttcttcattaatctttttctatcagatatttaaggtggaactagacagaaagtagtttaaaaccggaaggaaagtctcaagagtgaatattgttgctttgttgactggaacccataaattcctacttaaaaatttattttattacaaatacatttttcttaatcaagataaaaaataagcatcaaagcagcagcaaaattcccccttccccactcccacccagttcttctctcagtcacaacagcaaacattcagggagccctgaagtatgtacaaggcactattcagttacttaatcctcaacataaacctttaggtactgtacccacttcatgaacgaaaaaactgagaaataagggagttttaatagcttggctatagctatacagattaataaatagtaaaaccaggatttagtcttggctcacaagtctctttttaaaacaatctgctctattataacccacaatcagtttcagttttcaaatactctatgcactatatagaaatacttatttaatacaatggagtcattctatacttttatccatattatttaactgttctcctacaaatgaatatttaagatatttaccttttttcactttataattatatataaaattatacagacagaaataagctaaatatatatatgtccagaagtggagttgctagtcaaagtgtatttgttctttctcagtattttaaagttttcccattcagatctatgaaaatgtgttatttttttttcaaaatttgcctcttcctatttcttcttgtagataatcatttgtcccaggaatctttatatctggtagaacaaatccaaaatcttgttctttgaaattaccttagctattcatggcctcttcttctaca

SEQ ID NO: 125194 - DNA, 1085 bp, Homo sapiens
acgagtctcccgcctcgacctcctgagtagctgggaatacaggcacgcgcctggctcatttttgtattttgaatagagatggggtttcaccgtgttggccaggctggtctcgattgaactcctggtctcaagtgatcccctaccttggcttcccaaagtgctgggatttcaggcatgagccaccgtgcccagcccagaacatgtatttttagtatttttagtatttttagtttcaccatgttgaccaggctggtctcgaactcatgatctcaaatgatccacccatctcagcctcccacagtgctgagtttacaggcgtgagccaccatgcccggccaaaatcaggtgttttaacatgtaacacagactctaggcattttgaagttacaaaatacgaagatagagctagtaaaacttttgtttcaacattcccagaaagaaacgtgtaaaaacaaaatggtcacacctcctatttgaaccatacccacagaaatttgttcattaggtatttcacagagactagaaaataagaatggaaggcttttagattaataaaagctccatgaaagccaggattttggaaatgctgtttctacaagttactagctggatgagttcacttctctatgcctcaattttctcatgtgtaagatgagaaaattaatagtacctgtgtcatagaggtgttgtgttggaggattaaatgaatttatgtatgaaactcttaagccagagcctggcacatagtaagcactcaataagtggtagctgttactttctcatttacccccatttccttagtttttagaatagtgtctgcaagatagtaggtacttaagtgataaatggatgtagaaattctgattgtaactactatattgttctacctacaccctgtatataaaagggataacttagtaatttttccccagtattttaaagaaaaagtccttattcccaacattatgtctttccagatatgttgaggtcatgatgtataatggaaattaaagcaaagggaatacttttttaaatactttattgaactttataggtaagaaatgttgtctttaggaaatgacatt

SEQ ID NO: 125195 - DNA, 1321 bp, Homo sapiens
attactgcaaagttactacattagacacaaaagtatttgagatgacagtggtcatggaattataaataaatgagaataacgaattgctttaagtactttttttaaaaaataggaacacttgattaaaggaagcatggactttgtaattgaacattatttaggttcaagtcacaacttttaagcagcaatgtgattcccgctaacctttagctaaaggaagaagtaccaattatctttactaagtgtttttttaactgattttttttctaaagggttctccaaggacatctacaccatttggatcagggcgtgttagagaaaaaagaatgtctaatgagttggaaaattatttcaagccttcaatgcttgaagatccttgggctggcctagaaccagtatctgtagtggatataagccaacaatacagcaatactcaaacattcacaggcaaaaaaggaagatacttttgttaacatttctgaaattcaactggaagcttcatgtgtcaggaacatcttggacaaaactttaagttgtgttgatataaatttacccaaagatgatgactttgattggataattagtaaggtctttttgttatttttcatcgtatcaggtattgttgatattagagaaaaaagtaggataacttgcaacatttagctctggaagtacctaccacattttagagatttaccgtttccatatatttaacattcctggttacataatggacatttgtcttttaatgttttttcaatgttttaaaataaaacattttgtcttctagctattgtggttttgtggtatgataaagaagtagacttactacagtaatgctttgtagtcacttagagttcataggtaaatgttttgcaaattatttttgaaaatgaaataggtaaaccatcctttgagctgtagacagctctgtatttgttcgtaaataatgaggatgagaataacagagttctgttcatactcattttatctaatgcttctgttaaaatgcattaaaacttgaagccccagaaacccatttaagcataactttatactcatttaactggaaaaggcaagaatagaccatgcattgctaaatcaaagtgttctatctgaatttctctatacctcttagcattatggagttagtttctcttgaggccaaagaagatagctaccagcagcctcaaatcacttccattgcaaaaagaacatctctcatctccatcaatccaagagaagacaaatttgccatacttagatcatgtttctgtattattgaaccaattaactgtggccaaggccacagtgagaccta

SEQ ID NO: 125196 - DNA, 1088 bp, Homo sapiens
gtgtgatatcagaaaaagttgggttcaaatctctggtctgctatgtatgatataaaatctcaaacaagttactttagttctctaagcctcacttataaaacaggaatgatgatggaagctgcctcctagctttcggggtcccgatgtgataatacaatcatatatggccagtgcttaacctggtacctaacagagaataaaagctcaatattcctccttcttctcttccttctccttttcctcatcatcgttaattctctaatatgcttcttgttagtatgaagtctaccaagttgccatcctcccaagcatcttctcagaaatgtccaggtcactctctagctttcagtcagaagttctctccttaccatatcagtgttctcatcccttttgaatacctttgcatataatcacttgttttcatggattgatgactaaatgggacaccaacactcagatccccaacccaatactcatctcgtttcctacttctagatgctattagacatcttttactgactatttagtgggctcaacacactgtgtggtttttttttcctgaaaggtatttgttgtacacagacaaacagagaaaaggaaattctgaaaggaaagaactttgaggtctaggatccaaatgggttattataaacaattgagagtgtttaaaaagaaagaaagaaaaagaaacatttaaaagaggtcaagaaagtacctccacagaacccttttcatttatattatttcaagtaaaagatcacatattcaaaatgttcctattaattttcatatgctgcattctctcagcatgtttgaccatttcacttcataatgttttggcacaaaaatgtaaataacattgcacttcaccttcccaagttcccatagtccattttccgtaatagggggaagaatacactaacagtcagaaactatgcacattctgctggttgaaatccaaaagtagtttttttttagttttctgtcacaacttgttcttgggagtttgctccttgccaactagaaactatgattttcaagagaatacaagccctcttaacaatcagacaggattattatatctctgt

SEQ ID NO: 125197 - DNA, 1847 bp, Homo sapiens
tgtgagccttgaatcaaccaatctagtctgcagtagtgtggactagaacaacccaaatagcatctagaaagccatgagtttgaaagggcccatcacaggcactttcctacccaattacccaggtcataaggtatgtctgtgtgacacttatctctgtgtatatcagcatacacacacacacacacacacacacacacacacacaggcatttccacacattacatatatacacatactggtaaaagaacaatcgtgtgcaggtggtcacacttcctttttctgtaccacttttgcaacaaaacaaaacaaacaacattaaaaaattgagaacaagtatggaaagaatgaaagatcaaggaaaaaagaataccaagttacatttcgttaaggtgcttatgatcttagaactatgcaacctaataggtttgaaactgtttacctgagagagaacaaaaagagagacttttttgtattggaagtaatctgattaatttttattttcttcaaggagagatacttgaaaggaatatgtttgtccatctgttggatccaaacatttctatattttgtaaatgttgttgttgttttttttttaatcgtttactatttgcactacaatggtgtttgacctgtctaatccttatttaacaagtattttctttggttgggggtgggggtggggtttaagagctgcacttaatgtgagctataaaagaactgctacagcacacaaaatagctatttttattattataattataattattattattattttgtaccttaaaaaatagacacatacaccaaagacatttgtgtgagcctttaaacagtctgtctgtggttggtatcattcaccatcaatgagtcaggggttgggattcaaggttgagtagtgtggattgtgttcaggcttaaaagacctgagaagtttggtttttgactccttttacatccatgaaacaggacatttcatactggatgtacagtagttgtacactgttggatatcaagttcaatcaaattcatggaactacatgcttgtatgtgtatatatacattgcttgtgcatatgcatatctgtatgtatatatacatgtattgtaccatgtccatacacattttaagcacttcaggctgtcattttttaatgttcttaaagcaatgaatgtttgtgtgcaaaacacagtatttttaagaaggataggctatagtttttgcttttactctgaactaggtgggcgcatttcaaaaattcggatgggaaaaagcctggaaattccagtgaatattcagcaaggccctctttcattgtacagggatcaaatttcctcctcttttttgtgccccctcccacttctacaagttatcccctgtggggaaaacaggatgataatcaaaactctgggctgatgtttttccaacttagtgtctattggaatcaatcttaaatcagaagctttttcagaaaaataatatttaggccagaattagagttgagtgtattttttaaaaatgattaaggcttggttgtgagaaatattacctgtaccagctgggaaaaataatgtcatcactaactaaaagataattaatttgagagaaagtgttaagagagggagagtaaggaagagaacagttaagaggaggcagaggtgagggcagtagtaaaaatctctaaaattttaatttacagccaaaattcttcatgtgtaaatttgtattgattcagatgcagaaatgaaaaaaaaacacctttgttttataaatatcaaagtacatgcttaaagccaagtttttatctagtttattctagtacttagcttgcctggaatagctaataaatt

SEQ ID NO: 125198 - DNA, 1044 bp, Homo sapiens
tgcacctctttttctctctctttggtatgtgtccaccaagctcatagaggtttaagtgatgaaatattatcacccacatgggtttgcgtgggactttcttagtgaattactcaggcagagcaggctgtgatacagccttgctcacaagcctcgggagggaaaaaatagcacagaggatgaaaagaatattattagagagcaggtaatgaaaggttcgcaaagcaaccagctatatctggttagctaggtaatagtgcaggaacctaggtcgcacctgtacaaactaatgcagaacctgctcacggcgcactatgggaagacattcatttcaagagtttacagcatgagatatttgagtaaaacctgaaactgattagaaattgatcctgaacatcccagccttagtcaaccttccctttttcaaattgttatgcatggagattggaggattggggcatcttgaaagtgtcactgcagtatagcaatctctctcaggtaatatagagataaagggaatataataaattgacctgttatttattatctttttcatacctaggacattccgaggcttaatatatttctgaagcctacagccctgataaacatcaatcccacgtcagtttccagcagtctcatctccccacacccttctgcaatgaaagctaatgtaaaagaaagaaatatgcactgcttaataagtcagaatacaatagaacttgtaaaatgtacctgcatataaggtagacattaggaagacttgaatctctctcttccccctgttctcctgagcattatggcaacagcattttcatgaaattagatctgttttatattttttcctgataaaatatcatgcaatatacaaatagcagttccagaaatggacaccaggagaaggaggcgacaggcatgtcaattagtagggggaaaatccaaatgtcagaaatatgggggagagagaaagcacgcaggcagtggatgcaaatacagggaacagagtctttcaattcagataattaaacggatgcataaatcagcacc

SEQ ID NO: 125199 - DNA, 1079 bp, Homo sapiens
cctgacagccacaaacctacagcactgactgcattcagagaggaacctgcaaacaaaacttcacagaaaactttttgttcttgttccagagaatttgctgaagaggagaaggaaaaaaaaaacaccaaaaaaaaaaataaaaaaatccacacacacaaaaaaacctgcgcgtgaggggggaggaaaagcagggccttttaaaaaggcaatcacaacaacttttgctgccaggatgcccttgctttggctgagaggatttctgttggcaagttgctggattatagtgaggagttcccccaccccaggatccgaggggcacagcgcggcccccgactgtccgtcctgtgcgctggccgccctcccaaaggatgtacccaactctcagccagagatggtggaggccgtcaagaagcacattttaaacatgctgcacttgaagaagagacccgatgtcacccagccggtacccaaggcggcgcttctgaacgcgatcagaaagcttcatgtgggcaaagtcggggagaacgggtatgtggagatagaggatgacattggaaggagggcagaaatgaatgaacttatggagcagacctcggagatcatcacgtttgccgagtcaggttggtgctggcattggcagggggtggggaggggtggggggtgggagggtaaaatatatttctttgacagtcccaggaggaacttcttttcccttcagctggaaactgcctgggaaggttattagttattaggtgatggtagcggactagccgacggagggcaggcaggggagggggagaggactttacagaaaaggaattctcggtcgagctctgcctggagatgactggcttacacttactaaacccagcgggtcacacagagaggaagctcggggccaatgttgagctggaaggcagactgtgaggggctgccttgccctgcctgtgaaaccagatctgagcagccggaggaaagccgcggcattttcgggtgctaggggagcagaggaggcttccggaccccatccaagtttttattgagggtagaggggtgaatgtaccaggattggagtggaa

SEQ ID NO: 125200 - DNA, 1274 bp, Homo sapiens
cagctgcctgctacaggggaccagcgccaaaaactctgagttactttccccaggtgctaatcaggtgacaagcacagtggacagcctcgacagccatgacctggaaggggtacagattgacttcgatgccatcatagacgatggggaccactccagcctgatgtcgggggccctgagcccaagtatcattcagaacctttcccatagctcctcccgcctcaccacgcctcgggcgtccctcccattcccagcgctgtccatgagcaccaccaacatggctatcggggacatgagttctttgctgacctccctagcggaagaaagcaaattccttgcagttatgcaataggctttaggaaaaaaagactgcaaccaacggaaatcaataggagttgaagagattaaactgactttgttttggctgtttttttagttctgtatgtattttagcaatctcatctcacctaactgagatgtgtttcaattatattccttttatggaaaaggactctgaaaaaccctaaagtattctagggagaaactgtcttccatttcagttttgaatcagtattgttacactcaaaccaccctctttttaaaaaaaaaaaaaaaaactgtaagccccgccccctttttagtaaaccgatgtaaatttgtgatgtgcatattcttctttcttttagaagagcagtcaaattaaaggatttgacatgttttgctgttgctcaaaggaaataggagttggtgtgcttgtgaccaaggggttacacttccagcttttaaaattctcctttacatgtgctcagtgttttgttttgtgttttggtttctgttttttattttaattcccacattgggcacaagaatcagaatatggatagctagtttaagaaacttttgtgggtgcactgtagcatagatgacagaatattgatgttccccccatctccaattcagttcagggcattccacagttaaacagaaatgggaacgtggggctcttataaatgaaatgggcgctcacagttttggttttcagctcttcatgtctgtaagtgtgctttgggggaggctatgtctgtatggtcgattctcagttatcacatttgcctctcctcccactaccttcatgaacattcagtgctgtttcgcactgcagttagagagaagggacggacagttggtgacactcagccacattgctacttttatctgttctggtaagaagttagatagatggtagattgaagcaattgggtagaattagttggggg

SEQ ID NO: 125201 - DNA, 1053 bp, Homo sapiens
cgccctgagcgtgaatgtgaaactcgtggagtacctttgcctggggacttgcctggaactcaagcgttgtgtaccatcacaagattctttttgtccttgcacagcgcttggggaggggcttcagtgaatcgagggagttgttattgttttgtttaagccaggcatcagcaaactacagcctgcggccatctccagccgcccctgtttttgtaaaggaagcttcatggacaccccgccacgcttgcttgctcactgctctctgtggccgtgttggggctacactgcagagctgagtagttgtgaggcaggcaatgtggcctgggacaccagaaatagttcctagctggccctttacagaaaagggttgctcatgcctggtgtaagtcatgctcgaagggaattcatctccgcatggtctctccctttctctgtctccaggcacacagtccaacaacacctgcagcttgggtgggcccatgacgcttctcccgggcagaagcgacctctctggggtggacgtcactatgctgaacatgctcaacagaagggacagcagcgccagcaccatcagctcggcctacctgagcagccgccgctcctcagggatctcgccctgcttctccagccgccgctccagcgaggcgtcacaggccgagggccggccgcagaacgtgagcgtggccgactcctacgaccccatctccaccgacgcctcgcgccgctccagcgaagccagccagagcgacggcctgcccagcctgctcagcctcacgcccgcccagcagtaccgcctcaaggccaagtacgcggctgccacaggagggccgccgccgacgcccctgcccaacatggagaggatgagcctgaagacgcgcctggcgctgctcggggatgccctcgagcctggcgtggccctgcctccagttcatgccccgaggaggtgcagcgacgggggagcccacggctacgggcggcgccacctgcagccgcacgatgcgccgggccacggcgtgaggagggccagcgacccggtgcggacaggctccgagggcc

SEQ ID NO: 125202 - DNA, 1071 bp, Homo sapiens
aatcaaatcagaacaagatgtgatcttactgagaaagaatccttataatatcacgttacctccccctgaaaattcccccaagcatgcataaaatccagaagaccttaagtagaatattgaagagagcctttaaggctgaaaagcaagctgcatttaccttccttgtatcatattatatatacatattacaattatgtcagcgattaaaagcattgtcatgctgcattatgaactgtttttacgtttaggattagataattctttccccataccccctcagattccttttatgtcctaagggcaaatcctttctcttgggtcaggaatgtaataaggtaggttttcctctctctgggatattgtgtctgtctcactgtgtttaaattgattcagaaagctcttcagagcaaaatacagtattttctttgtatatgagccagcggttgactaacccttggggaattctctgtgttgagcatttgaaaggtacaggttgggtatgtttgaactgctgatgctcagtgaagaccactgggaaagtggattggccgtggctctgagagaggccttttctctaatgtggactcgaggaaaaaaaaaataattgttccaacaaataatttttaatggtacaataatttaggaaaattagccagttcattttaataagaatggatcaagaccaaaataaagagggaattatagtttatacaaatgtatgaacatacagtttaaaggcatttagccaccaaaaataaattttctaaaaacagcagttttctctccatccactgtatgaagtgttaacacatccctcctgagagttgaaccacaggccctgggatcaaaacagagcaaatttaccatttacactgaaggggactttcacttagatttggtatctccttccagaccaccagttagcagaggtcagacccattgccaaccaaggataactaatttaacccttgtaatgttggttactggttttgacagtgccccagagtctaggatcttggaatatgtatcaagtatagtcagagtatcaggagtacactgtgtgtgtttgtg

SEQ ID NO: 125203 - DNA, 1033 bp, Homo sapiens
cccaaggagctctctaggacatgcgggagagcccagtttgtgaagaggaggtcttcctggtggcctttcctgggggcagggagagtttgcacaggttcctctggtgcagtttctaccacaagataaagcagtcaagctgcaagtgaaacacagccctcactgtattcctcctcgtgtttagcagagataaacttcactggaatctcagtactgagccatttggcttctggctgtagctttaattgatataatgcagattttttttttcttgatcaagaggggattattcttgttatcagtccagagcatcttattttaagatgaaaagcctttacggaattacagatgccagcacttgtacaaagctttttggcgattgacaactcaaagagaaagtatgatttattagcctataatggctaaccctgagcaatggtctaggtcctactgatttgtgaaattgcttaacgtgaactgcctttttatgctacacaagccccaggttactcaagtaaatgtagtgtctgcattacatgaaatgttacaggagagagaagaagaaaagggaggggggagaggagcaaggtggattctaaaatccatcttggtggtgccttttacagtagtttggctgataagccggcagaggaaagattaataacgaggcttgtcgctatcagtacctgcttgtcgattctctgtaacagggctgtctgttcagcatggaaattattgattaaataaaaatggctattagattgtgacgtgatccataatcacaaacaatggtggacattcctctcttagatcctcggccatgcatcaagtcgtttcttttttcccctggccgtaatttatattgcgctgacacttgggctcattaggtttatcctttctgctcagaggcacgagcggtgaggaccagcaggaagtcggggaggaagagaggagagatgatggccccggccagggatctggccagtgtactcactgggctagcataaacatgttgcagtaaaatacatatcacata

SEQ ID NO: 125204 - DNA, 1083 bp, Homo sapiens
agtcaccctgcagtaaatcctccgtgtctcatctgtaaagtggagataataatatccattctaggttcttcactgggttttttaatttgttttttgtttatgaggatagaatgagatcctataatggaagtactttgtaaactcaaaagctttattcaaacataaggaaaaatccatagcaagtagtactaataaactcactcaactgaagaatggagagattaagtgcacttttatgaacatttaaaaatagtcataagtataccattgatttcagttgcacaggctcgcctatgcaggctgctgttcatcttacctgtttactcatctgctgttgatccatcgtcaccacctggtggccactacagaaattgcaggcatagcagctagaagaaaacgcttcatgcatgtccgatctagggtgctggggttgggggctatccctttgagtaaggggagcatacagggcaggctgttatgagtactatcgatgtacaagcaggacagtgggaaaatgagtaaggtgaaggcacagaagaaggaatgaaagatacatctcatggagattggatatgagcatggtatggaataaactggtggatgtaaacacagaaagaccattgcagaaaggcattggggattctatgtggagaagacagcaggaagaagttaaagggtacagaaagtatgggaaaattttatctatgattatagctaatataataaaagactgaggtttttggcatctctttgaattagaaatataattacaaatgatttgttttatgctttttggttgaagagtggtatgataagtaatgcagttagagcagaaccaaagtatgtccggaaggcagaagggtagtgggtagtaagattaaagagccgagtagcaccatgtcatgggagatgtgattgctagactaggagtctgacttttattccaggtggagtaaggataattaaatgcttttgatgagaggaatggcttgagccagcatcagctttagaaagatggggctgagccttgcaaaacctggcaagttgcaagtacagtgtattaaagagggcaaggttagactg

SEQ ID NO: 125205 - DNA, 1695 bp, Homo sapiens
caatcatccacacagctaccttagctaagtcttgccataatcattcatgcttgcttttggaaacactggcagtaactataacgctgcagaaacggaatattattactgatttctccctaacttactgtgaacaatgactgttttcaccacgtttctgctttcctttattaaggaaatacaatgtagaatgaaaggagagtttctcaaagcctggtgaaattctcctagggtattcttaatgatattcagtcttaaatgggcaagctattgtaatgtaaggttctctgcaggaatgatagtaatgtaatcccattgaagctgcctgttatggattgtagtcaaataggcaaaatgtagagtcacattaatgaacagagtatatctttggaattattacttaaagttgttgaaatggtttgaattttgctattgtaattattttattctcctttaatgcgcttaatagccatagtaattaacccaccagattggaaatttgcatgagttctaactttgacattacaagaaaccctgattctttctgggtattacacagcaggacagggagaaatacatacatatatatatataaatatttttttcactgattatttttttaaaaagaaatttccatgaatgcaattattagtttttcatgcatttttaagccattggcaaattccttaagaacactccattcttttaagaggatttgattccagaaccacactggcacaaagaatgatttggcattgcctgctagtcgagaaatctttaggtattatcactgcttcctcaggacttactgtagcctgggaaatagtgtggcataataaagtggtgacagtcattagcatgcataatgggctttaatagacattaaatgctgtttagctagaagagggagcagtgctctcccactggaatattcctccatcgaagcccattgatcactgatttcagcggggagaggttaatccatcagcttctgtaaccagacggcactgatggaaattctttaggtggcattctggatgaaccaagctttccatctttacaaacaaatgagtgatatgacaagcatggtgttcaaaacacatttaaccaattgattttctttcctcttgtaataagatctggagacatatgaaagcgtgcagtgtgagctaagattaaaggaattgctccatgcacaggaacatacggaactaagagccaataaaagtcctataaagcatgtagtcacccattctctttttatataaagtttgttattgcaataaatagttattattgaactgatgccttttatttccgtttttgcagaatcttgttttaggtctgcgtgtatgtgtgcacacacatgtgtgtctcatctcagtgttcatctttctcttagaagttttcaagatgcttggcaataatcctaccttctcatttaaacaaatttgatttgggatggtaaaattatagatagaaagctgcagatcttgtgtacttgtctgagctcagcgtttaagtgatgatcgtctttttttatctcccccgtgcagccctgccttgagcttcacctactcttccgcgcccgtctctctccacatgcatcagcagatcctaagccgacaacagagcttaggttcagcctttggacacagccctccactcatccaccctgccccaacttttccaacacag

SEQ ID NO: 125206 - DNA, 1029 bp, Homo sapiens
taaagtaacatgataaatatttcccttgtggcctaaagtttttttccttaaatctctatctttaccatgtatcatggataaaaagtatatgaaacaaatataaaatacccacaaacctatcactagagtgctggtatttctagataataatcgtaaaacttttattgattgaatgctatgtgctaagtgtgctacatacataatttaatttttgctcctgacgacctcatggagccagtttaaatccagatctctatgagtctggaggccaccctcagaactgctacaatgtcttgctgcttttgcacgaaaattggcaggtggaaaccgactattatcctgttagaaagctgagtcttggcagtaaattgctccagattgataggtatattttctttttgattttgtaatgaagaaaaggaaaagagagcttttaaattatggaatgtaaaattgtagcttatcattcagttgtgttattaaagctgtgctgccttttttcatactggtaaaccctgacttttcatgtgagtgagagttaactcagacactcttgtcagaaagcttagaaaagtattttaagtatgtctggaaagatatcatagtcttctaagttgtctactattgtaagaaatgcaaacatacagtgatttgatataaaaatgattttatttggggggcaaatgtggttatgtacatatatacattttaatcattctgatttgttgataatttcttagaccaacaacaaaaacttagtaatgcatttcacttttttctattcctttccttcagttttattttcaaataaaagatgtttcatggaagtaagagcacaatttgagttaaaggagctttactctaataagccataaaaggaattgctgatgtgggttgtgtaatggactctgagatgcctcaagagaaacttctagttgaccttctttcgctagtaaccatacatctcttgtctcctcctagcgccccatgcaggagtcagcccagcagaatactatcatcagatggccc

SEQ ID NO: 125207 - DNA, 1024 bp, Homo sapiens
aattcaaatatgaatttatcaataaaaaccccaagtcttggttctatggcggaatataacagcaagccctcctgtagcccccactgtgtgttctaggccctcattactgacctgcattggcccgtggtgataacatcacgagacaagatgcgtcacatctggaccatcctcgtaggcagagtcgggggagtcacatttcaggtgtgactgttgagctgggttttctttggattttagttcttcctgcttttttagccaggctttggatactttactagcatctgactaaatggttctctagcagcctaaatgtataattatcaaaaagattgatgatgtaaagctgatagataatcctgagcctcaaaagacaagtcctggaagattctgagagggaatatcattgctgcgggcacagagaatggtgagcttatgggtttgtggcctcctgggactgcctggttttagtgcatcctggcagggccctgggtggacgctatgcttatgaagtgggccccagcaagctggggcatgtcacgcccctgtgtctttgtgactgacattctgtctgcattggtctcagtggccttccctctctgcatggtgaactcctgcttatattcatcctcaaggcctaatttaagggccgtcccagagactcgcatgtagctttgttgtgatgcttttcctcttgcttggtgatttattgttaacggtcactgctcccttctagtttcaggggcagtgcccagcacttggtcaggcactttgtaaaaggtgctcagtggacactcacattggcccagtctgagagacagtggaggagcagtcagagagctcgaattcctgttcttgtgttgccactcacttgtgctgtgcactctggccactgacctttgcatgtgttggtttcgtaacgtggaaatgaagctgtctgctgtacccacctcttcagatcacagggagagttcaatgaaataatgttcatgtaagcactctgaaaagcacagagctctaaataaat

SEQ ID NO: 125208 - DNA, 1083 bp, Homo sapiens
aggggtgtcgtagaaggacatggcctgagcagaactgaggcccttgaaggttgtcatggagaggaacgtaggctcataaagccaagttctgcagaattacacgtttactcacttcaggacagagaaaatggcatgataatttttaaaaagttattttttcttctttcaaaggacaaaggcttgagagagacattttgttaaattttagatcagtaaatgctgtttgccaagtaatgtctaagagaggggatcctggccatttccatggacacgagagcccctgctgggtcccgtgctcctggcaggctgctggtgtccaggggaaggggggctcccggggtaggccccaggcatcacctgcgtctccctccagcatctcccctcgtgcttaaccagagcctgggccagggcctgtgaggctgagaccgtctggggtctgatgcctgctgcttcctgtctcacatctcccgccccctgcccctccatcttccagggggagcgactgtctctaatagggtggctgtgacagatgctgtgggaattctgagtttgggataatgagctgtcatatgtcatttcacttaaacacaataatacaaatattttgatcaaacattttctccagctgttgaacgaaagcaataaaagcagcagggagtgccagtgaattctctgtttctgaaacgctttaccctttaaaagctgttgcctgttaactccttctatctctgtctgtctcctttccctctccttttcctggcctctctgatttcccactgcatgcctagtctggggctataaataaagaggctgaattcagggatgtgaagggggtgaaattgagcacagctttttattaaacatcccttaggctggccgcagagcaaccgcagctgctgtgaacttgtaaaacctggcttggcctggccactgcagcacagcctccaagtgtttccccaaccctcacaatcacatccaacttttaggcaacagtcttttgagataacctatctttgatggcaccaggcccttggagctctgtggctggagtctggtttcatggctgatttccatggcagagtt

SEQ ID NO: 125209 - DNA, 1084 bp, Homo sapiens
ccatctctcattttcctcttacttcctttcgcttctcgcttttctctctatgccagtgcattttctttttcatggagttttgcttttatttagagtaatttttataaatatttgaaactaaatttatgcttctcagaaacaagattctttctgaaaacatactttgggtgataaagatgtaatctgcttccaaatctttccaaatctgggtgtaaattatgaaacagaaaaaaaaagaagcagccatttagtacctgattatcagtccacatcaagccaagttcagtgtgccttcctgaatttgcccacttgaattcagggcacacagtagcaggcacatgtcagaccaggagttagaaacacacggcttcaggactggccatgaaggacccagggcagattatttattctgtttgaaccccagtttcctcacctgtaaaatgaaggcaatttcacagtgtttctttggataaattcagataataattatcaaagttcctggcagtatcacagtcttaatctgttcaggctgctgtaacaaaataccataaatggagtggcctataaacagtagaaatttatttctcacagttctggagactgagaagtctcagatcaaggtgccagcagatttgttgtctgatgaggacctgtcttctggttcatagatggccttcttctcactgtgtcctcacgtggtggaacggccaataggttctctggggcctctttaaaaggaaccccattcataagggctccacccttatgaacacctcccagttgccatactgccaaataccattacattggggattagagttcaatatgtgaattttagaagaatatattcagtctatagcaatgttgtaactttaaatgtttccctgaatcaatccatctttaaaccttttttaagccaagagtttgaatctcagaaatgtgtgtttattaaatgatgatttcataatctcacacccattacacatagtaatctcaggagtggttcattgattcagtaaatatttggaaatgcctactttatgccagattccttgctgtgtttatgggattcaaagattagtaa

SEQ ID NO: 125210 - DNA, 1016 bp, Homo sapiens
attatgctaaggtaagccattttagggcagcttcactcttttcctttccctttctctttctttttccctctgtaattgtggaatctatttgtgtgtgtggcttatgctaaagaagtcttaatcatgtattatttcctatcctcttactttgaaatggtcagacttctagctgagttgtgtttgggcactgtagagggaggcagggtgtctgtgtacagttgtgctgggtgtttactgcacaaaggacagaaataaggggctaaacttgaacacatactctgctcaccaagctacccagaggaagagtctatctttccagtttgcggaaagcgccatcagctcaccaagctgagtgccagaggggctaggtctccccagaagaggcatagttttctaatctgttagattagaggtttctagtctaatctgaagatgctggtcatgactctagagggaggcataacatatcatttttaatttatcaggattgacaaagttaagtctagacacatctgtgaattccgtggtgggctgtacaaacacagtgctaactattgctactaacggtgcaaagttccattaagcatccacgtatttctgcggactcaccaagcattcaggtccttggaagcatctggaggatttgctcaagttttcacttttcatctggatatttgacattgtgtgcacacagctctgtgcattctccttctagcccaggagattccttttgactcttccattcaccctcaatcctcaggggcaataaatttggttgaaaagcagttgaggatttatgaatgtgaggcacataaaacccctttggattctcagacttacactaaacaaacttgtgagtgtgccagtgaagaggaaaaagtttaaaaaatccagcacgccaccggcaaggttggttattttttaaaacaacaacaacagtaaacaaaatggaaacaaaacacaggtcgcgttgctgatagcaggcagcagttctttgagcaggcgtgaagagatgc

SEQ ID NO: 125211 - DNA, 1114 bp, Homo sapiens
agtaggtcactgaacagttgagcccaaatcttgttcctcatcaactgaagatacctggctggcttcctgcttataataacagtggacacagtcttctggggcccagatatgcacagtgaggcataatgcatttggagaaaaagcgttggtttccagaaagagtccatgatattatcatagacggcagatgaaattcctgtcatgcagtgaatagtggggtaaaatctcccctgtcattgtttgtgggagtcttcagcatctggcacacttttttgtccttcacaagctctgtgtctgtctttactggttccattttctattattcctcttcttgggctcctatttcctggatgtccagggctttacaccctggagctaagcactagggtggccactttctggatcttgctttaacattccccataccgggtgcactgctcacaatgggtcatctagtgtttttccagcttacccgcaatgctcatgatcacgttacagactgtgcaaacctaagccatcccacctggtttctgtgctccttttcctggactaaagagagcgagctgaggaaagaacagagctaggtgagctagctggtagaaaaggtgcttagcttcagggaagcttaagtgctctagaactttatttcttgttgctgtgtctcatgcacctgatattggctatttgaaacattttctaccttcctcaggcctgctctcctgcctttggcccatagaaaatgacacagtttcttgaagtatcacctccattctattcctggtgtcctgttcatgtctgggctgtggtaatggccttcagactttctgttctccagtctgtccttcatactgctgccttgttaatcttcttgaaatgcccccaagattaccttcctgctcagaccatagctactcactgacaacaccgtccagaccccttgatctgaccccttgagctaccttgcaacttggcacctatgagaacactctcacactgctgaacttgcctcacctgagcagatcttatgctgtagttcgctggtactcatatccgatcccagcactctgcatgcatgccttgccccttgttttcggcctcagtccagtctcactct

SEQ ID NO: 125212 - DNA, 1875 bp, Homo sapiens
ttttcttctgcccccaactgctcctaagcagtagttcttcatggaaaatatgattcattcttccatgcaaatgctttgattgaaaacataccactggtattcttcctatgttccccagctcagatgacagaactattggttgctaattagcaaaacctgaggaattagcttaaagaaaaaaccctgaatttttaattggcttgcatttattttctgtggaaggctgttgtgctaagcccacttgcattcttgtgtgctaaaaaactgcatagattttttttctacctgtctgtctttatattaggtgactttccacatccctttagaaatacatcttctgagtgaatggaagagaggatgtatattttacatatttaataggtacacttgctcatacttctctctcttactatccaagtgtcatcttgagactgtgagagacaaaaatgcctaagaggcataaatgaacagttttgtcttgaccaaactgcaaaggcagtgacagttccctgagctcttagttctcttctcatccagactgtcttttacatctttggagaacagttgatgagccaatcagaaatgctttgtttttttccgccctttgaaaattagattgtttaaccagaaagactgatgttgggtcacaccctgggggctttgctaggtctcttgcttcctaggctgttagtcttgaattgcagtaagagctggagtgaggagatccaaacaagtccataaacctttgcaaaactattatttgtgagcttgagaatagctccctgcttattcttgtctttctcttagaaattcaatagaatgacctggctttcttttagtaatccagaggtaatgttttaagactagaaacagtgagccacttacatagccttttttttttttttttttttttggagacagagtcttgctctcgcccaggctgtgcagtggcgcaatctcggctcactgcaagctccgcctcccgggttcatgtcattctcctgcctcagcctcccgagtagctgggactacaggcacctgccaccacacccggctaattttttttttttttgtattttttagtagagacggggtttcaccatgttagccaggatccatagacttttaaagagctgcattgcaagacaacttggagcaaagcaatacagatttagggataattcttagtgttccagatttgaactgttgccagtgaatcttgactactcttgtgcctgatgcgaccgtgagtctgcgtatctctgttttaggagatagtgaatgaaactgggaaccaacagtgagaaaagtccctgtagcatttagaaaaatttgttaacaattttattcatcaattttgaggataaatttattaaaggagactgggagaagcttgaagaccacccaggtcaggaagagaaagaaaagaccaagagagaccgcatttttctagagaaaatcacttagccccttagtgcactggtccagtcctctcttcccctgccgcctggcactgttctcttctacaacgactcagctcccattggccactgctctggtgctggccctgcccttgttgccctgcttgtatagttgtttctcctggaccagttacttgctttctctttgccttcaaatcctgcttatgtttaaaggcctatctaacaacccacctccttggaaagtctctaagagccatcttacaaggatattttcctaccgtggacacttgagtagtcatgtcattctcacctttaaacacatcacagctacttccttgtgttgcccctacctggtggcccgacctcctttggaataatgtgattagtccgaggcagtacttactttctgtgggcaccaaaactcctagggtag

SEQ ID NO: 125213 - DNA, 1030 bp, Homo sapiens
taagttctctgtaaccaaatggcaaatacaattttgacctaccatcccaatgtactccctaaattggtcataaattacattattatatagataatatggatgggaagtcctaaagactgcacagattggctcaacacttgggaatttgggttcaaggtccagctttgtcacttgctagctgtgtgaccttgacaagtgtgctgatccctctaggaatcctttcctcactgtgggatagggtgataatatgactgcctgctccatggtgttcttgtggaaattgagacaatgcaaataaagtattaactaaaatctctggcacatgttaagtgcctcaaatgtattaaggtagttcttctctgctttctcttcctccttctcctcctctttttttccttctcttctacatcatcatcctcctcctcctcatcatcatcaatatgtgataagttgactctctaagtcatgtttgtgagggttgcacttgtatttgattcagtgtagactgttttttttttttttctttctttcttgccagacctggtcacctgcttgcctgagaccagtttcttctataacacagattaagaattgagcaaactgcaaacctgtaactgtggtgtcgttagagctgtgcactgtggccttctgaacataatcttttctcagtcaacctcagtagatcgactataacttttttctgttttgtaagtgaagaaattgtaaagattttaaatgagtttgagaagtgttaacattttaaattcttagcagaaagtgttttatgtaacaaatgcaaactttaatacatgcaggaacataaaagatatagtattatttattcatattgaatatttaaagacatcctaaactaagcctcagcatcatatgggatatgactttactttttctttagaactctgttggattacttaatctcctgccagtatcacaagtattttttgagatactttataataaaatctatctgctcacatggatttaattatccaggcaaagctaatgattg

SEQ ID NO: 125214 - DNA, 1390 bp, Homo sapiens
tggctgccttgccaaacggagcacctgtggaacacgccatcaacacagaaagtgctattggacagtgctgctcatagccttagaatccaagagattcctggactcttggaggcccgttgtaaatcgtagggccccaggaacctaggagagaaagagttcttacagacaaacttacagatgaccctaaacatgaaacaacaacagtaacaaagctagctcatctacaaggaccactctgaagtcctgtaatctgaagatggaagtctcattttactggcccaggcaactagttcctggaaagttcggtacatggatgatttttctagctagttagtgcttgatgttatttaccaagatgtatgagaccttgttccttcgtgtgagtattttaacctaggccattatctttttgcaaaatgggtatagtcatcttaggggaatgtagtgtggggcaatggaatgtttttattacacctcgaaatcacagttgaatggtatttatagagttatactaaaaactatatgaactggctttggaagtttttgtttttgtttttgttgtttttttgtttgttgttgagatggggtctcgctttggcacccaggctagaatgcaaagttgtgatcatggttcatttcagtcttgacctcctgggctcaggcagtcctcccacctaagcctcccatgtagccgggaccacaggcatgcgccaccacactggctaatttttttttggatttttttatagagacagggtttcatcatgttgcccaagctggtcttgaactcctgggctcaagatatccacccacctcatcctcccaaagtgctaggattacaggggtgagccaccgcgcctagcctggaaattctgcataggctgaaatttaagtcatgttacccattgctgtctgtgatgtatctggaccttccatttgttaggcagtaatatttttagtgtaggtgagaagttctgatattctaatataatccctagaaagtctgttttctagattataggagttggcaaaccatagttggagggccaaacccagcctgtttgtgtaagtaaagttttattggaacacagccactccatttgtttatgattgtgtgtggttgccttagccctactattgcagagttgcagaattacaacagactggcctgcaaaactgaaaatatttacactgtagcctttgacaaaaaaagctttgccagcccccagtccagatactgggtgaacgattggaacgcctttccagtaaggaaacatctgtgcaggtccaggtttgccagaggattttagagtagatgtgagatttccttattcttgggctatataatttagtagacaatagaaagggtaattacacattataccttttt

SEQ ID NO: 125215 - DNA, 1038 bp, Homo sapiens
ttctagagagggcacctcctagagagtgcttagcatgtgctcatcccattctgagtgttttgcatgagtgacgcatctaatcctcggtaatcctatcaagtggctactgtcattatccctccccattttacagaagagggaactgaggcagagacatgcctaaggcccatggccagtgtcggagctggggacccaacctgaggaggccaggcttacatttctggctcccgatttccatgctgtggtcattgttttgaaaaggtggcctggtcaacatgtggggcaggaggagagctaggaggtcatttaggaggctactgcagcttggctgagtccgggtgagagggggtgacggtccagctctgaagagggagggaagtggatggactcagcctatgttgtggagagaggaatccaagatgactcatcgttttttgacttgagcaaatataaaacataaatatagatataatataggacatcttacttgttctttatttgacggcggtgtagggattgggaagtcttcaggctgtcacaggtccttcagtgacctggaaagaaaactaaactcacttcctgtaaggggcatggatttctgactaggaaccccttcctatctgctgtccccagaaattgtccacttttcaaagcttgattgtcctgggcccttgctatggccctggctggggtaagataaggtaatgacgaggtgcctcaggccccttcctgatttgccccccacccaaataacagcctggcacatgaaagttcatcagcatttagcctgttgccacctgtccttgtgctgtttgcttgcacctggtgaaaagcaaatatggaggttggcatcaccaatatgatagtgtttataccctgaaaggatgagaacgtcaatattaacagtgatttttttttaattttttgagacagagtctcattctgtcacccaggctggagtgccatggcgcaatctcggctcactgcaacctctgcctcctgggttcaagcgattctcatgcctcagcctcctgagta

SEQ ID NO: 125216 - DNA, 1208 bp, Homo sapiens
catgtcctttctgttgagaaatactacttgatggcttctttaccattttgttccataagtaaacatgctgccaaccaatattcagatacatttccttttcttcttttatcctttctgctttccttcccttctttttctttccctcttgattagaaaggtccagcattttttaacatctcaagtgagacatgaaacggctttgaagatgatctcttgtcaagtgtaccaacagagattttagaggaaatttggaatcttcatgtcagaagcagtgttgtcttcaccaggttcataaggtggaactaagataaacttatagtgtgaactttaagtaacaaaggtggtgacctctttaaaaatctatataaatttaatctttaatgctttaaaaggggatgctgaaggatgcttttgtgtaatatattttttggtgttctatttacacgtagatttttaaaagatcttttttgggaggtacatcttctgcaatgcaacgttaatcaggacgcctttgtaggtagagaaaatatttagtctcctgtaaagctggcccctcccatccacattttctgcagctcttatttaacactggtgagaattaatagttgaaattcaaagagctgactgacattctctagcctagataatccaactatgtttccttaccactttctgctaaaagagatttacgatgtacctgcattgagaggtaggtccctttaaaagatatttcccattttgtaggaccatgaaaatgtctttaatcatgagtaaatgaagagagccagcattgtcttctgaagaatcttggggatccaccttatttatttatgtactgttggatattagtgaggataggggaggctgtttttgcttttctccccattaatttttgtgtttaacgttgtttaccttattggacacactccacctgcacaacttggcaacaaagtcatgtatgaaaaatgatcaaaaaaggaattacatttaattgtagcattctagttagagccaagatacatagaaactgacacactgtgtctgctcatttggcccttctatcctgccagaggaagatagcaaaccagatttattgaatacttactcatctgtccatccacccattaattcatgcattcagtaggtatttttcatgtatgtcctatgtgccaatactgtgctaagtactgagggagtgaattaaacaa

SEQ ID NO: 125217 - DNA, 1062 bp, Homo sapiens
cacaaggttactctcttcccaggcgtatatcaaagccacacaaatgcacacttgctttggtgtttacattttgcatttatctttagaagtgttttaaaaaaatctgtcacttataagaaaatacgtaggaaataacagttggcaagacctaacaggtgtttgctgtgttttcaccttttatactttaacatgttctggaagcaatttagttttacttttgtctcatctgtcttgaactgaaagttgcaggtacgttgatgagtactctggttaatgtaaacacctcttatattggctcaggaaaagtacgattctccagcttctctacagtgggctgcatgcttattaagtcacaccagctgccctctctgttctttgagagtggcatctgttgtttggtgactttttcttctgaaatctgtcagtgccaaggacaaggattaggagtgggttgaggctgtttgttatttgtttgttgttgctgggagttacttaatagtggtggaaaaggccaaaggaatattggagctcttacccttgaccttaagttaccctaactttagggtaaccttagtcaactaatgacttacaggtgccagacttaagataatgctggttgtcaaatcaaagagagaaggtatgtgtaggatgtggtctcagttccgtacatggtatgttgctaggatgcgtatgtatgaggtggattcttataaaaagtatcacaaacacctttaagaacaccacatagcaggctatacatcccttcaaagataagaagtgtcaccgtctgaggtgtaattccagcagtttcttaagcctcaacttcgtacacttgaaagcacacccacaacctgctgctgaaagcttttggaagtcattgagagacatggctcttgtttattctccaaattttaaatcatgcagcgtttggttggccttttgtctgaggagatacaaatttatcatagccatgtcaataagtacagaaaatttgccagcccacagagaaatttgaacttccttcctttcccgaaggagagtctcggggaagtcgtgcataca

SEQ ID NO: 125218 - DNA, 1030 bp, Homo sapiens
tttgggctatgcagtggtatccagttgtggtttcatttgtctctgatgactgagggactcaagtatctttttaagatatttatcggccgtttggatatcttcttttctgaagtgtctgttgaagtctcttttttaaaaaattttttagttctttgtgggtagataattgtttaccagtttttctatcactgatttgaagtgatacctgcattggttactgccttaatatatattttaggttctttttctgtaaaattttattgtatgatcaacctgtctattcttttgttgtaccatactctttcagatgttatacacagagtacattttatctgataatgcacattatctcttattattcttccttttcaaatggctcttggcttctattcgattttttcttctagctgaacttgaggaacacctttgtagaactatgttacttattgaattcatatgtatgaagtgaaagtataaaaacatgcatggatataatcatttctttaatagtggttaactctggggagagtggaaagggaacaagatggagagggttcagctctatctgtattatcttatttcgttaaagagaagaggttttaagcaaatgtaacaaaatattaacatgtattaaacctgtgtggcggatacctagatgttgcttatgttattctctgaaatacgtcatgattaaaagtatccctttagaatttattattattattattgttattattattattattattttttagatggggtctcgttctgttgcccaggctggggtgcagtagtgctatcttggctcactgcaacctccacctcccagattcaagcaattctcctgtctcagcttactgagtagttgagactacaggcatgcaccaccacgcctggctaatttttgtatttttagtagagatggggtttcaccatattggtcaggctggtctcgaacttctgacctcagatgatccaccagcctcagcctcccaaagtgctgggattacaggcatgagccactgcacct

SEQ ID NO: 125219 - DNA, 1955 bp, Homo sapiens
atagcaagaccctgtctctacaaaaaaattattaaaaaattagctgggcatggtggctgtagtaccagctacttgggaggctgaggtgggaagatcacttgaaccaggagatcaaggctgcagtgagctatgatcatgccattgcactccagtgtgggcagcagagtgagaccctgtctctaaaataaaaattaaaaaaaaaattgcaagtattttgaagggtactctacagataaaagtttcaggtacaaattcagggagattttgcccaattctggctgaattgctgataattacaattagctgccacaacagcagttgatcctttgaaatctgaaatgtgtgttttcttgatttagacttggtattattcattacccaccaggcttcctatactcatcttcctggaagaagatgtgtgtggcagccagaaggaacattttggactcttgtgtgactaactcctcccagatcatggccctctttcaaacctcttgaacatcctcatagagtgctttgcatagttttctgtttggcatctggttttatgtagttatagttcatcatggcttcacttagagcttttgcaaatttctttgatgctaatttagttgcattaaactttttggagtggaaaaaagaaacaaaaccaagagtacaataaactttgattaccagacccctaaacactgaacctctcaagtaacccatatttgtaatttattctttcagattggcatttacaggcgggagctggggaacgttgttattgaaaagttaggcagcagcgttcagatgcagctgaagcaagggcactaaactttcacagggacacttggagaaggtgctgcatcatctaacgaagattagatggtttattatatagaaattattaaaataattcattttagaaagagttccagtaaaaatggagcctaaaggagccccaggaatgcaggacgcctctgacttcactgaaggccacatagcctgctcactccagcctgagaccttagacccatccatgctattccctgctctcctctgtcttaaatgtgtttttatttttatttttatttatctacttattttttgagatggagtctccctctgtcgcctaggctggagtgcagtggtgcgatctcggctcactgcaacctctgcctcccaggttcaagtgattctcctgcctcagcctcctgagtatctgagactagaggcacgtgccaccacgcctcgctaatttttgtattttttagtagagacggggttttgccacgttggccaggctggtgtcaaactcctgactttgggtgttctacccaccttggcctctcaaagtgctgtgattataggcgtgagccaccgtgctcggctgtgcttttatttttatgaaaggaatacttgctcattgggaaattcagaaaagcataaaagaaaaacacgaagctggcctggaatctcaccacttggaaaataaaagttaacactttggtatattttcagtctttctctctgttcaggtaaccatatgctaggatcattttctgtgtcatgaaccactcttctccaacttggctttaatagctatgaatttactcaatcaatcccctatcattggacatgcacattttttttcaattgtgaataatgatgtgatgaaattccttccaaaaaaactgtgtgctttgactacatcttacccaattagctccaagaaacacagcaacttatatttccatcagctgtttatgtgagtgctcattttcagaaacacgtatcaacattagtgaaatattttaaaagaagataggataggtgaaaaccttacctcgctttttaaactttttaattgaaatacaatacacagattaaaaagtcacatagcataagtgagcagcttgatgaattttctcaaaatgaacacaccatgtaaacagagcccaggtcaagaa

SEQ ID NO: 125220 - DNA, 1004 bp, Homo sapiens
taataagagccccgactctcttgagctccaaactcacatgtcctgaactctggttaccactgtgttctttattttggctaagtatatcacctttcctgtggtcagccaggcttgaaaccgcaccatcacctttgacccctccttctctcctgctcccatgtcctaccggttttgaggtcctgttagattttcctctgtaattactcgctcgtgtgtctcttcaggccaacctactgtactgtgtggtgaaaaccctcacacctcatgcttagatgattaaaatgaccctctgtctaatcaccttgcctttcatctccactcttgtcacgcatgggacttgctcctgccaaattaggcttattacagttctgcttatgccacaaccctgctctaaaagctccagtgactcccagctacttgtagaataaagctcaaagtctttgacttaacatttagatatcttctaaaatctggccccagtctgacagtccaatctgatatgttcagaagtagatatgctactatcccatcgcataacctatgctttagctaaatgcaagggctcttggcctcttgtccatagaaatgttttgctaacaccaatgcatgtttaaattctcaaatgtgaatatgtccccagtctctttctctcctcataaggtcttgtgtcctttggggaactagcttataacactagatttttttatttttaaaattattattattttaagtaatagacttcatgttttagagaggttttaggtttacagaaaaattgagcagaagacacagagagttctcatataccccgtcatacatactttcccctcttattaacatcttacattaatgtggtacatttgttacaactgatgaaccaatattgatgcactgttattaactttccatcattcacatgggggctcactctgttgtacagttgtatgggttttgacaaatgtatgtcacatatccaccactgcagtatgctacagaatactttg

SEQ ID NO: 125221 - DNA, 1928 bp, Homo sapiens
tattagatggagacctcatactcccctcaaatgtttctcatcaagtacttctggcaacaggggaagagtagctgatgatcttttcttttaaatacaaatggcagaaaagtaaaactggctcacagaaatgttgtttgtgattttaactgcagtagcaatgattactttcatgtcaaataagcttttcagtggttgaagttaaatatatggatttcttaaaagtttagatagtgttaatttaccaaaaccaaattcacttaatccatagccaggcaattatttccccttagagtaatttagttccccttggagtaattccatttgggtatgtctgtcatgaatactgcttatctgtgattaggagcatcagaaatgtaggaaagaaagattgaagacactaggcagtggatttggggaaccctgagctaccaaatggcaaagcggacagatagaagctttcctatttggagttaagattctaggctttcctgattatggaaaaataatcatatatacaggtaaaataattatacatgaaaaaatggttaaaaattaatgaagatttcattaagaacttatgaagttgggctttccaccccccccccccccgcccaacccttgcagaaaaaggcaacacagacagggaagggagaggaaatgaagccttaggaatcctgggaactgctagagtgtcacaaaggttatgcatatctaattgattttgccctcagaagatattttgaacacaaggaaacatcaaccacattaaaaacctataagaggttttctgtggtgcatgaatacatgaaatccaatgaaatgtttaaaattccctgcattttgctcattgaaactcagactatttctcacttccagaattgatcaaaaagttcaaatcaacattagtttgtacttcttgattctgaaaaaaaaattctctttctaaaggatttatttatttttgagaaatgggttattaaatagctacagggaggtacatatctttaatagtagttttacctggatggttaatccgggagtagcatcttgaagtagcagttgatctactagtaatataagtatgagagcaatgtcactcttcagtgctacagggtaggttgcctcaaaaatccttatgacaagctgctttcttctggatatttaaaacagcaaatcaagattattcagcttatgaaaatacaggcaggtgtaaataaatgttatttctctggaggaaaaccttcttccactggagtaatagttccctaaactacacggaataatttctcacttaaggctgagccatggtgctgttaatagcactgcctcgcctggaatgtcttctgtttctgatctcttattgccagtagctgttttaacctatcagaaacagatcgggttatcattaaataggcttttaacttagttgttttaaatcttgaaatacactaagaaaaaaaagagaagagagtttttgcccaagtttaggcaacttaaaccaactggcttagggaaataaatgaagtagtctgctgttcagggaggatgcactatcatgattgaaggatgctgttcgacttcaccctacattagaaagttgttttattcacttcaaacatcattttaaacgttggctttggcatgggtgctttatttttaaacattttagtgtttaaacgataaaggaatcctgctcccatgggggttagaggtttcactgcagagacttgaaaggagaaaagctaattttttctcacgttcccacacttgtgacttttcatattttctatttactacagaaagcctctggttgttgaggttgaacattgggactccactcagggcctccctgagctcaagacaatgaggcgatgtgtctgtcttagccattcacagcacttgaatctatgtatggcagctaatgaaga

SEQ ID NO: 125222 - DNA, 1016 bp, Homo sapiens
ggagtaacttcagaaggtagtgtgacattatattgcttattttcatgtggaaatttttaacttttgctactttaacttttttttttttttgaagattgcatgaaatgcctaggaaggctccagagtgctttacattacaaactattgatttgtacaaagagagactgaaaactcaccatttagatgaaagataagtttcaaattgcagtaatgaaggactgagatagttaagccctattattgatttcattttgtgatatttttaaaaagaatgattcagtctgaagaaagttagcagtgtgtagagaaatttcatccagcagcttaagattgaagccttaatgactctgatgtatggaaacctggaatccagtggccagacgtgtggagcaggccatgccacttcaggacagtgtctgctgtttgaactgtggatactacaatgaaattccatatcagagagtttcattgagagggtgtgtagtttggtgtaggttacactggcagttttgtacatgcaaggcagaaaaataagacagctaaagaattctgtctgtgaacaagcaaagtttatagggtaagtggaccatggggtaatttttactggataatccttaattataaatgcttaaattctgaaagtattgcttttaaatctgcaattaagaatcaaggatcaaaagtttaaaagttgggaggataaaatatggtaagtagtacttcacaaaaaaatgttaaatacctttgggatagctgtagatgattttaacatgcaacaggttattggtctaatatttgtgatggtttaaaagtaaattactattcatggaacatacactctactcccttatactcccttaagccttactgtaaagacacacatgattctaagaaaccaaagctacacaagttctataagaataattaaagttttttcttctgaaaatgtgtgaaaacttttaattcctataagcctcagggaagcgagacaagggacacatctgatcagtcatgat

SEQ ID NO: 125223 - DNA, 1064 bp, Homo sapiens
tccatatcaactgcgcttcatgtatctttgtgaactctactgtgtctctgcaaaagttgacactgtaagactgtaaacacatatgaagtatcgaaacattttagaaatactgttattgaagatttttgggtggttgttctcttccaaagaaaaataatttcttgagaaattaatttattataattattaggatgggaggtttggattaacctttaagagggtatcagacttagcaaaatgaattctcaaaaaaatctctggctacagctgtctttaggactgaggggataaggaggcacccagctcgtggagcgagaggcacggcttgttttaacccacactgaccgcacaggggagctttaagccttttctgtacagcccagtcgcccctctcatattaatggcgctgcggcaaggacaacagtcacgttttagccaaatgtacgccccttttccgacaagaccaccaaatctagtcatctgaggtggcactaaaaatttgtgacagtttaaatttaagtagaagaacattgcaagattctcttgtatggcttgtgtggaacaggtcgtttttgcagctaaagaaaggattagatttgcaaataagccccaggctgcatttgctctattttattttattaagaaaatttaaaaaattattattttaaaaaagagatgggctctcgctatgttgaccaagctggtcttgagctcctggtctcaagaggtcttcctgcctcggcttctcaaagtgtttgggattacaggcgtgagccaccgcttctggtcagatcttataatatcactaaatataatttgtccccaagtttggaagagaaaggaggctatttcataggagtctttgagtttattaaaaaactgttatattattgaaaatttcaaatatatgtagaaaaaacagtacagtggacccgatgtatcattacttattcatacataccatacacaattacaaccaagaatgtctgggaagtattttgtcaactctaccctcttcaatgttattttgaactaaatctcagacatcacatcggaatactttg

SEQ ID NO: 125224 - DNA, 1142 bp, Homo sapiens
acaaaaagtacataatacagaagaaatgagaaagtgaattatggttatttgagtgccatgaacccattggtagacctttgtgaaaagaaagccaacaatcttactactataagataaaaccaggacacttaaggtaaaatactaatttgaatgaattgaaaaaggattatgtaaaagattttaaaaattcaatacagaaagcccccatattataagtatttgaacaataaatactattttcatgtttcatttgcaagtggcaagtgacaactgcattaccttactttcatgagatggtgacagaatattccatgccaattccatgacacaagttgtagttaaaaatacacttctatggctacattgcgctagatactttatcagttttcaataaagcaaaactagcaaagtcggtatgtattcaccacatttaaaaatttggaatttgagtcctggagcttaaatattaactcatgctaagtgtaggagctggtattaaaacttgatgtttctagccacagtctgatctctttctaccatgccaaatgtcgtatttgttgagaagagaatctcaatttacagccacagtgtttgttggggtggaatttggttattggcattcatgaacaccctgaaatgaatgcaaaattaagtgtatgggggtggttctctggggagagattgctttactaagtcagaatacattttctagtagaaaggctgtgatttgcttccagtttagtgtagagtggtatatgtctagtgttagaaatggaatttaagctttttgagcatctattaaggtcatgtagtacttgatactattaagtaccaagcattataatagtttggtgtgaaaagatgaatgtttgctctaaggaattcttaagtctaaagtggaagtaaacaactgaagtgcaattaaatgtactaaattctctaggatatgttgaaaatactatggggacagagtaaaggagtacttgttatggggccaggaagtcagagaggaagtgttgtttgagggtttggggtgtgaaatttcacaagatgtgtgagaaagggtactcaaaagtacatggaggaatgggattggaaaagtaccagaactgtgactatgaggacctgttcagggaccaggc

SEQ ID NO: 125225 - DNA, 1053 bp, Homo sapiens
agcaaagcaatgtcaaaattctacaaatcaaagaagggaaaattaaaggcatgttaatatttcagaggtaaggaaaactcatgtaggtttttattgtgtgctaacaaaattaggcctaaagaataaagggaggaaaaatcagctgaaccagatttgatccaggttctgttttccacctcctgcccccattaaatgcaaagcccagttccagttcaagctgcctacaacacttctccctttgttctgtttattctttccacgggccttaaaattaagttgttcctttttgtcccagttcttagagttctttgatgtagcaacccactgcattcctaaacattccaaaactcttgaaccatttccagcctgtggattttagcttaagtatcataatgtttctaatgttcagagcctctgccttttggttcattttgtatcttctaacccttaaaacattttaactccatttgttctacttcctcccagttctactgaaccatgaatttaaatttgcaaagcaattaatagcagtgaaacatggagatgcttaaaattcacatacacaggcaataaagaatactaatacagagccttataattatcaagtgctgataacactcaagcatccctgaaggaaaaaaaaaaaaacccaaccttgagataattaccttgcacagtctctcaggcatcaagtaggtgataagtgaacattgaagggttttcatctattgctcagttttcttcatagaatgaaactgccaactcttagtacttacctcacctttttttcaggagtctactcacccatgtaggcaagctctctgagccccccattgcaaagaagagcaagttgatgttcagcgaattgcccaagaacatataggagttgagagttcccttggattagaatcctgatttcctgaaaaccagtcctggtggttctgtatgaaagtcacattgcttcacacagttccttcaatttagagctcctccctccaccctgttctcaagaaacttatgaaactagcaatatctggctgccaattatctgat

SEQ ID NO: 125226 - DNA, 1046 bp, Homo sapiens
gattgtactaggcctatgaagagtggtaagccaaataggtctccatgggagatacattatgtaaataaataaacaatggtttgctggttcctgttggtgtctccacaagtaggtaaacatgtttaaaggaacccgggttcttagattttgttagactttttaaactcaaggatgagcataagtgcttgaaataaaatgctaatacttaagtgtcaaaactatggcttaaggctcttgttaattcattaatgtaatctcagtataataaatagcttcactataatgaaagttataattaagtatctgcactcatatgaaggcagtgcttaggtttttttttttaaattttttttaaggcaacttaggataaaatcattaatttggtttacagaacataaggagagtttataagcataatcattcttaccaacgtgaaagtatagtgggcaattccatgatttaaatggagctcagaagattctaagatttagttaagggcaaaagaaccttattttggagatttttctcagggtccccagttctgttccctaccatcactataacacccatatcttgttttaggtggcaaaagcattaaggagatgaaagatggtaactttggcttcctgtttcaagatgtttatcttggccttgtctaataatctctcttatgggctcttgatatattttgactttggcacactagaaagcggacatagtagcaaaaaggtctttgaagtcaagtctcagctatctcacttactggctgagtgactatgtgaggtaattatctcagggttggttggttggtttgttttttgagacaatctctctgtcacccagggggagtgcagtggcgtgatcttggctcactgcaacctcatcctcccaggctcaggtgatcaatccttttacctcagcctcccgagtggctgggactacaggcgcgtaccaccatgtttggtttatttttgtatttttagtagagacggggtttcaccatgttgcccagactggtctccaactcctcagctcaagcggttcac

SEQ ID NO: 125227 - DNA, 1161 bp, Homo sapiens
aggaagtcaacttgtaatgttcttatcttgttttccctaagatagattgaaagacaaagggaattcacttttccttggtgtcttatttaagatgctgattgtttgggtcacttcattatgttgacaaattccttatttgatatttagtatttggagttaggggaaatgagtatttcttttttcttttttacataactacaactgctgtgtttaagtaaagataccagattcaggttggctgaattctagttctagtttttctctaattcaaactcagtgttgcttgtcttcagtcttcctgttaaagtgaggtggaactagatggtgtatgatgacctcatgtagcctgaacatcctaagaaagttaaaatgtaagcattgctcctgtcagtggttatttgttcgttatattgcctcatgttaaaatacgtttttgtttattgttttaaagaacaacatagacgtttgtcctgaatgtggtcacctgaaacagaaacatgtcctttgtgcctactgctatgaaaaggtgtgcaaggagactgcagaaatcagacgacagatagggaagcaagaagggggcccttttaaggctcccaccatagagactgtggtgctgtacacgggagagacaccgtctgaacaagatcagggcaagaggatcattgaacgagacagaaagcgaccatcctggttcacccagaattgacaccaaagatgttaaaagggtaacttcacagtaaatcatttctcctgaaatagaggaagattctttatgttgttgtgcttgtttttaaatcatcagtatagtttaacacattctttctaagcagttttgtgtgggataatttgaagaatatattatgagtaaactccgaaaattttgtttatccaaaggctcaatggattatgtttctattatatacaaggttttaagtaaacataaaatttccagaacaaaaataaaaaatttaaaattcatagcaaaaattctgtgttttggctttggttttgtttgccagtgccttttcttagacaagaatacttaacacagataactccatttaagtaacacatggaaataggttattatttgcatttttggtattgttttttaagatggtaggtgtggcagtaagaatggtttttgttcttatttttctc

SEQ ID NO: 125228 - DNA, 1049 bp, Homo sapiens
tatttctcctccacagtaattggtaaatagtacttagttgaataaatgaatggttgaatgttcaaattaacacataaccagaaagttgatctgtcacaggatagtagaaaacaatgtgggatacagttcttcctccatatcccgtggcactgactcctacccccagtcatgacacattcacacacagaaactctcatgcctttataacattctgttctctattatgcagagcatttcagtgaagcttattcgaagtgttctttctctgtatttgtctcgtttaccaaaggcagttccttaatgctggcaagcacgtccttgtggaataccccatgacactgtcattggcggccgctcaggaactgtgggagctggctgagcagaaaggtaatgtatcttaccaagagtttctgcctccaggatttctgtgatatcatctttatgcctttaaaacttaaccccatttcagatatctcctcctcctggctacactggcactgtgggctcccaactgcctcctcacccccacactgtaaacacagatagtggagggcagaaggatgggtgggaatttgcaaacttttggtcaaagcttatcagcttattttactcactctaaggaaaaaatatgaattagttttcacctatgcttatgtcatgatattattttggctttattcatgtgatacttatattgctaaatgctgggatatcctaaaaatgctcaaatcagagaaactgattgtcttatttgcatagtttgtagtttttgttgtttctaaacaggaataaccatttattaaatatttagtatatgctaggaacttggaaactctgctaagcacttcatatgttattttgcttaattcttctagaatcccttggaggtatatattttctctagatgctgtatagaaaaatatggctcaaagaagttaatttgtgccaggtcacaaagctaataacatgactactaagtgggaggtagagattttaatcaaatcctacagggctcttaagttcacatttgttcccctaagccataccac

SEQ ID NO: 125229 - DNA, 1250 bp, Homo sapiens
tggatgtaggtgtgcagactcttagtggacattgtaagggctgcaggggatccacagttcacactgaggaacccactggtggaagccctgggcctagctcatgtccctaatctcaaaaatagctggtagcctcatctttctggcccatgggatgaccagtgtttttataaggcagccaagaaagcaggaaaggggctagatgtggtggcatcatcttgagttttgtaccctgactcaggcctccatcttcctttttgtaaaataaggataatgataatacctactaaactgaattggcttgggaattaatgacataacatactttgaactttaaagtgttatttttcttattccattagcagaagaaaagagaagaggctgggggtgaagggtgggattgtgctcagcgcttttggatgttgactctggagttatggcagggccctggggcaatgaggctgattcttctattatgcccttccctcttcaggtaacctggatggagaggaccatgccgcagagcgaacggtggaggatgttttccttcgcaagttcatgtggggtaccttcccaggctgcctggctgaccagctggttttaaagcgccggggtaaccagttggagatctgtgccgtggtcctgaggcagttgtctccacacaagtactacttcctcgtgggctacagtgaaactttgctgtcctacttttacaaatgtcctgtgcgactccacctccaaactgtgccctcaaaggttgtgtataagtacctctagaacaatccccttttttccatcaagctgtagcctgcagagaatggaaacgtgggaaaggaatggtatgtgggggaaatgcatcccctcagaggactgaggcatagtctctcatctgctattgaataaagaccttctatcttgtcttgcctctctgtttttactcttggatgagggaactagagtagcgtttctttgacgatgctccagggtttgcaggaaggctgacgccagttgtttgaagtttaattcatagctacagtttggtgagtacctgtgccaatcaatcactctgtcaagcactttgcctaaaagttctttgttttttctcaagatggaaagacccattcagtgttagtttttaagaatcaaaacaggctgggcacggtgactcacgcctgtaatcccagcactttgggaggccgagatgggcagatcacgaggttaggagattgagaccatcctggctaacaaggtga

SEQ ID NO: 125230 - DNA, 1128 bp, Homo sapiens
atttgaagatggatgcaaaactgactttttccatggcaggcagggactcaattgatcctccactgaacagaaattatttgcatgtctacagacaagaattattttgcattcctgtcagttatctgtaatttacagagctgtaaaatagctcagagtcaaggaaaggagtgaaaccgttgcagaatctgataaccctgaacagtgtgctctaaggaatgcagttttccactaaagcacaaatttttctctgtaaatatatacagacaaccctcgttattcatgaattccatattttcagattcttctactgactaaaatttatttgtaagccccaaatcaacactctgggcactctcaaggtcactctgagatgtgggtggagctgccaccccaggtgcatgtcccgagctgaggtcgacaaggctctgcctagtttcagctctcgtactgtaaaaggtgtcctttttatggtctagaatcttttttttttaatttgcattttcgtgctttttgttagtgattttgctgtttaaaatggccttgcaatgctgaagtgctatctagtgttcctaagcgggagaaggctgtgacgtgccttagggagaacatacatgtattagagaatctttcttcagtcatgagttgctcttggccctgaattcaatgttagtgaatctaccatatatattaaacaaggtgtctttaaacagaaacacaaaggaaactaggttatgtattgatttgttaacaaaaatacggtgcccagaggctgaaaggaatctaaccctgtatttcacctaggagcaatggttcagtattcactaagtcagtgttggcagtgactttatagaatataactattgtgaacaattgataaccaactgtgctttgtttagtacaggggttcttggatgtttgagatgcatctagagaacttacttaaaatacagatgcttgcctggcacggtggctcacgcctgtaatcccagcactttgggaggccgaggagggtggatcctgaggtcaggagttcaataccaacctggccaagatggtgaaaccccatctctactaaaaatacaaaaaaattagctgggcgtagtggcgggcgcctgcaatcccagctat

SEQ ID NO: 125231 - DNA, 1128 bp, Homo sapiens; identical to SEQ ID NO: 125230

SEQ ID NO: 125232 - DNA, 1007 bp, Homo sapiens
acagcctccggagacgcttctcaccctgagaccaaagcatgggggcaccacagacgtgggggagccgctctggcctgagcccctaggggtggaacacttcttgcgggagatgggacagttttatgaggctgagagctgtcttgtggaggcagggaggctgccggcaggccagaggcgttttgcccacttcccaggcttggcctcggagctgctgctgacagggctgcctctggagctaatcgatgggagcacgctgagcatgcccgtccgctgggtcacagggctcctgaaggagctgcacgtccgactggagagacggtcaaggctggtggttctgtcaaccgtcggggtgccaggcacgggcaagtccacactcctcaacaccatgtttgggctgcggtttgccacagggaagagctgcggtcctcgaggggccttcatgcagctcatcacagtggctgagggcttcagccaggacctgggctgtgaccacatcctggtgatagactccgggggcttgataggtggggccttgacgtcagctggggacagatttgagctggaggcttccttggccactctgctcatgggactgagcaatgtcaccgtgatcagtctagctgaaaccaaggacattccagcagctattctgcatgcatttctgaggttagaaaaaacggggcacatgcccaactaccagtttgtataccagaaccttcatgatgtatctgttcccggccctaggcccagagacaagagacagctcctggatccacctggtgacctgagcagggctgcagcccagatggagaaacagggcgacggcttccgggcactggcaggcctggccttctgcgaccctgagaagcagcacatctggcacatcccaggcctgtggcacggagcacctcccatggccgcagtgagcttggcctacagtgaagccatatttgaattgaagagatgcctactcgaaaacatcaggaacggcttgtcgaaccaaaaca

SEQ ID NO: 125233 - DNA, 1091 bp, Homo sapiens
caccagctcttccctggcccctagctcagaaacacagggtgagcacttatgtcttcatttctttccacagtggagagaagcaggcttcaagaaatgctgtcacttttgggcctagagacgtaccaggtccagaaactcagcctccaggactctctgcagatcagttttgacagtatgaagaactgggcccctcaggttcccaaagacttgccctggaatttcctcaggaagttgcaggccctcaatgctgatgccaggaataccactatggtgctggacgtgctcccagacgccaggcctgtggagaaggagagccagatggaagaggagatcatctactgggacccagctgatgaccttgctgccgacatttattccttttctgagctgcccacccctgatacgccagtgaaccccttagaccttctctgtgccctgctgctctcctcagacagtttcctgcaacaagaaatagcgttgaaaatggccctctgccagtttgcactcccactcgtgttgcctgactcggagaaccactaccatacatttctgctgtgggccatgcggggcattgtgaggacatggtggtcccagcccccaaggggcatggggagcttccgggaagacagcgtggtcttgtccagggcgcccgccttcgccttcgtgcgcatggacgtcagtagcaactccaagtcccagcttctcaacgccgtcctcagcccgggccacaggcagtgggactgcttctggcatcgggacctcaacttgggcaccaatgcccgggagatttcggatgggttggtagaaatttcctggttttttcccagcggaagggaggacttggacattttcccagaacctgtggcctttctgaacctgagaggtgacatcgggtctcactggctgcagtttaagctcttgacagaaatctcctccgctgtgtttatattgactgacaatatcagtaagaaggaatacaaattgctgtactccatgaaggagtcaaccacaaaatactacttcatcctgagtccctaccgtgggaagcgcaacacaaacctgagatttctgaataagttaattcctgtgct

SEQ ID NO: 125234 - DNA, 1050 bp, Homo sapiens
cgtccatgcgcacgaaggcgaaggcgggcgccctggacaagaccacgctgtcttcccggaagctccccatgccccttgggggctgggaccaccatgtcctcacaatgccccgcatggcccacagcagaaatgtatggtagtggttctccgagtcaggcaacacgagtgggagtgcaaactggcagagggccattttcaacgctatttcttgttgcaggaaactgtctgaggagagcagcagggcacagagaaggtctaaggggttcactggcgtatcaggggtgggcagctcagaaaaggaataaatgtcggcagcaaggtcatcagctgggtcccagtagatgatctcctcttccatctggctctccttctccacaggcctggcgtctgggagcacgtccagcaccatagtggtattcctggcatcagcattgagggcctgcaacttcctgaggaaattccagggcaagtctttgggaacctgaggggcccagttcttcatactgtcaaaactgatctgcagagagtcctggaggctgagtttctggacctggtacgtctctaggcccaaaagtgacagcatttcttgaagcctgcttctctccactgtggaaagaaatgaagacataagtgctcaccctgtgtttctgagctaggggccagggaagagctggtgaaggagagcccagcaggatggggagagtgacgacccccttcagagagcagagtgcaggcacaggaggctcagggtgtgctcaaggctgacctgagatcaaggcagggctggaacccggacatcaaggtacaataggtaccaacctaaccacagatatatgtgacattaaacaaaagaaagaacagaaataaataagctacatttaacaactggaagagttcttgcaaaagccatatttctggtctttctagaaacctgtaagatctaacactgagctcaaaattaattggctacagtgagcagcacatgactcctacaagctgaatgcaggcctcacctccccactgtgttgcttccgtgggctactcagagtc

SEQ ID NO: 125235 - DNA, 1020 bp, Homo sapiens
ctaaatcttaattatttccttaggatagaagtggaattactgggcaaagggtatgtatatttttctgtctttctgaatgactgtatttgtgctctggccagcagttttggagagtgctggttttctagaccagtgtttctcaactgtgggtgcatatcagaatcattgagggcacttttaaaagcagtgatacccaggaccagctcccagagattctggtttcatggatctggggtgtgacccagggtttatagtttttaaaagctctccaagagattttatatgcggccagtttgataggtgaaagtggtattccatttttttaattataattttcttctgaaattgtttcaggcattcagatttgggagaagtagccccagaaataaaagcatcagagagacgaacagctgtggccattgcaggtaaagttggatgaattggatgtgggcccactctggagctgaagtacttctcctgtccccttgggattctgggttccagcccctcctggacttgggattgtgcatctcaaaaataaataagtttaaggcttttatttttccttttacaagaagattccatctaagggtcttttaagcattcctcatatattcaaaatagtgttttttgtttgttttttttatgggcaacactttattctagaaaatggagtaagtgttcccaggattcagttaaacaggtgattatgacacaatttaacagaaacacattaccccaattttagcataactgccattgtaggtcatagttaaggtgactgtatagtttatcttctaaagtgggcacttctgagagtgaaagggatgtaatgttgggaaaacaggtataaattgggattgtcccagagcacactggggcttgtagtcttcctggttatggtccatacaggctggtttttctttctctgaggatttgggggtggggctgtaacgccaccctttgtaaattcacctttaaggtatggtggccacactccagatatctttagctctctta

SEQ ID NO: 125236 - DNA, 1461 bp, Homo sapiens
cggtctttaaagatagaaacttcatccctgacctctgtattcccttagaaagattccgcttttttctttgatccagtgggtaacagcaagtgagtaagttgatctccataagtaactctcactcctcagcgctttgtttcagaaaatatggtccctttctggccaggagaaatggagtaagacctgccctagaagggaggagctcggacacagaatgggtggaaggacctgtggggtccgagtggggctgtggagaatgcttagctatatagaggtgggactcatggtagtggatgaggtgactgagtgattgaaacccaggaatgtgtggctaattggggtagaggagaagccatcactggacgacaaacccaaggccagttgttcctctgtggactgagtccttgcctgaggaaggagggcacacgcaccttggcacctgcccctcttcttcccccctcctcctccctctccaccatcttctcctcccccttcccttcccctcctcctccctctcctcctcccttctctgttctgtctccgttcctcccctccactccttttctttcctctcgcctgctcctctctcctccccagtgacctcctcaggtcctttccccagcccactgttcctttaaacattcagctggagacctcatccaccctcctggctgctcctctcaggaacatctcggctcctgggaattctcaaggactcatctaccttggaagctgaaagcacccccattaacatccattggctgtcaaaagtacctgacttgacttttaaccttttgtctttgctgtccaggaagattctctcccaccactgtcattttatgggaagggaaaggctcagctttcccactggaggcccggcctggtctgaatgggccaggccacagccctagagctcacaggccctctacactgggtgaaagatgggtcctctggccacactgggggaaggggaaagggggccccgtaaaccacactgagaaggaagcattaagaactcaagatgtatctttgctcttgggagaagtccagcaggacccttatcttgctcagtagctgctgtgacttctgcagaagggacctagctttgccagcaggactgagactttgtattggctctctgctcacggatgtgggattgcccaaaaagccagcagccacccagagtgttccctacgctggacgtacgggagaactagcagggatagaaaaggccagaagtgtccctggttctttaggacagctctccaaacttcactcacctgcccatgggtggcagagtgcaccaggacttcatgggatgcaacagccatgccgttgacctctccatggggatggactgaagagcccaccccagctcaggggagagcctctcatccggaaccacgagtgacagggactttccagtcctagggaatgttcttttaaatttagatcctgccc

SEQ ID NO: 125237 - DNA, 1461 bp, Homo sapiens; identical to SEQ ID NO: 125236

SEQ ID NO: 125238 - DNA, 1461 bp, Homo sapiens; identical to SEQ ID NO: 125236

SEQ ID NO: 125239 - DNA, 1461 bp, Homo sapiens; identical to SEQ ID NO: 125236

SEQ ID NO: 125240 - DNA, 1068 bp, Homo sapiens
tggtgatctggactgggctagtcatagaggagtctccaaattgatgtttttattaagtgacaatctccatgagttgggaaggaaagaagaaacgctgaccatttttgaggaccttatgaatatgccaggcattgtgctaaataaaggaaatggcaatcaaaggatatgaaggcatcaaaggaaaagatgtgtttgagaaatgccccatggcccagtgtgtttggagctaagtggagacaagttcagaggatgagactgggaccagatgatgggacctggtcccgtttgtggactcactgcccaccactcgctgaaggtaaatgaaactatttgcattggtggagctctcagagaatcaatgtgacagcagtatagagacggcagagagggcagaagacagggagcagctcatgctgccatctcccctctttcgaacaggcctcactcaacagctcatctcttgtctttgccccttgcttggctgtctcacaactgcccagatcttccttgtctgccagctcctctgcctgctctttcactgttggggtttccttgggctctataatccatctccgctagtcccaacacatgttctctgcatggtcacatctgttttagtggctttaactgttgtctgaatcagaggttcttaacttaggctccatgattcatggatgggcttctgggggtccctttgttctctgaaattgtatgcagcattgggagtagtgtgtaattttcctgggcacaaggtctgtagctttcaacagattttcaaaggggctcttatccttaacaatgttacaactattcatcctaaatttccagattttcatttccaactacactagatacagctcctcaagtttctttaacctgggttagctgtgtgaagtctatatttttcagattgttactgatggataatttgaaaaacaataaataaagatcaagtataattggctttacatagaccaccgatcttaaaatcttaaaaagattttaaatagtcacttattcttatcagagtgacagctttacagaaacaactagcatccctcctccctc

SEQ ID NO: 125241 - DNA, 1068 bp, Homo sapiens; identical to SEQ ID NO: 125240

SEQ ID NO: 125242 - DNA, 1068 bp, Homo sapiens; identical to SEQ ID NO: 125240

SEQ ID NO: 125243 - DNA, 1068 bp, Homo sapiens; identical to SEQ ID NO: 125240

SEQ ID NO: 125244 - DNA, 1044 bp, Homo sapiens
ggtccgggtacgcgggcctaggggatccggggagggcgcgaggcccggaggtgcccggggcgcggcgggagcgagggcccggcgagcggctggggaaccggggtgcgggtcctcgccgcggcccggggcaacccgcggaggcctggaaatgcttcgctccggcgcctggtatcgatgttcctgggttttaaacttgctcgcgttgggagtggacgcttgtttgccgcgtcgttgagacgtacccagaatgtcaggatccgggcagatgcagaccctttgctgacagccggagagccgctccgggatctccttggtcggggccattgcctaccggcctgccttggggtggctgcgcttattttgatattacctcttttcaacttttttgatttaaatgttattccttttaggaaatgatggcgacacatatagtttgtaatttttgagaaaaaattctcacttggcaaactaaaacctcagtaattcattatttttttgttttttgttttgataattttactagtactgaaatttgggaatgacagtccaacactttcattttacaaagaaagaaattaggctcaaggtcatcgctttagttgttaaaattcttctttgactgttacccatcattcagagggtcttggatctagtggctgtgatagccattcagaacagttcccaaagagctttacaggtgtgtgttcagtggtaggggtggggaggggacggtgctaaggggccgggatcatggatttcgtgcctcctccagatgaggcctgagccatgccctggggtgatttggctcagtacagtgggcctgaatgaagcaagctgaatttgaaccccgcctgctgtctttctaggctttggggcagtggtcatttccgggaccaggccttttcattgccagctgactacccagcactttgagctcatgaatagagtaagcagggaaccatccctgggaaggccaggctgattgacctaggggttcaaggtcctgcagcattcctttcccccttgtcaggaaagggtgggcag

SEQ ID NO: 125245 - DNA, 1044 bp, Homo sapiens; identical to SEQ ID NO: 125244

SEQ ID NO: 125246 - DNA, 1044 bp, Homo sapiens; identical to SEQ ID NO: 125244

SEQ ID NO: 125247 - DNA, 1044 bp, Homo sapiens; identical to SEQ ID NO: 125244

SEQ ID NO: 125248 - DNA, 1018 bp, Homo sapiens
tcagcagcataacccactgacctccaccctcatcgtcacagccattaaggtagttactcagcagatactatgtggcagattcctgcacactgcggaaaaatatctggaccatgtcacttccgtgtctgtaactctacagtggcttcctgttgcatgttgaataaagcctagactccttgccctgctgatgccctgcatgacccagaacctaccacccctttcatttaccacactgtggccacacctgtttgtcaccactctggccgtctttctcttcctcaaacttacaagctggttcctcttcagagtccttgctctgctgcttcctctgcatggagcacactttttccacatcgtcccaggtggctccccagccttcacttcttggccccgaggttgccttctcagagaggccttccttgattcctagctccttgtttgtaggcactttttcccatctttctgtttgacttccttcagacacatgccagacacaaaatatgctggaaatccttatggattttcttgtcacctttatctcttactagaaggggtggggtgggctctgtctctgtcctcggtgcttgaggcacggttgttacatgtggcagatgcttagatgaaggatggaccaagtcatacagaaaaagtggtagagatatcagaggaagaagaggtggtctctagtttggtgggtcataagaggtttcacacacacagtgctggcattggggagggcagatagagtggggagcaaccatgacatcagctctccatcttggatctgtctcccgcccctgcttactccgtatcttggcatggtttgttctcacctggttcatgtgtcaccttcagcacctgcttcactctctaatagtacgttagtgttaggtgtgtgttttttcttccgttagaaagtaagttccatgggcaggaccttttagggattgttcatagctgcattcctgtaactaataagcagtaggctctcagtacttattttcaaaggcactattga

SEQ ID NO: 125249 - DNA, 1034 bp, Homo sapiens
taccatgctgttttgcttactgtagttttgtagtttaatttgaaatcaggtagcatgaagcctccagctttgtactttttgcttcagattgctttagctattcagggtcttttgtggcttccagatggcatttaaaattagttttcattgattagaaggaaggcctttgatgcaaattatgcctgggctgtctattgatacacagcagggaacagctacagaaggaaccactggatagcacagtggaggtcaagggtctcacgtgaactgggacaagaatgaggggtttgctccaagttggtttgtttgagcccttgaggggaactcgtgcctcagttttcagcagccagacaggtgccttctagtttcctgattccagtcctgtgtggtatagtagtggcccgtgctgtatggactgacaggagtttggcccatctcctgggcttgcaaagcccttctttcaagtgctgctcctgctgcagggggcccatgtgaccatcaacgcacgggccgaggaggatgtggagcctgagtgcatcatggagaaggtggccaaggcttcaggtgccaactacagctttcacaaggagagtggccgcttccaggacgtgggaccccaggccccagtggtgagtgctgcttgcccatcgccagcccttttgttgctcagggcctgaggcagggggccaggaatatgcacttcccagcacccgggctggctgggcccatgcctgcttagtttctgcagatggtaacccctgagctgtggtgattgcccactgaccagatgagcaggaatagccctctgaccttgcctaggggttggactagctgttctggagccttcctctggagcccagcctgtgtggtcagagtggaggctctgcagcatgcatggctatgatagtctggctgccctcaaggtcatggcactggaacatcttgggctgcccctggaggtagccaccgtggaggaactaaaggaggcatcaaggcggagcctgaaaccagagcaggccccttggagtcacggg

SEQ ID NO: 125250 - DNA, 1140 bp, Homo sapiens
gtgccagtcactctgggcgaggccttactgcgcccatgcatcccgggcccatttgtcagcccttgctcttcagtgggagcccagctgcaagcccagagtctggccactccatagtcctgcacccctcttttgattggtctttcctttgcccagagaggggctccagagggagataggtggtgaagctcatgcagggattctgaggacctgatgggggagggccctgcgaggggtccaagcctacatcaagaggaattcagtaccagggggagctccccaccaccccggaaaagggagaggcccagagatggaggtggcttgtccagggccccacagtaagttgggatttggagccagatgctctaagcccagcccttccgtttcctagctgggtgtcccttggcagatgccacctttggagcctgccccacctcgggacacagcgagcttcgagtgcagtcagcccctgtggagtgtgtcccagttacacagaaatggggaaaatttcacaaaactaaaaaatggcttctcagccctcctttttcagtgaatgatgtggagccccacgcctagaaagcctggtccatgggcgagagactttgctgagatgagaagccagctggggctgctgcccacccaccctgcccaggctcctgaaggtggcctcaccttccaggtgcttgacaatgccccgcaggctgttcccgtgggctgcaatgagcactcgcttgccggccttgatctggggaacaatctcctcgttccagaagggcagggcccgggcaatggtgtccttgaggctctcgcaggtggggagttccccgggcttcaggcctgcgtaccgacgctcctgggggacacaggcacgctgctttccctcccaagccagtgggcccccacccgactccccactctgcagcttcccagaggccttcccagcaaaggcagcccaccttgctaatggagttgtagtaggggtgcttctcgtccatcgggggcggcgggatgtcgaaggagcgcctccagatcttcacctgctcctccccgtgcttggcggccgtttctgccttgttgaggcctgtgaggcccccgtaatgccgctcattgaggcgccaagtgcgcaccacaggcagccacatc

SEQ ID NO: 125251 - DNA, 1078 bp, Homo sapiens
gtggacttcctcatcacccaccccaaggagggtcaggaggcggggctgctgcctagagtgatgtgccgcctgcaggaccaggtgagggcctccctgctccccaagagccaccgctggccaatgccactgcctcctgctctctccacaccaccggatggtctcagccacgcccgcctctccccacagggcctcatcctgtaccaccagcaccagcacagctgctgtgagtcccctacccgcctggcccaacagagccacatggacgcttttgagagaagtttctgcattttccgcctaccacaacctccaggggctgctgtggggggatccacgaggccctgcccatcctggaaggccgtgagagtggacttggtagttgcacccgtcagccagttccctttcgccctgctcggttggactggctccaaggtaggcagtgtgccgctgggccgcctgggggtggggctgggccagccctgctgaggacaatcccttccctacagcttttccagcgggagctgcgccgcttcagccggaaggagaagggcctgtggctgaacagccatgggctgtttgacccggagcaggtacattgttggggactggggacagcaaacagcacccatagtccgctccctgacccacaatctgaaatggccccagacccctccagcctgaaacccataggacccgaatctgggtctccacacacagttcctggccctcaagagcacaccccacctcggcgctgggctcttccccaccctcagtcttcctgcagggaagcagcagtggcaagactcctaggtcacggaagtcctgcttctgttgcagaagacatttttccaagcggcttcagaggaagacatcttcagacacctgggccttgagtaccttcctccagagcagagaaacgcctgagcctgcctgtgtcccccacttccactcaggaaattgggctgcccccaacctggccactgaatgtctccaggcagatatgctgccccctgacccccaccttcacccctccccgccaaggcctggctcttccggaggtcaattgtgcctgcaggatcag

SEQ ID NO: 125252 - DNA, 1033 bp, Homo sapiens
ccagccctgccaactctgctcctaaatccacccttttgattgttaactcctcattgttttttgctgttggctaaggaggagaaccacagaaatttgttccaccttctgttaggtgggagaggcatggtttttccagtgacttaggagcccctcgtgctgatgtgttagggtgactgttttgattatgttggaatcacaggctagagctgtgtaagtccctttcatagaggagaggagaggggtgtgcgtgggtttgttcccagagacggcaggctgggtagtcaggctccaggtttgaatccttgccctgtggtctacggcaggttgcgagtggggacggcgcctgcctggtgcatggtgctccatgggccacaccgtcccggagcgggtgatcatccgagtctagccatgagagctctgcccaaccgggctacgctccttccccacagctcttcacccagatcttcggggtcggtgtgaagactgctgaccggtggtaccgggaaggactgcgaaccttagatgacctccgagagcagccccagaaactaacccaacagcagaaagcgggtgagccctccagagaggctgggccctgggcttccctaaactgcaccctggatccctcagcatcaactccctagagggaagggagcagtctggtgcagagggtttggtggcagctttgtgtggtgggcttcctggggtctccacccagtgcagtcaggatctatcaaagccttttctcagtggacgatgctgaccacagcaacttccatgatatgccaggggcttgtgtctgcctactggttagactttgaccagtgaccagggacagcctgggccttgggcacactgcccagtgtggtgcttggtacatggaggcctgcagaggtggcactgagcagcagaaagaacatcagctttcaagtttgttaggcctgggtttgagtcttatctaccatttgccaggtaggtgaccattgcccaagaaataacctctctgagtctgttacattttctgtaaaatgga

SEQ ID NO: 125253 - DNA, 1008 bp, Homo sapiens
atttttaaatctttctcgtaaagatggggtcttggtaatgttgcctaagctggtctcaaacccctatgctcaaatgattctcctgccttggtccccaaaatgctgggattataggcatgagccacttcgctctgccttgactgtttttgatggaatattctcaagtagattacatgctgtggcatcttaaacagagcactgtgaaccaaatgtacccttgggtgctgccactgagcatgctgggcttgcccttgcccgccttctgcaggaccttatgtgttattttctcagtgttgtcagcctgcctgtttccatggccaccttccctctgtttctgctcactcctggtctgatagggaaatgccgtctgagttcttttggatgcctcgggtgtgcctgctttgacacccttctgccaactggctttgtggctggaggtgtcacagcggtggccacatggataactgtcagtgaagtgtggcttcctgggtggatggggccttgggaggtcacacagaatgttgtcaggattgacagggagggcttcgaagaggagagacttgagcagtgtgtgcagggcaaatgggctcaaatatgcagggaagggggcaaggggcactggcagggacaggggaccagatgagtggggccaccgtggtgagtgtgggagtgaggggcctgaagatgatgaaatccccttgaagtggtgtgaggttagtgagtactttcactgtcagcctcagccccagccctgaaggcatctaggctggcagaaaattacattagtaatgagaagtttattaacaatataattgggttaatctcatcatttttagtcaggattctttgggttgcaagtgacagtgacccaccccacaccgttggttcacaaaataaaggaaaggagggccagcagagcccaggatggggagggctgtggccggtctgcaggacaactgggctcagcgacctgggtatcaccaggccactcctcctcccctctgcccc

SEQ ID NO: 125254 - DNA, 1078 bp, Homo sapiens
cctggtgagtggccgtcatccgcctggccttggggccagctgccctggctggttggactgagggcttccccagagtaggcctgggtggggttgtcaggcagctaccagcgctttcccctcagagccggaggaggagaccgagcaacccacactggactacaatgaccagatcgagagggaggactatgaggactgtgagtagggtcctgccagccccacctgggtcggacccctggcctgggggatgtgccaatgggcccatcccagccttgggccccactctgagccagcctccccctcagttgagtacattcggcgccagaagcaacccaggccacccccaagcagaaggaggaggcccgagcgggtctggccagagccccctgaggagaaggccccggccccagccccggaggagaggattggtaggatggggggcaggagaggaggtgccatggccacggcgctctggccccctcctaacctccccgcctccccagagcctcctgtgaagcctctgctgcccccgctgccccctgactatggtgatggttacgtgatccccaactacgatgacagtgagtacccagcaccccagagtctgagggacataggcaggtgggggtcggggctggggtgtggtcaggagccagctggggcaactcacccaccttgcaaccccacctgtgcccgtggttacctcgctgtccctgctgtccctgcgtgcccaccccagccactgccctgtctcctctgccctcaggctggtctttccttggccgcttccctggttcctgcttggctgtgacccccacaggggtgtccctaggcacacactctgccctgtcacccatgtgggttccagccctcccagtcctgtgctctaactggcttcccgctggctcgtggccactgccccactctcttcagggagcccgagggcttttgcctccctgttgctcatgcccctgcgtccctggagccctcaggttccctttcctcctgggtggcagcccgtgcatcgccatttccctgcccccaggtccccatcagtgcctccaatgtctccccatctcac

SEQ ID NO: 125255 - DNA, 1882 bp, Homo sapiens
cctttcctactcagattcttgggacccagaagggaggggccccgggagcccaggatagcctcgcttggctgccccagccctggaccccaggctggcctgcttcaggagggtggcagctccccagggcccctagtggctgggcgtggtagggggaggacctggggccttggtggggagtgaggacctcaggtaccttcacaggtatccctgcagggccattgtgcagacggtccccatctggatgacatctgtggctgcgccctgggggagctctacctgtgatttcacgtgtgtcccctgagagctgggcatggtcagcccgttctccagatggggcagctgaggcccagggaggggaagcacaggctgggattggaaacagctcctggcctggctttgagtcgattccaggtgggctggtgcagggcaccagggagccaccagctgaccagagctgccctctgactgtgcccccgatgtgccgggagtgggctctgggctccttggttctgggtttggtggagggaaggatggagctagtgagccaccattctggggtacgcgtcctcagagtgtccccccattgggatggagtcacaccgtattgaggacaaccagatccgagcctcctccatgctgcgccacggcctgggggcacagcgcggccggctcaacatgcaggtgggcattgggatgggcccatctcccaactgggataagggactcctccgcccatgctcagcctcccctgccccctggacagaccggtgccactgaggacgactactatgatggtgcgtggtgtgccgaggacgatgccaggacccagtggatagaggtggacaccaggaggactacccggttcacaggcgtcatcacccagggcagagactccagcatccagtgcgtggccaggctcatggatagttggcagaggggagtggctacataggcatggctctgtgtcccattaaggagattccagtgggcccttctttggcccagccaaagaaggccaaaaagatcagtgagggactcaccctgcccatccccactcctcagcctggtcagtcagcccctgtgtcctgatagcacatgagtttagggacagatcacctgcccatggctatgtgacgggcataggacccaggctcaacacctgggccgtgcagcaccaccctgctagctcttaaattcttggggctcggaagagggaggctcaggccacctgagggcctgggagggggaagacccttgctctgaccactgtccactccacagtgacgattttgtgaccaccttcttcgtgggcttcagcaatgacagccagacatgggtgatgtacaccaacggctatgaggaaatggtgggcaccatgcccaggctcttggctctgctcccattgtctgggcgaggggtgggctctcagaggggctggcagtactgctctgaggcctgcctctccccagacctttcatgggaacgtggacaaggacacacccgtgctgagtgagctcccagagccggtggtggctcgtttcatccgcatctacccactcacctggaatggcagcctgtgcatgcgcctggaggtgctggggtgctctgtggcccgtgagtgtggagggctggcaggggctctgagtggaggtggggtgctagggtgggccagccggcacccagctaaagacaaccccgcctcccttgcagctgtctacagctactacgcacagaatgaggtggtggccaccgatgacctggatttccggcaccacagctacaaggacatgcgccaggttgggagcatatatcctggggctgggggtgggacctgtctgtggctgacgggagtgtgtgcctggtgcttctgtcactgggccca

SEQ ID NO: 125256 - DNA, 1018 bp, Homo sapiens
caaaactgacccgttcatcttcccagagtgcccgcatgtctacttttgtggcaacacccccagctttggctccaaaatcatccgaggtaatttttgtcttctgggggcccaggctgatttgctgatttgctctcacctggggacaaggttcacagagaagaaaacctgcattgtggagtccccctggcccttgtgggatggacagctgaggtcttctgcacagctgccatttcactgtgggagccaagctgcctcgccagctgggcagggactggaacggctcccagcctgtgtgcctctcaaggctaatctctggtctcctattgtcactgccccactgtgtgccaatggggactcctgtttatttctggcagcttctctttgaggcaggacttacttggaacctacagtgggtcctatgtgacttctttgcaggtcctgaggaccagacagtgctgttggtgactgtccctgacttcagtgccacgcagaccgcctgccttgtgaacctgcgcagcctggcctgccagcccatcagcttctcgggcttcggggcagaggacgatgacctgggaggcctggggctgggcccctgactcaaaaaagtggttttgaccagagaggcccagatggaggctgttcattccctgcagtgtcggcattgtaaataaagcctgagcacttgctgatgcgagccttgagccctgggcactctggctatgggactcctgcaggggtgcccacagtgaccatagcccatgcacccaccagccggtctccctcctccccatccctgacacctcagaatgtgagcagtccgtgccatgagcttgttttattggagtgaccttggctccctccctctgcccctactccaacactgcagcaaccccatctcttacgagactggcaggtggagcaggagcctctacacagcctctggctcttaggtcccagtcatgtttgcaccccctcaaaggggcaggaccagcccttcctttcagtgtccataccaggg

SEQ ID NO: 125257 - DNA, 1035 bp, Homo sapiens
ccttgtacttgatgttctctcctggcaaggccagggccctgtgattggcctctcatggagtgctgggcagggcctccatggcctctgtcgggcgggggggctacttcatctctgagtctgtacccctcgtgtcccaggcagtggagtgggagtgaagaagctgtgtgaactgcagcctgaggagaagtgctgtgtggtgggcactctgttcaaggccatgccgctgcagccctccatcctgcgggaggtcagcgaggaggtgaggcagggtgctacacagtggggccgccaggcagacctggcctcccactagaacacctccctggaggtggggttgtggggaagcaggttcagagacaatggactccagaggggtgggggctgcggtgccagctcactaacaccagagctttggtgggctctggccccaagattatacctcctgtctctgcattccagcacaacctgctcccccagcctcctcggagtaaatacatacacccagatgacgagctggtcttggaagatgaactgcagcgtatcaaactaaaaggcaccattgacgtgtcaaagctggttacgggtagggagcccaatgagaggatgtgggtgatgcaggtgaagagcccagcggtggtgtgttagggatggtgtgagtggggagcctggggggagtgggggggtgtggcctgggcacacgtgtgttcttgaggaggtaggtgaggctccaggcggtcggaggccatcagattgggtgagacctggctgggagatgggtctccccacctccatccaagggcagtgactccaggaagcaggcatgcatcctggagtcctaggtgagaattcaccaatgtggttgtggagaactggcttgttttgcccgttggggtgactggaaggagtggtagcacctggggctccctgctcaggcctgatgccactgctccccagggactgtcctggctgtgtttggctccgtgagagacgacgggaagtttctggtggaggactattgctttgctgaccttgctc

SEQ ID NO: 125258 - DNA, 1043 bp, Homo sapiens
gcagactcccatttgagcaccctgctttgatggccctggttgccctttatatcacatcctcagttggaggctccttgtcagcacctcttcctctggctgtaccatctcctgtgactgttctgttctggatagatctctctgttgagcccatgatggaccttctccctttcaccctttgtatgagccatttcccacttctttgtcttggatgagcagttttccttttgttccatccagagtgtcttgcgctcgttctgtggacgagccccagcagacctgagccagcactcactatgggtgtatgtggcattgcgagggtctgtcatgtggacacagccataaatggttgtgcatttctgcctgacagtttttgcacactattcttctagtgcagttcttataaatgtcctgcttcttggaagttattgggaccttgagagcaggacctgcctcttgtttttccattgcattccaaattatgcattcaccaaaatgtaaaattgactgtatcctgtggaaaaaccccccagaaaattcacctgttttggtgagccaggtagcaaacagatggagctttcatggtgatgataattcataattatcagtatttgtgctcatttatagagtgtttgttactagggatgggagggaaaggaatgaaaccaagaagcaatgtctacttaatgtataagcccagaggtcactttccactgtgttggggacaaggtgataagaagtaggcaataaatacattttgtgtttcttagcgttcaggaattcatgaccttcacgagtcaactgattgtggagcgctcatcgaaaggcactagagcttctgtcaaagaacaaggtaagaagaccctccaacttctgtgcgtgtgctggcctggctgccatgcctcacctcacatagcacccagctttctcctttctactgggaccctactcctcctctagcttgttctctctttcccacctcttccttttcctatttatgcagaattctgtgcccactgttgaagtctgagcttcccagataaaat

SEQ ID NO: 125259 - DNA, 1034 bp, Homo sapiens
ctccagcctctggtggctgctggccatccttggcattccttggattagaggtgcatcacttcaggctctgcctctgccgtcacgtgaccttctgtgtgtgtgtttccgtttcttaccaggacatcagtcatggaattagatgccaccctaatccagtattacctcttcctaactagttacatctgccaagaccctatttctaaatatggtcacattcagagattctggggatgttaatttctgggatgcggttggggttggggggtgcggtgtgggtcactctccaacccagtacaatcatatagtgcccagctactcttttttccaaagctccatgcacacgcacatgtgcgtgcacacacacacacacacacaaatgtatatataaatgtgtgtgtatatatatatatgagttttcctggagtgctggttatctaagcctgtgctggggacagctttttgggaagtctgctacatcccagttagatcttctagatttcacgggaatgtcaccaggttctgttccatccacttggacagtaactattcttggaccgagtctcgacacctagaggtgaagtttgtgtgtgttggagaggaacccaggtaaggcactttcccccatgactgaaatatgaggggctcatgtcagggcacgtactgaacagagctggattctcttttcttttttgtccagcacaacaccatggagtctctgttagagcgaggtgagaagctagatgacttggtgtccaaatccgaggtgctgggaacacagtctaaagccttctataaaactgtgagtacccagcacctgctgcctcctgggtgttctctctagagagcagtcgcagcttgctgcttctggcactctccactatgaacgggtctttcttagactgttgaatcatggtggatgattccttgtgcggcaagagcctaaggtgagcgcctcaggcccaggtggttggaggcagttcacttgggcgccgttggagtcgatgcgggccgaggccttgttccactcctgcctc

SEQ ID NO: 125260 - DNA, 1065 bp, Homo sapiens
gggtggggagtccctgatgctagggctggggtgggtggagtttgaagactcttgggaaagcctctcctggggccactgttgggggtgggagtgagcccaccacagaggccacaggcaggcccccacttcaggcccaaggcctggggcggggggaacagtcactgggtctcagattctgagactgttgtttagcttacctttctgctaggattggcttcccgcagagggcagggcccatcctaagcagcttccaagtcccacaaaggtggcttgtgggaggatttggaaggagctgcattgtgggcggggagtgtgtgggttgggttcgtaccagcaagtagactaggaactgagcccaggaaagggggatgttttcctggtgtttggatggtcagctgggagtgtccatcatcaggggaagatcaaacacaggtgcactcagctgcccagggcctctgggacacttgccttgacttgcaacttgccttgaacatcacgatcaaagcagcaggtgctgtggtctctcaaaattgatttttatttgactctgtggctctaagactgccttgaaccgcctgaggcctatgcatctgaacaagtgggtctctcccttgagcaccaggagtgggtgccagccggccccgaggattcccagcaccccacctatggtcttgccagcataggcttgctagttccttcttggtcagaggtagctgcagaggggggaggccaagggtttggtctaagctgtgccctgccacctggcaggaggcccactcactgcccaagtcatggcaacaggctggagcagcccaggagatgggcctaaaatgttctggatcccttgggtcctagtgttatgttccagtctgcccacctgtgctcaggatgcagccctgggatccagcacccatggaagcttctgctgggatggtgtcacctatgggttttgaaccagtgtggtatggtccttgggagctctgctctgagcttgccacactgctgagagcacccactgtcctgaccagagtctcagtggtcctgacccccaatgtgggcaggggc

SEQ ID NO: 125261 - DNA, 1751 bp, Homo sapiens
cccctacaaatcaagccaagggaggggcacagaatggggaacaggacacaggatcctaaactccaaggggactgtccaccgatgaacactcagagtggacaccatcttccgtccacgctgtgcccaggacagctgtccccatccatgaacacagggtaaacatctgccgggctccgcaccagtggctccctgggccatgggacagcggcagggctcaccacggacagcacgtggcccagcagccggccaccctggcgtcctggggcctcctcccctcctctccctctcaccttgtcacctccacggagctgcctgtctgggataatttggggattttttttctgggggataattcttttgcatgacccctaaagagcaagccacaccggtctgctagctaggtgtccgcggtgtggtggtggcggccgctggccagcgctgcaaggggtcggctgcccacggtgctggctggcctcccctcctctctctttttgctgagtttcattgtcttttctttctgagccttgtaagtgtacaaaaattattcttattttgttctgtctcgggaaactgcaaataaaagaaaaacaggacaaactgcttcaagtgcagctgggtgctttagctggaatcctgccgacctcctgcgccaaaatacagactcaagcccggtccctggccaagaccctacttgggcccctcctccaatgaaaggtagtgctatgggagccctgagctggccctgacagtcctgagcccctctagggtgaacggctcaccccaggtagggcactagtcatagatcatagctctaccagctgtctccacctcttcctctggtcctctgaagtcttctgggcccagcgctgtccaccctgaatgctggaactgaaactggatcccagcccccaacacccctgacctctccattcacccccggtggccgctaaggatgtggccagggcagcctctgggcaggaaggagccccaggaccaagacctctggctgtcctgctgtttccttccgcccctgctacatgtattggctattctggatgctgaggacacacagtgaccacagagccgggctccaccccagtggattatgcagacagatggcacgcaggcctgtgtggacatcagcctcgggcaccagacataggcaaggcgcaaggtgatacagtaggcagccaccatgggggccaggaggctccagcagaggccacacaaccagcccagaatccaggacagagagctggaatggagacagggaagccagataccaggccagactggccaggtgctacaggcctgtgggccaggccaggcttggggacttcgtcctgggtgtgaaggagacaggcacccctgaggccttccctctgcatctccagcccaagctaagcgcaaactcttaggttggagtaaggagtaaccccctgccaagtttctcctgtcctcaggctccacccaccacctatgctgcctggccccatggggcacacgctcaggcccagcctgggaaagcaactgcacctgcctgtgctatgctggcccttctcagcctcaatgccctcctccctccccgacgcaccctcgtggcccccgctgggccccctgatgcaccctcatgtctccatggcaacctgctcagagtgtggccctgcccttggctcccctccacacctgtgtcccaggcagtgccacggcactttcctaaacagaaggatgggcttcaaaacagtcccaga

SEQ ID NO: 125262 - DNA, 1003 bp, Homo sapiens
aaaaatcactggcattcgtggggccactccccacccaagctccacgtgtgtccgtctgtgctcctggcctctgggggaccagctgggacatgaacttgtctgccaggcccccgtcgcgtgctgaacggtgttagtttgtaggtaacgcacacaccccacacctaaggtgtctgcatcctcctgccaacgcatgggctccacgtggtgtgctcgctggctgtcgtgactgtcagctgtctcttgggaggggctgtgggggcccgctgggctgcctcctttcccgctagttgtgcctgagagttgctgttgttcctgctttcccttcccttcctttcatcccctgaagggctaggtgtgggttttccgtgcccggtatccccacacacccagcacggacaacccttcggcagagcccaggccggcccctcaccccctggagtattgaaactggagtcccgtccccaaggccttcagagatgcccctacacacccagggctccagctctggtccttctgggggagtaaagtgcaaagaggggcacagcttagttttgggcctctcgccgagcaagagacagcactgctggctacagctccaacacagccagctgtggcaagaggactctgcctgggctggcccccctcctgtgtgaggtgtctgtcccttctctgctggccagcagcagatgcactggcagctcccaaccctgtttccgcccctcggccctcccccagcctgttcggcttctctgcagcccgcaagggggagcagacttttgacaaaggactgcgggcctcgctcaagtccctgagcccccagctgaagctgggaggggaggccaggctttgtgtctgggcatattcgtctgctgatggggtttggggaagcctggggcttggggtttggtcgggtggtgcagctagtggcagagcgggatcagaggtggtggctgcccagcttctgggctgagacaagggtctgtgcaggggtttactgaagtgg

SEQ ID NO: 125263 - DNA, 1044 bp, Homo sapiens
aaaggattaggctggtggggtggaagacgggcaccagggcagtcatggtaacccgagacccccgccccgcctgctgtccacagtgctggccaagaacagcaagccgatccacacgaccatcctgaacccacacgtgcacgtcattggagaggatgccgcctgcatcgcttacatccggctcacgcagtacattgacgggcagggccggccccgcaccagccagtctgaggagacccgcgtgtggcaccgccgcgacggcaagtggcagaacgtgcacttccactgctcgggcgcgcctgtggccccgctgcagtgaaggtgagtgttctgtgctaagtgacagctggggcagaggggtggcggtggtgtgagtggctgcagcctggggaggcgatggggagcggtggggcctgtgcagagccatgcctgggaagtccctgagctttcctggtgaggccacaggaatgatgtcaaattagggaccacggcaggctgggtgtggcaggcctccccagaggactggggagctggtgagggcctgagcagtccacactggccagagctgggtgggttgcaggtggatgggccccgggcagcacagtcctgggcaccatgccctgtttgtgaggactgttagagccccagatgggcgttccccaggtggtgggtgcagcgggcccagagcccagttttacagggatagtagtaattgggttgggcaccttgaacctctctcccgagtgggcccttttctggactttaaccctctctgcagtgccgcatggcagacagcagagcctgggggtggatgggagagggggctgctgaggagctgacccacccgccccatttcagagctgcgccctggtttcgccggacagagttggtgtttggagcccgactgccctcgggcacacggcctgcctgtcgcatgtttgtgtctgcctcgttccctcccctggtgcctgtgtctgcagaaaaacaagaccagatgtgatttgttaaaaaaaaacaaaaaaaaaaaaaaaaaaaacaagatgacga

SEQ ID NO: 125264 - DNA, 1059 bp, Homo sapiens
gaagagaagacagccagaagccagcagctgtggctcagatctgagcccgagcagcctctcgaggtggaggcagacaccccccaccccaccccgtgcagaaagaagccttgccagcctgccctgaggctggtacagagtccaggcaggctcagtggccatcatgcccctacgatgactgtcactccctctccgtgcgcctggcctctgctggctctggccaggggtggtcacagcactagggtggcagggtggcctctgactctgcgccagcctgcactggcctgtgctgccctggcctctgctggctctggctctggcaccggtcccgtgttggctccttcagccttcacatacctgctgcggccaccacaggcccaggacccccacaggtggccaccccacctccaccccaggagccccaggtatccagctgtcaccccctccctccctcctggcctccccctgtccttctccagttgccttcttttcctgcgggcgcaccacccacctgcctgcctcacctgttccgcctcagcccccagggtccccgacatcctgagctcagtgaggaggggctcgggagccccagaagccgaggggcccctgccctgcccatctccggctccctttagccccctgccagccccatgtaagtagcctgggtcctgctgctgtgggggtcatgttggagggctggcaaccccctagaggggccactccagagccgagggcaggctgagcgtggaccctggctccagcctcatcaccccacaatccctcactggggctttccagggtggccccagcccatcgagccccacctctttgtgaggagggccctggaccactttcctgctcaaggccactgggcaggatgggaggccctggaggctcgggcctcaattccagtcttcagggtcggtgcaggcctcactccacctcagcttgcgggcgggggggctccctgctattgaggcaggctctgattcagggcctgatcccagggcccaaggggtctagaacacgggacccctcccactggcctcctccgccttgccg

SEQ ID NO: 125265 - DNA, 1036 bp, Homo sapiens
gagaggcccagcctcccacccatgttgacttgtggatgtctctccaggagtgttcaggaagtcagtgaggcagaagataccctctccccaccaggaccccaccctcagctcctccaccatcctcaacaggccgacccacagaccactccgaaggtctggcttggtggggctgggccaggatctgcagggggaacagcccatagtggcacattccacggcccatggggagacggggccacggtggtgcagtagagaggtgtctaagccagtggcagccaaggggagggcttgccgtcacctctgtgttccctcagtgctgctctgtggctgcctgagaggcagggcttaggggctccctgccggggaggggaggggtccccaccatgctccgctccaactgcgcccctcagtgccccttgccctgggggctcctacaggtgaaccctatagcagtactcccaaggatgtaaagttgtggctggtgggtgccggccttcctgctggggcgctgtgctgtgtcccctcagctgtcctaagagctttggggcttgctggcccgtaggtccccatatttgctggaagcaggcttggtgtcccctgagaaccccaggccaggcttcgggagccagccccagaccgcccacgggaatactgggtttgccaaatggccaccttgagacccaggagaggagagcggtcctgggaggggcgagctgctcagagcagccaggccgtggctggagggtggcctggtgcagcctacctagggccttccagtggccagggcagcccacgtgccagcctcacagccagccccatctcggaccctgtccatcccatgtgccaccgccacccccatgacatcttcaaacctgtgccccccaccacgctggggcacaggttcaggcagtaaagggtagggagaacccctcaagaccgagcctggcttctctggctcccacacacattgtgcagcttgtcggggccccacacggtccatctcccaccctggacagcagcacctccgccagcctgg

SEQ ID NO: 125266 - DNA, 1040 bp, Homo sapiens
tgcatttctgactgtacagggcgattctgctgctgctgctgctgctggggttgggggaggatcccatttgagaagcgctgcagtcctaggttgaaacgtgcctgtctgtccccacccaggcctgcatgggcagcacgggatccccaggcaggaggacccaatttcatggcctggccagccagggtcctggagccaggcggtgggggagggatgggggattgctgtgccaccttccttcccggcttggcccgggggcaagcatcctcacacttcccatgtcgtcatccccttggctccagcctggctgcctctctaaccctgctgtaccggctggccgcatggccctggctctttttggtgagcgtggtccaggactggtgacctgtgagtcctgggcccgcagtcttgcgcccctgcccgaaccaacacaaatcttgttttctctctctctcttccttcctcactccctccccttctcacctttccttttctgtaaggtaagctgacttcctcttttggttttttatttatttttattttttagttctgtaattaaaatcctaacagccatggagggtgtgggcaccgggggctggggccaggcccctctgacctctgagggggaatgctgggtgaggcaggggccccgctgctgggaccaagtatcctcaggggcttgtgggcagaaaggcctgtgctggccccagtcagtgcacagaagcggccccaaggccagggctgctgggcagctcggaatgagggcgagcagggctgcccttggtgcctgagccaaggagccaatgggacagacctctgaggcctgggtgccaaggtatgaggtctgagagcagggtgagcgcctgggctgggacaaggccctctgagtgggcggccagctgcagcccacccacccctaccccaggaaggcagggcccgggagggcatgacctctggggtgctggctcagctgcccccaccccaacctgacacagctagtcctgagttcccatcagggaggaagcagcatcctgccttcctct

SEQ ID NO: 125267 - DNA, 1052 bp, Homo sapiens
aggtgtctgagatgcctgtgactgctccgcctaccctgggctcctgcggcacctaacgcatgctttgaacttgagacacagaaaggaagttcccgtgcccttgaatgctagtgtagatgggcatcgacaggactctggccacggtgaatctggagttagtcccaggcagagatgtgaaatgagcagccccccaaaaaatggttggccgggagccatgcactcaggagggccgggcccatgcaccccacactgcgcccaaggcgtgcacaagcgattgttttaaaagcgggttcacaaggaaggatgtttgggaactgactgagacaacagggacgtctgctgcagggcttcccagagctctgatggcagcgtcggcctgagtccttcgaggagggctggtttgtacgtggcatttgctgcccactggactgtgaacttctgtctttttatttcccactgctgctgtggtacatctccagtagcatagtttggaaatgcaggttttgatagactcaaggatctaaatagaaccctcttagtaccaaggactgtccggggtctctgccagccccgccgatgggcctaactgtggtgcctcctttcctgtgagaatcttctgaggacatgcccggggaaagagctcagttctgctgctgcctagggtgccatgctggccccggttccaatgcagagcctggctggaagtaccgctgggttggcggaggctacgtgcctgactgtcccctcgggggtggggtggaactagccttctgaaaccgcctgcttcagttggccacagctttttgaaatgtgtgtttctggaagggactgggtcccttccttgcctgttcagctccccacgacaaatgtcctcaaggcgaggctggatgcttccttcctcaggctcctaggaggagcccgtcccccagctgtgtcgggcagctggtcaccagcaaggacaggatccctcagctgcagcctcaggctggctggcactgggcgggtgtttctgggatgagttgtgtgtactggagatgggaggggagctgaga

SEQ ID NO: 125268 - DNA, 1027 bp, Homo sapiens
ggaccccagaggagctgccgtggtgaccagctgttctggtgacccctgaggcttgaggggtcttgaagcagctagaagctgtagttggtcaacaggtttaggcccagggtgtgtgtagttctggaaataggtgatctgtctcagtgcggctgctggcttcctggagctcttgcctctctggaaggctgaggtcatgtcagcctcatgacaatgaggctgagcatctgggcaggaggacaggggtcttatcctggccagaagccagcagggaacactgatgggatagccccggttttatctgtgtctctccccagggagccatcctcaccaccatgctggccacacggaatttctcaggtgagcctttcttctccagggagacaggcgctgccccctccctgctggcccacgcaggagagcgcctccttcctcaccagcctctccactcctcctctgcggcaggcctgccctcggcgtctgccctcagctctgagacccactgcccacctggccccgctgggctcccaccttgggtgataccacagggtccagccccccgaggccatcaccttcgtgctgggtctgtgtccctccaccccctgaacacgagcgtctgtgctgccccactggggctcacagcatcgtgtgtgtctgtccaggcgtttgtcgggcatctatgtggcctccttgtcattttgagtgctctgaacattgtgttttgtgcgggaggtgggcagaagggatgcggggtgatgcgggaggctcgggggcctccttccaagttctggatgagctgcagcctcctgtcccggctgctcagggtgggtggttgggaagcaagttctcttggcaggggggtggggtctgttatagacccctgaggcccagggcgctggcagacccatcgggcatgatgttagccccggagtggagccggcagcccaggtctggacaagctgtacctgtggcttctccgtcgtccgacactccgtgtgcgagcgtctgtgatccgtctctctcgttgtcc

SEQ ID NO: 125269 - DNA, 1225 bp, Homo sapiens
ggtgctcgctgggtggccagctggcccgcagggcccaaagcactctgctcagccctgccctctggcctgcccacccgggccctacccagcccgatcctctgggcagccctagggcttacaccgctggtggtgtgcctggacaggtacggaggcaggcaggaggtgtgtcctgggctattgccagcccctcatggcttctctgtccccacagtgcgtctccacgacagcatctccgaggagggcttccactacctggtcttcgatctgtaagttccagagctggggactctcgctgcactcactcccagccttggctcagggtgggatctgcagcctccccagccccagggaatagtccctacccgtgggctggccactcccttgagtgtgcttctgctgctggtccccttgctccaagctgtgcccagcctagcttccctcgcctcccctcatttgctttgcactagggttactgaggcccacagaggcagggctgacatcctggactccccctctcctccacacagaacagggcacactggaggcagcgggtgggtggaccccagaggaatagtcagtcagcagctgcattcaccttcctttccttggtgccctcatcccagctggactggggcaccactggctggcgtgagtgcacatgtgtgtgtttatgagtgtggctgtgaaatgtgagcacgtgcacctgtatgtatgtgtgtgggtgtttgcacgtgggggcgcgtgagcacatgaaatcagggtccatatgggtggggatgtgcatacatgtgcatgtgtattgtgtgaatgtatgagtgagcgtgtggaggtgtgtgcatgtgggtacgctggcacaagtgtatgcatgcacgtttgcatgtgtgtgcatgcatgtgtatgtgtgtgtttgcatgaatgtgcatgtgtgagtgtttcatgagtgcgtgtgcagtagctcagtgagaaggtgtctggggccgctgccgcctctcacttcctgccggatttagaagcagtgatctcatctccctcacttttgacagttcctgctaagcagcgctatatttagctgtctgtgagtcagtgctgttccaggaccctgacctgggcaagggcccataggccttagcctgcccctgtggcctccaggcggccacacagccagagaagcccagccttggtgctattgccatggttaccccaggccctccccatggctgctgtg

SEQ ID NO: 125270 - DNA, 1014 bp, Homo sapiens
ggctgagcaacctgccccaggtcacacagccagtgcaagtggcaggggctgggcttgccctatattttctgattctgtggaggcttctggggcctggcctgcccttggtggagggcattttgcctgaggtttaggagctaaggagggccattggtatggggctgctggagtccaggaatctgcaaggtgaggcctaggccccagaagccacatggagttcctggatgtaaggacgctatcaggctgggcccctgggagaaccagagccagaggagggagggcactggcagccagttagaaactgggacagcgccggagcatgcaaggaaggggggctgcttgtgcctgaggcccagggacctgcgaacctaggagaaggtggctacgtcttactgtcttacccattcagcgtctgtggcccagtctcaagtggtagaggagagccacacctcagaggttcatctctccaagacttgaggactggagggaataaggctggtgcagtgcaggccctcaagccagactgcccgctgagtccacagccctattctgccttttgtgagctgtgtgactatcagctgcttacctaacctccctgtgcttcagcttcctcatctgtaacttctcggggtggttgggaaggttaaatgaaataacacacacaaagtgcttagaacagccctagcgtgttggctgtcgtcgtcctcgttgttctagcaatcatcagaaccggcacgtgggagagtgtccaaaatgagtcattcctagaaaatatttgctgcttagtacagggcacatctccagctcaaggaaaagcaggccttgaggttgcttgctttgtgctgaaatcactcactgttccctcgcctcttcatccgcttgttcattcatcacatcctgaccagctcctgccctgcgccaggcagagttccagggccaggcacgcttcacatagattgtcatgggaagttgtgcaaggaggaaggagggaatgatggtggtccatcctgctga

SEQ ID NO: 125271 - DNA, 1019 bp, Homo sapiens
ctgggccccgcaccttgtggggtgggaggagagcggccagggcaggaggggccacctcctgcttcaccaccagtttactcctatctcccaggcgaggcctctctgaggctttcccctcctcctcctgccagccgggctctggggcacaccctcaaccccctcccggccccattctgacagcccctcccctgcctcggaagaacaaatttggcttcagccaaaagctccaaagagtatggaattaggacaaataagtggaggactaaatcagtgcaccgctgacttagaatcatccagggaaacttttagccccgagttagcagcgctcactacccgaatgggcctctccacccatcccaaacacaagccggctggtccctgccccagccttgccaccagtggcccagggggtgccacgaagggtgttcccttggtgggggcacaaccactcctctcgtcagaggccctggcacacccttgtgggcctctcctgacatggacgatccctgggccaccagttgctggcgcaggaggtgacgccttgtttttcctgtcccccagatcaccagaagctggagagagaggctcggatctgccgccttctgaagcattccaacatcggtgagcagcctggggtagggagcggggatgggtccccaccttctcccggacagcagcccattccggtttctctatcagactttcaaagagatgcagaaagacttccttttcttctctgttgaaatatcccaccagaagcccctgaggacgccccctcttctcccctgaccttgaggactttgtcgtatgtgacatgattcccgggggtgctcagagccggggcagccccaaggtggggctctgggtgcccagctccacccgactggacaggtccctttcccatcccactctgtcctttgggtcttgtcggtggcattggtgcagaggaaggtaaaggacacattcctcacagagccctctgctgagccagtgcccagcatgtgacccccataactctg

SEQ ID NO: 125272 - DNA, 1033 bp, Homo sapiens
aagccagggcaggagctcctctgcaggccaggctttgtggggtacgttcatggcctcttctcgatggcctcagcagccttaacccgattccttccttgtgtctcttgggctctggactgtggttgatgctggtcagctccctctgtcccccgtccctcctcccctctccctacccccaggctgtcagtttgtgaatgtcccttcgcccttactctgggcctccatggcctctgcgttgacacctggacagtggaggctctcaggaccctctcctccagcttttcagtttaaggatgtgatgtttctctctccctacaaaaccttccatgagtccccatgtctgactgcacaaatcccaatataactgccctctggagctgggccttccagacaaggccagctttatttgcctctggggaagactcagcagggcctcatggacgtggtacagagcccccgaggatgcctgctgagaggcctgtggacatggactcttggtccagccgacccacaaggatacaggcctgtaggtcacacaggagctgaacggggcccctccgccaccctcccgagggcctgactgatccttcttctctgcacagccccccagggcgtgccatctgccagggctctgccagccgtcgggaagccggcctctgttctgctggtgttgagtggggccagctgagagtggcttgtgaggggcacccacttcctcacagtttctgactcacagccatctgcccgaggccgggccggtggctgaatgcttaatggggagtgtttatggggagattaatcggctctctctctttctccttgtctgtctctgtctctgtctctcgctcccccattttcctccccaggggggctttctctgtggtccgacgctgtgtcaagctctgcaccggccatgagtatgcagccaagatcatcaacaccaagaagctgtcagccagaggtagggcatggggagtgtcctgcgcagctgctgtcaggctggggcaggggctttggaggccgtgccctgtgg

SEQ ID NO: 125273 - DNA, 1066 bp, Homo sapiens
agataaaatgtgatacaaagttgagccatatgtgtgattaaaaattttctagtacgtaaagaaaaaaaagaaacaggtgaaaggaactttaaaaatatatttatttaactttatatccaaaatatcattcagaggcctggtgcggtggctcgtgcctgtaatcccagcactttgggaggccaaggtgggtggatcacttgagcccaggagttagagaccgtgggcaacatggcaaaaccccatctgtacaaaaattaaaaaatcatttcaacatgtaatcaaaacagaaattattaagctattttgcattcctttttgtactacgtcttgaaatctggtgtgtattttacccttacggcacatctcagtttggaccaggttcttatgactacatggtgacagtgaccacagtattggacaacacagggccagagcttcaaaatcaccatgcttttttttttttttttcatttttcctggtttcttttaaggataatagttacagtcatagctgtcttagtctgttccagatttcttttgctctcctgaagacttattcatttattcagcaagtctggttgcctgtacttaccatgtgccataggtgcttgggaaacagtagtgaacaaagcagtcaaggatgcctgcccttagggagcttatatactgctggatagaggcaggcaataaacataaatactaaaaaaattatatgatagggtagaaggtgattaatacctctgagaataattaagaagactcaggagtgctagttaggaggaaggttattattataaaaaggatggtaaagccaagaaaaaagaagactccaattgctaaaatcaggaatgacacaggggaccttactgccaaccttacagaaaaaaaattataaggaaataactatgaataattatgtgccctcaagttagataacctggatgaaatggacaaatacttagaaagacacaaactactgaatctggctcaagaagaaatagaaaatctgaatagacctataacaagtagagactgacttagtaatttaaaattttcccacaaaggaa

SEQ ID NO: 125274 - DNA, 1047 bp, Homo sapiens
ccggctccaggcgcactgcgggcccgcgcgccgccggcttctctgggctccgggcccaagcgcacggccccgcgcggccccgacccgcgagcccccggccccgggcctggctgcctgacctcagcgcgcgcggccctgcccagctctgcccagcgcggctgccgggccggggctccgggctcgcgacttggcgcggcgggggcggcagcaggtgtccccggagcgcccggcagacgtgacgcatttggcggcggggaggtcagagaggaggggcgcgcgggggtggcccccgggcctggagcgccgggaggggtcggctgcggccccagagggtcgtccccgacgcgggtgcgctgtccccacccccacccgagcggcaggcggcgggggtggcgggacctgcttgcgcctgctcctgcgcgtggccccatccgcgctgggggtgccggcgtgggagagcctctgctgtaggtcccctggggaatctgggttctggaggattttcccccagattcttctggaaacaggaatttggaggtgtggggaggacgaggtcagggagcctggatcaggtcatggggatagcggggagagactaagagcctgactggattgcaaatttcagggtcatcgaggtggatgggggctggattttggactgttggcgggggcgccctaaaggggaaggggctttgaaggtttgtttgaagtgggacctcacggggaacaggtgctgtggctcccgttctctccttggcagtatgagcagtgtagggcgaaggtctggttcgtggtccccggacccggctttgcccctggggtgagatggggagcgcctcaggggcctcctgtctggcctggggtctcccgttctgagaatcaaggtggctgcacctggcatccctagggctagcttcagaactcctgaatctccagcctgactgggccagagccccatcctcctgcgtcctcccccatcctcctccgtcccttcagtgcaggcggtgggggcgctggcggtgctggcgagatttcctcttacacatc

SEQ ID NO: 125275 - DNA, 1052 bp, Homo sapiens
tgtgcccaccccatctccagcctcctctgaccctgctcacccctggggacaggacctaggggtgtgagaagtacttggctgaataaagactgtttcaaaggcaatccttagaattgcctagcatactcccagggccagaaataacccgccagaaaggagaggcgtatttgcccctgaagagtgcaggagggagaacagttgagaagtgttttgtgtggaaatgtgtccaagaggcgtcagctgctgcacagagaactcactgcccagaacactgcgcttggggaacagacctcacccccacctcaaatctgctctccactgggcctgttggcagccagctcagctggggaagggacagcatgactcgctttgtcgatgaaaagcacgaagttgtcagcacagaacctggccagtccttgagaaactccctccttggtggtcagaggtcaagcagcccatgtggcccacggtcctgaagaactgggctatgtccctgaggctcctctctaccgtctgactgtggggtctggggaacaggcatttaaaccaggctgctgccctggggagtgcccactggacgccagggtgccccatagggacagggtcacaaagccctggggcttcccctgccagtcctggtgaggacagtgtggtcactatctcagagagacgaaaaatgaatattctgtcatttcagactaaactactcacccagctcacactaatatggatttgttaattttacctttttttttctttccaactttaggttcaagggttgttacatgggtaaattggatcataggggtttggtgtacagataattttgtcacccaggtaatcagcatgatacctgatatgtagtttttcagtcctcaccttcctcccactcggttttattttttagtactgaaagtttaacagattggtcttacctcagagggagggaagaaacccccccatcgctgggctccttggtgtgacaggggtctggtaggggttttcaatcccaccacccattcctccacaccaaatgcctgaagtccccactt

SEQ ID NO: 125276 - DNA, 3142 bp, Homo sapiens
ctgagaatcccacagcctcgttttctgggcctatgctacagggttttgtgcaacagggactgtggatcatattggtagaataactactggccctacatagtctcttttgtctcttgtggtcagaaggttagaaggaaggagagatcatccctagccctcagtgtactcatggtggccaggtgaggagggcagatatagagtccctttgaggagaagagggcctgccagcccaggtacagatgcttccctcagggtccaatctccctgatgtcccctgccatggccacacactgagccttgcttctgatccttggaggctagatagttccagaatggccacacgttggcgagggcttagtcaaccagctctgactgcatctgcaaggatgcagtggggaattcctgactgacgggtctaccactggacattctgaggtttcttcctccgtgccacatcctgggtcaaccctggattgtctgatgatatagttcttgatgctgataactggggtgctagggtatctcctctgcacaccttagtcatgactcaggtggggcttgagcactttctctacgcaccttctctacaaccctggtgggctgggacactccctcttaatgccttagtcagtgcctggtgggaccatagatgttgcagggtgtttggaatttggacagagatcctggtggaaaagggacaagatgaaccataaagaggagccagtgcttgctggggacagaagatggagggttagaaattcagtctgtggagcagtcttggagagaaattggcaggcacccagtacctcccttggtcgaaggctgctccagggtagtacagttctctggccagccggtcttgccaggcaagtgcctgagccctgaggaagcaagaaggctctctacctgcagtcagagtctgctctgggagaaagtacacagtgcgttgtgatcccctttaatctctctattttctgtttgtagaaagtccatgagatgctgaagaaggggtgggatgctgaaggttctcccttccgaggccagcgattcgaccctgccatgttcaacatctccccgggggctgtgcagttttaatgaccagaaggaaaggaaaccctcgccggtggggaggcagagccttatcctcggctgcccttcttggctccctgcattccagggacttgctcgtcttgtttacccctagccatcctttctttcaagggtgaaccaggccttccaccctgaccttgcatctccagactgttccagagaaggtgcggggccagctgctatgtggtggccgctgtggctgacactgagtgaaggtgtttgaaatgcaggagaggatatcccagcaaattgggatcacatgcttttgtctccacagcaaccagccactgcaggcagcatgtctttcctcccctgctctctgcttgctgttgttttgacgctattctgcttgcatgtcttctggttgggatgtggagttgttgctggactctcaggcgaagctgaagtcattgaagtgtgtgaagctctgtgcttgcatgagggcaagcaaggaatggctgtgcctgaggctgctctgggaaactccttgccccttgacctcttttgagagcattcacgtggtcttcttgctcatccccttataaatgtgctttgcctgcctcagcctcatggtcagagcagtggagactggagccctgtttgcacgttctagttgttcggagaaagcctaggttctgggctcaggtccagatgcagcggggattctgttctctgactgtggcgaccttgctttggttcttgttgaagtgaaccaagcccggccaccacgcatggcatgctgtgcttggctccccataagacgtcctctttgggtgcacggtgtcaaagtgtgggcaggagtggagagctggtgccctcaggaggagaccacagcatgtccatcagctcagcagagctcgacagccacaagtcctgagaagctttgaccttgaagggcttctgggagaggaggaatttctgcatggggcgtgaaggcacactgtcccaccacaactgaaccagaagagagtgaagactcccctcttcccatcctctgtgccaggtgccagactgtgctccttggaacttatggcccaatcttacctgttctccagggactggtcactgcctcaggacccccaagcctatgccctgagccatggctgctgactgactccagccaaggtgcaaagacgagattatgagacaggtcctcaggcctgtgttccaagtactcacaggggctctgggtgcccatcgccgggagtatggttcagctgccaccggcactgtccatttgcctgtctgtcaagctcagagcatggataagccacacagcagggcagtgcaccctggcaccatgcacggccagcaagaatcaaggcccgcagatgctaagagggcctattgtcaggggaaggtccccgctcctgcacactctctatggatacttgggttgtgggggctctcttggagagtaagtttgtggtttgtttctggtttacagtggtggctgacaccccttgtaagaaagcattcctgggaagtcttctgtgggtccaaacatgttgctccgatcatcacaggagagcaaaaggccctagataccccctttggaatgtgagagtcttgttgtctgatatttgccactgagctggtgaagcccctctaaagagatctcgaccctggggagcagaattcttgtcatctatgaggggtcctgagaaagacttgtcattttttttcctggagttcttcccattgaggtcctaggatttgcacaccactgtcccacaagagctttcctgcctaatgaaaggaggtcttgtggtgtgtgtctcctctcttctctatagttcccgagttggcccccattgcagcccccaccctgtgggtagtcttccagaagtgatgcagtggtgtgagatgccctacaccttgttatttgggagactttgagagtcattcacttccatggtgactagtgtttgttttgcctgattttatattctgtgttgcatttctccccactccctgccctgctttaataaacagcaaaccaatatctaggaagaatgactgagggatagta

SEQ ID NO: 125277 - DNA, 1114 bp, Homo sapiens
cccctaagatagcagaatgttggatgttgctcttggaagcaagagagatcactggagaggtagttggttgataagagctaagcagagccttccatggcaagcatgggggcaggctgggttggcccaggacaggtcctggtgtgggggggtgtcatgggtcttggaaaatagcctttcttcatgagagtgggcaaggtgtgcacatggaacaggcactgtcctgagtatccaggacctgctgaagaaggataaaggcatcttccagaatgtcagtcccctcaggtatgtgcctcctagctcttccctgggatatgttagcacaggcagcaaatgcattcccaggcacagagggtcctgccttgggttctggcaccccctcttgtctgtcacctccctttgtgtagttggtcctgagcttatcctggacacccatccctcagtgggctctgctctgtccccagccctggacacctgtctcaggtctctgactcaggtctctgtcctgcttgtccccaggtgaacctgagcaaggtgggcgagtattggtggaacgccatcctggagggagaagagcccatcgacattgacaagatcaacaaggagcgctccatggccaccgtggatgaggaggaacaggcggtgttggacaggcttacctttgactaccaccagaagctgcagggcaagccacagagccatgagctggtacgagcatggcagtcctggagagtccaccctttaggcccttgtgctggtgacaaggccgatagtggcagaggggttggtgatgacggtggggaagaaggttgtgtggaccagcttcctgccatgtcctagcctagcaaggaacctgtcttacctgctcttgtccccaatcactgcctcacaggtgcactctggtctttcagctgtgttctcatacctgggctgagagcccagttaacaggacctcgaagggtgtcatgagatctgcccttcctgcaccagagcctggtaacatcaagtgtgttgatggcttttgtttgtgcctcatctgcacatatcttcccatgaagagtcgcttggtgggacctttggtagaggaggggagggagccagattgcagagccagttt

SEQ ID NO: 125278 - DNA, 1735 bp, Homo sapiens
ccagaagcattactctaaggaaagtagttaaatgtggacagtgacagcagaaacatttacacattaaaccagtttatagaacatgagaatgttcagagcataaagaagcttgtcagctcaatgacttacgaggcgtgggccattaaaaaaaaaggtctggagtttgggaaggagaaaggaatggggatctgcagctcagagtgagagatggaattctgtaaaggaacagtgtggagagggactccaggcaagtcaataacgatgttagaatgcccttgtttagaataattatcatgctaataatattgttcatattgtttttactaatatgctcatccttaaaaatagaagatattctaagggtactaaataaataaataattaaaattttgcaactgagaccttcctcttccagagcctttacaagaacctttatagacaacacctcaggtcctgtttgctgccccagcatggagggcagcccacttggttacagtgatgacagatggaaacttgactggagcaggtctggaaggcagaggaggcaggcctgtgtgtatatggtcaggacaaaggaccagtggtgctagccacacctgtgggatggctgtaattaaacacacacacacacacacacacacacacacacacacacaacagaagataacaagtgttggtgagggtatggagaaactggagccattgtatgccgctggtgggaaggtaaagtggtgcagctgctttcgaaaatagtatggtagttcctcaaaaagttaactgtagaattaccatatgacccagcacttctgggtaaatatacagaagaattgaaaacagggactcaaacagatgtatgtacatcaatgttcatagcagcattattcacaacagccaaaaagtgggggcacctgaaatgtccatcagttgatgaaacaaaatgtggtttatccatacagtggaatattattcaaccttaaaaaggaatggagttctgattcatgctacaacatagatgaacattgaggaggacattatgccaagtgaaataagccagacaaaaacaaacagataactgtattattccatttgtgtgaaatgtccagaaccggcaaatctgtagaggcagaatcattagtagttgccagtggcttggtggggttgagggaacaatttagaggaagggttagagcaaatggggagtgactgataattggcacagggcttctttgtgaggtaatgaaagtgttttgaaactagataaaggtgatggttgtgcaccattgtggatatactacatgccattggttcacttttgaatggtaagttttgtgttaagtggattttgcctccattagaaattgttcaatataaagtcggctcacatctcctcataaaataccacactgatgcacatgcgtgacgtctgtgagtgaggatggcccccttggagagctgcactgcccagcacagtagctgctagccacatgtggcagctgagtaaacacttgacaggtggctcacgtgactggagaactgaattattttattttaattaacttaaatttaaaacctacttgatttagttactggaaaaccttgaatatttttgaaacaacttgggcatgtgaatataccctttcaattgtaaatattatgaaatctgaacacagatgaagtatttctgatgaaaaagtgcagtgctcatcttaatttttgttgggttcaagtgtacttc

SEQ ID NO: 125279 - DNA, 3846 bp, Homo sapiens
tgtgagatgcagccaccaggcaggaggttgggggagctgtgccttaagaggatagctggatgtttaactttcatgccagggcccccggggccatagcacaatcccggcaggcctgtctccacctgtgtgttctgcttgagtccaggcttcatttgtgccctggctgcctttagtttttttagttagctttcatgaaacacctgctactcaaagagcttgtagaaattcagcagaaccattgcagactgaggggcacctgtcactgcccgtgaacacggctcctaaatattctctgctaaaaattcctctacaattgaaacactgcatgagttctttcccatggttccttaaagtgcctttattatcaatagatggcattgcgttcctaatgcaccttcacctgtgagaaatcaagtacctgaataaagaggagttatggagagcatttaaactcttcccatagtgctcccgtgcagggctctgcctgcctccacctctttctggaccacgtagcctctactgcagtaaacacagagtatatcacagaaactttgctgtttacaggagctaaggcgtttgttgtcttcttgatataattatttatttatgtgtgaccttttaagcccacattgtttcctctgattacatatctgagataatattgtgaattaatgagccgattgctttgattcacgaagatcctgtttgcctcccgcttgctgcatcacgtctgctgtgtggagcttggcacactgctttgagcgtgtggatgcagagagggactgcaggtgaatcagaggggctggctttgggttgcagctccctgtcaagcagctgccaggttttgggtcatctctttagccttgctgtacttccatttctcaccgttcaaacaaggttgagcactgtagtcttgttgatctccaatgtttgttggtttcttatcattaagtacccaaccctgtgcaggcactgggaatggctaaagaaagtgagttgagggctttgctctaaagggttggagatatcctgtgaatgtggccttatttgggaaaagggtctttgtagatatgattaagttaaggatctctcaagatggaatcaccctggattatccagtgacacctgtctttataagaaacaggagaagacagagatagacacagagaaggccatgagaagatagggcagagatgaatgatataaccaccaagcccaggaacacctggagccaccagaagctggaaatggcaggaaggatcctcccctagagtctctgcaggagcatggccctactgacaccttgatttcagagttctggcccatggggctgggagataataaatttgtattgccttgtatcgcctggtctgttgttccctgttagggcagccccagacaccagtgcaggtctcccatcacagcactgctgtgaggctgcatgagatgagaaggatgcaaagggatggcgtccagagctgcgctgctgccaccaccctcagctccttggttagatattctgaccttctgacctcctggcagcccagtgcagacatggccttcgcttcccagctgccttccacataacctgctcctccctgtgccgtggatcccacatcagccagccagggcaggcaggggtggctgctaaaaccgtatgacagttcttgcctccctccctccctcccacacttcagaatgttaaatgagacttcttgactcaggcaagctcctttcttggttacgaagatgtaaaatcagccgtggcaacggcaccagctcttttttccgatagctcgttcagtccccaaagctaggcagttggcatgcgcaccatcctcctttcttcctgcagtcgggggagctgacaggctgtcctccatgctgccgtgggtggctgctctgctgcgggggctcttggacatggctatgcttgagatggtcgttgtagctgtatgtgaggtgaatgccgttccatatacacttcttcatgtattgacgtggtgcgcacacaagtcatttaaaatcagtgaaattgctctggagtattctttgaggagttagaccttgaagctcaggctttaaaactcatcgtaatatatttgtttatgatttttgaaccctgtgagtgtttttgtgcaagctgtatccacctcctcccctcaatttagattatttctcaagagtggaattctagtgtaactgcagcctctgagctgttgctgtggttctccctggtggatgagttgtttctggagtgtcgccgatgacattagccctatatccccacatccccaccaacagtgggcttttcatcttcacttatctttgctaatttacccagatacttccagtgtcacttcttagaacaattgtgaggataaaatgaagatgggtggtttattgtctacttgtcctcattggcgagccactttcctgagtccccacaactttcctggctcattgaggccatcccatggattacttaacatacttcttcataaactcagagtgggaactacagattaaattaccttagcattttggcaagagcccagagcctggaaattagtatgtgaatgtaatgtgagcccttaagccttcagtgcaagtgatgtctctagggagagccctcagcgtttttcaggggaaatcagaatccttcatcagttccagtagggaagagctgaagcttacagatttaacagaaggcggtagcccaaggaaacctgttccagtgtgagtggaaggaatgtgctgagcagagccggctaatggtgcctcttggtggcaccatggacagggtgctgggcaccctcgtttcatggggttggaggagaggaaaggaacgcagctcggcattgctttgtcggccccatccctggaatacatgggccttccagccacactcagaccacagctgggtcctatctggcctatacagtgtcttaattttgtttctaattttcaagcttaaaaaaatatttgacagcattgaaaatcaggagattgctcataacagtgctgacttgtggtgtgtcctgagaagccagatctgctccattgtggcccacattcccccagcagcaggtgctgagcaggtgccctggacctctgccacgctgtcgtctcaccccgttatctgccctcgctctgaggtgccttcccggaaggaacgtcccacaacattcccataagtctcattggcccagtctcgatcacgcgggcagctgtgaggagtaaagtcgtcctcgctgggcacattgcttccctgaatagaaatgaggttccgttactaaggaaggaaagggatataaatgctggtgagtcatcagcgcagattgggggatgctgaggtaagtttattcatgttgaggtggaagtttctgtgaggacattttgggaacactgttcagcctgcagtctggggtccctcagaaatggactgattagaggtctgggactgggtagataaaagaggaacctggagcattttgttatgctggaaaatgagaacgtgccagggaaatgattgagcaccatcaaagtcaagcaacctccaccaaccttgtctgggattgtttcacaccaacataattaagcatggtaatgagttataagccattgagagaccagagaggccaggaatccaggggtcagtactgacagcaatagatagataatttcattgcagaagagaaggtgcttgcttcaataagatgcataagccatcagtcagtgtggagggactagggcaagaaagtcagcatttcccagccttcgtgggacagatgggaccggcagatgctatgcggggcagggtggagcagggatgcaggggttctg

SEQ ID NO: 125280 - DNA, 1002 bp, Homo sapiens
gcctcctatttaggccctacgtgaggccctatgtgtgatgtgtagagtttccagcaatggggcttggactggcccatcccagttctgactctcctggccacccagggcctacctctgctgatggccagtggtagatggcagtggttctttttctaaatctcaccctgtgtgctcccctgcccatggcattcagcagccaaagaccagagaagtgctcttctcctgcctgcaaatactgtgaagatcaccccatcacccagcagttcagttcctcatcctttgaccccagacatataaagcctgtgcattatgacacagcctggagccttttcccaagctataggctcctgtgactactaccagttcctttcctttatgtcatacttgactttgcagatgccattacggcctctccctcacttgagcttcacgtggttgtggaggtatgagagcatgagtgatgcactagtagtactggggccggctagcttgccctctgaaggtgcagccctggccgcctgtattacactagtgagcccgtgatcctggggttgccatctccatggactgagaggtcgtgatagccctgccttaaaacactggccttgactctcctgccttccgttgggtgaactcagtgcagatcatggagcaggtcacgatgctctcaagttggttccctctgagcgaggagctcttggtgagcaaccccgtgtgtggtccggttgcactttttagatacttcatgcagaagcccaaagccttagtcactggtctctgagcccatagccaccgtatttggaatcttttgggattacaatcagggtaccaatgattccttttactttacactatttgcataaatatgtgattattaatacatagctcaactcttaagggttttgttgacggaagtaactctaacttcttcgtggatatttcaaagccatgtttcttttttgtgtgcgttttgtacacttgtatgtataatacaagtggaat

SEQ ID NO: 125281 - DNA, 1083 bp, Homo sapiens
ggttttgagcccctttcatgaacgcttatcttttcccccttttacttttgaactccagaatttgtatttgattcttaaaaaaatggtaataataatttctatctcgttatcagtatcaatagtgatactgatatttattgatattctctacttaaaagacgttattcccatactttcctttagtaatttttgcatagttttcttagctctttgagcatatttaaaataggtgatttagagactgttttctgctaagttcttcatatgtgggcttcctcagggacagattttattgattgctttctttttcctatgtatgggccatactttgttgtttctttgtctaatttttttttttttgctgttattgagaaatggatttttaaataacacaatggggtgactcaggaaatcagatgctcctttcttcccatggttgctattggtacgtgatatagttgttcttgtttaatgacttttctgaactaattctgtaaagtttgtattctttattgtgtctgaccagtgaaatctgtacttggtgaacttagtggccaagtaattattagatggcgatttccttaaactcctgggatcagtaaacacctgtttttgtcgaggggcttcatctacctgttggagcataccttcattgcttggcctaacagttaaaaactgccttagcctttatttcctgctgatgttgagtcaaagtcagccagaggtgagagcttaaggccttcttaggtttttcctgagtgtgcagtgaagctctgtacattcatgtgtctttctagattcctgggaaaatgtcaaagcttttcaaagcccccacggacattttatttcccacctttgcctttggtttgcctcagttgttatctgccacctcaggaggctgcaaagttaaaacacttgccgtattttcaacagacactcctgggttgggaggaaggcttttctgagtttagccagaaacagtcagtcagtcttgcaaatgaggtcttacagggaaccatcagacaggtcaaatgatgacagttctttgagaatgaagctttgaaagagctctaagagcactgt

SEQ ID NO: 125282 - DNA, 1044 bp, Homo sapiens
gcagctgactccctctctctctctcttcagtgtacccacagaatagagacaaggaactttgagttaatgacagatgtttttgtgattgctcatgtcagacctgggtgattataaacctggcatttcattgaatcacagaattggaatgcttttgaaaattaaactccagagatttttagtttaacctctcattttgcagatgagaaaactctcatggtgggttgatggtagatcatagaccagaaccaaggtcccgtcacctccaccctgttttatggccttattgcaaatgaagtcatgattggatgttattgagtgacaagtgaatctgtttcccttgagtcttcttcctctcatagattgtgagtggtcctgcaggctggtgcagtcactgttgtgacctgccatctttgtcctcaccttgggtaccttttggaacaccaccttagccactaggtgtgtcatttatggctctaactgatccccaggcttagattcgtagtgaggccttgcctgtgagcttgatgtaagtgctggaatttgtgttaaaagctccataacgtgttcttagaagttgcttaggaaaaaatgcaggaaaacgttttattataggaaacttccataacagaaaagactaatagactgcattatttttgtatttacataatttttgagtgcataacacatttatatgttcaaaagcaaaaacttgtataacaacacaaaaatccctgtcctgcctctgtgtcttttctgtcttgtcctgacccctccccagccagccctaacctaagtcatcacataactggttttggggatatttcaacaaatatttttatgcatgtataatcaagtatgaacatgtattgctgtgtccccacctttagcacagatggtgcattccactttttaagatgatcttactgcccctgcccagtgtcattttggccgcaccaaagtgactcccatctctttttacttccatgtccccaagtgcctgaggggtgcccagtaaattctaggtagactttgctttccctggtc

SEQ ID NO: 125283 - DNA, 1039 bp, Homo sapiens
tcacaggactatactgacctggaggtcagggtgccagtacccaagcacgtggtgaagggaaagcaggtaatggccttggcgggtaggggtgggcggcttcacccaagccagtcaaagctgttgcagggaagacccaccagcatccttgagggagtgttgagatcggctttaggatgtgaggtgtgttccttctcctgccctcggaatgagctgagcacaccatccttgctccccttattctgtttgtgaggttctcccagctcttctgcagaaacctccctttggggatggtgaaccctgttcacactgcttcctgagagagaagcccacacatctgatgtcttcacctcttttataaatacagccatagactctcctggggttcctattgtagatggccagcttctcagttttcaagggaatactcaaacattattaccttggtgaattctcttttttcctaaagattaaatctgccttcagtttccctaagaaaagtccagtctactaaacgcacagtgatagctaacatacattcacatagcatctgtcatgtgagtttcctgggctttgccagcccagggtctaataaactcaaattagacaaaatgacacagtgggtagcacctccccgtgtatggtgatgagccatgcatcacagagatgaaaggtttatgatttaattctccacaacctttaatcacaggagagagctctaagactctgcagttctctcagggcaacaacatggctgcacaggagggatggagggagggacaggcccacctcatcccagcgtccccacttgcttcccttgctatttttttttttttttttttttgagacggagtctcgctctgtcgcccaggctggagtgcagtggcgggatctcagctcactgcaagctccgcctcccgggttcacgccattctcctgcctcagcctcccaagtagctgggactacaggcgcccgccactacgcccggctaattttttgtatttttagtagagacggggtttcactgttttagccaggatg

SEQ ID NO: 125284 - DNA, 1026 bp, Homo sapiens
gggaatctgcaggttccatgcaagaggagccaggccagggctactgaggacacggcaggaggatggggttaggcaggttctgtgtgatcagagccctttccaaaagcatacagctttactgcagcgtgtagtggcaagggtgtcagatgtcccccctcactcgaaggcagagactgacagccttttgccctggaggaggcagaacccatgtgggcatcactggtggtataggccaagtgactgcactgttgctggcggcagcgtccccaaggatatcccccggcattatactcattctcctttcttgagagagccgtttctttttcccaacttttgaggagtcttcatgtttactccctgatctctgccaagtgctggggccatgttggtcttttgtgtgtgtgtgtgtgtgtgtgtgtgtgtgtgtgagtgtgtgtgtgtgtgggtattttatttatatattttcacaattttgacttttttcaaatggtaatgtatgtacaaaagtgtcaatgaagagaagtctccagtttccagccataaaggtagctgctgctaccctattgttcttttggagatattctctgcatgtttaagcatatttatgtcagatatgagtcttaaagctgctgtcagtgctcacctagaaggatcctgtggaaacttggggtctgggtgagtccccctctctgtgtctgactccttcgtaccctgctccaagggtcaggctagtgctgctgccgtggccgtgggaccgcacctgggtacaggggctgcagggtgcatcactgtctcctgttagcattttttaaagagaaccatttttctcttggctataaaaatgtctacatattctagggagtttggataatacctaggtacaaagaagaaagattcctgttactctactatcagagataaccacaaaaatttaatgtgcttcctttcagtctttttcatatatatgtgcacacttgtgtgtatattatatatttcttcttagaaattaaagtcataccatactta

SEQ ID NO: 125285 - DNA, 1076 bp, Homo sapiens
ggacctggttggccagcctggggcctaggttttggggcatccctgccagccatccagccaccctcagagcaggcgtgcctggaggatcttggcccatttatatgcagaagaggatcaaattggctaacaccaaggctttataaatagtaggactgtttctccagcctgtcttcattctgttcacagctaaaatttcctggcagcttgtaactaatgagaacggaaaagtactgtttgcagagatttcagctagctgacttgaatgctcccatgatgctttgtcactgattgttgtacttactgctctctggggtggccattcccttccaagttgagctgggtctcaggtaatgaaaacagcaactctttgaccaagaccctaagatggtcacaaggaaagcccattttgtcctcatgagagtatgactacacacaggctctctggctgagaactgtgacacccagaggtcacaggcttggctaaggatgtctataggacttgaatagtccagcctcatgtgtcaattggggataatgtttggactggcatagacccataggtaagtgtgcagtaatgtcagctacagctaataggttgtcttacctgagctctgcactacttctgcaatggaagtgttgtttccctgactttactgatgagcaaagcggaggcttagagacacaaggttgtatcaccaactagtggctgggcagggatttttgactccagagtctgtgtccttaagtactggtttcggttctcctttatctggaattcttgaaagatgtaccttgcattaatcaaatcagacacgtaaaacctctttgccttggtttttcactttctcattagagaactcattgcttcatagagctttacatcagctgaaagttgtcgtaacggatttccatgcagtgtgtgtgactgtttgtgttgtgttcatttctgtctagatacaccttccactgtgcacacctgtgtgcacacacacaacccacccctcctcccctccaaaaacaaaacaaacaggaaaaagaccaaaaacagtcattgcggatgtggagcaacctgcaga

SEQ ID NO: 125286 - DNA, 2475 bp, Homo sapiens
cttaaacgtgggtgttctcaagattatatctataatcagccctttcttctttctgcagttttctcccttggagagctcatccattcccagagcctgaagccatacatctgtgattcactctgacctctgttccatgctctctaccactccctgtgtttggtcctagtttaatttggagtttagttgtcctaatgttctgtagatctaccagcttcctgacctcctttctctaggaagagttctaccattttcctcattgcccaagctcagggcaccttcttcccttcttgcttgtccaacatgctctaaatcatgctatcactgtgatttcccttgatattctgaacaaaatgagcacatccttaggaagcaagacctatgaagtagtttttttttctctctctctctttctgtattcttttggagtgggagtgggagagtggaggcggcaggtggtccatgtccaacttcctgcctgagctggagcaggggtctggaggtaggttcttgtggctactgatgcagaacagcgactcaggaaggtgtcactcagcttagactaaatcattctttggagacagttcccacatctaagtggagttttatttcaccctgatgttaacattaactgtggctctgggtgatgatcaggaaagctgaagaagcttctgtcagtgccagcaacattgagaagtataccatcatcatttgtgaattaagtgtaagacagaattacatcacagttactatctctccggcgcctcgggcaggtgttctgggggctctgtggaaagcctctagttgggtcagtagtcactctccacatctcctctgtggtcctcaggagtgaccacagacagactgatgaaaaggctgccctggctcttagaggacttgccactgttcgtgttcactgtgtgctgcacagaccaggaattaatttcaccttctgcctcctagactgttgaaattgggacaggcaggcagccgtgcagcaaaggaaatgagagaagcctattaaggccaaggagagtggaggctgaaggcacatgggagtagactacagtcatgccagtgagtatcaggaagctgagtactctgtggggaagcctatgttcagctaccaagtgtggtgggtgcaggcggcggcctgacaggtgcattacagcctgaagaactggggtgaggccagaatttggctcagccacttagggtatgtgactatagaccattcctttagcctctgggagcctccatttcccagagatgacaatttccaagggtgtggtcaattctgtgtgcaatcctgtgtggccagacagaggtgccccttgctgatggcctgtccctttttcttattcccttctaattgatgtcatatgtctcttgtcttcatgtgaacttgatatcacctaagatccatggctttgaggaaggctaatgcaaggatggtgtttcagttcatttgggctgctgtaacagaatacttgagagcaggtgtttatacaaaattttattttcctacagttctggaggctggaaaatccaagatcaaggctctggcaggttcagttgtcaagtgagggctctctgcttctaagatgggcctgatgctgtgtcctttggaggggtggaatgctgtgtcctcacgtggtgacagggacagaaggggaagagagctggatgctgcgtgaagcctgtttaataaatgccttaatctagtcataggggaggagccctcataacctaatcacttcttaataccgtcacattggccattaagtttccacacctgaattttggaggagacacattcaaaccatagtagatgggaaacatacggaaactttctacagaagaccttcgttacagtgtttgttggcctggggcaggctactcaggctcgtcacttaaagaattatttttattgtcttcctctggagacttttggttttgtcaggtgaacgttgtggctgtcaaacttgcacggaccatcccatgctgagatgggacttcaataagtgcgttaacagataggtatcaggtcttcttctcctaccaggcctgcccctagggaatgaaatggcctcatggcgaagcatctcttggttaaggctcttctaaggcaagaactaattgcttttccttggcagcccaagtaaatgttctctgtgagaaatgactttctgacatttgtttcattgtggctgtacttaccaaaaaacttttatataattcactacagagaattctcaaatgaatgtaatgaacattgccagaaactgggctggatttctgaggcattgttttacttacttattttttggattttcagtcaaatcatataatcatgtttgatggagtatctagttctgccagttaaaagggtaatagtatggggattgctaatttacacattagtcaaaaatactcctttgaaacactttttaagggaggcaataagaagtgactatt

SEQ ID NO: 125287 - DNA, 1013 bp, Homo sapiens
atcactgcactccagcctgggcgataaagcgagactctgtgtcaaaaaaaaaaaaaaaattagacattcttataggttcagtgtggtatttcactgtggtttgaatttgcagttccctaataagcaataatgttgccctttatattttctttgatgaagtgtcagtggaaatattttgtccatttaaaaaaattgggttgttttcttattattgaattttgagagctttctgcatattctggatctgagtactttatcagatatataatttgcaaatattttctcccagtctttggattgtcttcattttcttcacattgcattttgagtagcagaagttctttattttgatgaagtgcagtgtatcagtttttttttttttttttatggatcatgtttttggtgtcatatctaggaaatcttggcctaactcaaagtcacaaagattttctcatatgttttctattaaaagttatatagttttaggttttatatttaggtctgtgattcattttaagttatttttagtatatgatgcaagatacggcttgaagttccttttttgtgtgtgtatggatgtctggttacaccagcatcatttgttgaaagtactatactttcttcactaaacttttatatgtttctgcccctttccttctgcttctttgcatagtaagcctcctgtatccaataatcttctcctgctttgttacctgtcaagcacattattcccttttattttgccctgtgccttccttctttgtcttcagttccacccagtccttgtcttctactcttgagctgacatcagcagtttgatttctgcctttatgaatacagtggctttctcacaagctatggacaacttccttggggttagagtgagtggtttgtctttaggtttccctttattgatctcctctgatatttgatgccatcaactgtcccttttcgttgaaacacatgtgtttggcttctgtactttcctgattctcttcctccccaacgattag

SEQ ID NO: 125288 - DNA, 1028 bp, Homo sapiens
ctcaagcagtcctcttacctcagcctcccaagtagctgggggcgtgcgcccccatccccagctaacttttatatttttgtagaggtgggttttcgccatgttggctagactggttttgaacttctgagctcaagcgatcatcctgccttggcctcccaaagtgctgggattacaggtgtgagccactgtgtctggccatccctgggactctaactcctgttggcttgtccctgggacttgggatgggctgtctccctcctgggctgcccttgactctggtttgtatttagttttgaatcaaggcagccaccatcctcgtagcacagggaggacatttttgccctcatcagtggtactttctcttgactgtgcttttttttccttctctatagatgacttttctccacaaatggcctttgattttattcatgagatcattcccaacatagtgaatactttgttttgttttttctctcaggtgactctgtcaaccaccaaatactaactctggcttcctttcctctttttatccttcctctttgcccaccttcttttcaacttagtccattttgttttcttgtgtactaaactgcatgtatttaaagtacacagtttaataagttttgatgtatgtacacccctatgaaaccatcaccacaatcaagctaatgaacagtcatcacccccagaagtttcttcggaccccctcctgctgcccatccttccacctccattcccatccttaggcaaccacggctctgttttctgtcacgatagattatatttcctagaattgtataaatggaatcatatagtatgtacattaaaaatttatttagtttctgaaaattgcagtacaatacatataaaatttaccatcgtaaccattttcaagcgtgcagctatgtgacattaagtacgttcacattgtcatgcaaccatcatcgccattgagatcgaggacttttaaaagtctgttctcaaactgaaactctgtacccatgaaacagtgactccccttccccgtg

SEQ ID NO: 125289 - DNA, 2717 bp, Homo sapiens
atgggatgtgtgaaggtaatgcagggcaggggacagtgcccattgactgccccaaggacacctaacgctgcccacacactcccaaactcccaggaggcagggcctaccctccctttgagagctgctgatcaagtaggagttttctgttttcattcatatttgaaaagttggaataatctgctttatgatgtctttattccctgaaaagttaagctaataatattggtcagtgttttcctatttaggaacattttctgaacatgtggtcattaggggattttagagtataagttatgtatctgttaattttttctgggtaattatgtggttgagatgctagtggcacacattatggttacatttgttcagtaactgtaactcgagccctggaaattaggcttctataaaatttcatagcaattcatgaaatgttgtttgtaagcaaaatgtacccagctccttgactaaagttaccttaaatattcttaaagatagagaggtaatacgcatttctttttctctttctgtatgtgtgtatatatgagagagagagagagagtgtgtgtgtacatgtccctgataattcctatctcagagcagtggaagtcctctgagtttgataatatgctttgcatgtgctatatttgtggactgcctcagaacatctcttggggagactacctgggttcagggaccacctgcctatgcacctgaatcatgtgagccctgattttatttaccacggagccaggcacttgaacactgtcccatcccaactgtgtccatcccaactgtggacagcttttacacggtccacctccttgccttccaggaccccttcctcccttctccttggcttctgtggccctgcacccatgaaggccagcacaggcaccaccttctctaggaagcatttctggcatttgagaaaatgagctttcacacagtctgggttagggcccggatcccaaactttctgtttctttgtttcctccccctttcaaccattatggctgaggtgtggccattctgcatgtcacatggctggtgaaagactcctttctctctctctttggtgcttcttcaaaggctccttcactttcaatggtataggtcagattgtaccatgtgtctgcggctgactcaatcatggtagcttttctgtccttcccatagcatccctaacaggcaggaaatgatttagtctttatgagtgtgcctccccccacagggagacagccttttcctgttgcagatcacactgattttaagagaagacttctcttcatatgcagcttgcccttctatcctcccatcccatgtatatgtggcataccttctatgatgtttcaggctctgttctagcagtcagacatatagagtgggagatgctcaaggggctcacagtttagggggagcttggacaaactgttgcaatcccatgtgatgaatgcagaggaagggtccagacccattttctggaatgtcagaaatacttcctggagaaggtgatgcctgtgctggccttcatgggtgcagggccgaagaagccaggagaagggaggaagggattcctggaaggcaaggagatagaagaaagcatttgagttgtgtccagagaatccccttgggaggggtatagtcttgaaggagcgttttgagataagcagagttgaacccgtcgggtttttaggcctgttgtctaggactacctaggatatgtggtaggagaaaagaattatcacaccgttcaaatacatttttaaaaataatgaaagattttccaatggaggaaaactaaaatcctttaatgcagattttgcaaaaaagcgtttttgccaagtgttgactagtgtagagttaattcatttggagtaatgttttatagtatttgtgaaatttagtataggttagagttagtactggatccagggtttaaacttttgttttctctttctttccccccaaattaaagcatcctatccttttcatcttaatttcattcatatcttcatattacgtttttgagatagctgtttatttttttgagggggaaatagtgacataaataggtttagaacctcaggtggcttaaaaccccagatgtagtcagtggtaaattttttttttcttggttagtctagttttggtgttggtaagtattatatatgctggtgggtttttaaaaagggcacgtggtagagtctggcatactatttggagtcttgtggtagctgcccacttcctgctaatgcagtagagcatgttcataatggccttatatgctttccttcctagggcaggccgtacttagtcataccaggtaagaaatatgttttaaaattttagttaaacagttatgatgatagcttatagtttactttgcatttctttatttatagaaagattacattttctacacagtgatttactgttgttatttcctactttgttaactcattaactccacttactcattgatgggagtctggatattatccttctgtagttttacaaatcctcacattttcttattcactgcttttcttctatcagttgattcactgaatttagtgtggggattttaccacatcgatactgccttcagtgattttctttatgttagattttagaaatttctctctgctttaatgttgtaggctaaatataccattccattgtctactaaagggctcaagactgttctttaatattgt

SEQ ID NO: 125290 - DNA, 1338 bp, Homo sapiens
gccatcctctctcccttcctgactcaaattgtacaactgctcaaaggaagaaaaagaagccagaggttcctctgcatcagccagaggccaatcaccctgatccaggctgccaagttagaacccaagctcccagatcaagggacaagtcagaggtggagctctttgatcaaggggcaggtcagagatcaaggtccccattgaggcccggcagggacgaggcaaaagactggggcaggctggcaatcttaaaccccatttgccccaagcccctaaaaaaaaaaagtattccataaatacttgctgaatccaagaaccaaacctagtacttagcttatactgaaagctttaattatactatctcatttaatccttacaacagccctttaattgttatcaccctattgtatataagaaaaaaactaagacctcagtaaaaaaaaaaaaaagaaaagaaaaggctctcttcctcggcgctgcctacggaggtggcagccatctcctcctcggcatcatggccgccctcagaccccttgtgaagcccaagatcgtcaaaaagagaaccaagaagttcatccagcaccagtcagaccaatatgtcaaaattaagcgtaactggcggaaacccagaggcactgacaacagggttcgtagaagattcaagggccagatcttgatgcccaacattggttatgggagcaacaaaaaaacaaagcacatgctgcccagtggcttccggaagttcctggtccacaacatcaaggagctggaagtgctgctgatgtgcaacaaatcttactgtgccgagatcgctcacaatgtttcctccaagaaccgcaaagccatcgtggaaacagctgcccaactggccatcagagtcaccaaccccaatgccaggctgcgcagcgaagaaaatgagtagacagctcgtgtgcacgttttctgtttaaataaatgtaaaaactgcaaaaaaaaaaaaaaaaaaaaagaaaagaaaactaaggcccagggagacgaaagaatttgtttgttcaatgccagacagcttatcagtgtcagagctagcaactgaatgcccggtctctagactccaagattcatactcttattccataacataatttttttaaaagggggaaaaagactagaatcaggaagtaaaaagataaatgtaacagtttcagagattaaaggagcaaaccacaaggcaagagacaggtatcctccttgctcatccactgggagagtctagaagcctgacaccacagcaccaactaacacagcaggcccagctcttggcttgtaatctcaatctcttatcaaaacccaaggacttcttgg

SEQ ID NO: 125291 - DNA, 1259 bp, Homo sapiens
agttggtgctgtggtgtcaggcttctagactctcccagtggatgagcaaggaggatacctgtctcttgccttgtggtttgctcctttaatctctgaaactgttacatttatctttttacttcctgattctagtctttttcccccttttaaaaaaattatgttatggaataagagtatgaatcttggagtctagagaccgggcattcagttgctagctctgacactgataagctgtctggcattgaacaaacaaattctttcgtctccctgggccttagttttcttttctttttttttttttttttttttgcagtttttacatttatttaaacagaaaacgtgcacacgagctgtctactcattttcttcgctgcgcagcctggcattggggttggtgactctgatggccagttgggcagctgtttccacgatggctttgcggttcttggaggaaacattgtgagcgatctcggcacagtaagatttgttgcacatcagcagcacttccagctccttgatgttgtggaccaggaacttccggaagccactgggcagcatgtgctttgtttttttgttgctcccataaccaatgttgggcatcaagatctggcccttgaatcttctacgaaccctgttgtcagtgcctctgggtttccgccagttacgcttaattttgacatattggtctgactggtgctggatgaacttcttggttctctttttgacgatcttgggcttcacaaggggtctgagggcggccatgatgccgaggaggagatggctgccacctccgtaggcagcgccgaggaagagagccttttcttttcttttttttttttttactgaggtcttagtttttttcttatatacaatagggtgataacaattaaagggctgttgtaaggattaaatgagatagtataattaaagctttcagtataagctaagtactaggtttggttcttggattcagcaagtatttatggaatactttttttttttaggggcttggggcaaatggggtttaagattgccagcctgccccagtcttttgcctcgtccctgccgggcctcaatggggaccttgatctctgacctgccccttgatcaaagagctccacctctgacttgtcccttgatctgggagcttgggttctaacttggcagcctggatcagggtgattggcctctggctgatgcagaggaacctctggcttctttttcttcctttgagcagttgtacaatttgagtcaggaag

SEQ ID NO: 125292 - DNA, 2645 bp, Homo sapiens
aaatacaaaagacagtagacagaagaacatgactcctcatgtgctcattgcccagttccaacagcagcctgcttttctccctcctggtttattttgaaacaaattctgccttgtatcatttcatctgtaaatattttcagccactgtttaaacttccagttttcttatagtgtcctaattaaaagaaagttttgtttgaatcaggctactaataaggctccaaacaccaatgcctcatagtcaaccctccatttttctctcttttttttccctcaaaatttatttggtaaagtaaatcaagttgtttgtttgtatttcccactagctggattttgctgattattacccacatgtggtttagcatgtcctttgtcctatttcctataagttggagttggatttagggtaacatttttgaaagttaggagagtatgtaatagaagcaggttcttcctaaagatgactgttgttcaatatcatcttttgcaaaattttaatattttatatgtatgtatatattttccctactatatatagtacacatgcacagacaaaagcacatcagtgaatgttgcctttgtcatatccctggaatgtgctgtgaacccttgcactagataagcagctgacactgactgaatacttcctgttgccaggtagcttctccttagtgtacacataggtttttcactgtcctcacaactctttgaggccgttctgttgccttcccattttgtagtttaggaaactgacccaggctcatgttgttgagcagtggaacctagtttgcctttgggtggtttgccctgagattctccgctacgttaaaatgctgatgttcatattgtttggtccataaaacataaaataaaataaaatgcttgggtccttgctctagagatctgatttaattggtctgagtgtggcctcttctgtgtcatgtctggattttcagaaactttccaggtgactctgatgtgtggccaagatgtttactaactgccatgtagtattctgctgtgtagatcttattatttaatgagtccccaaggggtgtgtacttaagttgtttcccgtgtgccagcatcacaaatgatgttgcagtgaatatgcgtttaagtgtctcttggaacatgtgtatgaatatcagctaaatgaattcccagaacaggaattactgggtcaaagggtatggcgtttgtaattttgatggatgttgctaaattggcctcagggagtttgtgtctgttctctcactgctaggttgctaggttgtctcagagtacccgaccccatcctaggtgttagccagagtccctaactcctttctgggctactgttaccttttcttctttggttttctttgaaatgtcgttcacttttgaaatatcttggatttaactttgtatatgtttctgtatttttttccattctttgtatctacaaatactaaaccatttgttcattttgtttgttagcacaacgctattttgtttcatagctttataatacattttagcacttggtagaactagtgtttaatctttttacccccagacttttctcaaatattcccgtaaattaatttttgtgtatgaaaattctgttgaaatattcattgagaatacattaaatttatgttttggattagggagaattgacatctttacattattgagtcttttggtctaagaaaaggttatgtcttatttactcaagtcttgctttatgttcttttgtagaattttaatctttttattcagtaagtcctatacaccaatatcgaattctcttactggtttctaatagtttctcagttgattttcttggattttctaggagtgcagactatttcttatttatagtagtattttagtaacaactatatttagtaatacatcatttatgtatttgtcacatttagaattctaaatgtaattgtatttttttcctcctcctcaaaatttgttgctgagcaactggaaggatggaactggcagccactaaagcactggaggggaagtttctcagggttgattggggttggtcacggcttccatcaatctgagaagctgaccagtggttgaggtggcattactaattaggcaatagacacacgagtctggagttctgagaagagtagggactgggatgggcatttggaaaacattagcatttagatgcatttaaccatagactgggtaagatcaccaaggcagtgagggtggatggaggagacaaacctgagagcattccaggagcccttgtgaccggtgcagtaacccctcgattagacctgttgcttcatctctggtttgttcatggagtccggatgagcacctaaaatcctgtgtcattttgtgagtctttgtcaccccttgcttctaagaggtatatctaaggtctgtgtgtcacttctactctgtagtggcctcagtgtgtccctgagtaggtgattctgtgttctctatcctatgagtggtggctgtaaacacttctatgtgtttacacactcctatgtgtttacaaaaaacctctatgtgcctttcctgtgcaaactgtcctttgtgtgtcttttcttgtggccactcatgcttgccctgctcattctgtcagcagagaagtcaggaggaggggagtgggac

SEQ ID NO: 125293 - DNA, 2109 bp, Homo sapiens
tcccaataactctctggccctaccttctaaatgtatgattttaagcaaagcacttgaccattgtacatctcaatttcttcacctgtaaaaaggaagcagatcactggttctcaatttttggaaatacacatttttccaggggaaaaactccacagatgattctaacactcctcttcctcctccctgaccacatgctccctgaacccatccaactctgaaaacgttaagataccaggttattttctgatataacttcaatatccagcaaactcaacactgctttctaaaaatgaagcatataaccttcactgcaaaataaaaataaactgcaaaataaaaaataaaaatgcaatgtttcttgtgagaattttttaaaagtcctcctaacaacttaaatcaggttttcctgacttgtgatttaagtcaaatcgcttggaggcttcttatgcctgagctttcttaaagaaggtgcagtttcagggtgaatcactggaaaggtgaaatagcagctatgacacaagatgacactgagccaggtggcctaaggctcaatccccaggtggggtccacagatagctgaatctgaggggaaacagacagacatccctcaacccctggctttctattcattattctctctcagtgcatactatgcagcatatgccctcatccaaggacaagagccacttcaggtagacaacactcaacagtgtacatcacaaattcatttctttttttttttttttttgagacgaagtctcgctctgtcactccagctggagtgcagtggcatgatctcagctcactgcaacccccgcctcctaggttcaagcaattcttctgcctcagcttcccgagtagctgggactacaggcatgcaccaccacactcagctaatttttgtatttttagtagagacaggctgtcaccatactggccaggctggtctacatcacaaattcaaaatcagcaaaaggcatgcaggaaatgctaaggatactctgttcagcataaaagaagataaagtgtaataaaattttataaatatacatacatgtatttatgtatatgtttacatgcataagaaaaaaacaggctggatacagacactcatgcctgtaattccagcactttgagaggctgaggcaggaggatctcttaagcccaggagtttgagaccagcctgggcaacacagggagtctcgtctctacaaaaaattttttaaaaattagccaggcatggtggtacacatccgtgatctcagctactcaggaggctgaggtaggaagacagcttgagcccaggaagtcgaggttgcactgagctacaattgcaccgtgctccactatattccagcctgggcaacagagtaagactatgtctcaaaaaagaaaagggaagaggaaaagaaagaaggaaagaaaagaaaagccatagaaaatatcccaaaaagttaataggaagtgaagggattttctttatatactcatctgtattttccaaatattgtacattgagtataatcagaaagaaaaatgaaaagctttttcttttttaagagaaataatagtaacgataatagctagtatctacttgagtgcacactctgtcaggaatcatgctaagtaggtctcattcaatcctcaccacagtctacggggttgggtatatggagagaaggggattctgattaagcccccgtgactctacaaaggggtctcctgcaatgggcacctgaaaaagcctcgactagtaaaggaagaagctgtttaaagacgaaacaaggaacccaaatttctcaggcagtgtgagcctacacacggaaagaagtctcaggcctgaagcacaggcacctttctattctcctgacagcccacccgagggacatcaagagccacagatgtcatgataggtgtgtgagtgctatagaaggaatgtttgtgtccctccaaaattcatgttaaagacctaacctccaaagtaatgttatttggaggtggggcctttgggagacgattaggtcataagggcagatccctcgtgaatatgagtagtggccttataaaacaggcctaagggagttcatttgcccctttcaccatgtgaca

SEQ ID NO: 125294 - DNA, 1055 bp, Homo sapiens
cagacatttattgctgacagcctctataggaggctagaagtccaagatcaaggtgccagcaggttcagtggtgagggcccacttcctggttcatagacctctgtcttctcatcgagctgtcacatggtgaaaggggcaaatgaactcccttaggcctgttttataaggccactactcatattcacgagggatctgcccttatgacctaatcgtctcccaaaggccccacctccaaataacattactttggaggttaggtctttaacatgaattttggagggacacaaacattccttctatagcactcacacacctatcatgacatctgtggctcttgatgtccctcgggtgggctgtcaggagaatagaaaggtgcctgtgcttcaggcctgagacttctttccgtgtgtaggctcacactgcctgagaaatttgggttccttgtttcgtctttaaacagcttcttcctttactagtcgaggctttttcaggtgcccattgcaggagacccctttgtagagtcacgggggcttaatcagaatccccttctctccatatacccaaccccgtagactgtggtgaggattgaatgagacctacttagcatgattcctgacagagtgtgcactcaagtagatactagctattatcgttactattatttctcttaaaaaagaaaaagcttttcatttttctttctgattatactcaatgtacaatatttggaaaatacagatgagtatataaagaaaatcccttcacttcctattaactttttgggatattttctatggcttttcttttctttccttctttcttttcctcttcccttttcttttttgagacatagtcttactctgttgcccaggctggaatatagtggagcacggtgcaattgtagctcagtgcaacctcgacttcctgggctcaagctgtcttcctacctcagcctcctgagtagctgagatcacggatgtgtaccaccatgcctggctaatttttaaaaaattttttgtagagacgagactccctgtgttgcccaggctggtctcaaa

SEQ ID NO: 125295 - DNA, 1059 bp, Homo sapiens
aaaaattaaccaggtgtggtggtgcgtgcctgtaatctcagctacacaggaggctgaggcagcagaattgcatgaacccgggaggtggaggttgcagtgagttgagattgtgccactgcactccagcctgggcgacagagcagagcgagactccatctaaaaaaaaaaaaaaaaaaaaaaaaagaattgttcatagtaaagactttgtaaaaagtgaaaaagtgccatttgagcctcagtgtttatgtaatactagactgggtgaccagtgcctgcagacatgattagcactgtggaagagaggggcgcaaagtctgcagcatcttatgacgtagtcactaatcaggcatttctcaagagctgcctgttagggtttgcctcttggatgacctcacggtagggtttggtgttggtttcctgggcatgggccgtcagtgtcaactttcatagcacctgcagttcaggctcttgacctgcaggtgttgctgtagacagtgggatggtgactttgcctttgcttgtgctgggatgctgacaaaaatctctgaaaggctgtgtcagtcctgggcttttccttttaaaaatcacgagcagaattctttaacagagaagaaggaaaatatggtagcactaagaatgtcagttactgcctagaaactgttgtctttgtcctttgtgcttggactggttatctttttgtcctttggatgaggaacagagtgctccaacactgttggtgtgcattgggcagtgacagggccctgggtccaactaggccattcctcctgccctgggcagggaagcagagtagtgacagtgtacaaagagggtgtcatggaacaatctaacatattaaccccttctaggacaagcccgttagaacataatacctgagaaaactgttcagtactttctcttgctttgggtagtgtggcctttgtgcgcagttacagggacctcggtgcttcttgggaagggaatggcatcatttggaagataaatttcaggtttcctaatagtgtccttggcagatacttcatcatcatcatcaggctgctc

SEQ ID NO: 125296 - DNA, 1052 bp, Homo sapiens
aatcacagagtggtggaattgtgagtgttcttcatttttatctttgtcccttactatattttctaatttttctgtaatgaccatttattttgttttattaatttttttgtattccttttatgatctctaaaaaatgaaaggagggtattggttttgatttctgagtaatagactagaatagctactttgttgttttgtagagaccctattttaaaattcttgaaccagtgaattttgttctgggttagaattagagttagttttgtgagttctaccttaaaaataagtatagagtgaagacttggatatgtttcaggaaagctaacctttctacttggtagctctttgttcagaatagactggtaccgcaagaatcctaatcaaacctttccaaggactggaacattctcagcttcagttacttgttttccttgaacaaaacaggaagttgtggcaccgatctctagttatacctgaaatgtagtgttttagcagatttgaaaatagaatgtgaaagaccatccttttccttgttctacctttagctgcaccccaagtcctcccaccagtgttcaggatggtttatcctataaattatagatctgcagttcttttaattgagtaatttaaggtagttattctgtagaagaccacacagaagcaccatcttttgtgagcactctgtctaaaatctgagaatctaagtcttagattgctgatatctgatgactcttacttgacatgtttttcggttctaaccagtattaggcaaaaactccctttttgtatactacagtaaagtcacatcacatgcttatttaatttaaataaattcagtgtaagtgctgggaaagaaagaaacaagattaaaaataatgtatttatattttgtatatatgtattttgaattttatttttttagagacaggatcttgctgtgtttttcaggctgaactcgaacttctgggctcaagtactcctcctgcctctatatatgcatttttgttgtaaggtgttcattactgtatacagacaattgttttgtgttttag

SEQ ID NO: 125297 - DNA, 1047 bp, Homo sapiens
atagactacataaatttattgctcacagttctggatactggaagtctaaggtcaaggtactggcagattcagtgtctggtgagggcccacattctgattcgtagttaccttgctgtgtcctcaaatggtggaagaggtgagagaactctctcaaatcttttatgagggcactaattccagtcatgaaggcagagccctgatcacctcccaaagtactcatcccaatatcttgggattaagatttaccgtaggaattttgggacacaaacattcagtctatagcattgttcacttcagttctatttattccaacattacttatattagcaaaattttggaagaatgctgaatttctgtagtaagggaatggagaaatacatttataaaatgcttttaaagactactgacatggttattgtgatggtcagtttcatttgtcagtttggctaagttacagtcctggttattcagtcaaacactcatcttggcatggctgtcaaggtattttgtggatgtgatgcaagttaataattggttgactttaagtaagggtgattgtcctaggtgatctgagtgggcctgatctatcagctgaaagcctgaagagcgcagcagagctcccctgaagtagaagaaatttctccgatggacagcagctgcactcagtttctggagagttccacattggcctgctatgtggatttcagactggcctagccagcccccacaatcatgtaagccaatttcttgcagtaactctcttaataaatacacttatcccttggtatctgcaggggattggttcctggtccctcgtggataccaaaattcatggatgtctaggtctcttatataaaacagtataatatttgtgtataacctatgcacattctcccatagactttaaattatgtctagattacttacaatccctaatacaatgtaaatgctatgtaaatagttgttacactgtattatttggggaataatgacaagaagtttgtacatgttcagcacagacaaaacaatccattttttttttttttc

SEQ ID NO: 125298 - DNA, 1029 bp, Homo sapiens
gactccttcctggggtctgcctctccacccccaccagatgtgggatgcttggtgtctctgctgaatataggcagagaagaatttggatgggagtgctgggctgcatcattgtggaacttcaaagcgttcccttaatattttggggagtacagtgttggtgtagagttaggcagctcatacgtttccttttaaaagtttgcatagcctggatacacagcttgaagaacctcagcaggaatgatgtatgtgaaaattgcattccattttataatacattagtatgttttaagacaaaaatcgtttagactgacaagccattcattataatcgataatgctgttttttttggagtccactttgagaagtgctcctttgtagaagtccttgaaactagaatcaggaaagctagctacatcctgttccttacataaattgttgagaaatcttgggagagtcacttcacctcttgtcagctgagaagattgattggaggttacagattagagttctcttccagccctatgttctgtgactctagaatgagtactgagaacatgtgatagttgggaggttggcagtggtagcacttcctggtggtgtgaatgggtaggtcagagaaggctggatgtactgagtgagcagaggcagctgcatggtgaggactatcaagtctgggggttctgtgttcgaagtctcaggtgttaggagagagagatcttgttgctttgcttttgtggagttaagatgaagatctggagtatcagcaggatgagcaactctgaaagcatggactcaaagcggtagagaccctaatgttagaatgaagtcagggcttcaggttatctgcagaagtaaaaatggttctggtgttgtttccagtttttaaccttttaggattttattgatttttttttttcccctctgcctacatcatcatctccccacactgtttggtgtgtgctgcgtagttttttacttcttttgccagcaggagctggggcaagttacgtaacctttccaagccttatt

SEQ ID NO: 125299 - DNA, 1050 bp, Homo sapiens
accattccatagtaggatgagaacacttttgtctagattgattgtagtttgcagaaagatgtggaggagaaaggagtatatactgagtaatatgtatagtatcagatgttttatattctggggtcgttatcttatttaacccttaatataacctgagaggttggtctttgtttcacagatgaactgacagagcactcattaacctggtaactcatttacctggtaacacctcttacaagacacttccataggttaggatttggtgaccagtctaatgaagtagtggagatggggagcagggatggaggaaggggagggatgggtcaaagatgatccaaggtttcaacttgggtgactggaatagtgataatgcgttaactgaactgtcacctgggtttaggggaaaaagttcagttttagacaggttgaacttgaagttgcaggtaggagtccctgcccataggctattggaattactggactagatcttttgggagctagagcaactggagtggtccgagggagagagaagagccaaaggtgaagaacaggccttggggaataatcttggtggagagcaataagtttcacagaaaccaaggggacaacagtctccagcagatgcttaagagaggtgtcatgttttctggaagtggttctcaaccatcagcatcgcttaaggaacttttttctttctttttttttttttttttttcctggagatggagtctcactctgtcgcccaggctggagtgcagtggcatgatctcagctcactgcaacctccgcctcctgggttcaagcaattctcctgcctcagcctctcgagtagctgggactgcaggtgtgcgccaccacgcccggctgatttttgtatttttagtagagatggggtttcatcatgttggcgagactggtctcaaactcctgaccttgtgttctgcctgcctcggcctcctaaagtgctaggattacaggtgtgagccactgcgcctggccaaggaacttttaaaagcacatattcctggatattttggttgggtagatcag

SEQ ID NO: 125300 - DNA, 1011 bp, Homo sapiens
agcaggcaggaccctccctctgtgtcacctccatgactcagggctcagacaggaagccctcatcctcgtcctccacgggtctcatgtttgtcaaggccaggggtatcaggcgtagtaggcaggggcccatgcctgctcccatctgggagaccctgcttcaggcccctctcatggccccttttgttccccacagctcactgtacaacttgttggttcaaggttagaaaatgcagttttgtgttgagggggaccatcacagaagacaaagggtccaggatgaaggctacccatcagcttgcagggctgggacgaatgtgagaagcaactgatgcttgtacagtagagagtaagcatgtagggccagtccccagaccttgcctcccctcagccttgacatgtgatctccatttctggtggctacccctgctagtggtctggcttcaccatcttagccctgcccaggctaagaccctcttccatcagaacctgcagctgggatgctgggagcaacagtcagggcagagctgcccatcctcccattcagggagccctcaggaagtacttgggaccccccgaccctttatagattcagcctgcctcatcccctccatggaccaacacgcccttctcctcagcagtgggctgggggaccaggctcctgaactgcttgtggctgttccagcagtggggagatggagggtcacacagtcctgagtctatggctttgacagcaacgggtcctgactgcagctgtattcgtgaagcgaagtacctaatacaatcaccgaaatgtacaaattggacccctataggttcaaggattcttggtgtaggaggtatggcccccgccccgggaaccaggacctcagcttttagaagcaaaatgcatgaatgcagtgatggttaggccaagtgccaagggagacagccaacccctgctatcatggccagaggagggagagaccactcaggcctgggtggtggtagaaatcctcactgccaaggagattg

SEQ ID NO: 125301 - DNA, 1704 bp, Homo sapiens
agcaggtgtggcccggggcatagacttccaccatgtgtctgctgtgctcaactttgatcttcccccaacccctgaggcctacatccatcgagctggcaggtagtagtgtgacggcccaggcatctgcatggtaggcacactgagggacttggggtgtgctggacagagcctgcgggttggagatgcaagctgcactgtcttcccttgcaggacagcacgcgctaacaacccaggcatagtcttaacctttgtgcttcccacggagcagttccacttaggcaagattgaggagcttctcagtggaggtaagagcctggctcttgtggtcctgggccagggtcaggcttcttccacaatgctttaaaactccatgataatgatgacagaggtcacaacatagtgtgacaggccacttccaccatccatccttgttctgccctgagtggcaggcactgtcccccttgagagataaacaaattgaggtaatttgtccaaagttgtgtttactgtctgcctcatgagcgttgagtgacctgacaggctgctgtgacagctcaggacagcacctgaccccagggtgctgggtggtcctggactgctctctgtggccgtcgtcatgggggtaccttgactcccaaggaataccatggggtactccttgggagaggagaagagagtgggtgacgggttcttgggcttggggccacacaggccacccccatccacacacggggacagatgggtcatcactgtaagaggcccaggtgcagctaacctgcatgttcggcatcccaggaaggcggtgggtcccctgctgctttcccccaagggggaggtgcaggaggcctccaatgaagaccctatcctaaggcctcagcctgtgggaccctcgctgctttcttctccacagagaacaggggccccattctgctcccctaccagttccggatggaggagatcgagggcttccgctatcgctgcagggtgagctgctgtggtggggaggggaatgagaggggaggggctgtggcccagggattgcaccgtcttgctgagcatccaggtgtgaagggaggatttggggcagcctcactgtcttgaccttcagtgtccacccccaggatgccatgcgctcagtgactaagcaggccattcgggaggcaagattgaaggagatcaaggaagagcttctgcattctgagaagcttaaggtgagtggatgggaggtgagaaggggatagatcttagacggctgccctttttggagactggctgagctccgagtggtgagaagcagagaactgggcagttttctggcctttggcacggaaggggaggaaatggacccagaatcatggaaggaagccagtctgttctgcttggtggtaaattggcacaaccttatggtggacactgtccagcagaattacgagctcatgtgtcctttcatccgaaattccacttctggaacttaatcctggtcacgcttgtgaatgtgcacagtcaagcatgtgcctgcattcatccatccatggcattatcatggaaccaaaagatggaaacagcctggggccaccatagggggcttgctaggtaaactcaggtgcattcagagccgaaggttacatgggaaggaatgaggttggttgcgtgtccatatggaacagtctgtaagatgatgcccagcaaaaaggggtacagggt

SEQ ID NO: 125302 - DNA, 1795 bp, Homo sapiens
tttcaggccatgctttgcctaaaatcctgagcaaggacctcccctaaggggcagctttgagcagcagagccaaaattctaaggccaaggttctcatcttaagtaaactttacctttcagaaggcctgttgctgtaggccttcccttctcaatgtagtcctttattgatgtgtttctctttgttctgtgcttggaagtattttatatatggtttatatggtatactctatataccacaacaataagggcattttggggttttaggttacaaaactggaggagagttagggtgccaggaatccttaaatgcatctctgccctgcactaaaatgttgatgctttggttggtgagtaagtggccatacatctctgtgttcttttcctttctgaccacaggcctgttttctcccccaggttacccttaagttacaggagtcccagctgcctgggccagaccagttacagcagtttcaggtggtctgtgagactgaggaagacaaattcctcctgctgtatgccctgctcaagctgtcattgattcggggcaagtctctgctctttgtcaacactctagaacggagttaccggctacgcctgttcttggaacagttcagcatccccacctgtgtgctcaatggagagcttccactgcgctccaggtctgccacagccaacatcttggttgaaataagttgaagatagagatggaaaggggacccagttaatgttctgtttcttaagcacttagtaggggccaggttctagatgtgactgatactgacttctcccaactccaaaatacctatcatggccgggcaccatggcttatgcctgctgtaatctcagcactttgggaggccgaggtgggcggatcgcctgaggtcgggagttcaagaccagcctggccagcatggtgaaaccccgtctctactaaaaatacaaaaattagctggacatggtggcaggcacctgtaatcccagctactcaggaagctgagataggagaattgcttgagcccgggaggtggaggttgcagtgagccaagatcgtgccattgcactccagcctgggcaacaggagtgaaactctgtctcaaaaaaacaaaaccctataattatttccagctgaggaaactgaggcacaatgattaagtagggaaagagattaagaagaggaaaaaggaaagggtgatggttactgtgatactagggatggcagaggggccttgagcttgctctgctgagctgattctctgtccgctcttggctgcaggtgccacatcatctcacagttcaaccaaggcttctacgactgtgtcatagcaactgatgctgaagtcctgggggccccagtcaagggcaagcgtcggggccgagggcccaaaggggacaagtgagtccatgcctctttttccatccctccccagaaatgcctgtgtttttagctttttggaagactaaaaccagagtgcacagagcagggagccaaaccttccaggcctggctggtagtgtagcccagagagccccacaggttcttgctcagctgcctggatatagagaagggagtggatggtgcacactgcacatgcaccacgaagggcaaaactgccggggttgttggcatgcagagccctgcaggggagatggcccatcctgcattggtggtatggctgtgacttgcagggagcatatttctgaagggaaaaggaaccccccaactctccagtctctgtccagctgaaggcttgactagctcagagttggttttcagatcaccatgtagggcaatgagtt

SEQ ID NO: 125303 - DNA, 1078 bp, Homo sapiens
tgtgccacagagcaggccctgcctcactgtctgctggtcagttctgggttcacttaatggctttgtgaatgtaaataaggggcaggtcttggccctagaggattgagatgtttttctaaatcttagaactatttttggataaattatatattttccttcctagtagaagtgttactgcctgtaactagctcaaaataccaatgcagtttctgcattctgggttttgtttttccttttttttttttttttttttttttgagttttgctcttgtcgcccaggctggagtgcaatggcgtgatctcagctcactggcaacatctgcctcccgggttcaaatgattctcctgcctcagtctcctgagtagctgggattacaggtgcccgccaccacgctcagctaatttttgtatttttagtagagatggggttttaccatgttggccaggctggtcttagactcctgacctcagttgatccacctgcctcagcctctgcattcagtttattcacatatttttggtaactcccatggcagctcctaggatttcagcggtctgtgggccagaaagcaggcaccagggctgacctcaaggccgtatcagagggccaagcagagttcttttggatacctgcttttcatcccacagggccttagagtcagaggtaaggtagcaacagagctagaatggggcaatgcactcttaccctccttctcaacttttatttaagctgtgctaaatgttttcttcaagggaaccagatttagttctttacagaattttccagtgaaataaaacatgttgtaatagctgtgtttgagatgaaataagaggttgtgggtagaggggaggcacctaaaggaaaagaggaaaggtgcctgggctacctatgcagataacctggagtggacttcactgtggactcgtggtactaaggcttggcctggacaggcagtctagggggtatgggaatacacggtgtggttgttcaactatttgcaaaggtcaaccaaatagaccacatgttcgcaaagtatcatctgaggaaattaagtaccttcttagccctctcagtcat

SEQ ID NO: 125304 - DNA, 1025 bp, Homo sapiens
gggctttttgtatttagcacagaaaacacttgtgagcccgagctgagaacccaaaaggcacgcttcaggccatcgtagccaccaagcctggtcagattccgtccaccgtctccttggtgctccgagacccaaatcgctgactggggccgagggcgggcgtgactgcgcaggcgtgcctcccctgcgagatgccggaggtaagctgcggggtaaggggcgagaaattaagggcgaacgtcattgcgcatgcgccctctactctcgttgcgggggtaggcgggcgccgggctgtgtgagggggcggggcgcggcagtgttcggtacggatggagttgcaggagacggcgagtacatatcactgcgcaggcgtcctcttcccctaactctcagggtcgctagggtggcgcgcaggcgcagagcgatgcgcaaatgtgcgcaggcgcttaggggctgaggcgcgatggcaggtgtcggggctgggcctctgcgggcgatggggcggcaggccctgctgcttctcgcgctgtgcgccacaggcgcccaggggctctacttccacatcggcgagaccgagaagcgctgtttcatcgaggaaatccccgacgagaccatggtcatcggtcaggcgggctgagggtggggaggccctttgtacccagctcagccctcggcggcgctccctcctcccgagcccagccgggtcgctggctcccccagtacctagcctgagggtgccccgaggacgccaggccccctgcctagagctccgggccgcacgtcggagggggccgggcggagaggcggcccactagggccggtcgtgactatgtgtctgccccgcaggcaactatcgtacccagatgtgggataagcagaaggaggtcttcctgccctcgacccctggcctgggcatgcacgtggaagtgaaggaccccgacggcaaggtaaggctggcgttggcccacgcagccgttcttcagtggagctcccgtggggtgtaaagcactgcctggaggaggcctcaa

SEQ ID NO: 125305 - DNA, 1043 bp, Homo sapiens
cacaggcatcctgtgttagtaggtgcaagagtgtgtttcagtttcacacagtcacagctctgttgtgctctcaggcacatgaactggtggcactgagcaggtagcactcttgtgaatacatttataggccagggtctttctcctcaacaattagagttgaacatgttttgtttttgtttttgtttttctagtagcttttaaaaaaaaattatcctttctctagagcatcaggatctagtagccttgtctcctaaatactcatttttaaaacctttctttcttgtttttttttttttttttttgtacaggcagttgtgaaaaacttcaggacaaaaatgtttcatttaaggacttgtgctgctaagttgaggccattgacggcttcccagactgttaagacattttcacaaaacagaccagcagcagctaggacatttcaacagattcggtgctattctgcacctgttgctgctgagccctttctcagtgggactagttcgaactatgtggaggagatgtactgtgcttggctggaaaaccccaaaagtgtacataaggtaaggctcgcagggctgtgggtctgcctcatgttggtgtgttggcctgttcctgactggtcaccaggtaagtgtgtgcgtcctgaggagtcagcgggcagacaggcagctggagcgccataccaaccaccgtatctgtatcggacccagcatagccccagcagaagccatggtccctggattggcgtccagcagtagacactgtgcttaactctgcgaggatgtgaagaagcatgtgtgtgaccctccagcatctccgcaagggctgcttcaggatgaagccgctgaagaaagaagaaagaaagaaagtgtgtggaaaagagcaggacctcaggaagctcctccattctaactgtctggagaggatactttcatttgtaacatgccgtagtcacctcatgtaatttctgtatgaatggccttttagctcattatgttcgtatttttttcctgtttgtttctaacttctctgtattacatataagg

SEQ ID NO: 125306 - DNA, 1065 bp, Homo sapiens
cctacacctgcagattatatctagaataaaactgagccctgaggtttcagaatcaaggactattatgtgcccaggcctattcttttgccttccttttctcaaacataaccttttcttggaaccaaccaagttgttttcagtgatgttaggatttggagtcagtagctcctaaatgacagtgcctagtgtctgaaaggtaaagagcacctggctgagactgcatgtccttgtgaaggtttggtcctcagtgattcatgggtaaaaggtgcactctgtgagcagtgtggccacagtgctgtggacactgggcctgttgccatcatagctgctcctgctggaagcttttgaagatggtttttgtgggggcatggtggctttatgtctttatgcctgtttctgttgctgggagtctccagggggcacagtgtgggaatcacatgcatgctctgcccctccctgcttgtagaggggaggggacaggatggttaaaagtgggcgtgccctccagcaatcccggttgtcatccagcacggacttcatcactcctctgccatcccagacggcaaggtgggtcctctttaagttgaattgggcccagtatgtggtgtgtgcatgttttttgtttgtttgtttttttgttttgttttgtttttgagatggagtctcactctgtcgctcagactggagtgcagtggtgcaatctcagctcactgcaacctccacctccgaggctcaagcgattctcctgcctcagcctcctgagtagctgggattacaggcctgtgccaccacgcccggctaatttttgtatttttagtagagacggggtttcaccatgttagtcgggctggtcttgaactcctggcctcgtgatccgcctgccttggcctcccagagtgctgggattacaggcgtgagccacggcgcctggccatgtgcatgtttttcaagggagataatccataacttctgtccaaatttcaaagcatctgtcacccatgaaagtttaggatccatagccttagaggcatttcactttatttgtgctcttattttagatcacat

SEQ ID NO: 125307 - DNA, 1135 bp, Homo sapiens
tcaaacgtgggtgagaattaagctgtaaatgctaattttaatgtaattttactttttttttaccccttccctctttttttttcttctgtccttttgtgtgtgtccttccctctcatcgttggccactcatagatacgagggcaccatgtagcacagctggaccccctggggattttggatgctgatctggactcctccgtgcccgctgacattatctcatccacagacaaacttggtgagggtctgagagcagtcagctgcgttgcttgagctcctctcgctgtgccacgacctgtggtagccaggatgtccaggcaggagggaaaggctcttaagtttcctttcattctgatcacttgaaatttatcggtattgtagccttagtgtgttttgggcaagttatttttatcttactttttcagccagattgtcttaagtctcaaaatttgaaaataaaattttggacagaaaggtttgtggcacagggaaaaagcttgtccacctggggcaggtggatcagaagcacttcagagtatagctcttttggcttcaggttttcaaatgtcagtgcagcactgccttcagtgaggcatgtccatgaggccttgctcaggaactgctgacacagccatccttttctgaagcccagtgtggcctgcccttgactggaggccatgtcccttaggggacgaattctagagcaagttgtgcagttgggtctcctgatttgtaattgctggtgatcacactgaggaaactttggaaggcattcccacagcgtcaggaggtcagggcctttgggaggtgcatgtatggagcacactggggttttgtcacggttgccagaagatagtcccacctacaccccctcctcctcatgaagtgaggtgggtgttgtggctgggctctcacctgcagttgctttgcagagttagtctgctttatgtcactgtgctgctaacctgtactaaagaaatgatgatgtgactaatttttaaatggccagggtgttcacaatagacactgtgcatgctgatgaaattgatgatcacttacttgcctaatactcctcttgggatgggtacgaaattagcctcctcacaggcacttttggggaatggtacagacagtctct

SEQ ID NO: 125308 - DNA, 1858 bp, Homo sapiens
gctcttgggttgttttcagctagcaagcacttctttcctagtttgccttcttgaaatgggagatcaaggaatccttccattctttagaattcttcaaaatcttacggtttagagtagtctgccacctgaatctagtgctgagaaatatctgctctaaaaattaggctttttcattttcttttcctcaattttcatctcaaagtagtgacttcccaggaaagtgctgttatccgccacttcttgaagctaaggagatgaggagctctcaaatgacgctgcctgatggctttccatcgtcagggtgctaacctcccctccttctgattcaccttattccagctgttctatgaatcatttccatgtttaataaaattgaccccctgaccatgtaacccacccacttctcccttgatgtgtgtgtgtgtccctgtgatggtgtctgtgctacctgttactgtggtaatggtgtagggttttggtgtttgggtcttttttaaactaactctcacctgtctttttccttctgcgctcacccatgataccccactctgcctctcagatcttgcagttttcaaggaacgacttcgaatgctaacagtaggaggtatgaaaataatgagcttttcaccttttcagagttgaggacttcatttgaataggatgtgcaacttttcctagcatgcaatatggggaaagttgacgcaacttctgtcacgtgtttttaagtttgttaattgttctgaaatgtgtttttcccttcctttaattattaaccaataagtagagctacttatatggtatcgttttgtttctgttcatttgtgtttcaaagagcacttttcatcttcacgtgtgcttcatcgcttcactgtgagctgccatcttcagcataattcacctttagctgctgccatagccagctgggcacatgaagccatgttcagctctgcatggtggcttgtcctgtcctccacattctgtgctgaggctttgactggactctggattcttccagattctgcttcctgggcattttgggcaagatttccaaaatgttttatgtttgaaggccaactgaagtattaataaaaacttactgagaactcttagtgaccctcggttgggcaaaacacatttgaggaatccagagtcgaaatgctgggggatcatcagcctgttgtcatccaccctggtggccagtctcttctttacactctggcttctctaagcagttatcttttttatcatccttctaatatctgtgaaactctactttttaattacacttttaattttgagattattatagatccatatgcacttgtgacaaataacagttctgtgccctttggccagcttccccagtggtaacatcttgaaaagctatagtacaacatcacaccactacactaaattgataaagtaagactctagacatccatcaccacgaggattcctcctgttgcccttttatgaccatatctacttccctcccatcccagccactacttgtattccctggcaaccactattttgttctccatttctgaaattgtcatttcaggaatattataaatgtagaatcacagtatgtaacctttggggattggcatttttcaatcagcataattttcttagagattcatgcaggttgttggtgtgaatcaatagtttgttcctttttattgctgagtagtattccatggtgtggatgtactatgattgtttttaaccattcacctgttgaaggacctcttcattggaatggattgtttccattctttggctaataggatcttttgcagagcagaagtttttaatcttttttccccctcgtttcctacctcagcttctatgc

SEQ ID NO: 125309 - DNA, 1042 bp, Homo sapiens
ctgtgatggggttgggtgctagggcccattacagcctggtgagggtggggtcacagtgttttctctggtatttgcctgtagtagagcagtttttgtctaaaagttttttgtcttgataggctacctctttcctggtcttttggtagagagcagcttttgtcaggcttttgttatcaaatacacctcttaaagttttggggttgctggttcttctgctccaggtctgcaatatttgaagcaaaaaagaaattccagggaactccctggtgtgttttgccttgagacctccctagctggtgtgccttattctctccacctttcagagttgtcttatgattgttttgcatataatgtctaggatttttagttgtacttattgggggaatagggaagaatatgtgtactccgctttcacaaagcactcatatatagatctagtttctcaaatagctaaagaactaaaagtgtaccagcagttctgaggctcagcagtatagcccaagaactatgaactcaggatgatagaagtgaaagaccatcacatggtgaggtcaagggatatctgtaggcacctacttcacagggtccatgctgaaagactgcaaccaatacacagcgcttatctgggggcatacactggaccgatatagtttcacaatcaaaatatttcccaacaaaatgtgcactgttattctggtccccagtcagctgcacctggcctgagttttttagtcaggaaaaatttctcaaagatgattctgtttttcctccataaatactatagggcaattgcccaaaagccaggccataaatggcaagagccacgtgcttcacctaggcccaagtggttgctgtgccctcagtgttgacagactaacaggagggaatgggtgttcaggcttaactaagccactactaccatcaccaccctccaggttaaaaaaaaaaaaaaaaaaaagccagatttgctttgttttaataaaacaaacagggcttggaaaatgtagagtttgcttttaagacttaaaaaacaaaacaaaac

SEQ ID NO: 125310 - DNA, 1100 bp, Homo sapiens
tctggccctgggccatggggcagacattcccagggaagcagtgaccctgtctgtgttgatcgggcctgtgtgcagcctgttggccgaggtgagagggggtttggggtggtacaggcaaagctccatctgcacatgtgtgaagagacaccagacaagtagagtcagccttcagagcaacctccgcctcctgaattcaagtgattctcttgcctcagcctcctgagtagcagggattacagaggcacaccaccacggctggctaatttttatatttttagtagagatgaggtttcaccgtgttggccaggctggtctcgaactcctgacctcagctgatctgcccacctcggcctcccaaggtgctgggattacaggtgtgagcctccatgcctggccagaatcccctctttttggtcaggaagagtgacattgcccttcaaggtggcttggttccctgtccaggtttgaggagttcctacagcggaagtggtcctctgagaagcgctttggtctagaaggctgcgaggtactgatccctgccctcaagaccatcattgacaagtctagtgagaatggcgtggactacgtgatcatgggcatgccacacaggtacagccaagggcgcgcccaacctggtttctcaccatccctgtgggctgtgtaggaggcaccaggtaaaggcactgagagagcagctgtttcctccttgagtgccagttgtgagtctgggctcatctggtacctgagggtgtattgctttgcaggggattctcacattgcctgcctctggaggactgcaaagtcatggtcacctccaaagccacatgtagtttcagactggcatttggccttacagtgcatctttatgaaaattaaacccaagttcccttgttggggtctaacctggagggaaggctgcttcctgacattgaaggggaggccaagactgtgaaaatagggaaggtgtggggagggagaagggtaaggaagcctcaggcccatggcattgctgcatcttctatctttctgctgcccactgtggccttgattgcccagcacggagaggctcggttcccacattagctccagtttacagctat

SEQ ID NO: 125311 - DNA, 1093 bp, Homo sapiens
cctgacctcaagtgatctgcctgtcttggcctcccaaagtgctgggattataggcatgagccactgcgcctggcctggaccagttcttaagaaaaaatgtggtgggctgggcgtggtggctcatgcctgtaattgcagcactttgggagactgaggcaggtggatcatgaggtcaagagatcgagaccatcctggccaacatggtgaaaccccgtctactaaaaatacaaaaatttgctgggcgtggtggcacgcacttgtagtcccagctactcaggtggctgaggcaggagaatcgcttgaacccgggaggcggaagttgcagtgaggcaagatcgcgccattgcactccagcctggtgacagagcatgactccgtctcaaaaaaaaaaaaaaaaagtggtgaagggttaggggttcaaactccgagcagaatctctacccagcaaatgtgaggaagaaacttttgggagtgaaaagaataaaatcttagaaaggtgttatgcctattgagaaggagcaggcccagaggctgagatgttttgcatccacgaagtgtgggactatgggtgggcatgcacgggagttgtgccaggggtatggttgggcttgcgtggtggctgtcagaaagtgtgggggtacaggtgggcgtgtgcagtagtcatgccctgtgccagtcacgctgtgttgtgcccaaccctccaggaggaaatttccaagtatgataagatctgtgaggaagcttttgccagatctaaagatgagaagatcttgcacattaagcactggctggactctccctggcctggtgagtgaagaaacagtgccacaaataagctcctttgaggatctgatgtaacgaggcatcctcttcccagaaaaaattcatgctttccactttgtacccacaatgcacagttgtatgcaccatttcagcaaagccccctgcagaccctggacccagacccctgcattaatgttttctggggaacacagtgtgagctacattgtctctcaccctgcttctccccaaaatcacgtgtctgccattttgtggtccctggaaaagtagagcagatgtcatgcctcagttg

SEQ ID NO: 125312 - DNA, 2579 bp, Homo sapiens
tgagcgatgaaggctggccgggccttcgctccaacctgatcgttcctagctttggggccaggcagtctcacctacatggtacgcccctccgctcctacttacgtgcccaccagcacggcgatgtgggggccgtctgaggccgtcacctgctcgcggaggagctgttccgctcctgggctgaacgacgctgagcggccagcccccagctgccagttttgatggggacacccctttccaaactggacatactgaagctcaggcgtgaggatgccctgctcccctgaggtgccttgtcttccctagtgccaggtgtccttcaccgcggcacccccacccggtgccttgtttacccctccacctaccgtgtctctcctcccattccctggaccctctgccctgcagtgttctgcctctccttctccctagggtaccctctttccagtattacagaacatccatggtggtgtctttaatttgtgtcatcgcagatttcacagggacacacacggaacatgtgacttggtctgagaccgtggtgattacggataggatggacacagactcaccaccaagttctggcaagctagaaccagagggcatcccttgatgcttagtgtggaaacaggagaagtgaaggaatcttaacttccagaggtactgacctctagcccttgtcatgcccaggggatagttacaagctggaagtgtaaatgaagagaacaagcaggtgacagttgccggttgtagatttctgaaggacaggcctaagatgtttggggagcatcctgattattgggattgagctcccaagggctgatgacatgaaggtggtcatgtgtcctcagtcctaggatgctaccagatatccatcttacacattgtaaactgatgccaggttaaggttgtcccttcagctgttcactgaaatgtctcatgcctgggccattgcttattcctggactttttgatgaactctgcatcctgacttagccccacgcttagacattttagtactgtggccttacaggtagagggggcaggactttcagctacctgtatatgtgagtaccccactttttgctaccaaggaccccgctcctgcaacattccacagccatcatttcttcaataccctttgactccattgtcacctgggttggatcctgaccctgcaatcttggagacagtgagtcctgatgtgtgacctattgagaagcgttgcctgccacagggcccacttgctggtcctgctcctagctgactaggcaggcagagaggtggcatggaacaaggctcaggaggtcaaccaggagacttgggggtgcagctactctgggacatttggggaagagaggtctggggtagtgagttctgtaactctgtctagaggaagatgtgatctgacccccgagaaagccttgtggccctctagactgaccttgtccatctctcaaggggtcctagcttccagctggagttagtttacaaggaaagcgccaggcactaagacccttggtgggcatgggccttgcatgatctgggatccagattccaggctccaggcttgttcccaacccagactcaaagccaggagatgagaagaggatctgcacacacacaacgcagaacactatcctatcatcaggggcacagggtcaaggataccagacctggagactggaagtcttttcagagagactgtcctcagagaggagaccagaggcatgagttcgggtcggcaggaaatccccctgtgcagtgaagagtaagctcagagggaactggaaatctttgtggtctctgtccacagcagagaaccatcaggggtggaattccccaggctcatgtgacataggagcctgctgtgggctcctcccctccttgtacctgccctgtgctccttctccccagctcactgcatttcctagatctgaggttctcaaactacagttcctggaccagcagcagcagtagctgcaaacttgttagaaattctgggcttaggccccagcccatcctactgacttcaggtggggctgggcagcctgtcatcaccagctgcgagctggttttgatgtgctgcagttggggagctgctgccctaggtgacctaaaatgaggcagtgctgcacagagtgctgcctgcactttgaggcctttgaccacgggcgggggagggggcacatctgcttgcctgccagattccctctctgttcttgggacagcaaagtggccagccaacccaaccagctttctagtggggaaagattgtcacagcagttctgcggagacagaaggctggtggtagcagttgtattgtaattaaactttttattttgaaattattggctggacacagtggtgctcacctctaatcccagcactttgggaggccgaggtgggtggatcacttgaggtcaagagttcaagaccagcctggccaacatggcgaaacttcatctccactaaaaatacaaaaattagccaggcatggactatggtggtgtacacctgtagtccagttactcaggaggctgaggcaggagaatcgcttgaacctgggaggtggaggttgcagt

SEQ ID NO: 125313 - DNA, 1021 bp, Homo sapiens
aaaaaaaaaaaattaaagattcatgtgcattataagaaatgacacagagagatttattctgtcctttacccagtttgccccaatggtaacatcttggaaaactagtacaacattgcaccaggacactacactgatacagtaaagaggttacagcctgttgccttctattttttttttttgagatggagtttcactcttgctgcccaggctggagtgcaatggtgcgatcggctcactgcaacctccacctcctgggttcaaatgattctcctgcctcagcctcctgagtagctgggattacaggcgcccaccactacgcccggttagtttttgcccagctaattcttatgtttttagtagagttggggtttcaccatgttggccaggctggtctcgaactcctgacctcaaatgatctgcccacttcagcctcccaaagtgctgggattacaggcgtgagccaccgtgcccagcctgttgccttcttatattcacgcccaccttcctcctgccaaaattacagaaatggagaagagattagtacctttctctttacccccacatttaacccctggcaatcaccaatctgttctccatttccctaattttggtgtgtcaagaatgctaaataaaggaatcgtacaccgtgtagcctcttgggattggctttttccaccgagcattaattctctggagattcatccaggttgttgcatatatcagtagttcattcctttatattgcatccgggctatggatgtaccaccgttgatttaactcttcatccattgaaggacatctgggctgtttccattccatagctcttgcaaataaagcagttataaacatttgtgtacaggtttttatgtgaacataagttttcatttctctgagataaatgcgtacaagtgcagttgctgggtcatagtagggtagctgcttgcttagttccatatgatacggccagactgtttcccagagtggctgtacattttacattcccactagtaatgtgtgagag

SEQ ID NO: 125314 - DNA, 1061 bp, Homo sapiens
tataagtgtgagccactgtgcctggctgagaattctttatatgttctagatactagtcctttgttggatatgcagcttgcaaatatttctcctggcctgtaacttatcttttcatcctcttagcagggcctttcccgaaggaaaaattttaattttgatgaagtccagtttatcagtttttttcttttatggatcatgcctttggtatcaggtctaagagctctttggcctagatcacaaagattttctcctatatattttcctgaatattttatagatttatgttttacagttaaatctataaaccattttgagttactttctgtataaggtgtgaagtttaggtgttttttgtttgttgttttgatgcccagttgctccattgtcccagcaccattggttggaaaggctgtccttcctcctttgaattgctctcgcacctttgtcagacattgtttgggcctatttgtgcaaatcaatttcagattctctggtctcgcctgttggcccatggttctgttcccatgttggtaccacacagttttgattaccatatctatattctaagtcctaaaatctgtgtatggctgctcaaggccccacccagcagttctggggaggagtttctggctgttggcaggttcctctgtcccccaacatcactattcctgagtcaggctatgggactgggattgccacccctaccttgcctggctgggccatctcagctcccaggcctgttcttgcctagagtccaggtgcctggagccttctggagccatcagcccctggttttcttcacccctgcttcctgggcaggacttggtctgggggagcaaggggaggagcctatgggctgggaatcaagtcttgcctcccctgagggtgtgaggaagtccagaacactgccctctccctcttccctaattggtaccccccagtcccagtgctcggtgatgggaagatccagtgaaaggccacatgcttagactccccaggcagagctcagctctacttctcacctgctctggggccctgggcacacagctcgccctcagaat

SEQ ID NO: 125315 - DNA, 1036 bp, Homo sapiens
caccaggtcactggtatccactcagccccatcttgcagagtcacttcaatgtctccccagcccctttcttagaaacactggccaagtcacagtccctgccaggtctgtgggtgcccaccctccatctattgtgctgtgtgtccctgccctctcctgggggtgtcatggatgggccagtgggtctgcctgcctggcccctaggaccatatcagcctcgggcagcccccacttggtggaatctgggtcagttctgaggtgccctggcctggagcccttctactaccctaaagagggccttcttgttgggaggggctgctagccagagcccaggttactggccccacaccccatttcaggaggtatcctgcatgtccctccccaaggccaggatggagagttgttggttgaccactgcactcctgtgatcaccgcacccctgcactctcctcctcggctttctcagcccctggcctccagaaccgcctatgcccctacctgggctactcagggtagacaagacctttagcagggagtcccctcacctccactgccctctgtccttcaccccagggccttctgtggggttactggctactggctcctctctaaaccccagtttccacggggtagctaggattgtccctggctttataaggatagccaggcctcggtgtgggcgggagagtggggaaagtatttggaatcgggaagtccatctctagggctgatccagggactctgggtggcagggcctggtcagaaagggttcatgctggcctccaggctgtatttgtgggggcagatcctcaccagagtgagtggggtgggtcagtactaggcccctccactgccttgcctgccatcagagcccaggggtcccttattgagaaagaggtggggcctgctggcaccggggtccctccaccctgctgaaagggtctcctggctgcatcgcagctaacatcccttccttcctgtcgggcagccagagcagctgagttccagataaaaactgtcagacccggcctgtaggctg

SEQ ID NO: 125316 - DNA, 1268 bp, Homo sapiens
tgacacaagacgctctggctggggcaacccagctcacagccagtggcctctgctcccaggaagcgggccttgtgacgagttgcggctgaccttccctgtgcgcgatggggtggtcctggagcccttccgcctgcagcacaacctggctgtaagcaaccatgtcttccagctgcgagactcagtctacaagaccctgataatgaggtgagctccgcctggcccccacctgacccccacgaggctctgttcctcctcccacactctcagggcccgttttctgggtgtccacccatcttcctgagcaggcctgacctggagctgcaattcaagtgctaccaccacgaggaccggcagatgaacaccaactggccagcctcggtgcaggtcagcgtcaatgccacgccgctcaccatcgagcgtggcgacaacaagacctcgcacaagccactctacctgaagcatgtgtgccagccaggccgcaacaccatccagatcaccgtcaccgcctgctgctgcgtgcgtgtcctgcgccgagggggcggtgctgtggcgtggggcggggtgtggtggggcctggcccagcggtgccgtggggtggggcggggtgtgggcggggcctggcccagcggcgcagtgggagcggagccaggacatgggcgggccggcctgcagcaccatcagatcatgccgccgtctgctgttttgctgtccaccgcctgctgtagcatgtgtgcccccttgcagggtggagagcaggacgtgggggctttattatttcagaaaaatgcgttgcttctctttgttactgccttgtatttctattttaatctgtcatccttgccctttaagaaagcgatccagtaatataccctagctgttttccagttagagtaaattgactagatttgatgctcacattaattatgtaagagaaaccaggatatgcagaaagctcatggagctcggagtccccggctgatcaagcattaccggttctagcaagcatcagggtcacccttgggctagagaagaaagacatggcttatgagtgcactagtcagcctgggcatgagggccttggggacgggttggccacacaccacattgtctgggatgtggcagatgtcaacacagacccagcatctgtgactgtggatgtgcgagcagggggaacgttcaaggggacttgaggtgattctcttcatggagaagtggtgactaggcaatggttagaccggcaggatgcccagcacagctgtagagatgga

SEQ ID NO: 125317 - DNA, 3091 bp, Homo sapiens
cggggtgggtggtagcgccccaaaggcccgggcgcggggcgaccctgcttgaggggcgagcgcgggcgggctgcggcgccatttcctgacgaggggccattttgggaggtccgcgagtcgcggggaggaggccgggacggcggcggacaaaggcaggcggggcggctgcgaggccgttgggggagggggcccgcgtccgcccgcccgcctcatgtggccgcgccctgtcctgtccgacgcacgtgctcggcggccgcgctcaggtccgcgccttgagagtcgttgggctccgccctagcttggcctgggcgccgcagaccggagccagaagcacgctcgcgggggcttgcgaccgccttcctgggaagctgtcccctggcaggcatgggtgctttacatcctgagctgggaagctgtttgcttgagggtttttctcaaggatcgaggcgcggtgtgagcccgtccatgctcggtcctgtagatcccgggaggccatgttataaaaggagacttgctgggatgtgacgggttgccacttgaaatatcttccatttggataaagtaggaatatttatacatgtgccccaaacgtccctccgtgtcccccacccccaagcggaaatgtgaaaatgggccttgcctttgctggtgcccaaggaccgccttccactgcagtgacggcgctggcgggggaggcgctcttgagcccctcccgattgtccctctgcctagcaagcaagttgcgactggccacaaggcaggcctcttccgaccaaggtggattaccagtgattacctaattagttttgagagcgttaaatgagttcttaaagatcagttgtaattatagcatagtatctaaacttggcgcgtgtcttcaaagttaaatattgagtacgattccgttccagttaacatggatagaccttagggagtagcgaaataggatgttagtggttttattcctttaaatcacatctcaaaaggccaccaatggctagtttgggatcttattccgaaaatagattgatcctcatgcagtcttcgtgaggacagagcgatttccttgttgcctaccctgtccatagtgcctggcacataggcactgaaacactgcatgttaatccacaccccaccccacctatgagtgtagtcaaagctggtaagtgacaagggctttcgtggaaacttggcctgacctaatgttgggcatcaggttacccaaagagcttcagggaaatgagaaaggacttgcaggtcttgatgagaatggaggggtaactgccaatgagggctttggctttagcgaaagtctgaaagggaagccataggaacttaaacgtaccgactataaagctctgagaaaagctgatgttttagaaagaccatacattctaggtacaaatacctaaaaactaaaaaataagtacgttggccaggcgggcggatcacgaagtcaggagattgagaccgtcctggccaacatggtgaaaccccacctctattaaaaatacaaaaattagctgggcgtggtggcgcttgcctgtaatctcagctactctagaggctgaggcaggagaatcgcttgaaccccggaggcggaggctgcagtgagccgagatcgtgccactgcactccagcctggtgacagtgagactcttgtctcaaaaaaaaaaaagtacattgctataagagaagtgcacacggatactagtagttaattcagtcacatctgtgaaatagcttataaaatgctacttttaaacaagctgtttttatgaaagggcttgtaaatgtttatggtatttaagctacctctctagccataacgtattatacattcaagaaaggttcaaaaccagatatactagaaaccaatctttattttttaccccactactaggtaaggggcctggataccaagaagtgactgctcatctaatccataaagctatgttaacagattggaggtagtagcattttcattacaagtgactaaaagaacagctgtttacccctgatcgtgcagcagtgcttgctgttccttagaattttgccttgtaagttctagctcaagttggggggtggtgatagacatttaagaagccatatatcttttcagaagtaggtgtgatgtactaaaagtttgagacactttctagaagtctcactatttaagttatgactagtattggatttttggcatgtctttgggtttcatgtttcttaacccaactgcctgcagggccttatggctgtcaggagcagttcttgggaattaaagtaattactgaagaagtattctagtgagaaaatgaatttatgactcagaagcccctaaagacatgggtactaagcaacaaaataagcagatgttaattaactgtaattttctcttacagctgtttgcagacaaggtcccaaagacagcaggttggtccattttctaagtttaacaaagatgttccaattgtgacagtttgtgtgtgtgtgtgtatatatatatttttatgtatgtatatatgtgtttaatttttttttaaacagaaaattttcgtgctctgagcactggagagaaaggatttggttataagggttcctgctttcacagaattattccagggtttatgtgtcaggtacgaaatttactgaattttattttatttgggttgctcccttcatttgggattgagccagaatatttcaggatacacatatctgaactgttactctaccatttcggttctatttaacccttctattcagtttgaacttgggtttaaagtttgaaccttgcagatttggcacacttcatggttatgttgtcagaagtgacatttttcctatatgttgacagggtggtgacttcacacgccataatggcactggtggcaagtccatctatggggagaaatttgaagatgagaacttcatcctaaagcatacgggtcctggcatcttgtccatggcaaatgctggacccaacacaaatggttcccagtttttcatctgcactgccaagactgagtggtaagggtacaacatggcacactaaccacctgactaaatgaaaagttgccctggggggaac

SEQ ID NO: 125318 - DNA, 1049 bp, Homo sapiens
accagcctggccaacaaggtctaccaaaaaatacaaaaatgagccaggcatggtagcacgtacctgtagtctcagctgctcgggaggctgaggtgggagaaattgcttaaacctgggagatggaggttgcagtaagccaagattgtaccactgcactccagcctgggtgacagagtgagactctgtctcaaaaaaaaaaagagatgttagcccaagcccagggttacatggctccagttggtgacacaggaatctgaacccaggtcagtctgaccacaaatccaggtcagtgcaaaaagtcacgagtctgctcaagggggtctgcagctggcccgtggacatgcgatggcacttacattcttctggtttgcttgaggccacatatagaaaagtatctataaagccctcatgttaatgtctcacatgtagagccaggtggccttttgagcttaggtagctttgtgcctatttatcgtctgggctttcaaaaagagtttgtggaataggtatatatgagaggtacatgtatttcctggatggacagaagccgtgactccctgtttagtatggagccaggcaagtctggcactcagtattcagtttagcacttcctgcacacaggcaggctcatctagtctccagcccagccctacaagcccctcacatgcccagaatgccagtgggaaactaacactctgggaattgcctataagcctgtagactccatagcctcctgccacagctgagtgtgagtgtggacctcagcagctgaggaactctgctccaaggctttgcttggtggagttcagcagcaaaaccctatgtgacagcctgtcctgtcaaaaacttgctcctgctcccacacaagctgccttttttttctcttatcaggagcatcaattcctcaatccccattccgcttttactgcctctgcccacttcctgctatcttcttccccaactctgagtacagccacatacttctggaaactcatgataatctgtttcagatattcttcctggagcacattcatactgtattcacacat

SEQ ID NO: 125319 - DNA, 1866 bp, Homo sapiens
actccgcgtcacttgcagcttgcaatccgtggtgatgaagagttggattctcttatcaaggctaccatagctgggggtggtatgtattactacttaagccttgattcttattggtctttctgactaatatatcgttcagatcaatgatatagtatatttgatcggttaactagaaagcatataaactttaatttcataaatactaaatctataacaattctaagcttttcataatgatctgaataaatatttcaccttctagccatatgtaatgctatttttattttagccagttctttgtctaaatttcatatgatacttaaagcctgatgtttaacatatttcccatacttttttaactgtgtttgaaaaatgagttggagaagttgcataacatacactggaaagggttgaaataaatacacttgaaaagtgggtcaggatcaatgaaagtgagaggtaagttggtggttcttaatcttctttggataaccctcaaagaacctcgtgaaagctgtggttacagctgggcacggtggctcacacctgtaatctcagcactttgggaggctgagaggccccggatcacccgaggtcaggagttcaagaccagcctggccaacgtggtgaaaccccatctctactaaaaatacaaaaattagctgggcgtggtggtgcacacctgtagtcccagctactcaggaggctgaggtaggagaatcacttgaacccaggacagaggtcgcagtgagccaagattacaccactgcaccccagcattggcgacaaagtgaggccatctcaaaaaaaaaaaaaaaaaaaagctatggttactcttctcaaaaaatgcacggaaagtcacacaattttacatacagttttaaagggttcacagacccctggggtgtagccattggtatagatagtttaacagtatcagaatatgaaaagggacttaagtaaatttcattttttctataattaactttttacttgaggcaaaaactttaaaagtttttaataacttttttaaatttcattctaggtgtgatccctcacatccacaaatctctgattggaaagaagggacagcagaaaactgcttagagggatgctttaaccaaccctcttcctccccgtcattgtactgtaactgggacagaagaaataatggggatatgtggaatttttaacaacagttaaatggaaaagcatagacaattactgtagacatgataaaagaaacatttgtatgttcttagactcgaagtttgataaaagtaccttttcatgtggtgacagttgtgtgttgattggctaggtttctcccgtgtgttttatacaaaaatggaattgataaaccattttttacaaaattaatttgtctcaaaactgttctgttcatgatgtattagaaatattttactcagactttaaatattttaaatctcagattggttattcagagtaaccttagaacagaaattgggaatatatctttacaatgattgataccatggtatattgactcttagatgctattgatctgtagcaccattttttacaaacgactaaggaaaaaacctgccaattaaatcatgatatgccatcaattatgagacatcccaatttgagagatgttagattatagaaaagtatgcatttatgactgaaatggtagtggaattatttgaattctacaccaagcacttaccatgtgccaggccctttgcagagtgctctactgaccaagaaagttgttgctgccacattatagatgtggagcctaagggtcacagaaattgtgtgctatgccaaaaaacattgaactggtagatagaaaatgacagagctaggattcaaacc
